United States Patent Application Publication US 2017/0114356 A1 - sequence listing, part 75

SEQ ID NO: 112011 - DNA, 1793 bp, Zea Mays
tggaaagccaccgctcaccttctcgctcgctcccccaccgaacgcctcttggtgggagaagaattggccgaaaagcttcgcgttggctggccgggatctctccgtctttaattaccggacccctggggggattccctgctgcctcattagaccagaccagacagggagacagggagagggttggggagggaggagaggagagacacaaacaacgggtggtcgctgggaagaggaagaagaggcccgcggggaagcggagggatccagaagaagatgaggcagtgggtcctggccgtcgccattctcgccgctgcttcggcggcggcgctcctcctcggggccgaggcccagcagcagggccaccagacagagaggatctcaggaagcgccggcgacgtgctggaagacaaccccgtcgggaggctaaaggtgtacgtgtacgacctccccagcaagtacaacaagaagctgctgaagaaggaccccaggtgcctgagccacatgttcgccgcggagatcttcatgcaccggttcctgctgtcgagcgccgtccggaccttcaaccccgaggaggcggactggttctacacgcccgtgtacaccacctgcgacctgaccccgtccggcctcccgctccccttcaagtccccccggatgatgcgcagcgccatcgagctcgtcgccaccaactggccgtactggaacaggtcggagggcgccgaccacttcttcgtcacgccacatgactttggcgcttgcttccattatcaggaagagaaagcgatcggacgcgggatccttcccttgctccagcgtgccacgctggtccagaccttcggacagaagaaccatgtctgcctcaaggacgggtccatcacaatcccgccgttcgcgcctccccagaagatgcaggctcaccttatccctgcggacaccccgcgctccatcttcgtctacttccgcggtctgttctacgacaccagcaacgatcccgagggcggttactacgcgaggggcgcacgcgcgtcggtctgggagaacttcaagaacaacccgctcttcgacatctcgacggaccacccggcgacgtactacgaggacatgcagcgctcggtgttctgcctgtgcccgctgggctgggcgccgtggagcccgaggctggtggaggcggtggtgttcggctgcatccccgtgatcgtcgccgacgacatcgtgctgcccttcgcggacgccatcccgtgggaggacatcggcgtgttcgtcgcggaggaggacgtccccaggctcgacaccatcctcacgtccatccccaccgacgtcgtcctgcggaagcagcgcctcctcgccaacccgtccatgaagcaggccatgctgttcccgcagcccgcccaggcgggagacgcgttccaccagatcctcaacggcctcgcgcgcaagctcccgcacggggacggcgtcttcctcaagcccggggacgagagggtcctcaactggaccgcaggaccgcctggcgacctcaagccttggtagcatcgtacgttcgtgcgccctataagttaccatggctgcatgcatatacactgctgacaacaagccaattaagtgtacatttttttggtatcttctttcttccttccttccttatatatagctgcaataccgtatacgttcatctctctctctatctccttatatatagatgatgagaaccatgtggataccgtagtcgaaatctacaacagtttacttactcgatcgctttgaatgtctgagctcattctcattatcctcct

SEQ ID NO: 112012 - DNA, 2072 bp, Zea Mays
ctactaccggtcgtggagggcaacctggcagctgtcctctcccctccaccgacagctcgtcgctgacggcgacggcccgcaagccaccgccatcatcgccactcgcccactccaccgctcgctcccacacctgtgccagtgccatccctttttgactcctcggcctccctcaaatcagtcgtcaccacctcactgtccggctgtccctgtccctgtccctgcgcatcaatcaatcccacggtcttcctgccgcttcctcggctgcccccatcctccgaatcctgcctcgcctcgatctccccgttcctcgtgttccgacggagggtggcgggcgactaatggggacgggggcggggagcgcgcgggctctggccgtggcgttcgccgtctcgcttctcgcctgctctggcgccgtcgctgtcgccagggcgcaggacaccgagcggatcgaaggaagtgctggtgatgtgctcgaagacgatcccgttgggaggctcaaggtgtatgtctacgagttgccgaccaagtacaacaagaagatggtggctaaagactctaggtgtctcagccacatgtttgccgcggagatcttcatgcaccgcttcctactgtctagcgcgatccggactttaaatccagaagtagccgattggttctatactccggtatacaccacgtgtgatctcacaccgtggggtcatcccttgcccttcaagtcaccacggataatgcggagcgcgattcagttcatttccaaccggtggccatactggaacaggacagagggagcagaccacttctttgtcgtgccacatgactttggcgcatgcttccactaccaggaagagaaggccatcgagcggggcgtccttccgttgcttcgccgtgctacactggtccagacttttgggcagaaggatcatgtctgcctgaaggaaggctccatcaccatcccgccatatgctcctcctcagaagatgaaaacccacctcgttcccccagggacccctaggtcgatcttcgtgtatttccgcggtttattctatgacactgcaaatgatcctgagggtggttactatgcaaggggcgcccgtgcatcagtctgggagaacttcaagaacaacccgctcttcgacatctcaacggaccacccacccacgtactacgaggacatgcagcgtgccgtcttctgcctgtgcccgctgggctgggccccgtggagcccccgtctggtggaggcggtggtgttcggctgcatcccggtgatcatcgccgacgacatcgtccttcccttcgcggacgcgatcccgtgggaggagatcggtgtcttcgtggccgaggacgacgtcccgaggctggacaccatcctgacgtccataccgatggaggtgatcctccggaagcagaggctgctcgcgaatccgtccatgaagcaggccatgctgttcccgcagcccgcccaggctggggacgccttccaccagatcctgaacgggctggcgcggaagctgccgcacggtgaggacgtgttcctcaagcccgggcagaaggtgctcaactggaccgagggcccccgcggcgacctgaagccatggtaggtgtactggaaaaaaatgccatggcaccgtcagcgtgtccgctgttcttgtgtacgctacacagcacaaccagatgggaagctgatcgacgacgaggacgatgagtactcccatgtcactgatgtaaatgtaaagcgtcttccagcccaccaggcactgtgcttcttcaggcgacgtgtctggtttgcttgtgttgtgtctgttctgaactttactttagcgttaacctattaacgatcggagatcatgtaatttatggctgttgtattctccctatagtatcaaggacatgtttgattagtttagtctagggactaaaatttagttaggagactaaagtttactccctactctatttagttgtagggactaaaaatattcagagcatattaaatgaatcataagaagaataaaatatcccttagcattctcgtgtaattagtgtaactgaaataaataacggacaaaaaaaaa

SEQ ID NO: 112013 - DNA, 1443 bp, Zea Mays
cctcgcctcgatctccccgttcctcgtgttccgacggagggtggcgggcgactaatggggacgggggcggggagcgcgcgggctctggccgtggcgttcgccgtctcgcttctcgcctgctctggcgccgtcgctgtcgccagggcgcaggacaccgagcggatcgaaggaagtgctggtgatgtgctcgaagacgatcccgttgggaggctcaaggtgtatgtctacgagttgccgaccaagtacaacaagaagatggtggctaaagactctaggtgtctcagccacatgtttgccgcggagatcttcatgcaccgcttcctactgtctagcgcgatccggactttaaatccagaagtagccgattggttctatactccggtatacaccacgtgtgatctcacaccgtggggtcatcccttgcccttcaagtcaccacggataatgcggagcgcgattcagttcatttccaaccggtggccatactggaacaggacagagggagcagaccacttctttgtcgtgccacatgactttggcgcatgcttccactaccaggaagagaaggccatcgagcggggcgtccttccgttgcttcgccgtgctacactggtccagacttttgggcagaaggatcatgtctgcctgaaggaaggctccatcaccatcccgccatatgctcctcctcagaagatgaaaacccacctcgttcccccagggacccctaggtcgatcttcgtgtatttccgcggtttattctatgacactgcaaatgatcctgagggtggttactatgcaaggggcgcccgtgcatcagtctgggagaacttcaagaacaacccgctcttcgacatctcaacggaccacccacccacgtactacgaggacatgcagcgtgccgtcttctgcctgtgcccgctgggctgggccccgtggagcccccgtctggtggaggcggtggtgttcggctgcatcccggtgatcatcgccgacgacatcgtccttcccttcgcggacgcgatcccgtgggaggagatcggtgtcttcgtggccgaggacgacgtcccgaggctggacaccatcctgacgtccataccgatggaggtgatcctccggaagcagaggctgctcgcgaatccgtccatgaagcaggccatgctgttcccgcagcccgcccaggctggggacgccttccaccagatcctgaacgggctggcgcggaagctgccgcacggtgaggacgtgttcctcaagcccgggcagaaggtgctcaactggaccgagggcccccgcggcgacctgaagccatggtaggtgtactggaaaaaaacagcacaaccagatgggaagctgatcgacgacgaggacgatgagtactcccatgtcactgatgtaaatgtaaagcgtcttccagcccaccaggcactgtgcttcttcaggcga

SEQ ID NO: 112014 - DNA, 1600 bp, Zea Mays
cccctccttccgttctctccatttttttttctccccttcttttccttactccctccctcgtcctggtggtagctgccgtcagcgctgcgtgcgagcggagcgcatcagcagcaccagattcgacgcccgaattctccctcattggctcgccaccgccgcgcccttgactagcccgcctcatccaatctccctcctcggggtcagggtcctgacggcgacatcctaccgcacgccacctgcgtcgcggcggcggcggcggcgccgctgcagcagcacgagcccggcaggatctcaggggacgcggtgggcgtgctggacgacgaccccgtggggaagctgaaggtgttcgtgtacgagatgccgcgcaagtacaacaggatgctgctggacaaggacagccggtgcctgcaccacatgttcgcggcggagatcttcatgcaccagttcctgctgtcgagcgcggtgcggacgctggacccggaggaggccgactggttctacacgcccgcgtacaccacctgcgacctcacgccgcagggcttcccgctgccgttccgggcgccgcggatcatgcgcagcgccatccgctacgtggccaccacgtggcccttctggaaccgcaccgacggcgccgaccacttcttcctcacgccgcacgacttcggcgcctgcttccactaccaggaggagcgcgccatggagcggggcatcctgccgctgctccgccgcgccacgctggtgcagacgttcggccagcgcaaccacgtgtgcctgcaggacggctccatcaccgtcccgccctacgccgacccgggcaagatgcaggcgcacctcatcagccccggcacgccgcgctccatcttcgtctacttcaggggcctcttctacgacatgggcaacgaccccgagggcggctactacgccaggggcgctcgcgcgtcggtgtgggagaacttcaaggacaacccgctgttcgacatctcgacggagcacccgtcgacgtactacgaggacatgcagcgcgccatcttctgcctgtgcccgctggggtgggcgccctggagcccccggctggtggaggcggtggtgttcgggtgcatccccgtcatcatcgccgacgacatcgtgctgccgttcgcggacgccatcccctgggaggacatcagcgtgttcgtggcggagcgggacgtgccgcgcctcgactccatcctcacctccatcccgctgcccgacatcctgcggaggcagcgcctgctggcgcgggactccgtcaagcaggcgctgctgttccaccagcccgccaggcccggggacgccttccaccaggtgctcaacgggctggcgcggaagctgccgcacggcgagggcgtgttcctgcagcccggggagaaggcgctcgactgggacgccggactccagagcgacctcaagccctggtagtggactggactcgttgtacatctcttcgtgttcctttgtactctttcatttgacatgacatcgatggatggatggatcacgcattagtttttgtaccacggcccgtttacatgcagcagcaatatactaatatatagtgtattttccctgctctccacta

SEQ ID NO: 112015 - DNA, 1794 bp, Zea Mays
tccctccctcgtcctggtggtagctgccgtcagcgctgcgtgcgagcggagcgcatcagcagcaccagattcgacgcccgaattctccctcattggctcgccaccgccgcgcccttgactagcccgcctcatccaatctccctcctcggggtcagggtcctgacggcgacatcctaccgcacacgcagccgcagccgcagctgagaaacaaacagggctgggctgggcaggaggagagcagcggcgggcctgctcgagcgagcgagcgagcaaccagcaccagctccttagtcagcagcagcgacagggggtcggatcaggccgctctctctgctacactcgggcgcctccaccagcagcagcagcagcaggaggatcaaaaggccaatgggggcgcacgccaccgcggccgcggccgccgtcctgctcgtcgccacctgcgtcgcggcggcggcggcggcgccgctgcagcagcacgagcccggcaggatctcaggggacgcggtgggcgtgctggacgacgaccccgtggggaagctgaaggtgttcgtgtacgagatgccgcgcaagtacaacaggatgctgctggacaaggacagccggtgcctgcaccacatgttcgcggcggagatcttcatgcaccagttcctgctgtcgagcgcggtgcggacgctggacccggaggaggccgactggttctacacgcccgcgtacaccacctgcgacctcacgccgcagggcttcccgctgccgttccgggcgccgcggatcatgcgcagcgccatccgctacgtggccaccacgtggcccttctggaaccgcaccgacggcgccgaccacttcttcctcacgccgcacgacttcggcgcctgcttccactaccaggaggagcgcgccatggagcggggcatcctgccgctgctccgccgcgccacgctggtgcagacgttcggccagcgcaaccacgtgtgcctgcaggacggctccatcaccgtcccgccctacgccgacccgggcaagatgcaggcgcacctcatcagccccggcacgccgcgctccatcttcgtctacttcaggggcctcttctacgacatgggcaacgaccccgagggcggctactacgccaggggcgctcgcgcgtcggtgtgggagaacttcaaggacaacccgctgttcgacatctcgacggagcacccgtcgacgtactacgaggacatgcagcgcgccatcttctgcctgtgcccgctggggtgggcgccctggagcccccggctggtggaggcggtggtgttcgggtgcatccccgtcatcatcgccgacgacatcgtgctgccgttcgcggacgccatcccctgggaggacatcagcgtgttcgtggcggagcgggacgtgccgcgcctcgactccatcctcacctccatcccgctgcccgacatcctgcggaggcagcgcctgctggcgcgggactccgtcaagcaggcgctgctgttccaccagcccgccaggcccggggacgccttccaccaggtgctcaacgggctggcgcggaagctgccgcacggcgagggcgtgttcctgcagcccggggagaaggcgctcgactgggacgccggactccagagcgacctcaagccctggtagtggactggactcgttgtacatctcttcgtgttcctttgtactctttcatttgacatgacatcgatggatggatggatcacgcattagtttttgtaccacggcccgtttacatgcagcagcaatatactaatatatagtgtattttccctgctc

SEQ ID NO: 112016 - DNA, 1568 bp, Zea Mays
cgttattctgttgattaaagtttcaatttttgtgtggtaggtggactgccgaaagcaacaactccaccaagagttgtactcactctttttatgcccaactagtactggagtacgtttttatacgcccattttgaatctgaactccggctagcagcagtactgaaaactggttatgcagagatcccatctatgtacacagttcaggcgcatttaatcaacgaaaccaagttcattttggatgaatgaaacgaacgaacgaatcgatggttttgcaggggacgcggtgggcgtgctggacgacgaccccgtggggaagctgaaggtgttcgtgtacgagatgccgcgcaagtacaacaggatgctgctggacaaggacagccggtgcctgcaccacatgttcgcggcggagatcttcatgcaccagttcctgctgtcgagcgcggtgcggacgctggacccggaggaggccgactggttctacacgcccgcgtacaccacctgcgacctcacgccgcagggcttcccgctgccgttccgggcgccgcggatcatgcgcagcgccatccgctacgtggccaccacgtggcccttctggaaccgcaccgacggcgccgaccacttcttcctcacgccgcacgacttcggcgcctgcttccactaccaggaggagcgcgccatggagcggggcatcctgccgctgctccgccgcgccacgctggtgcagacgttcggccagcgcaaccacgtgtgcctgcaggacggctccatcaccgtcccgccctacgccgacccgggcaagatgcaggcgcacctcatcagccccggcacgccgcgctccatcttcgtctacttcaggggcctcttctacgacatgggcaacgaccccgagggcggctactacgccaggggcgctcgcgcgtcggtgtgggagaacttcaaggacaacccgctgttcgacatctcgacggagcacccgtcgacgtactacgaggacatgcagcgcgccatcttctgcctgtgcccgctggggtgggcgccctggagcccccggctggtggaggcggtggtgttcgggtgcatccccgtcatcatcgccgacgacatcgtgctgccgttcgcggacgccatcccctgggaggacatcagcgtgttcgtggcggagcgggacgtgccgcgcctcgactccatcctcacctccatcccgctgcccgacatcctgcggaggcagcgcctgctggcgcgggactccgtcaagcaggcgctgctgttccaccagcccgccaggcccggggacgccttccaccaggtgctcaacgggctggcgcggaagctgccgcacggcgagggcgtgttcctgcagcccggggagaaggcgctcgactgggacgccggactccagagcgacctcaagccctggtagtggactggactcgttgtacatctcttcgtgttcctttgtactctttcatttgacatgacatcgatggatggatggatcacgcattagtttttgtaccacggcccgtttacatgcagcagcaatatactaatatatagtgtattttccc

SEQ ID NO: 112017 - DNA, 1325 bp, Zea Mays
ctgaaaactggttatgcagagatcccatctatgggacgcggtgggcgtgctggacgacgaccccgtggggaagctgaaggtgttcgtgtacgagatgccgcgcaagtacaacaggatgctgctggacaaggacagccggtgcctgcaccacatgttcgcggcggagatcttcatgcaccagttcctgctgtcgagcgcggtgcggacgctggacccggaggaggccgactggttctacacgcccgcgtacaccacctgcgacctcacgccgcagggcttcccgctgccgttccgggcgccgcggatcatgcgcagcgccatccgctacgtggccaccacgtggcccttctggaaccgcaccgacggcgccgaccacttcttcctcacgccgcacgacttcggcgcctgcttccactaccaggaggagcgcgccatggagcggggcatcctgccgctgctccgccgcgccacgctggtgcagacgttcggccagcgcaaccacgtgtgcctgcaggacggctccatcaccgtcccgccctacgccgacccgggcaagatgcaggcgcacctcatcagccccggcacgccgcgctccatcttcgtctacttcaggggcctcttctacgacatgggcaacgaccccgagggcggctactacgccaggggcgctcgcgcgtcggtgtgggagaacttcaaggacaacccgctgttcgacatctcgacggagcacccgtcgacgtactacgaggacatgcagcgcgccatcttctgcctgtgcccgctggggtgggcgccctggagcccccggctggtggaggcggtggtgttcgggtgcatccccgtcatcatcgccgacgacatcgtgctgccgttcgcggacgccatcccctgggaggacatcagcgtgttcgtggcggagcgggacgtgccgcgcctcgactccatcctcacctccatcccgctgcccgacatcctgcggaggcagcgcctgctggcgcgggactccgtcaagcaggcgctgctgttccaccagcccgccaggcccggggacgccttccaccaggtgctcaacgggctggcgcggaagctgccgcacggcgagggcgtgttcctgcagcccggggagaaggcgctcgactgggacgccggactccagagcgacctcaagccctggtagtggactggactcgttgtacatctcttcgtgttcctttgtactctttcatttgacatgacatcgatggatggatggatcacgcattagtttttgtaccacggcccgtttacatgcagcagcaatatactaatatatagtgtattttccc

SEQ ID NO: 112018 - DNA, 674 bp, Zea Mays
atgaccggcacggtgtccaagctggcgggcgccccggcctgcggcgccaccgctccggccggcgtccctccgcgccgccgcaatcgccttcgccccctccccgcgccgggtgggaggcgttggccaagaaaggtgccaagaaacagaggttgttgtgggcatccacccggtgtcaagaacccagcttatcccgacactctttacatcgacagtctcattggacctgacacggtcaacacgatgcccgaccaagctttgcacgcattcatagaccacggcactgtctcgaggacagttgatgcgaatgtgtccgaggcggaaggtgtatacagcgccttggagaagcttggcattgactggggcgaggtcggaaagcagcttgagctggaaggtgtggactccttcaagaagagctttgacagcctactcgtgagcctacaggagaagggcaacagcctcaagacggcaactgtgtaaaactgagaagattgggtaccggcgggtgaacgattttactaaataaaatgctagcttgctggctctcttagtttttacgatgtacctttgctctccattttctgaatcgggattgtattctaggcttgcctggccgtcattgtgtgaccaacgttcatggcttgtacaagggatcggacgtaaacggttggaaaaca

SEQ ID NO: 112019 - DNA, 631 bp, Zea Mays
aaggctgccgttggcacaggcccaactagcaaatcgggtctaccagaagaaattctctggcccgaggtgggaggcgttggccaagaaaggtgccaagaaacagaggttgttgtgggcatccacccggtgtcaagaacccagcttatcccgacactctttacatcgacagtctcattggacctgacacggtcaacacgatgcccgaccaagctttgcacgcattcatagaccacggcactgtctcgaggacagttgatgcgaatgtgtccgaggcggaaggtgtatacagcgccttggagaagcttggcattgactggggcgaggtcggaaagcagcttgagctggaaggtgtggactccttcaagaagagctttgacagcctactcgtgagcctacaggagaagggcaacagcctcaagacggcaactgtgtaaaactgagaagattgggtaccggcgggtgaacgattttactaaataaaatgctagcttgctggctctcttagtttttacgatgtacctttgctctccattttctgaatcgggattgtattctaggcttgcctggccgtcattgtgtgaccaacgttcatggcttgtacaagggatcggacgtaaacggttggaaaaca

SEQ ID NO: 112020 - DNA, 919 bp, Zea Mays
cagaagccgcacacgcggtcacgcggaccgcggacgactgccgccgccgtcgtcgtcgattggctcgtgagtcctgctcgctgctccttcctacgccgtgccaccgcctgctgtttcgctcgctcgtgcttggctgctcctgactgcaccgcgccgccgccgccgcagttctgctctccatcccgacacatcgcgccgcttcaagctaaagtgccactgcgccaccatccatcccggcatctcgcgccgtttcagtctcaagagcagatacgcaggtatggagccacgcactgagggagatgcttccaggaacttgcgccaaggtcgattgctagagccgccaccggtacctgctgtgaggacttctccagaaggagtgcagaggcacacaggtcaggatgtgattgctagtagaagtcaaagtgcagcagcatctgagacgggctcttctttgccatgtgaagatggaaatgcaacggctgaaactattggcagcagcacccatcctgtgcacattggtgtgcaaaaccaagacattgaacaagagcaagttcatgagactggaaagagatacaagaggttgacatctgatgtatggaattactttaccaagaaaaaagagataatagaggagaatgggaagaagcgtgagcaaatttggggttattgcaacttcccaaattgtaagcggcgatatagagcagagggccgccaaggtacaactgcatttaagaatcatttgaggtccgcacacagcatagttcgaggccaacaacaacttaaatttgagaaggaccttggtaataacattacccatatccagcctttcatgtatgatcaagaagttagcgtgaagaaacttatcatggcaataattatgcatgattatcctttcaatatagtagagcatggatatttc

SEQ ID NO: 112021 - DNA, 430 bp, Zea Mays
agattctaagattgttggttcaattgtgagtgaccttgaaattgagactttatctaccgtcatggctaacaaaataagagctgtggatgacaaggacatagaatggaaggaccaggagcatgatggtgagaacgaatatattgatagtgatcttgatgttatggatgaccacaatgaactttgagctatagctgtaggcttctagtttcagcttaatgtctactgcctttgagttactatgttatgtgtcttgggacttttataaactattatcgtgattgtgcatttgtgggtgtctgcttaattaattagacattgatgttgacttgttatatactccgtccgtcccaaaatatagctgtttctagtctactttttttgtccatatttattcaaatgataataaatatagacatatatgcaaactgta

SEQ ID NO: 112022 - DNA, 191 bp, Zea Mays
gactaaaattctatggtgtagtgctaaacgggctaaatgggctaaacgggcctaccgtgccagcacggcacggctaagtaggcttaatgccgtgcttgggcctggtcttaggcactagtgccgtgccggcatggcacgactattaaacgggccaaacgggccgtgccctaaccgtgctgtacctggccgtg

SEQ ID NO: 112023 - DNA, 183 bp, Zea Mays
ggtgacttgcggacgacgagatcgtgtttagagcgagctggcgaggtgggggttgagcaagggatgacgggttcgacgactcgacggcaaacgacaagcacacgcgaagcccgatggatgaggagcgaacgcacggatgggtcgaaccgggactagaggacaacgaacgacggcgaatgacga

SEQ ID NO: 112024 - DNA, 2778 bp, Zea Mays
atgaggatcatgatcaagggaggcgtgtggaagaacacggaggacgagatcctcaaggcggccgtgatgaagtacggcaagaaccagtgggcgcgcatctcgtcgctgctcgtccgcaagtccgccaagcagtgcaaggcccgctggtatgagtggctcgatccgtccatcaagaagaccgagtggacaagggaggaggatgagaaattacttcatcttgctaaactcatgcctactcagtggaggacaattgcacctattgtaggtcgaacaccatctcagtgtcttgaacgttatgaaaagctgcttgacgccgcatgtgcaaaggatgaaaattatgaggctaatgatgatcctaggaagctgcggcctggcgagattgacccaaaccctgagtcaaagcccgcacgtcctgatcctgttgatatggatgaagatgaaaaagaaatgctttctgaggctagggcccgcttagctaacactaggggtaaaaaggccaaacggaaggcaagggagaaacaacttgaagaagcaagaaggcttgcttcactacaaaaaaggagagaattgaaggcagctggtattgatacacgccacagaaaaagaaagagaaaggggattgactacaatgctgagattccatttgaaaagagaccaccttcaggtttttatgatactgttggtgaagacagaccacctgaacatgtacagtttccaacaaccattgaggagcttgaagggaagagaagagcagatatagaggcacaattaagaaaacaggatattgccaggaacaagatcctgcagcgacaggatgcccctgctgctataatgcaagcgaataaactaaatgatccagaagctgtcacaaagaggtcaaagctaatgctgccgcctcctcaaatttctgaccacgagctagaggagatagcaaagatgggcagtgctggtgatcctgctttagctgatgagcttggtgaaggaagcactgccacaagaaccttgcttgccagctattctcagactccaaggcttggtatgacaccattgcgaactccgcagcgaactccagctgggaagggtgatgcaatcatgatggaggcagaaaatcttgcacgtctcagagaatcacaaacacctctattaggaggtgataacccagagcttcatccatcagatttctctggtgttacaccacgcaagaaggagatacagactccaaatccaatggcaacacctttagcaagccctggccctggtattactccaaggattagtatgacaccatccagagaggggcacagctttggtttaacaccgaaagcaactcctcttcgtgatgaacttaacataaatgaagtggaaatgcaggacaacactaaacttgagcttcgtaggcaagccgaactgaggaaaagcctgcgatctggttttgcttctattccacaaccaaagaatgagtaccagatagtcatgccacctattacggaagatgagaaagaagaagctgaagagaaaattgaagaggacatgtcagacagactggcacgagaaagggctgaggaacaagctaggcatgaggcattgctcagaaagagatccaaagtgttgcagaggagtctgcctaggccaccggctgtttcagtagagattatccggcaatctcttattagaagtggagaaagcagaagcagaagcacctttatgcctcctacatcacttgaacaagctgatgaactaataaatgaggaactccttaggcttcttgagcatgataatgcaaaatatcctcttgatgaaaaaactcaaaaagagaaaaagaaaggaagcaagcgtcagcaaaatggaggacctcttgtccctgaaattgatgattttgatgaagatgaactaaaagaggctagctctatggttgaagaggagattcaataccttcgagtggccatgggtcatgaaaatgaatcttttgaggacttcgtgaaagcacatgatgcatgccaagacgaccttatgttttttcctaccagcaatagctatggtttagctagtgtggctggaaatgctgataagatttctgctttgcaaaatgagtttgaaactgtgaagaagcgaatggatgatgaagctaagaaggcttctcggcttgagcagaagattaagcttctgacacaaggatatcagatacgggctggaaaactgtggtcacaggtccaagatacattcaagcagatggacactgccgcaacagagctcgaatgcttccaagagctgcagaaacaggaacatctcgctgcttcatatcgaatccaaaatttgtctgaagaagtgagtaaacagaaggcactagaaaggaccctccagagccgctacggcgagctggtttctggtttccagaggatccaagaacaggtcgaggagcacaagaggcaactcaaggtacaagaggcggtagaagccgaaagtcacgctcaggaagaggaagctgcggcatcaaatcatgctgctgctgaggaagaggatgaaaggaaggaagatgatgaaaggaaggaagaggatggaaggaagtctctcagctctgaagagaaaccacagcagacaagtacggctaccgatgaagaacctgcaggaagcaaaggaaccaccgaggatcagatggacgtggacagcgggaatggagagggtggagttgtaggccctgtcccaccagcaccagacactgaagggggtaatgatgaagtatcagttcaagagatcagtgaagcccagcccttgccttga

SEQ ID NO: 112025 - DNA, 1851 bp, Zea Mays
ataatggcaaatttctcgtccccagcaaagtccctccattcggtctcatctcccatctctcttctctctctcccgcgacatcagcggcggcgcagcggtggggtggggggacggcattgcgagctcacagtctcacaccacccgccgcgtggtgattccgagaggttgctgtgccgctggctatgtagtgatgtggaccgtgatctcgacggctatccgcggctgagcgggcggcggcgatgaacgaagcgagcgccagcgctggcgtcgggaccggctctggcggggaggtgccgctggtatacaaggcctggaaggggaacaatgtgtttttactgaaggggagattcatatttggtcctgatgcaagatccttgtttgtcaccatgttccttattgttgcgccagtatcaatcttctgtccattagttgcgaaggaattgatggataaattctcttatggtctgggattaccggttatgattgcagcagttctattcacagcatatgatctgagtcttctgcttctaacttctgggagagatccggggatcatacctcgcaatgcacatcctccagaacctgaagggtttgatgacaatgcagaggttggggctaaccagactccacctgtgcgtttgccccgagtgaaagatgttgttgtcaatggaattactgtgaagataaaatactgtgacacttgcatgttgtacaggcctcctcgttgctcccattgctctatctgcaacaactgcgtggagcgttttgaccatcactgcccatgggttggacaatgcatagggcttaggaattacaggttcttctacatgtttgtattctcaacaactctgctctgcctgtacgtctttgggttctgctgggtgttcgttgttaagatcagaaatgcagaacagataacaatttggaaggcaatgacaaagacccctgcatctgttgctttaatcatctacacattcattgcggtttggtttgttggtggcctctctgtgttccatttgtatctcatgagcacaaatcagacaacatatgagaacttcaggtatcgctatgatcaacgagccaacccatacaacaggggaatcatggtaaacatcaaacagatcttatttaccacgatccctccttccaagaacaacttctgtggtagggtccaacaggagcatggtctaaggcctcgtccaacaaatggtttcatgagtccaaacatggggagagctgttggtgacatcgagatgggtagaaaaccagtggcttgggatgagcctaggatggcagctgagattggtgatttaggagcaggtctgagcaacctgctggaggacaaggatggcaggtttcgtagcgcatctccagatctcagccgcgacgcccttgcagttggaggaggcttagaagaggaaggctcctcggcgatgaacgctgggcgttcaagctggggagttgaagcaggtcgatgatggcattgaccgtgtaagcggctgtagtgagacgctctgggttgttagtgccagttcgctgctaatctgttgttttgtttgagatttgaggtcactaatgttattagactcatgacctgtatggcggttgtttctggactttcttttcttctttctcttaatttgagatgtctttcgtgtctattatttgaaccagttggtttgtgacgtctcccggtttggcaagttatgttttgtctgtatataatcggacagtaagcctaaaataggatccagctgcttggatttggatggtaatggttgtgaataatgccctaccttttgcattgcagtaactgaacattgctcggtcttggtgcccatgtcaagatta

SEQ ID NO: 112026 - DNA, 1631 bp, Zea Mays
cccgccgcgaaacccagcacgaccgatccatccacctcacaccgcgtcttcgtccagctcactcccccgccgcgcccccgctccgctcccctctcttcctcgccgcgggtcgcgcgcagccaggcgccgagccgccgaccagtaaccgacgtatatctcatccttccccctcccccctgcacagccccctctacaactccccgattaaaccctagaatctcccaactcccaaatgcgcgcccccacctaggcccccgaattcggcatccgctccgcggaaggtgtgcaagccagggtgcacacaatgagtgcgggtttcaacaagcagatactggctcagaagctttcgaagcttaatagctcacagcagagcatagaaactttatcacattggtgtgtctttcatcatcgttactgccaacaagttgtagaaacatgggattgcgagtttcatgcagctcctggagagaggagggtatctttgctgtaccttgcaaatgatattatgcagaatagcagaaaagaaggcaatggatatataactgaattcatgagggtcatccctgctgccttgaatgaagtgttgactatcagagatgattttgggcggaatgttccaaaaagactgattgacatatgggaagaccgtaaaatatttgatactcaggcacaaagcctcaaagatgactttttcagaaggttaaaggacattagaaacaaattgaaaaatacgggcagtgagctgctggagaaggttgtctctagctacaaacatgtcctgaatgctcctatggatgaggatactctgatgcgaaaatgccaagcagctcttatcaattttgatgaactcaataaaacgtatggaaacaactctgttttaggtaagctatatgtattctaatagtccgtttggatgcaggtattcagcctcagaattcagaattggtattggacagcttgattaccgttgtttggatgcacaagaatttggcactggaatttgagtccagtaccaactcgacattcacttcacctgtgcccccttgccaccaattcggagcctcacccctccgttttgtggggaattaggccactaggaaaaaaaaacttcggcctttcaattctgtgttctgtacatccaaacagatatcgagtttgatggtttctatgattccaaaagtcaattttatggccatccaaacaacggatttcaattgtgttccatttcaatatcaaggctgatttggtattctctccaattcaattccttcccttccaatatcaacatccaaacaaagcctaaggatattctcacatgtcctgtcattatttactagttaatatgtagctcatagcatgcagaaactagtgattatgtggagttatagtttggtctgcaagttcttcacctcagttgcggtgcaccacatatgcagggttttcacaaaaccaacaaactaccatggtctcaagcataacacattgatgtttatctgtgcatgggtttgctgggttttagcaggagctaaggagatcggtagtatgggcttagttgctgccctgggcgaggtcgggtctagtttcagtactactatgtaattcccttcgggataatgtgggtctttgggaga

SEQ ID NO: 112027 - DNA, 1471 bp, Zea Mays
atgaggttgcaaggtagcagcaatcaatcggaatttatgcagggggtgcaggaacaacacaacattctcagaaactccattgaacaactcaaattgtcagaatcactcagggccactctgatttctcatttgaaggaagcgctgaatgagcaggagctcaaagtggaacaagtcagaagcctgcttcaggcagctcagcctcgattcaagagagctgctgagctctgcgtggggcttggaagcaacatggaaatgcatgagccatcaaatcaagggcataagaggtctagcctctctgatccacttagtactgttgctccaggagctgagaagtctcttcaaaagggacagtcaagtgcagtgttgtattcacaggagggaaatggttttgagcacatcatgacagagacaaagcttgctgcaggtgatgcttcagacaatatacgtggtggtgatttgccttcacaagtgaatgggggcaacaccaagctgaaaatagaagagcacacttctggtaacaagaggcagaagctagaggatgacacagatatttctcagcctcaatcacagtcaccgccaccgccacccccattccctcatcctgacgcattcgaaccaccaccaccaccaccacctgaggttcctccatcaccagagcctagcccaccaccaccgccaacttcaccgccacccaatatgatccccccgccgccgccggcaatgccaccccaaatgatctcacatgtaccacctccagctggtacatttgtaccttttcctgctggaccacctggtccaatgtattccagctacccaccttttactcctgtggtcaacttccccataaccagcccaccagctggtttccctagtccaagcccgcctccgccttttcaaggattagtgggtacattctatggccctcagttccccaccgcacccccaccagcagacaggaaatgagtgtagtaacctaccggcagcccccctcatcatactagtttatttccccttttcaacagagaatatgactcggggggtggggggggggggggggggcgctccatcagcatgtgttgtggagctcagaagattgttgtaaatttagccagtcagtgcgcagcagtgaattttctgaactagttgtggtcttggtcctggagtagaagtgtagaacctgtagatttcgactgctagagagaattagggattctgagagccgagaacaaatgcctgcgacagattaataataagttgtggtcttgttggagtaaaaactgtagattcccacagcttagagagagagcatggaactcggtagcatgacatgttgtaactcatgtacaattgtgttcattgccagatcatccgagaacatgtacatgttcccgtgatgttttgagcgtgtaattctgttgttctgtgtaagatatggcttgagccgctgtcgatggttgaaactttttgctct

SEQ ID NO: 112028 - DNA, 1056 bp, Zea Mays
ttatttgtaaaaagatgacacgggatgaccgttgaaattagtgctttaagtatagtatagaaaaatagtaccggtattaaatgctagaggttggaaatctctttctgttccatgattccatcaagaacaattcctcctccaagaccagttcttcctcctgtacgtcctccataaatacatggccagctctaccacatctcttgcaacattactacacatacctgcagctaggagtgaggtgcaggcatggcctactgctactatccagcaagagcctgctatctcctgttcctcatctaccagcccgtcgtctactacctgttgctcatggctccccacaccatcgcgctgtctttcagctacgacttctccaacccgggcgacctcgaccgagcaaatctcacgtacctcggcaactctatcgccggcgacggaatcattaaccttacaaatatgaatgacacctggagcaccggcggtgtggcctacccgcagccggtgcgcctgtgggatcaccgcaccggcaggagagcaagcttcaccaccaacttctcgttcgccatcagcggcgagcgtacctacaaccgtgcggatggcatggccttcttcatcgggtccttccgctcagccgtgccgctagactcaggcggtggttttctcgggctcatcagcaacatcactccaccgccgctgtcgactgtcggcgtagagttcgacacaaacaggaacatatgggatccccaggacgccattgaccattttggcatcgacgtcaacaacatcacctccatcgtcgtttacaagtcgctgggacaagatttcccaaacccgctctctggtaccatgtcggcaggcgtcaactacgatggcagctccaaggttttatccgttagcctccggctggccaacggagatgttcatgacctcgaaacgtcggtcgaccttaaagccgccggagtgccacagtatgccaccatcgggttttcggcggccaccggcaatcacgtcgagtcgcaccagctcttgtcttggtccttcaactcaagaggtaattag

SEQ ID NO: 112029 - DNA, 465 bp, Zea Mays
cgcatacccgtgaccgcagccaccacacccattttgtcttgtcggcatacgccgccgtctccttcaacatggaattcgtgatgcgcgacgacgagagcgccacgttcaacgtcgaggaggagcggatcgatagtctgagtccatgccgccggcatcgctgcttcgtccagccaccagatctcgcgcgctgatgctggactacggaagcagaagggcacttcagcgccggtgtacgcggccggtgccagcaccgcgtccgcgttagtggctacttcagcgccggtggacgcggctggtgcccgcaccgcgttagtggcgaggcagcagcgagcagccaacgggacgggagagccggttcctagtaagtgcctagctgtttttggaaatccgaatagatttgccaagatttattttggaaatcctaggagatttgcgaacagctatctagctcacctagaaaaggtc

SEQ ID NO: 112030 - DNA, 1645 bp, Zea Mays
cgcatacccgtgaccgcagccaccacacccattttgtcttgtcggcatacgccgccgtctccttcaacatggaattcgtgatgcgcgacgacgagagcgccacgttcaacgtcgaggaggagcggatcgatagtctgagtccatgccgccggcatcgctgcttcgtccagccaccagatctcgcgcgctgatgctggactacggaagcagaagggcacttcagcgccggtgtacgcggccggtgccagcaccgcgtccgcgttagtggctacttcagcgccggtggacgcggctggtgcccgcaccgcgttagtggcgaggcagcagcgagcagccaacgggacgggagagccggttcctaatccacctaagttcgaactttgggtgataatacttttagctgttgcgagtgtgtcatttgctgctttagtggctgctctactttggattatcatgcacagacattattcccgtgcctcatcgatgaagatagagttgcaagttgcaagggaattctcgtaccaggagctgtctgcagcgaccagcaacttcttcaaggacaggaagctcggcgcgggccagttcggggaggtgtacagaggtgagctgccggaccctctcatgccgccggtggcggtgaagaggctgacgaggcagatggaggcgcggacccggaaggactacgtgaccgagatcatgaccttgggccggctcagccaccggaacctagtgaagctcgtcggctggtgtcaaggcggcaatgagctgctgctcgtgtacgagctggtaacgaacaggagcctcgacgagcacctccacaggtcagagcgcctgctggcgtggcctgagaggtacaggatagtgctcggcataggctccgccatagagtacctccacaccggcgaccagaaccccatcctgcaccgcgacatcaagcccagcaacgtgatgctggacgatgacttcgaggccaagctcggcgacttcgggctcgtgaggcagatccatccaggacatggctcttccctcgagggcaccgtcatgatcgggactagggcgtacatggatcccgtatgcatgagcaccaacacggcgagcacagcgtccgacatatacagcttcggagtgctgctgttggagatcgccaccggcctgatgccgaccgaggtggcgggcccaggaggcctcctctccaacaccctcatcagcactgtccgggaatactacggcaggggatcggtcctcgagatggctgataggcggctgaacggcgacttcgacgagggcgagatggagcgggtgctgctcgtcggtctcttgtgtgtccagcaggatcgccgtcaccggccggaaatcagaatcgctgtcaacatgctctcgaatctcaagcttccgagtcctagaattcgttcctgaaaagattcactcgccaataatagggtgccttgcctctcgaatctcaggcttccgactcccagattcgttcctgtatgtacatagtgctttgtgagttagcatttggtctggctttgatcacgtattcctctataaactagcaagctggctcgcacaagaactaatgtgatgtttggttcacatatttgtaatgtaacgggtaacagataacgttaaatcatgtttatct

SEQ ID NO: 112031 - DNA, 637 bp, Zea Mays
ccatgcgtgagagactcgccatgcaccctagaaatttcctagaaaaattgtattttcctctgccgttcccggctccgcggtgatagtgcctccatggtcaggtcggctatgagtagtgtcctgttatttgtgtcgtgttcaaaatccttccactgctatggaagctcatagatctgttgcttcatcgctacgacgctaccgcagttgagtcatcagaacagtccttcgacgccgaagcaccccgccgtcaaacatcttcgcgcggaccgttctgtctgttcttcgtccaagctgcactcgccgaataacatccttctcgtcgcgctcagaagccgtcacctgaccaacaagtggtcacggtaagttcatagcacgcgagacgggtgtggatgtcgaatactgtcacggttaacatgtggctaactagagaattcaagtccacgaaaaatgatgaagatttgattctctaataaattgtctatggcagtgcgatcaggtgttcgagcagtagatgaatgtatcttattttaaattgtgtcagacccagtttatactagtataaccgatatcgtatttgttcggtccatgtgtttcttgcctagctcaaaatcttcgaataaaagtaactgtttgggtt

SEQ ID NO: 112032 - DNA, 472 bp, Zea Mays
agactcgccatgcaccctagaaatttcctagaaaaattgtattttcctctgccgttcccggctccgcggtgatagtgcctccatggtcagttgagtcatcagaacagtccttcgacgccgaagcaccccgccgtcaaacatcttcgcgcggaccgttctgtctgttcttcgtccaagctgcactcgccgaataacatccttctcgtcgcgctcagaagccgtcacctgaccaacaagtggtcacggtaagttcatagcacgcgagacgggtgtggatgtcgaatactgtcacggttaacatgtggctaactagagaattcaagtccacgaaaaatgatgaagatttgattctctaataaattgtctatggcagtgcgatcaggtgttcgagcagtagatgaatgtatcttattttaaattgtgtcagacccagtttatactagtataaccgatatcgtatttgttcggtcca

SEQ ID NO: 112033 - DNA, 2195 bp, Zea Mays
ccaatccgcccgccccgctcccgcgcgagatccatccatcccgatcccatcgcgtcacacgtcaccttgccatttatcagcacacgcggttagccgccctctcaagctcgctcgtcgctcgctcccctgccccgcgtccgccccgcctcctgaaaattcccccttttttcctacttcccgtcccacggctcctacgccccgcgggcccaaaaaccctagccggctaatccaatcctgcttcccgcccatggcctccgcggacgctgccaagcccgcgtccccgcccgccgcggatccgcccgtcgacgaccccatggacgccgaccccgcgccccccgcgggggaggaggagcaggccacgccgcagaagcagcagccggagaagaagcggggcggccggaggaagaagggcgaggcggcggagaagacgccgccgtcgtccaagaagtcggcgggccccacggtggagcgcccgtccagggagaggaagacggtcgagaggtacgcggagctcgcgccgcgcgccacacccgccaaaaagtcccccgctattctccagggttctggaacgaagctcaaggacatacccaatgtttcatttaaactatcaaagagaaaggtggatgagaatctccagagcctccatactgtattgtatgggagaaaatcaaataaccattttctgaagagaaacatatctcaattttctgggtttgtttggacagacaatcaagaaaaacagaggaacagaataaaggaaaagcttgagaaatttaacaaggagaagttgctagatttttgtgaaatactggacgttattgtaaaagtaactatgaagaaggaagaagtttctgccaagctcttggaatttttggagtctccttgtgttactcgggatgttgttctcactgataaaaagaaggggaagaaacggggaagaaaatctaaagtaggtcgtgagacaactgctgaaggtgcttctacagagaagaaaaggaaaagagcccataaacaagcagctgaagatggtaaagagaatgatggtgaggatgatgatcccactggttctgaggatgcatcaacaggagaggaagctgatggggactctgaggcaaatgatcatgctttgagtgatgatgaacatgatgagcctgcctcaaagaaaaagtcttcagatgttaaacaaaagaaagaaacaggttctgatgcaaaggaaaaggatgcaccagggaaaaaaggttctacgaaacgtgcatcaaagccttctcaaaacagtaaaaatgagcctgaggtagagataaaaaaggttggcaagagagaaaagagttcaaaagaaactgacgtgtcaccagattcaaataagtcaaacaagaagatttctaaatccaaaaagggtgatggaaaagaaacccaaaataataaagctgccaggtcatccaataagagtaaaggtaaagtcaaaggtgggtcagtggctgggactgccccaaccactgaacagcttcatgctgttgttagtggcattttgaaggaagttgacttcaacacagcaactttggctgatattctcaggcaattagggacccattttgaaatggacctcatggacagaaaagcagaagtgaagcgcattatagaagatgtaattaatagtatgtctgatgatgaaggtgaggaaggctcagaagatgaagctgaagacgatggtaaggcggataatttaaagagtgaacccgatggaggtgaagagaagtgattctgtggactggatgtggattgaacatcgaagggtcatttttcatggcagtctcctgtttggaggtttggctctgtacaattcgggcaccgcaagaacgagccggtgacctgggtactgcttacatgattgttaaccatttcaacagccatacgcatctagctgagcttgacttggtagtgaatgtagtctagtcgcttgtcatgtaatagctttgcgattgatagtttgctagcttaggtagctagcctgactgtaatatgcagaataattcttgtcttgtttccgtccattttatccatgtaaaactatgagttctgaatctttctgaaccttgcttttcttgttctccttgtcatcttaatgtctgatcatttttgttgaattttttggttgaagcttcttaggtctatagtggttcagacgcttcagtttgtca

SEQ ID NO: 112034 - DNA, 1046 bp, Zea Mays
gtttgaatcccagtgggagcgaattttggaccgaggttaaaaaaagtcacttgctagtttccttggtcgtgcacacatgagatggactgacctaatagggggctcaaaacatgactgccatagccctaataaaccattttctgtctatgctctgcaggtaaagtcaaaggtgggtcagtggctgggactgccccaaccactgaacagcttcatgctgttgttagtggcattttgaaggaagttgacttcaacacagtaagcaattgattacgttttgaacatggcacatagttttataagctttgtattctaactcgttattttttatgtaggcaactttggctgatattctcaggcaattaggtacctatttatgttgcttaaatttcattggagtagatatgtgaagaaatataccatctctaaccttagttttctaacagatgagtgtactgacatgtttgattcttttaaaccagggacccattttgaaatggacctcatggacagaaaagcagaagtgaagcgcattatagaagatgtaattaatagtatgtctgatgatgaaggtgaggaaggctcagaagatgaagctgaagacgatggtaaggcggataatttaaagagtgaacccgatggaggtgaagagaagtgattctgtggactggatgtggattgaacatcgaagggtcatttttcatggcagtctcctgtttggaggtttggctctgtacaattcgggcaccgcaagaacgagccggtgacctgggtactgcttacatgattgttaaccatttcaacagccatacgcatctagctgagcttgacttggtagtgaatgtagtctagtcgcttgtcatgtaatagctttgcgattgatagtttgctagcttaggtagctagcctgactgtaatatgcagaataattcttgtcttgtttccgtccattttatccatgtaaaactatgagttctgaatctttctgaaccttgcttttcttgttctccttgtcatcttaatgtctgatcatttttgttgaatttttt

SEQ ID NO: 112035 - DNA, 1563 bp, Zea Mays
cagaggaggaaaaaggaggtctgagtgatcatggactagaattgtatacgtatcatgtttatgatgcatagacagcctgtggaggatggtcgaattgccggcgaataccttgattgttttaaaacgtggatgtttactccaataaaaagaacacctctctaactgcaaaattacctgaatatctacacactttgcaatataacaaataaggcactcactcaagggtgattggtccaatccatcaagttttcagctattatacacctgcaggtcggagagaaggctgtggcgatcatccaccccatgagattgtaggaagaagtgaggatgatcttgagcccgcaagtcttcacagcaagagaggcctccgccgagtttggataccacacgagagaaaaaaaaaacataaaaatccatcgaccaacaagaatccaggagtagcagaagcattccgtggctgcacgcatacacttttctctcctcctccacttgagggaagacccagaaaacgcaaggttgaacgactacactactgcccagactcgtcatcagactcgccgtcctcgcggtcgtcctccccgtcctcctgctgctgatgatggtgatgctggtgcccgtgcgggtgctgcatctggccactgccgccggcagcggcacccacctggtggtagaactggctgatcgactgcgcggcgagcacgccgatgtgaccgtcctgcgagaggccgagctcgagccccggcatggccgcggcgtgtccagcgaacatgggcgcaaagccgatgtggccgccggcggcgccgcctcccggcagctccaggcccgcggggacccccatccgctgcatgatgccgccgataccggtgccgtcgcccgcgcccgcggaattcaggaaggagggcgaggagaagccggcggacggcgcccacatgtggtgcgggtggtggtggtgcggcctggcgagcccggaggtaggcgacgggagcgagggcgcgacggaggcgagcgcggacgccggtatggtgcccgtgccggtggcggcgacgatggccggctcggcctgctgcagcagccactgcacagtctcgccgtcggacttgtggccgagctcccgcgtgagctggaagatccgcgcggcgcagagcgccggcatccggatccggcggcccctgccgtcgaccttggtgtggcggtccttgttggagctccgcttgggggcgagcgcctgctgcctccgatccccgggctgcgccaccacctgcagcagctgctgctgctccttcactccgccgcccccgtcctgcggcggcggcggcggctggtggatttggatttgcaggtgggggtgatggtggtgctgctgctgctcctggtgctgcgccgtctgctgctggtagtccttaggatccagctgatgatgctgcgcggtcgaggtggtggtggtcgtcgcggtggtgggctccgttttgtttagcgctaggggtgtggggaacttggggtccatctccacacacacggagacacagaggcacgcctacaaactgcaccaactcccttctcttg

SEQ ID NO: 112036 - DNA, 2067 bp, Zea Mays
actcgcatctaaaccctagcccctcaccgttctcaatctcttctcccttgatcggcacagccacaacctccttctccaatactctctccctcgccgccggccacctccgcctcctcccacgcgccacctccgcctcctcccacgcgccacctccgcctcctcccacgcgccacctccgcgacaaaccactgaaggagggagaggactcgctcatatcgtccgatggaggaggactcgatcaaggggatgatctccgcgatatcctgggtgcccaggggcgccgccaagagcgtgcccgtcgttgccgacccgcccactcaggaggagatcgccgaggccatgaagaccttcgacctgggcagagactccgggagcgacgctgacgaggatgatgatgctgccaccatggaactcgacggtgcggcggaaacggtggaggaggttgatgaggctgcccgagccaaggccgtagccaaggcgctctgcaagggctctagcaaggcggacgacgtcgctgatgagctccgcgaactcaacatggacgcgtacgatgatgaagatgaagaggtcgatattttcggctctgggctgggggacttgtactatccgagcaacgcaatggacccatatctgaagaagaacaatgaggatgatgaggaggacgacgatgatgatgaggaaatcgaagataagatgatcatgcctactgattttgttattgtctgtgcacatagtgaggacgatatcttctctcttcaggtcaacattcttgaagaaacaaatgatggtgaacaaaatatctttgtgcatcatgacgttcctctcgctgattttccgctatgcacagcttggatggattttaatctgaaaggtggtgaaaaagggaattttgtagccgttggaaccatggatcctgccatagaaatatgggacttagatatggttgatgaagtgcaaccgcacatggtgctaggaggactttcaaaaaagaagaaaaagacaaagggcaaaaaggggaagaagtataagaaaggaagccacagaagttctgtgcttggtcttgcatggaacaaggaagttaggaatgttctagctagtgcaagtgcagacacaactgttaaaatctgggatatagctgttggtaaatgtgcagtcactctagaacaccatgatgacaaggttcaagcagttgcttggagcccacagtcacctgaagttctgcttagcggatcctttgataaaacagttgccatgaatgatatgaaagatggtgggcagaattgtcataaatggtctgttgaagcagacgtcgaaagtttagcttggaatccacacaatgaacattcatttgtggtcagtcttgaaaatgggatggttcaagccttcgataagcgaacagcttcatcaagttcttctggccagtctatgtatacccttcatgcacacgataaggctgtttcttccatctccttcaacccgtctgcccctaactttctcgcaacaggctcagttgataaaatggtgaaactatgggatctatcaaacgacaaaccatcatgcattgcctcccaaaatccaaagcttggagctattttttcggtatcattttcaaatgacagccccttcttgttagcatgtggaggttcaaaaggcaaactgaaggtttgggacacgcttacggagcctgcagtagccaacaagttcagcaaatagaactgccgctgtttgccattataagttatttcccggcacacacatgtttgggtagattgaagttatagtcgaagttttgcccttgtgagttgaggagcccaattgtataatgaactcatgaaatcaatccaagcattgatttatgtattagtggtgggcagaggttttggagtggacgtattaactttatgacggtgcgagttgggttgtgacttcccaattttttgtgaaagaagttagtgatcttcagaccagctcactttatctcgatccaatttgaaactttggacaatagttttacatggaacagctcgactgtataaggctatctttagcagcggtacacatctttgt

SEQ ID NO: 112037 - DNA, 1185 bp, Zea Mays
ggtgcctcattgcaaaacagttgatatattatttggtgcacctttgatatttctcaacaggttgatgaagtgcaaccgcacatggtgctaggaggactttcaaaaaagaagaaaaagacaaagggcaaaaaggggaagaagtataagaaaggaagccacagaagttctgtgcttggtcttgcatggaacaaggaagttaggaatgttctagctagtgcaagtgcagacacaactgttaaaatctgggatatagctgttggtaaatgtgcagtcactctagaacaccatgatgacaaggttcaagcagttgcttggagcccacagtcacctgaagttctgcttagcggatcctttgataaaacagttgccatgaatgatatgaaagatggtgggcagaattgtcataaatggtctgttgaagcagacgtcgaaagtttagcttggaatccacacaatgaacattcatttgtggtcagtcttgaaaatgggatggttcaagccttcgataagcgaacagcttcatcaagttcttctggccagtctatgtatacccttcatgcacacgataaggctgtttcttccatctccttcaacccgtctgcccctaactttctcgcaacaggctcagttgataaaatggtgaaactatgggatctatcaaacgacaaaccatcatgcattgcctcccaaaatccaaagcttggagctattttttcggtatcattttcaaatgacagccccttcttgttagcatgtggaggttcaaaaggcaaactgaaggtttgggacacgcttacggagcctgcagtagccaacaagttcagcaaatagaactgccgctgtttgccattataagttatttcccggcacacacatgtttgggtagattgaagttatagtcgaagttttgcccttgtgagttgaggagcccaattgtataatgaactcatgaaatcaatccaagcattgatttatgtattagtggtgggcagaggttttggagtggacgtattaactttatgacggtgcgagttgggttgtgacttcccaattttttgtgaaagaagttagtgatcttcagaccagctcactttatctcgatccaatttgaaactttggacaatagttttacatggaacagctcgactgtataaggctatctttagcagcggtacacatctttgt

SEQ ID NO: 112038 - DNA, 4458 bp, Zea Mays
ggcctctcctactgttgtgactggtgccacctctcctttcccttcttcctccgtgccccaatccctcttctcccctcgaccagccgagagagcgcccctaccgcagcagctgcagtgctgctctgctctgctctgttctgcccccacttcaccctctcgtctcaccccgcctgcagcttggtcgcttttctccccagtctcctcccctccaccctctcgtctcgtcgcacctcacctgcttggtcgcttttctcccccaatctcctcgtctcccgccggcaccaataccatcctctgtccgctcgctgttgctgttgctattcccgtccgtcccgtgcttctactcgctagtcgtttcgtattcgtatcctctctcctcagccgccctgctcccctcccgtcctctggtgtctggtcaaaccagcggctcccaagatttgccgctgcttccttcctggagaaatcaagcctgtgcggcgagaaatcaagaggaagggggaagagagggagaaagagagaggggcgggggtggaggaaagaaagcctgccccttgcggacgtgcctgctccctcgggggcattcaattggagccaacagtgggcgggtgggcggctgctacagcacggcggcctccataaattagctccccgcgttccggccccttccgccccctgtcgtcgcacccgccccgtgtctcccccgatcggtccgtcgatcacgcggacgcccgccggagcatgcgcgccgcgggcctcggccgccggagaagcagcatcagccgccgcgccgccgccggcgtccggaaggagatgtagcgctagctccccgacccgcgaggaaagggaaaggggaatgaccgttacggcgcgcgggaggagcggtggagccgggatgggggagaagggcggcgctcccgggctcggcttcctgagcctcgatcggatgcgcgtcctcctgccgccgctccgcctgccggagaagctgtcggccaggacgctgcggacgcacctcttcactaactaccggatgcgcaaggtgcgggacagctccagctggctcatcccgctctgggtcagctcttgggtcctcgtcgcctccctcatctacctttgcatgagctaccaggccgtcggcaagcgccgggagtctctcgccagcatgtgcgacgagcgcgcgcgcatgctccaggaccaatttaacgtcagcatgaaccacctccaggcgctcgccatcctcgtctccaccttccaccactccaagacaccctccgccatcgaccagaaaacgttcgcgaggtatgcggagaggacggcgttcgagcggccgctgacgagcggggtcgcgtacggggtgcgggtcacgcacgccgagcgggagcagtttgagcgccagcagggatggagcatcaagaagatgtactcctccaagaccaagaatcagtcgcagggacccgggaacgccgaggacgccgaggtgcgggagccggcggaggagtatgctcccgtaatcttcgcgcaggacgcctacaagcacgtcatctccttcgacttgctatccggcgccgatgaccgggacaacgtactccgagctagagaatctgggaagggtgttcttactgctcctttcaagctgctcaataatcgccttggagtgatcttcacctatgctgtgtacaagtatgagcttcctgcaaatgccaggccacaggagcgcattcaggctgctataggctatttaggtggcatatttgatattgaagctcttgttgataagttgcttcaccagctcgcgggcaagcaatccatcatggtgaacgtttacgatactactaatgagagaccaatcagtatgtatggttcgaatgatacaggcagtggcatgtgccaggtcagcacactgaacttcggtgacccttcaaggaagcatgtgatgcactgcaggttcattcagagcccaccttggccttggatggcaataacgacatcaattggaactctagtgattgctttactgattggatacatagttcatgctaccgcaaaacggattgccagagttgaagatgactttcaggagatgagtttgctcaagaagcgcgcagaggatgcagatattgccaagtcacagttcttggctactgtttctcatgagatcagaactccaatgaatggtgtcctagggatgctccaaatgctcatggatactgatttggacacaacacaacaagactatgttagaaccgcacaagccagtggcaaaactctggtatccctcatcaatgaggttcttgatcaggcaaagatcgagtctggtaaacttgagcttgaggtggtaccctttgatcttagaacagtttgtgatgacattttgtctctcttctgtgggaaagcacaggagaaaggactggagttggcagtgtttgtttctgatcaagttccacaaacactaattggcgatcctggaagaataaggcaaatcattacaaatcttgttggaaactctataaaattcacagagaagggtcatatctacttgacggttcatgtcgttgaagagattatgcattgtctggaggttgagacgggaactcagtatacaaataccttaagtggctacccagtggcgaacaggaagcgcagttgggaaaactttcgactttttagtagggaactgaactcatccgagatgccttttgcacccattgcatcagactcaataagcttgatgatatcagttgaagatacgggtgctggaatcccgttcgatgctcaatcccgtgtcttcacccctttcatgcaagtaggtccatccatcgctcgcatacacgggggcactggcattggattaagcatcagcaaatgcttggttggcctcatgaagggagagatcggattttcaagtaaaccccaagttggttctactttcaccttcactgcagtgcttacgagggtccattccagcagaaatgagaataaatcatcagaatttaaagagatcaatgcattggtggtagatcatagaccggtccgtgccaaggttactaagtatcatttgcaaagactgggagttcagactgaattgacaactgacctagatcagtatatttctaaaaataattgtggatcacagattgcaaagcttgtgctcattgacaaagaaacctggctgaaagaatcccactccatgcctcttttggttactaaattgaggaacaaagatcagccagactctacaaagttatttcttttggagaaccctaaaagttctgtcaagagcaattcacatatattcagggaatataacttgaatgtaattatgaagccacttcgtgcaagcatgcttcaggtttcgctacaaagagcattgggtgggatagataaactgcattgcaggaatggagtagtcggcaattcaacactgggcagccttcttcacaagaagcgaatcatagtggttgatgataatattgtaaatctcaaggttgctgcaggcgctctaaagaaatatggcgcggaagtaacttgtgctgacagtgggaaggaagcaatcacactgctgaaacctcctcacaattttgatgcttgtttcatggacatacagatgcctgaaatggatggatttgaagccacaaaaaggattagagtgatggaaagagatctaaatgagcaaatagaacgtggagaagccccaccagaatgcgtaggggttcggcagtggcgaactccaatattagccatgacagcagatgttatccaggcgacacatgaacaatgcttgaaatctgaaatggacggttatgtttccaagccattcgagggcgagcaattgtacagagaagtagctcgctttttcctaaatcaagaccaagttcagtaggtaggcttatatggagtgtaaaatagtggaggatatcagggttcacccatcgaggctgaaagaattttgtcagagatcccatgttcttgagagtggaaaacactttaggctggagatggaaccacctatgttcggttccttggtacatctgaccaagctgcaaaactaaatgtgcaatgtcttgaaatcaaggtgcatgtggagctatttactcgacaatctgaggtcaaggcgtgtgaaaaaaaagcccagctgcattcactaaccgcagatgtcctctgccactacaatatagagtagggagagaaattttccttccccagaaggtaccggctgtacatattaggtattggttgtttgtgcaggcatttgttggcattttgttgtgcatcgtcttcggtctgtattgtttgggtcgaagctgtaaaatgtaaatggcgttttcaaagatggaagttttgtttgacaaatacatcggtcgtcatcagcttgtcttcctgagtttctctcctgctactggttctctcccaaccagccaatcactatactgaaggctgcctgttggtgtggctttatctgat

SEQ ID NO: 112039 - DNA, 231 bp, Zea Mays
atgcggcaccggcaccgccccgttagcaacagatgcacgccccgtttcatttgtcggttgcacgctctgccgagtaaagcaacatctggctgcttgtacttgcaccggcaccaccattgttttcttttgccaacatctttttggctttcgtattcctcaaagcatttgtcaggagttcctcaagtttctcaagttcattggcatccgactcctcagcgttgttttgtttag

SEQ ID NO: 112040 - DNA, 357 bp, Zea Mays
ggtatcaagagggtgaaacatctacctggtggctatggagacattgtcaagtgtcctaacactgctagagagattgataaagagatgaatgaagctttgaataatgggaagcgggctaggacggtgtacctagatgacgatgtaatggaagatgaagcagtacaagatgatgatgtccaagttatgggaagcaggtcgtgtcagcatcatcaggcttcctcatgtattgtgccaagttctggagcagctgccaaaagaaacaaagcaattttccaattgaagccccacccaattgcagctccaaagaagtccattgcatctatgattcgacgaacacctcaagaggttgtagcatag

SEQ ID NO: 112041 - DNA, 345 bp, Zea Mays
gtaagaagcgaacacattgtcgccccgagaccgttcacacatagttattttcttttcagttccagggagatttatgtgtcgttcggtgggcttctgatgctacctagacgtgcccttccactattgctagcttcgagcttgatcagagactcttttcgctgatgctagtttatatttcttgccaaaaagataattgttcattaaggatctttaacagatgttttttgttattttctcgagacctaaatgttcatcgaccaaacttgttattgtatcagtgtataatattattctcactgttttttatgtcgtggactatgttttttgtacgccattgaaactacc

SEQ ID NO: 112042 - DNA, 123 bp, Zea Mays
atttttttcccacttcctcactaccctttcaagtttcctagaaattacccatcattgccattataatctaccgaatcgtttttgcgcctatcggatcggagaagcccaccgcccaacagaaac

SEQ ID NO: 112043 - DNA, 777 bp, Zea Mays
atgcgggggacagggaggcgcgctgacagagaggcgcgcggcggcacggggacagggaggcgctcggcggcgtggggacagggaggcgctcggcggcggtgggggagagggtggcactcggcggcggtgggggagagggtggcgcggggacacagaggcacgcggcggcggggggcagggaggcgcgcgtacaggagggccgaggatgtgctcagggtgttattgcagtgcagcacggtcgtggctaccggatctcacagtctccgcggatgctgcgccgtcgccacccccactgaagttcgaccagcgcctcgtcgaggtcttcacccccttcctcgagaagcacataagcctacgtcgagctccgttccggcacccaggcctgagacgaccccctgcaggcgctccaacgccgatccagtggggctccaggcgttctgcaagcggcacggcctctctgccaggggctccaacgccgatctcattgcccgtcttgacgtcgcgctcgggagggctgttggtgcggaggaggaggtggctggagtggcagcaatgaagggttgtacaagggggaagtctgctcaagccggttctgtagaggtgggcgcagttgtccctttgaggcgttccaggagaaattcactgagagctgctgaatctgaagaagtacaagtggctgtttttgttgacaggaagcgcaagtgcaagaaccaggagaatgataagggtgttgctctcagcgctcaggtggtcttttattctttatggggcttctag

SEQ ID NO: 112044 - DNA, 521 bp, Zea Mays
ataactcgcaacaagttatcagggcgaaggtttaatttaaatgctcaaaacttaacattgttcacgtccactgccacttcccagtaccaaattcctaggcaacaactttagcatcaaaactatggtttttgaagtacataaggagacccaacataacatccagaatcaacgaaatagaggagatatccaaagggcatcatatttatgcattttcggtcatagggtactcaaagaccacatctttcccacacagcctgcggtagactgcagtgcaggtctccagcttgtattcggtgttgttcctctcctttgggtccaagaaaatctgaatgacattacaagaaaaggttaaacggtatctgacacgcttccccacaatctcggctgggtagacaacatcctccaagatgccatcgtgaacagcagtgagagtcctggtgcgagggcgcacaacagctgaacccttcttgggtggcctcacgatcctccttgtagcaacaattaccacatcctgtgccagg

SEQ ID NO: 112045 - DNA, 1914 bp, Zea Mays
aagagcgtcaccagacaaagatttcagagcgcatatgcaacgctgcgttttcgcgtcaggcgaggcggaaatcgtggcagcggcagcggcagccgagccgagcctgaacggctgccactgctgccacaccaccatcactcacctctcccacgcccccaccaccagaccttcatgagttgatgtgattgataaataacgcgtcaggtcgcgctgtccacacctcccgcggctcgccaagctccgctcacacctcacagtcacagcagcatgactctgtagtccatctccctttgcagccgccgccgccgccgcctcgagtggctcccagatccgagccgacgccggagcagggacaagccgctgccagcggcaatggcggacgccgtgggggcgctacctcctcctcctctgccgccgccgccggagtgcgagtccgggaggtcctcgccgtcccacgccgcgtcgccggagttcgagttctggatggtgggcaggaacccgtccccggcgctgctcaccgccgacgagctcttctccggcggcgtcgtgctcccgctccacaccctccaggcgccaggcgctccggacggcgacggcgcgcctcagcctcaagccgacgcggacgcggacgcggacgccgcggcgctcccgctgcctgacgcgcaggcgcaggtggaaggggaggccgcgcagccgctcgcggagtccgccatcgcgccgacgccggacctccccgcggtcacgttcaagtggaaggacatcttcaaggcgggcgccggcgccggcgccgagggcaaggagcgcaagaaggtggaacggcgcgtgagcagcgtcagcgggaacgccgagctgattaacatcaacatatggcctttctccaggagccgctccgccggagcaggtgccggcaccttgagtagggccaagcccaatccgaatccaaacccaaaccccaaccccaacgccgccgtcgccgccagcggcggcgccagcgttaacgccaacaccaccgccaatgccaccgccccgagcgcgccgccggccccggcgccggtcccgcgcaaggtgagcagcgcgccgtgctcccgtagcaactcccgcggggagtcctccgggcctgtgccgaccatccccaccgccactgcaactgcagcgccagaagcagcagccggagaagaagacgccgacgcggccacccaggttcaggcggcgccactgaccgccgccggcacatccagcgccacgtccatgttgaggaggtgggtgcccggacagggccgtaataacaacaacgcagcagggcccggcggcatccgcgtggggcggcccagcgccgtgtggaagctgaggcgcaacaagctgcagcaaaccgccgccgagcagaagcaggtgggcggcaagaagaaggcggccccggcccaggaacccgccgcggccgcggacgcggacgcagatgcagccagcgacgacaaggcgtcgccgagcgtggccgcgccagctgccgggtgccggaacaacgtggagggcgccggcgaggaagggaacccgccgcaggtgctcttcgggctccggaccttcttctccaagaaggtgtactgatcagcagcaagccatggcattgtactttgtacatacaaattcgagctctaggctcgctcttccacattttcaccttacctgcccccttcttttctttttttttttgccttttttttattactctccttcctctgctctaattcgatcgagtagcttcgatatcctctgtactgtactagaacgaagctaggcctcaagtagtcgcctcaagcaggccagccatgagccatcgtcgtgtgtcgaccatggatgaagcagaaagcacccatgtccatgtaaacggtagtaatgtaacaagcatgcatcatccgtgtc

SEQ ID NO: 112046 - DNA, 1745 bp, Zea Mays
gctcctttcctatataaaagccctctgccttgctcgcccttctagcacacaagcacaccgctccgcacttctccctgtcgtctcgcccgcccgcgcgcgcggtcgtttaaccttttttctcccaccgctcgccccgtcccgctttccccccggcagcgacgactcctgcggaggtacagagagatgaggacgaggagcgggtcccggtattccaacggcggcgaggtggttgccttggtgggtcagaagaggaagaggtcgccgtcggccgtcgccggagagtgcgactgcggcgggcgcaggaagcggcctgccggcgagccggactacctggacgcgcttcccgatgaccttgtcctctccatcctgtccaagctcgccgccgcctcctcggcgccgtccgacctgctctcggtccacctcacgtgcaagaggctgaacgagctcggcagccatgacatggtgttcgccaaggcctcgccggcgtcgctggcggtcaaggcggcggcgtggtccgagccggcgcagaggttcctcaagcgctgcgccgacgccggcaacctcgaggcctgctacaacctgggcatgatccgcttctactgcctgggcagccgcagcggcggcgcggcgctgctggcgagggcggccgtcggcgggcacgcggcggcgctctactcgctggcggtcatccagttcaacggcagcggcggggccaagtcggaccgcgacctgcgcgcgggggctgccctgtgcgcgcgcgcggcctcgctgggccacgtcgacgcgctccgcgagctcgggcactgcctccaggacggctacggcgtgcggcgggaccccgccgagggccggcgcctgctggtcgcggcgaacgcccgcgagctcacgctcgcgctctccgcggccgcctcgcgccacgccgtcgccgcgctgcccttcgccgcggccgccggcgtcgtcggcggcggcggggggtgccccctcctgtccgacttcgggtggagcctccccgaggcggagccccacgcggcgaaccagttcatggtggactggtgggcctcccgctgcgccgcccaggcgggcgggaagaaggacggcgacggcagcggcgtggacggcgacggagacggcgcggagctccgtctttgctcccacgtgcggtgcgggcggcgcgagacgcggcggcacgagttccggcggtgctccgtgtgcggcgcggccaactactgctcccgcgcgtgccaggcgctggactggaagcgcgcgcacaaggcgcagtgcgtgcccatggaccggtggctcctcgccggcgttgccgttggcggcggcgtcgaggcgcagcagcaccagcagtgagcgaggaaacggctcggcggctgacatgacgtaccagcaccgagtcccctacaggcccacggctccgctgcgtggaccgggcgtagcggaaagcggcgcagggaggggaaggcgtttcggctgttttctctttctttttgcctctttttcacctgctgatgaattgaatgaggtgtatatcgctggcgctgcctgccgttcagatgcgcattttctactaggtagtaccagggaagcaaagagccaaagagcagtggagatccagcagccgcgcctctcctttattttcttgtaatgttctggcatttccaagctagaaatcgtagaattccaatttccaagccgttttgtaatggagctttggagctgaggttttccatgggggtttc

SEQ ID NO: 112047 - DNA, 1067 bp, Zea Mays
gctcctttcctatataaaagccctctgccttgctcgcccttctagcacacaagcacaccgctccgcacttctccctgtcgtctcgcccgcccgcgcgcgcggtcgtttaaccttttttctcccaccgctcgccccgtcccgctttccccccggcagcgacgactcctgcggaggtacagagagatgaggacgaggagcgggtcccggtattccaacggcggcgaggtggttgccttggtgggtcagaagaggaagaggtcgccgtcggccgtcgccggagagtgcgactgcggcgggcgcaggaagcggcctgccggcgagccggactacctggacgcgcttcccgatgaccttgtcctctccatcctgtccaagctcgccgccgcctcctcggcgccgtccgacctgctctcggtccacctcacgtgcaagaggctgaacgagctcggcagccatgacatggtgttcgccaaggcctcgccggcgtcgctggcggtcaaggcggcggcgtggtccgagccggcgcagaggttcctcaagcgctgcgccgacgccggcaacctcgaggcctgctacaacctgggcatgatccgcttctactgcctgggcagccgcagcggcggcgcggcgttgccgttggcggcggcgtcgaggcgcagcagcaccagcagtgagcgaggaaacggctcggcggctgacatgacgtaccagcaccgagtcccctacaggcccacggctccgctgcgtggaccgggcgtagcggaaagcggcgcagggaggggaaggcgtttcggctgttttctctttctttttgcctctttttcacctgctgatgaattgaatgaggtgtatatcgctggcgctgcctgccgttcagatgcgcattttctactaggtagtaccagggaagcaaagagccaaagagcagtggagatccagcagccgcgcctctcctttattttcttgtaatgttctggcatttccaagctagaaatcgtagaattccaatttccaagccgttttgtaatggagctttggagctgaggttttccatgggggtttctgtc

SEQ ID NO: 112048 - DNA, 456 bp, Zea Mays
atgtgtttgaaattagctaacacaatagcggcctacacataccacatcaacagccttctggaaacatccggttgcctttgtaaagaactcattagctattgcattgtctggagtgaagaatccatgagaggtctgagcatttcccaagcaccagagtgcatcggacttgttgggatcaatttgaagtgcctcctccagtttggcttccgcatcttcaagaagcttgaggctgtcggggccggttcggacctgcgacagctccagcagcgcgccgccccaccgcgtcaggttgtcggcgtcgttggggttctgctcgtacgcgacctcggagttcttgcaggccatctcgaagaagaacagccgctcagcgtcgctcatccctcccatctccatggcggccggggtggggttccgcgctccggcggccggatccgattcggggggttagggttttag

SEQ ID NO: 112049 - DNA, 104 bp, Zea Mays
aaattaaaatgactgcatgtacatcatatatagagaggtgttatttagagttagcatgcaagaagaaaacccataacatgtaaacaactttaatagtacctagc

SEQ ID NO: 112050 - DNA, 3024 bp, Zea Mays
aagagctctcgatctagggattcccttcccgggtctcgttgctctcctcgtccaaatccccaggccagcctagcggcgcagcctgcacgcccccgccccccggaccatggccgaagaccacctctcctccgcgccgtccgccccatcggcggcggcggccgcggccgcggcggcggtcgggtcctcggtgatcccaatcgtcaacaagctgcaggacatcttcgcgcagctggggagcagctccacgatcgacctgccgcaggtggccgtggtcgggagccagagcagcggcaagtccagcgtcctcgaggcgctcgtcggccgcgacttcctcccgcggggctccgacatctgcacgcgccgccccctcgtgctccagctcgtgcaccagccgcgccgccccgccgacgcagaggccgatgagtggggcgagttcctgcacctctcggggcgtcgcttctacgacttccgcgaaatccgacgcgagatccaggctgaaacagatcgtgaggcaggtggtaacaaaggtgtatcggataggcagatacggttgaagatcttttctccgaatgtccttaacattactttagtcgatttgcctggaatcactaaggtgccagttggtgaccagccaactgatattgaagccagaataaggactatgataatgtcatacatcaggcacaagacatgcatcatcttagctgtttcgccagcaaatgcagatttagcaaactctgatgctcttcaaatggctcgggttgctgatcctgatggttctcgaacaattggtgttatcacaaagttggacataatggacaggggcactgatgcccggaactttctgctgggaaatgtgatccccttaaagcttggctatgttggtgtcgtcaaccgcagccagcaggatatcaactctgacctcagtatcaaggatgctctggctcgtgaagaaaaattcttccgtactcagccagcatatcatggtattgctcagtactgtgggataccacaattagcaaagaagctaaaccagatcctggtccaacatataaaaacagttttgccggggcttaagtcacgcataagcagtcagttgactgctgttgctaaggagcttgctgtgtatggtgatcctgttgattcaaaggctggccaaggtgctaagcttttgaacatactagctaaatactgtgaagctttctcctcaatggtggaaggaaaaaatgaagatatatcgacaattgaactctctggtggagcaaggatccattacattttccagtctatctttgtcaaaagtttagaggaggttgatccttgtgaggatgttacagatgaagatatccgcatggctattcaaaatgcaactggtcctagaagtgctctgtttgtacctgaagttccatttgaagtccttgtacgtaggcagatcagcagattgcttgatccaagtcttcagtgtgcacaattcatatatgatgaacttgtaaagatgagccatcgctgccttgcaatggagttgcagcagtttcctatactccgcagaagcatggatgaagtcattgggaagtttttgcgggatggacttaagccagcagaaaatatgatagcacacattattgagatggaggaagattacataaacacgtcacacccaaattttattggtggcagcaaggctgttgagcaagcacagcagcaagttaggtctgccaaaatgtcagcagcggtggtaagaaaggacggagtggatgcacaggcttctgagaaaactcaaaaatcacgcgcgatcttgggtagaagtggtgtaaatggagtagttactgaccacatccagggggtacggcctgctgctgaggcagagagaccaggatcttctggtagtggaagcacatctttctggaatcaaatatttacttccaatgaggaccgaacacatcctcctgcaagagataacacaacaaacaaatcttatgctgtgcctgcacccaatctggaacattcattctccacgatacagttaagagagccaccagtcgtcctgaagccttcagaacaccagtctgagcaggaggcgcttgaaatagcgatcacaaagttgctattgaagtcatattacaatattgtcaggaaaaatgtggaggacttaataccaaaagcagttatgcatttcttggttaatcatacaaaaagggcgctgcataattaccttataacaaaactttatagagatgatcttttggaagacttgctcaaagaacctgatgagataaccataaagaggaagcagatacgtgaaaatctcaaggtccttcaacaagcttacaaaactttggacgagataccacttgacgcagaggcagtagagaggggtggatactccctggattctgatgcgattggtctgccaagggcccatgggctttcttcatccctccacggattcaacgatggaagctcaccatattcaaccccgaagcagtcaaggtcaaggaggtcaaaccattctggcgagcagcttcctttcaaccccaatatgagtggcaatggtttttgatgccaccctcctacgttacaagacggccaaccagattggttatggaaccaaccaaatgtgcagcaagcacaccttattcaagtttgttggcaccaatagatatatgttatttctagttaaattctttgtagcgctgcgccgatgaagcctaacatggtgcgagttttgttgtttcgccttttgtacagtatatatctttgcccagtcatttcgtcatgatatgatatcaagtgatgggtatagttttgttcggacccagggaaagcaatgggaaaaaaatctactaggtgtgtagcagtacccagcgtctgagtgactgttacggatttgccttgcaaaatagacatggctggtatggcggcggcaaaaacaaaatgtggcataaaattgatctcgttttcttaatgttttcatttgatttgatagccctttgttaataattatgcatttgtaaatcagcatta

SEQ ID NO: 112051 - DNA, 2722 bp, Zea Mays
gatctagggattcccttcccgggtctcgttgctctcctcgtccaaatccccaggccagcctagcggcgcagcctgcacgcccccgccccccggaccatggccgaagaccacctctcctccgcgccgtccgccccatcggcggcggcggccgcggccgcggcggcggtcgggtcctcggtgatcccaatcgtcaacaagctgcaggacatcttcgcgcagctggggagcagctccacgatcgacctgccgcaggtggccgtggtcgggagccagagcagcggcaagtccagcgtcctcgaggcgctcgtcggccgcgacttcctcccgcggggctccgacatctgcacgcgccgccccctcgtgctccagctcgtgcaccagccgcgccgccccgccgacgcagaggccgatgagtggggcgagttcctgcacctctcggggcgtcgcttctacgacttccgcgaaatccgacgcgagatccaggctgaaacagatcgtgaggcaggtggtaacaaaggtgtatcggataggcagatacggttgaagatcttttctccgaatgtccttaacattactttagtcgatttgcctggaatcactaaggtgccagttggtgaccagccaactgatattgaagccagaataaggactatgataatgtcatacatcaggcacaagacatgcatcatcttagctgtttcgccagcaaatgcagatttagcaaactctgatgctcttcaaatggctcgggttgctgatcctgatggttctcgaacaattggtgttatcacaaagttggacataatggacaggggcactgatgcccggaactttctgctgggaaatgtgatccccttaaagcttggctatgttggtgtcgtcaaccgcagccagcaggatatcaactctgacctcagtatcaaggatgctctggctcgtgaagaaaaattcttccgtactcagccagcatatcatggtattgctcagtactgtgggataccacaattagcaaagaagctaaaccaggtatggtccaacatataaaaacagttttgccggggcttaagtcacgcataagcagtcagttgactgctgttgctaaggagcttgctgtgtatggtgatcctgttgattcaaaggctggccaaggtgctaagcttttgaacatactagctaaatactgtgaagctttctcctcaatggtggaaggaaaaaatgaagatatatcgacaattgaactctctggtggagcaaggatccattacattttccagtctatctttgtcaaaagtttagaggaggttgatccttgtgaggatgttacagatgaagatatccgcatggctattcaaaatgcaactggtcctagaagtgctctgtttgtacctgaagttccatttgaagtccttgtacgtaggcagatcagcagattgcttgatccaagtcttcagtgtgcacaattcatatatgatgaacttgtaaagatgagccatcgctgccttgcaatggagttgcagcagtttcctatactccgcagaagcatggatgaagtcattgggaagtttttgcgggatggacttaagccagcagaaaatatgatagcacacattattgagatggaggaagattacataaacacgtcacacccaaattttattggtggcagcaaggctgttgagcaagcacagcagcaagttaggtctgccaaaatgtcagcagcggtggtaagaaaggacggagtggatgcacaggcttctgagaaaactcaaaaatcacgcgcgatcttgggtagaagtggtgtaaatggagtagttactgaccacatccagggggtacggcctgctgctgaggcagagagaccaggatcttctggtagtggaagcacatctttctggaatcaaatatttacttccaatgaggaccgaacacatcctcctgcaagagataacacaacaaacaaatcttatgctgtgcctgcacccaatctggaacattcattctccacgatacagttaagagagccaccagtcgtcctgaagccttcagaacaccagtctgagcaggaggcgcttgaaatagcgatcacaaagttgctattgaagtcatattacaatattgtcaggaaaaatgtggaggacttaataccaaaagcagttatgcatttcttggttaatcatacaaaaagggcgctgcataattaccttataacaaaactttatagagatgatcttttggaagacttgctcaaagaacctgatgagataaccataaagaggaagcagatacgtgaaaatctcaaggtccttcaacaagcttacaaaactttggacgagataccacttgacgcagaggcagtagagaggggtggatactccctggattctgatgcgattggtctgccaagggcccatgggctttcttcatccctccacggattcaacgatggaagctcaccatattcaaccccgaagcagtcaaggtcaaggaggtcaaaccattctggcgagcagcttcctttcaaccccaatatgagtggcaatggtttttgatgccaccctcctacgttacaagacggccaaccagattggttatggaaccaaccaaatgtgcagcaagcacaccttattcaagtttgttggcaccaatagatatatgttatttctagttaaattctttgtagcgctgcgccgatgaagcctaacatggtgcgagttttgttgtt

SEQ ID NO: 112052 - DNA, 789 bp, Zea Mays
atgatgacccatcagatgacaggacgcactccaccaccaaaccgaggaagacgacgctcagccgctcaggaatcgaaggagcgacgaagctaaaggagggcgcatctaagccgaattgaagcatgagggaatcgattaatcgtccgcctacgccgagcgcggtggaggatcgggacaaggagccttctctcgtagaaatcattaacatcaagtttgtagagagtggagagaaggagaagctgacggagctcctccgcgagcggctcgtcgagtgcggctggatggatgagatgaaggcattctgcagggactatgtaaggaagaaaggaagaaataatgtgagggtagatgacctcattcatgttattgttccgaaaggaagagcatcagtgcctgcttcggtgaaggcagaactcctgcaacgtatccggtccttcatggctaccacacttcggtagtcatttatcgtgacggttggagctacatgtaccattgtacgaacactgggaggtcgatcttgttggggaccaagggtgcaggtactgagcatgaaaaggatcagtgtgatcttcatgatgctatcgacatgttcctcgtcagacaggcggttggcgtgatttcaggtgtagcaacacggagttataaccctgaatactgtaccgttaaaggaaccttgtagtttgtaatgctacattgccttatcattgtatcaacagatgctttatttcacaattagaaaacagaaacacaatcttgatataaatgactacactaatgtgcatcatgtga

SEQ ID NO: 112053 - DNA, 871 bp, Zea Mays
atgatgacccatcagatgacaggacgcactccaccaccaaaccgaggaagacgacgctcagccgctcaggaatcgaaggagcgacgaagctaaaggagggcgcatctaagccgaattgaagcatgtaagcgagccaatctcatccgctgctgctcgtatgcgcactctttgtctgtgacccgaccccgtcctcaccaaattgctctgagggaatcgattaatcgtccgcctacgccgagcgcggtggaggatcgggacaaggagccttctctcgtagaaatcattaacatcaagtttgtagagagtggagagaaggagaagctgacggagctcctccgcgagcggctcgtcgagtgcggctggatggatgagatgaaggcattctgcagggactatgtaaggaagaaaggaagaaataatgtgagggtagatgacctcattcatgttattgttccgaaaggaagagcatcagtgcctgcttcggtgaaggcagaactcctgcaacgtatccggtccttcatggctaccacacttcggtagtcatttatcgtgacggttggagctacatgtaccattgtacgaacactgggaggtcgatcttgttggggaccaagggtgcaggtactgagcatgaaaaggatcagtgtgatcttcatgatgctatcgacatgttcctcgtcagacaggcggttggcgtgatttcaggtgtagcaacacggagttataaccctgaatactgtaccgttaaaggaaccttgtagtttgtaatgctacattgccttatcattgtatcaacagatgctttatttcacaattagaaaacagaaacacaatcttgatataaatgactacactaatgtgcatcatgtga

SEQ ID NO: 112054 - DNA, 855 bp, Zea Mays
atgggagaggagcaagaaggaagggaagagatttaccgatccgccagagtccactattttgcccatttggcaaccctgctgtgtaattctattggaggtttttcgcataattcaggagaccactacaatgaacccttcatgaatgtggactcaagtgatgctgaaaaccctgggaaacaacctgtgattgatgcaagcattgtgtatgatccttggacaatggaaccgcgggggtttggttttgtcaccatggctgctactaaggaggcagatcactacatcaaatatctggactgttctgtgttgcaaggtcaggtcataattgttaagaagtactctacacagaacattttattgttttgtcttcaccaccgagaatccgagatcgcctcccatagcctccacatccacaaggtcctgcttgactgcgacgacgtccaggccgatgccctcatcgtggatcgactcgcctcgctctagaaggagtggcccctctggagttgaatatgcagttataaccaatttttaccccttttatcctagaagagttgccaagacgcggtataagaccatgataatagactaagagaggatttggctctaattactatctattttatttatggagtcccatgagaacttcgagtatttatagattgctttattaatttattaaagttaaagattgtatgtgttgagtatgtatccactcttgttggaagtgtcttgcaattctaatccaaggatgtataaaagactgcatgggctaagtatgtgtttttcatgtatttggagtatatatactttttgttgcttgaggacatgtatgtacactagaagcttgtcaattgtgtg

SEQ ID NO: 112055 - DNA, 1972 bp, Zea Mays
ctctctgccagctccagcttcttccaccgcggggccacacccacaccacaccacgacctccgcgacgctcgcggccgtgtttctctcgcctcgctccctcggatcgcccgttcgcccccgcccatcgctcgctcatcagaaggagggcctagccttccgcagcagcgctcgtcagactccgccgcccgcaattccccccttgccccggcttttaatgggctttccctcccaccgaaatggccggcgatccctgcacccgcgccgccggtgaccgccccacctcctccgtcgccttcttctccgccgggggcgggctcggcctcggcccctccagcctgctgctccacctgctcctcctccactccctcttatagcctccagcctcccctcgcctcccgccaccccctatggccgccgttttcttccaccacgtcgtcggcgacctcaccgtcggcaagcccgaggtcgccgagctgcacgacaccgacacgctcgacgacgccgcgcgcgccatcgccgccagccccgagggcgccgtgcccgtctggcgccccagggccgcgccggacgacccgccctcgggggccaggttcatcggcatgatctccgcgctcgacatcgctgccttcgtcgcctccgcgggggtcggggatcgctccatgcgcgccgtcgtcggcgaggtcgtgcagcccaatcctgcgctgctcagggagatcgatccgggtaccaggttgatcgatgctctggaactgatgaggcatggagtgaagcgctttcttgttcgcaagagtgggagctggaaaggcattaccaagagattttcagtgctttataatggtaagtggctgaagaacatggaatcaacatctccaagtgcagccagcagcagcagcacgcagctatccccacgttctggttctgcagaaaagttctgctgcctatcaagggaagatgttctccggtttctcattggatgccttggtgctcttgctcccatcccgctgactcagatatcttcccttggagccatcaatccgcagtacagttacgtggaagcatctgcgcctgcgatggaagcaattcagaagatccctcaagacccatgcgccgttgctgtagtggagacgatgccagatggaactcgtagcatactaggagacatctctacttacaagctgtggaaatgtgactatgtttcagctgcatgggcactggcaaacctgtcagctgggcagtttgtcatcggtgccgacgagaatgggtcaacacccatctcagtcttcccagagcctcccatcagcccatcgtcaccggtggaggagatcagtcctgggcgctcgccaagggcgaagaagttcagcagcaggagcatcgggtttctgaacaacacccagatgtcagcgtggcggacacggagcatgtaccaccggggcaggagcaccccactgatgtgcaagaccacaagcaccctcgcggccgtcatggcgcagatgttgtcccatcgggccacacacgtctgggtgacggacgcagagtcggaggaggacggcgtcgtcgtcggcgtggtgggctacaccgagatcttcaatgccgccaccaggagcacctgcccaagtccgacagcatcttgatgcaccacatcgtgctgtacagtatactgctgttggttgatccgttggtgccccggtgcacgctgttgcactgaactgtacaatgtactttgctcatttgttggtttgtctggagagtttttagtcttttagatattcttggtctgcatggagcaggacttggtggtatattgttgcattcgttgtggacggtacgaataagaattcgggtttgcctcggagtctagtccattttgcatgctcgcctgcagcagtgcagctgtcgatgtactctatgactgtatatggaaatggaatgttctctgtttcctttcacatgcttgcagccttgcctgagagtc

SEQ ID NO: 112056 - DNA, 1828 bp, Zea Mays
ggccacacccacaccacaccacgacctccgcgacgctcgcggccgtgtttctctcgcctcgctccctcggatcgcccgttcgcccccgcccatcgctcgctcatcagaaggagggcctagccttccgcagcagcgctcgtcagactccgccgcccgcaattccccccttgccccggcttttaatgggctttccctcccaccgaaatggccggcgatccctgcacccgcgccgccggtgaccgccccacctcctccgtcgccttcttctccgccgggggcgggctcggcctcggcccctccagcctgctgctccacctgctcctcctccactccctcttatagcctccagcctcccctcgcctcccgccaccccctatggccgccgttttcttccaccacgtcgtcggcgacctcaccgtcggcaagcccgaggtcgccgagctgcacgacaccgacacgctcgacgacgccgcgcgcgccatcgccgccagccccgagggcgccgtgcccgtctggcgccccagggccgcgccggacgacccgccctcgggggccaggttcatcggcatgatctccgcgctcgacatcgctgccttcgtcgcctccgcgggggtcggggatcgctccatgcgcgccgtcgtcggcgaggtcgtgcagcccaatcctgcgctgctcagggagatcgatccgggtaccaggttgatcgatgctctggaactgatgaggcatggagtgaagcgctttcttgttcgcaagagtgggagctggaaaggcattaccaagagattttcagtgctttataatgaaaagttctgctgcctatcaagggaagatgttctccggtttctcattggatgccttggtgctcttgctcccatcccgctgactcagatatcttcccttggagccatcaatccgcagtacagttacgtggaagcatctgcgcctgcgatggaagcaattcagaagatccctcaagacccatgcgccgttgctgtagtggagacgatgccagatggaactcgtagcatactaggagacatctctacttacaagctgtggaaatgtgactatgtttcagctgcatgggcactggcaaacctgtcagctgggcagtttgtcatcggtgccgacgagaatgggtcaacacccatctcagtcttcccagagcctcccatcagcccatcgtcaccggtggaggagatcagtcctgggcgctcgccaagggcgaagaagttcagcagcaggagcatcgggtttctgaacaacacccagatgtcagcgtggcggacacggagcatgtaccaccggggcaggagcaccccactgatgtgcaagaccacaagcaccctcgcggccgtcatggcgcagatgttgtcccatcgggccacacacgtctgggtgacggacgcagagtcggaggaggacggcgtcgtcgtcggcgtggtgggctacaccgagatcttcaatgccgccaccaggagcacctgcccaagtccgacagcatcttgatgcaccacatcgtgctgtacagtatactgctgttggttgatccgttggtgccccggtgcacgctgttgcactgaactgtacaatgtactttgctcatttgttggtttgtctggagagtttttagtcttttagatattcttggtctgcatggagcaggacttggtggtatattgttgcattcgttgtggacggtacgaataagaattcgggtttgcctcggagtctagtccattttgcatgctcgcctgcagcagtgcagctgtcgatgtactctatgactgtatatggaaatggaatgttctctgtttcctttcac

SEQ ID NO: 112057 - DNA, 1747 bp, Zea Mays
ccagcagtgtccgcagcagcggtggtggcgagacgagaggccgctaaaacccaagcgcggcccgagccgaacctgaacctgaggtggagagatcgcacgcgccctctgccgcttgttcgttcctcgcgcttgccaccaggcaccaccacacacatcccaatctcgcgagggcaagcagcagggtctgcggcggcggcggcggcggcggcagcgcttccggctcccctttcccattggcctccacgatggcgctccgcctcaacgacgtcgcgctctgcctctccccgccgctcgccgcccgccgccgccgcagccgcagccgcagcagcggcaggttcgtcgccgtcgcctccatgacgtccgccgtctccaccaaggtcgagaataagaagccatttgctcctccaagggaggtacatgtccaggttacacattcaatgccacctcacaagattgaaattttcaagtcacttgatgattgggctagagataatatcttgacacatctcaagccagtcgagaagtgttggcagccacaggatttcctccctgacccagcatctgaaggatttcatgatgaagttaaggagctcagagaacgtgccaaggaaatccctgatgattattttgtttgtttggtgggagacatgattaccgaggaagctctaccaacataccagactatgcttaacaccctcgatggtgtcagagatgagacaggtgcaagccccactgcctgggctgtttggacgagggcatggactgctgaggagaacaggcatggtgatctgctcaacaagtatatgtacctcactgggagggtggatatgaggcagattgagaagacaattcagtatcttattggctctggaatggatcctaggactgagaataatccttatcttggtttcatctacacctccttccaagagcgggcgaccttcatctcacacgggaacactgctcgtcacgccaaggactttggcgacttaaagcttgcacaaatctgcggcatcattgcctcggatgagaagcgacatgaaactgcgtacaccaagatcgtggagaagctgtttgagatcgaccctgatggtaccgtggtcgctctggctgacatgatgaggaagaagatctcaatgcctgcccacctgatgtttgacgggcaggacgacaagctgttcgagcacttctccatggtcgcgcagaggcttggcgtttacactgccagggactacgccgacatcctcgagttcctcgtcgacaggtggaaggtggtgaacctgactggtctgtcgggtgaagggaacaaggcgcaggactacctttgcacccttgcttcaaggatcaggaggctggaggagagggcccagagcagagccaagaaagcaggcacgctgcctttcagctgggtatacggtagggacgtccaactgtgagatcggaaacctgctgcggactgcttagacaagacctgctgtgtctgcgttacatagttctccaggttttgaccagatggtcccgtgtcgtcttatagagcgataggagaacgtgttggtctgtggtgtagctttgttttttatttttatttttctgttttgatgtacaacctgtggccgcatgaactggggcgtggagatgggagcgaccatgccgttctttgtctgtcgctggcggtgtgtttcggtatgttatttcagtcgttcagatctgttaaaaattttgtgagctatgcagttcagttcagctc

SEQ ID NO: 112058 - DNA, 1073 bp, Zea Mays
tggtgttgaattgcaatgcaggtaaacgcttacccagtatatggggacaaagggaaggcaaaagatccattctttggcctgacgatgggatcaggatctcaatcttcatatgatattttcagatggttctgtgtggaggctgggagctcttctagtcctaaagtgcttttaattcacggcttgccatcgcaggcatactcttaccgcaatgtgatgcctgtactggcggacaaatatcatgccattgcttttgattggctcgggtttggattttctgataagcctcaaccaaaatatggttttgactatacacttgatgagtatacttcatccttggaatttctagtcaatgctgttgctcctgataagctctctattgttgttcagggctactttgctccggttgcagtcaaatatgctagtgaacaccaagacaaattgaatcatcttgtactagtgaatccaccaataaccgataaacatttgaaccttccatccaccctggcttcgttcagcaacttcttgttgggtgagatattttctcaggatcctctcagagctagtgataaggtattgactagttgtggtccatacatgatgaaggaagaagatgctatggtgtatagaaggccataccttgtctctggttcctcggggtttgcacttaatgcaataagcaaagctatgaaaaaggaccttaaggcttatattgaatccatgagaagcatattaagaagcagttcgtggaaaacaaagacaacagtatgctggggcatgagagatcgttggctaagctatgatggggtggaagaattttttggaggcctaaaccagaagattgtagaactgccaatggcggggcaccatgtgcaggaggaccgtggtgaagaattaggcaatataatcaaaagtatactgaggtaatgttgttggagtctttttctaatcttgtctcttagttttctccttgtatacattaccatatgagcaaacttttgttggcttgtatgccataatcaagtgtgcgtgtcacacattcatttgaataagagaatgaaataagcattcttctt

SEQ ID NO: 112059 - DNA, 1146 bp, Zea Mays
tggtgttgaattgcaatgcaggtaaacgcttacccagtatatggggacaaagggaaggcaaaagatccattctttggcctgacgatgggatcaggatctcaatcttcatatgatattttcagatggttctgtgtggaggctgggagctcttctagtcctaaagtgcttttaattcacggcttgccatcgcaggcatactcttaccgcaatgtgatgcctgtactggcggacaaatatcatgccattgcttttgattggctcgggtttggattttctgataagcctcaaccaaaatatggttttgactatacacttgatgagtatacttcatccttggaatttctagtcaatgctgttgctcctgataagctctctattgttgttcagggctactttgctccggttgcagtcaaatatgctagtgaacaccaagacaaattgaatcatcttgtactagtgaatccaccaataaccgataaacatttgaaccttccatccaccctggcttcgttcagcaacttcttgttgggtgagatattttctcaggatcctctcagagctagtgataaggtattgactagttgtggtccatacatgatgaaggaagaagatgctatggtgtatagaaggccataccttgtctctggttcctcggggtttgcacttaatgcaataagcaaagctatgaaaaaggaccttaaggcttatattgaatccatgagaagcatattaagaagcagttcgtggaaaacaaagacaacagtatgctggggcatgagagatcgttggctaagctatgatggggtggaagaattttttggaggcctaaaccagaagattgtagaactgccaatggcggggcaccatgtgcaggaggaccgtggtgaagaattaggcaatataatcaaaagtatactgagatgatgactgcggatcgcgtgcagggggtgaggctctagagcgtgccaagaaccagatgctttacgaggggtcaaaatgtggcgaagcaataggatacgaaaaattgagtatgatgcacggggcaatccgctctatgcatcgatttttatcaagagaacgccaccctgaactcaagcggcgatgtggaacattttcagacaacaacaattgattgacgaccttgcg

SEQ ID NO: 112060 - DNA, 77 bp, Zea Mays
ccggttaagattctacacgggaaatttgctattttatcactgtctcggatttctctattttaccatcagacccacaa

SEQ ID NO: 112061 - DNA, 474 bp, Zea Mays
caacgaaagaagaattacgcccaaatggcttctcaaagactcaagctccgcttcaaccaaaaaggactaaaacatcacacctttctaccgctttccccaattccccaaccactaaacatatgggtcgacagagatccccggaattccatccaaaaaccttgtatcccgcccagatatcgtctaaaaccccccgaatcggagatgattccagaagggttagacccagtcgcaccgcatgaagggaaaaccaagaggagggaacacctgctgtcctggtggtgctcgccgccggcaaagtgtgtgcgtgtgggtgggtgggggtggagctcggccgcggggggagaggatgcggccgccgccctctacggatggatcgggactcgggagcatgaagggaagaaagaaaatagaaagagtataggccgaccgatgggcctacgtgtcagtgtgtcacatgtttctgttaacagataa

SEQ ID NO: 112062 - DNA, 3537 bp, Zea Mays
atggcggggaacgagtggatcaatgggtacctggaggcgatcctcgacagccgcacctcgtcgggcggcggcggaggcggcggcggcggggacccaaggtcgccggtggcgggggcgtcgccgacgaagggggcgagcccccgcggcccgcacatgaacttcaacccctcgcactacttcgtcgaggaggtggtcaagggcgtcgacgagagcgacctccaccggacgtggatcaaggtcgtagccacgcgcaacgcccgggagcgcagcaccaggctcgagaacatgtgctggcggatctggcacctcgcgcgcaagaagaaacagcttgatggtgaagtgacgatagatcaagcatgcatggttggttgtggtgctttcagaattcagaaccccacacttaactgtgatgtcacatctaaaaagaaactttttgctgatctgcagtgtttcattgctgttcatataaagctggagttggagggcatccagagaatctcggcacgccggaaggaacaggagcaggtgcgtcgtgaggcgacggaggacctggccgacgatctgtcagaaggcgagaaaggggacaccctcgctgagcttgtgccggttgaggcggccaagaagaagttccagaggaacttctctgaccttaccgtctggtctgacgacaataatgagaagaagctttacattgtgctcatcagtgttcatggtcttgttcgtggcgaaaacatggaactaggtcgtgattctgacaccggtggccaggtgaaatatgttgtcgaacttgcaagagcaatgtcaatgatgcctggagtgtacagggtggacctcttcactcgtcaagtgtcatctcctgacgtggactggagctatggtgagccgaccgagatgttatgctccggttccaacgatggagaggggatgggtgagagtgccggagcctacattgtgcgcataccgtgtggaccacgggataaatacctcaagaaggaagcactgtggccttacctccaagagtttgtcgatggagctcttgcgcatatccttaacatgtccaaggctctgggagaacaggttggaaatgggaggccagtactgccttacgtgatacatggacactatgccgacgctggagatgttgctgctctcctttccggtgcgctcaatgtacccatggtgctcactggtcactcacttgggaggaacaagctggagcaactcctgaagcaagggcgcatgtccaaggaggagatcgattcaacatacaagatcatgaggcgtatcgagggtgaggagctggccctggatgcgtcagagcttgtcatcaccagcacaaggcaggagattgatgaacagtggggattgtacgacggatttgatgtcaagcttgagaaagtgttgagggcacgggcgaggcgtggggttagctgccatggtcgtttcatgcctaggatggtggtgattcctccaggaatggatttcagcaatgttgtggttcatgaagacattgatggggatggtgacagcaaagatgatatcgttggtttggagggtgcttcaccgaagtcaatgcccccaatttgggccgaggtgatgcggttcctaaccaatcctcacaagccgatgatcctggcgctgtcgaggccagacccgaagaagaacatcactaccctcgtcaaagcctttggagagtgccccccactcagggaacttgcaaaccttactctaatcatgggaaacagagatgacatcgacgatatgtctgctggcaatgccagtgtcctcaccacagttctgaagctgatagacaagtatgatctgtatggaagcgtagcgtttcctaagcatcacaatcaggctgatgtcccggagatctaccgcctcgcggccaaaatgaagggtgtcttcatcaaccctgctctcgttgagccgttcggtctcaccctgatcgaggctgcagcacacggacttccaatagtcgctaccaagaatggtggtccggtcgacattacaactgcactgagcaacggactgctcgttgacccgcacgaccagaacgccatcgctcaagcactgctgaagctcgtagcagataagaacctgtggcaggaatgccggagaaacgggctgcgaaacatccacctttactcatggccggagcactgccgcacttacctcaccagggttgctgggtgccggttaaggaacccgaggtggctgaaggacacaccagcagatgccggagctgatgaggaggagttcctggaggattccatggacgctcaggacctgtcactccgtctgtccatcgacggtgagaagagctcgctgaacaccaacgacccattgtcgtcggacccgcaggatcaggtgcagaagatcatgaacaagatcaatcagtcgtcagcacttccgccgtccatgtcctcagtcgcagacggtgccaagaacgcaaccgaggccacgggcagcaccttgaacaagtacccactcctgcgccggcgccggcgcctgttcgtcatcgccgtggactgctaccaagacgacggccgtgctagcaagaagatgctgcaggtgatccaggaagttttcagagcagtccgatcggactcccagatgtccaagatctcagggttcgcgctgtccactgcgatgccgttgtccgaaacactccagcttctgcagctcggcaagatcccagcgaccgacttcgacaccctcatctgtggcagtggcagcgaggtctactatcctggcacagtgaactgcgtcgacgctgaaggaaagctgcgcccagaccaggactatctgatgcacatcagccaccgctggtcccatgacggcgcgaagcagaccatagcgaagctcatggccactcaggacggttcaggcgacactgtcgagctggacccggcgtctagtaatgcacactgcttcacgttccttatcaaagatcccaaaaaggtgaaaacggtcgatgagatgagggagaggctgaggatgcgtggtctccggtgccacatcatgtactgcaggaactcgacaaggcttcaggttgtccctctgctagcatcaaggtcacaggcactcaggtatctttttgtgcgctggggcctatatgtggggaacatgtatctgatcactggggaacatggcgacaccgatcatgaggagatgctatctggattacacaagactgtgatcgtccggggtgtcaccgagaaaggttcggaagggctgctgaggagcccaggaagctacaagaaggacgacgtcgtgccgtctgagacccccttggctgcgtacacgactggtgagatgaaggccgatgagatcatgcgagctctgaaacaagtctccaagacttccagcggcatgtgaattagctgctgggaaaggtcgatctctaatatattcttcttgttcataactcaaacggcagacacattttctccttttcttcactagtactacataaataacttgtgaacagtaccgagggtgtatatattgcagtgacaaataactaggaca

SEQ ID NO: 112063 - DNA, 201 bp, Zea Mays
atgacgctgctgggcgtggtcctgctgctggggctgctgcagctgagccagcacgcggcgcccgtcggcgccgacgagagcgccgcccccaccaagaaaaatactagcttcagtttccacaacaccgccggcggccgcactctcagcagcttcagcgtcaacggcgcctacagcaagaagcccgtcggcaagggcaactga

SEQ ID NO: 112064 - DNA, 435 bp, Zea Mays
atgcctggcagcacagcgtgcgtgacccacgtgacgccctcgacgttgactagatcagggtgcgcatcagctcctcgtccacctcatggaagtagcgcgcgtacggataagacaacccgtcgggaccctggatggagtcttgagtgccttgacgtcggccatgagccctttgatatccttgtcggaggtgcgggcgtcgaggaggaggtgaaggacgaaggtgagggaggagaccaaggggggtctatcgcgatggggcaggggcaacacgcgggggtaggcgcaaatgggggaccaagtggagggaggcgaggatggtgggtgtttggagcgggcacgcatgaagcgaggagcgcgggatatgcgggggtgcatggagcgtggggtttgtggggcttgcagctgtcgatggcacggagaggggcatcgatatag

SEQ ID NO: 112065 - DNA, 1537 bp, Zea Mays
gtgtctagacagcgaaagggacggcagagggaggagagggctcaaaccgcctgcctgctgccctgcaccccgcgcccaccccacttcttccacttccaccacctcctcccctccagtccccctctccacctgccccccgctccctggtccggcgcggagaaccagccagccagcccgtcgtcgctgtcgcccgccggtgaagcagtagccgcgcgtgacgccggatccaatccgcggccctcgccgcgcgcgcggtcatggacttcgacggcgccattggcgatcagggtgagctgtgggaatggcaaagtcaggagtatggtctgcagaaagatttgttagctgctccatgtagcagcttgtgggctgaagcacccaacaatatgggtgatgattggagcatgtttgatgagcaaacaccaattaaacattgtacagacttcgaatttcagttctgtgatataggagatatcatcgtcaaggagtttgaagaagggaaggaaactttgcaggcaaagcgcagacgcatgttgcagttctgtccagaaaatgttgagatgacacgttctatgactgaagaggggcttttggaaagtcttcaggagatggatttttcaggtaccaactgtttactgaactctgacgggactgatgaactgccagaagaatggctagtcgattgctcacaagacaccgagcctggttttccggcagaagaaatgaatagccctgctgctgccacggaaaaagatgttgatacgtctgcacatcagaatgcttcgcctagtcaacagtctatcgtagtcaacaacaatcgtgcacaggctagacctacaccgctgaaagctggcaagagcatcatcggggcaaagaaggcgaggacatccgtggccttccctttcgagctcatcaagccgagcagcatccgcggcgacgtcaccctgagcgacataaacgagaagctccacgcgcccccgccgtacaagatcaggcacaagagcgacgaggagcccagctcgctccaggcctcggccatctcggggaagcctgtggtccacaagacgaagatccacaccgaggggggcaaggggagcatcacgatcaccagaaccagaggctaagctgaccatttgcggttgtgacacctgcactgcacagtggcggctaatagttcgactggcctttttgcgtttctggtgctctgggctcgtcttcgtccccagttggttttgttggcccaagaggtgcatggccttattagtggagtctagagtgcttatactaggcagcatttactggcttgtgtgggtgggcatctctgcctgtgcttgctgtttgtgggagagatagatattagacgcgtagttgggttgggtgttggatcacgcttgtagtaggggtgtcgcagctgtgctttggttggtttgtgttgttgggaaggcgaagtagtagttggtttagcttgattaattaatatggacatattgatttggtgaggctatataaatccacgggatggaggcttgacggttttttt

SEQ ID NO: 112066 - DNA, 1379 bp, Zea Mays
gtgtctagacagcgaaagggacggcagagggaggagagggctcaaaccgcctgcctgctgccctgcaccccgcgcccaccccacttcttccacttccaccacctcctcccctccagtccccctctccacctgccccccgctccctggtccggcgcggagaaccagccagccagcccgtcgtcgctgtcgcccgccggtgaagcagtagccgcgcgtgacgccggatccaatccgcggccctcgccgcgcgcgcggtcatggacttcgacggcgccattggcgatcaggacttcgaatttcagttctgtgatataggagatatcatcgtcaaggagtttgaagaagggaaggaaactttgcaggcaaagcgcagacgcatgttgcagttctgtccagaaaatgttgagatgacacgttctatgactgaagaggggcttttggaaagtcttcaggagatggatttttcaggtaccaactgtttactgaactctgacgggactgatgaactgccagaagaatggctagtcgattgctcacaagacaccgagcctggttttccggcagaagaaatgaatagccctgctgctgccacggaaaaagatgttgatacgtctgaatgcttcgcctagtcaacagtctatcgtagtcaacaacaatcgtgcacaggctagacctacaccgctgaaagctggcaagagcatcatcggggcaaagaaggcgaggacatccgtggccttccctttcgagctcatcaagccgagcagcatccgcggcgacgtcaccctgagcgacataaacgagaagctccacgcgcccccgccgtacaagatcaggcacaagagcgacgaggagcccagctcgctccaggcctcggccatctcggggaagcctgtggtccacaagacgaagatccacaccgaggggggcaaggggagcatcacgatcaccagaaccagaggctaagctgaccatttgcggttgtgacacctgcactgcacagtggcggctaatagttcgactggcctttttgcgtttctggtgctctgggctcgtcttcgtccccagttggttttgttggcccaagaggtgcatggccttattagtggagtctagagtgcttatactaggcagcatttactggcttgtgtgggtgggcatctctgcctgtgcttgctgtttgtgggagagatagatattagacgcgtagttgggttgggtgttggatcacgcttgtagtaggggtgtcgcagctgtgctttggttggtttgtgttgttgggaaggcgaagtagtagttggtttagcttgattaattaatatggacatattgatttggtgaggctatataaatccacgggatggaggcttgacggttttttt

SEQ ID NO: 112067 - DNA, 1543 bp, Zea Mays
cgcctctcctcccccttccccgcgcgggatccaacccgcccataagacgccaccgccccgcatctgccgccaccttatcacgacccgacctccaaccccgacgccagccagccaggcacgcacgcacgcacctacctgctgcggcggcccagagagatggacggcgggcggccggagatgcggcggaccatgacgctgtccgagcagctgtcgtccacgcccgacccggccatccgcgacttcctcaagatcccccaagacgccgacgtcggcgggatcctccacgacgaagatagcccctcggctgtggacgcgcaggggccccgcgccggcaggacgagcggctggaagccgctgcgggaccggctccggctccggcgcgcggcgggcgcctggcagacgccgcctaataagcccggcgctgccgcggcgcacgccccgaccaacagcggcaatctcagcaacaggtacaactacaaccccggcgaggcggcggcggcgttctcccgcaccttctcccgcgcgccctctctgcgcgcgccgtcactccgcgcgacgcccacgttctcgcgcgtcgcgtccacccgcctcggccccgcctcgtcccgctccagctccaggcgccccgcgacgtacgacttccgcgacgtcgacgagcgacgccacgacgccgacgccgacgacgggggcgaggaagaggacgacgagggcgaggacgacgacgacgagggcgacgaggaggatgagaaggaggaggcgcccgcggcgcagatgtcgctgatggcgctgctggagcagacggacagccagtgggacgacgacgaggacgaggaggagagcggcggcggtggcggcgcgcgcaagaaaggcgagggcgacgacgacgaggacgacggcgagggccgggaggaggagatggtgcacgtgtgctgcgtgtgcatggtgcggcacaagggcgcggccttcatcccctgcggccacaccttctgccgcctctgctcccgcgagctctgggtcagccgcggcaactgcccgctctgcaacggcttcatccaggagatcctcgacatcttctgacggatcgatcgagcttgccgtcgatcaccatcgtctagcttgcttccgcttcatatcctagacgaggatgtgagtggccgatgcgacactccggaatcagtgaaactgaacctctcgtagacgaattcgatttcgagctacccagcaccaaaactctgttgtttgctagattttctttttggggatgtcattgatcgttcaagtacgtatgctaccgtacgttgcaataaaatggtatagtatctacgcaatgtgtgtgtatttccgtattagtacagtatttcagagtggttgttaggttgaccaaccagaaccaagataagattcagaagaactcctgcttctgcatccaactaaccggagcatcttttgtttagctgaggctcataggagccctgtatgattgtaccccacttctcatttttcttagctggaagttgaaactgaactatcagaattattcttc

SEQ ID NO: 112068 - DNA, 737 bp, Zea Mays
ggacgtgaaacctccagccatggccatacccataccacaggtgtgcacccctctcccctcgaacttctctcccccacgctatccctcccagccttccgagagccgtcgtcgtgagtcgctcgcccatgttccttctccccctccggtgctcatgttccttcccccctccggtcccgcctcatcgtccaatgagacctaggcccctgacctccgcggcggcggatcgggggccggcgacggtgcgcgaggctgcggaggcgatagcggctccccctcctccgacgtcgcatctccactctccccatccttcgtcaccgcggccgcgtctcagactgatggccacccattgggtccaacccaaggtgtacccgctgttcgtgacgatgggtgttgctatgggcatatgcggacttcagctctttcggaacatcaccggcaacctggaagtcaggtccggatctacactcttcactccttttgcctattcgattcttgcaagagatgtgctgctccagctagagcaggttcctgagaagtccctgcgaagtaagattgatctgcttcctgctcgtggatgtggtaaatcagcatgccttggtcttgccattgctggagttgtagcaactgggtattcaaatatatttgtcgtcgctccaagtccagagaatttaaaatttttgtttgattttgtgtggaagggaataaatgcattggagtacaaggtgcttttctgctat

SEQ ID NO: 112069 - DNA, 174 bp, Zea Mays
cagttgcatggatatcagtacagtatgagactccttttgattgaaaagaaagaatgggtaacaaacttttaaggactcggtcaagtgatgacgtggagagaggagatattgaagagggagcatgcggcacatctgaatgctatatcagagtatgaaaggcgggaggagaacatg

SEQ ID NO: 112070 - DNA, 1474 bp, Zea Mays
cacagcagtcgagcagaggcagggcggagtggcctctggcacgccgtggccatatcaatatagtagtgctagcgctaggggtagtgtatgccatggtagagtggtagtggcagtggcaccaccactgatacgcctatagtatcccaatccccaatccaccgtctccggctcaccggctggcctttcttcctccctgcactgcacccgacgagagcggtgcgtgtgtgtgtgctgtatggccggacgacggggacactagtgcctactccctgctgcagtgctgcgtctgcgtgcgcgcgtgcggacctaaaacgcgtcctttacgctggagtaaagagcctcgccacctgccctgctatctgctctgcttgctccaccagcaagtcaacaagagccagcgccgggcgcggacccggccggccctcgcgtcgtcgcttcggttcggtttcggctcagctgccgaggctcctcgccgtggaatcagcagcgccatgagcagggagcagccgtcgccggcgccggcgcagcggcggttcatcgccatcccctccttctcctcctccggctgccgctcccactccagcgtcgacgttgtcgacaccgcgcgccacgccggcaacggcaagaagccccacccgcaaggggctgaaacaggggcggtgccaggcggcgcgtcggcggggggcaagggggagtcgctggtggcgcggctcctgcgcggtttcaagaacctgtcccagatcttcgcggtgtacgaggacgaggaggaggaggaggagcgggagatggtgatcgggctccccacggacgtgaagcacgtggcccacatcggatgggacggcagcaccagcaccaccagcagcctccgctcctggaaccgcgccgcgccgcctccaccggcctcgtcgtcgtcgtccgcgcccgccgccgcggcgcccaaggagcaggagcagtacccgctgcccctgccggcgctgtccatgcagcagttcgagctcgccatggccgcccaggccggcggaggcggaggcggggctgcccaccggcgtcacagctagcgtgaggcagagagttggtgggggtcgtcgtcgtcagtcagactcagacagcaggcgtcagtcacaggccgtcgtccgtttctgccgccccactgtgtctcccatgtggagtggagagaaaaagaagggtgggggccggcgggcggacggacggacggcgcgagcgcctggcggcgctgtccgcctgtcctctacctcccgtccgtccgtccgtccgtgctggtcgtcggagttggtgcgtgcttcgtttgcttgtgctttggcgccatcgctgcggaactgcggtgcgctgtacgtagccatttttcaacgaggggggcggggttctccttgttcgcctgctacttgtgtcacttttactgccgttacaaaatcttaattgttacacgctgctccatgccaccgccttctctctc

SEQ ID NO: 112071 - DNA, 3666 bp, Zea Mays
caagagctaaacctagtcactgcatcttttgtgcttaaacgatccctgccatatcataagtgcttgcttgggtccagatgaaaaggttacatcaataactacagcctgaacatgagcagcgttagtttctcattacagtcaccagtacagctacagcaacaaggagcctacattattatatcgacacaagaacaacattccctgaacacccagttccatacatcagcgttgatgccgtcagcattacatgtccttggtgactgtcacaaccagaggtccacattctatcgtttcggccatcttgaggcccttcaccacctccagcatagttggcctcttccatggctcgtccacagtgcagtctcgggcaatggcgagcacatgggccatctgtacccgccacacgcttgagacaggcaaacaaggatcaaacagctcaccttccttgccatgtgccatcatccatcgcacccagcctacaaggtttccacccccttccccttcctcttgccctgtaggtggccgtccagtgagcagctcaagcatgacaacgccaaagctgtagacgtcgccttttgtagaggacttcattgtcagggcatactctggaggtatgtagccaaatgtaccagcaatgtcagtgctgacatgagtctcgcatgcactgattatccttgcaaggccaaaatcagagacccttggctcaaagttctcgtccaatagaatgttgcttgacttcatgtcacggtggatgatatggggcacaaaaccgtgatgcaggaacgaaagaccgcgggcagaaccaatacatatcttcaggcggtctggccatccaagtgtttcgatggcatcagcccggttcctgagccacatctcaaggctcccattttccatgtactcgtatatcaggaacctttcatcaccacatacacagtagccaagtagaggaacaaggttaggatgtttcacctttccaattgtctccatttcggccaggaattcacgatcaccttggaactgatggccaccatgaagccttttgatcgctactctccgaccttcaggaagtgctgccctgtagacagtgccaaacccaccatccccaataatgtgcaccttactgaaattctccgtggctttctggatatcatctgcggtgaccctcagaagtgcatgctcaaatgttgcaagattgatactcaagggttctcgaaacttcttccctaggagctcatcacttgaggttggttcaatggtagccttggccttgctgacaggtacaagagccaagggtctgcttctcaatagcctccgtttcagataaaccaccagaaaaactaagacaatgacaacagtgagtatactaacacaaatgattgctgctcttcgaactctatcagatgaattaagtgccttccgatcaaaaccctttccagtacaaaagccttctgcagcacaatccactaagccgctcatgccaatgtgattaccagagaagtcggcaaatgtgaggccaactatattgcagataccacaaggggcggggccattgaagtcattgcttgagaggtcaagatagtttaaataactgagatcagaaagtgagaagggcaaacttccagtgaggctgttgttgtggatatcaagaaaagacagttgtgtgaagtttgaaatagactcatctaggttccctgagaaatggttactgctcccattgaacaatatcagggagctcgatgcctctttttctttaggacaagacaatgggatttgtccagagaggctgttattgctgatatccagataggttaagtaattgatgcagagtaaagagtcgggtagtgttccagtaagtgcattactggataagtctagcttttcgattttgggaagtatttgacctatctcagcaggaatggagccacttaagtggttattagagagaaaaaggccctgcagttgaaccgacggtacagaccaaggaagtatggggccaactaatgtgttatgagaaagatagatggatgtaacattaggcagttctgaaagctctgcaggtatagcactggacagctggttattggacaagttcaagctgttgagaaatgtcaagtgtgatatggcactcgggatgtggccagacaaattgttagaacttagatccaaggtgacaaggtttctgcagttgaagagctcaagtggaatgttcccagacagcctattgccccatagagagagatttgtcagattccttagagagccgattgaccgcggaataggcccttctaagtagttactgtcgatctgtagcctctgcaaactggagagtctaccgatgctttcaggtatagggccagtaagctgattgtagctgagtgtgatctccagaatagttgatgattcccacaatttctctggcagctttcctgtgaagttgttttgggccaattccactgttactagtggtagctcagacaagtaatgtggtatctcaccatgaagatggtttccttgcaggttaagttccgtaaggttcttgcaccctttaaatgcctccatgatattcccagtcagattgttgttgtgcaacaagagtgactgcagtgatttggcctgacagatctcatcaggaatagaacctgatagcatgttggtttctgcagaaaaaataactagatgctgcaatggcagtactggcaggggtccatcgaacatgttctgcgccagatatattgaacgaaggttcgtccaattccggatccactctggaatgggaccagatagattgttcccttgcacatctaatgtgacaatggcttctaaacctgcaagttctccaggtatagggccagaaaaggagttgccattgagatcaacaaagacaagcttcttgcagttaccaagttctctcggaatattcccagtaagcccagcactccttgcatatagacgagtcagatttcccagcttgccaatagatgccggaagttcagtattgaaatcattccctgaaatatcaagctttctcaaacttctaagatcaccaactgtccaagggatgcctgtgagcttgcatccagggacatcgagctcttccagcagctttagttcaccgatctcttctggaatgcttccattgaaaccattatgtcccaatattatcagttgagcattccgtagctgaccaatctccctaggtagtggccccaccaaagcatttgaagagagatcaactgtaactaggtttgccattgcagttattcctggaaatatcgagccgcagatattattctggctagcatcaaggtgcaagagctgagacagattacccaaagctgatggtatcgacccgttaagtgcgttcatgtgaaggtccaggaactccagattctgcaaactgcccaactctggaggaatggcaccagagatagaatttgaggatacagaaaacttcttgaggtactcaagctgtgcaatagcagggctcaattgaccagaaaagaaattagatgacaagtctatatccactacagcatgttccacacaagttatacctgaccaactgcaaggggctttttctgaatcaaaccagtcacggagaaatcccttcccttcagtgaccatgtccctcagtttgaacaatgtatttatatcattatgtccagt

SEQ ID NO: 112072 - DNA, 2049 bp, Zea Mays
atcatttaaggtgtttgtgcttgatttaatttcttacatttttaaataaaatgagtgattaaagttttcgaaaaaagtcaatagtatcatattgtgaatataaatattttgaataagacgaatgaacagagttagtacttaatagaattgatactcgtaccagcaagtttctgtactttgtttttcctaagtttgtacttctttatcggaagtataaagtataggtgaccgaccagtgtttctttacctttcattttccgtgctcgatttttttagatcgaacaccaggccaggaggaggagcaggcgcggctaaacgcgcgagtgcacgtagcaaaccgcatcgtcgaaagaggagagagaaataataaatatacgacgagggggcatggcccccctctcccttattctattcctccacaccgatcactcgctgctcccctctctcgccggagctccgggccggatggcggcggcagcagcagctcctcccgcctccgtgatcgcgtgatggacgcacacaccgccgcgctccgccgatggacgacgccggaaggccaccaccacacgctcccgtggcggtgaccgcctccgcctccgcctccgccaccgccgcgcccgcccctccccaaccctcagccactgctgccgtcgacaggtcctcccccgaccccgacgcgctctatgaagaggggatgtggcaacaaatggccatggacagcggtgccactatgcaacctgggtcatatcctgagcgaccaggtgaacccgactgcacttactatctcaggactggattgtgtcgatttggcatgagctgccgattcaatcatcctccggataggaatctggctattgcctctgccagaatgaagggagaatatcctgagagagcgggacagccagagtgtcagtattatctgaagactggaacatgcaagtttggccctacatgcaaatttcaccatcccagggaaaaggctggaattgcagggagggtgcagctaaacacatcaggatatccactccgcccgaatgaaaaggagtgtgcatattatttaaaaacaggacactgtaaatatgcaaatacttgtaaattccaccatccggaacttttcaatgtggtgccttcgtcacgtggttctcctatttatacctctgtacattcctctgcgagtgctggtccgcagtcctatactggaactatgccaagctgggcttttccacgagcttcttttataccaagccctaggtggcaaagtccttcaaattatgcgccgatgattgtacctcagggccttgttcaaatgcagagctggaattcatatactggtcagctgcagtcacctggggctcaacaaacttatggaagttcacaacaaggagaagctagtacaggaaatcagggaatgctgtcaccatacagacccagttcgtttcccgtgcctcaatatgcgctgcagagagagaatgtatttcctgagagacctgatgaaccagaatgccaatattacatgaagacaggagattgtaaattcggtgcagtgtgcaagttccatcatccccgggtgagatcactgccccctccagattgtgtcttaagtccaatgggtcttccactacgtccaggtgaagaactgtgcaaattctattctcgttacggcatctgcaagttcggcgccaactgtaaattcgaccatcctacagtggttgctccaatggtctatgcgtatggtttctccgcgtctgcttcccctgcatccgcttcgactaatgtacctatggcgcgacgccttctgggatccccaccggggtctggatatacatcttaggcgtcgttttttttttcagttgacctacttcgatttataaaatccatggcactgcctcaggcgctgtgaatgtttctcctaacttcctgccgggatcaaagttctgtaaattgagttgctaccggagatgtacagcccctttttttttggttaatccagatctttgggaataactctcgaaaccgaataaactttggatacagagatgccagttttca

SEQ ID NO: 112073 - DNA, 1652 bp, Zea Mays
gagggggcatggcccccctctcccttattctattcctccacaccgatcactcgctgctcccctctctcgccggagctccgggccggatggcggcggcagcagcagctcctcccgcctccgtgatcgcgtgatggacgcacacaccgccgcgctccgccgatggacgacgccggaaggccaccaccacacgctcccgtggcggtgaccgcctccgcctccgcctccgccaccgccgcgcccgcccctccccaaccctcagccactgctgccgtcgacaggtcctcccccgaccccgacgcgctctatgaagaggggatgtggcaacaaatggccatggacagcggtgccactatgcaacctgggtcatatcctgagcgaccaggtgaacccgactgcacttactatctcaggactggattgtgtcgatttggcatgagctgccgattcaatcatcctccggataggaatctgaatgaagggagaatatcctgagagagcgggacagccagagtgtcagtattatctgaagactggaacatgcaagtttggccctacatgcaaatttcaccatcccagggaaaaggctggaattgcagggagggtgcagctaaacacatcaggatatccactccgcccgaatgaaaaggagtgtgcatattatttaaaaacaggacactgtaaatatgcaaatacttgtaaattccaccatccggaacttttcaatgtggtgccttcgtcacgtggttctcctatttatacctctgtacattcctctgcgagtgctggtccgcagtcctatactggaactatgccaagctgggcttttccacgagcttcttttataccaagccctaggtggcaaagtccttcaaattatgcgccgatgattgtacctcagggccttgttcaaatgcagagctggaattcatatactggtcagctgcagtcacctggggctcaacaaacttatggaagttcacaacaaggagaagctagtacaggaaatcagggaatgctgtcaccatacagacccagttcgtttcccgtgcctcaatatgcgctgcagagagagaatgtatttcctgagagacctgatgaaccagaatgccaatattacatgaagacaggagattgtaaattcggtgcagtgtgcaagttccatcatccccgggtgagatcactgccccctccagattgtgtcttaagtccaatgggtcttccactacgtccaggtgaagaactgtgcaaattctattctcgttacggcatctgcaagttcggcgccaactgtaaattcgaccatcctacagtggttgctccaatggtctatgcgtatggtttctccgcgtctgcttcccctgcatccgcttcgactaatgtacctatggcgcgacgccttctgggatccccaccggggtctggatatacatcttaggcgtcgttttttttttcagttgacctacttcgatttataaaatccatggcactgcctcaggcgctgtgaatgtttctcctaacttcctgccgggatcaaagttctgtaaattgagttgctaccggagatgtacagcccctttttttttggttaatccagatctttgggaataactctcgaaaccgaataaactttggatacagagatgccagttttc

SEQ ID NO: 112074 - DNA, 503 bp, Zea Mays
aataggcactagatagtccttttgctgcacctcattgaatggcctgtcgtcttgattatcctgtccccaatggtttttcagggtgaagaactgtgcaaattctattctcgttacggcatctgcaagttcggcgccaactgtaaattcgaccatcctacagtggttgctccaatggtctatgcgtatggtttctccgcgtctgcttcccctgcatccgcttcgactaatgtacctatggcgcgacgccttctgggatccccaccggggtctggatatacatcttaggcgtcgttttttttttcagttgacctacttcgatttataaaatccatggcactgcctcaggcgctgtgaatgtttctcctaacttcctgccgggatcaaagttctgtaaattgagttgctaccggagatgtacagcccctttttttttggttaatccagatctttgggaataactctcgaaaccgaataaactttggatacagagatgccagttttca

SEQ ID NO: 112075 - DNA, 751 bp, Zea Mays
actttttacatcttcacttcacttggcctaccagcagtccagcagagtttccgtctccccgactcccgactgccggccctgacctgccctgcgccgcgcggagccgcgtactaccgcccgcccaccaccgaaaccctagagcaagcagggatgcacagtccggtcccgctcctcctcctcctgctcctctgcacggccgcggcggcctccgacggctcccagccccaggtacgtcacgccagccgccagcgtcttctcttcccctattctcgcttggctgcctcgacccccctgccgcaatcgatcccagctcacgttgcgcctccgcgcaggcgcaggcaccgggggcggcgcggcgggggatggtgccagtggcccccgcggaggcggagctcggcaccatggtggcgctcgccctcaacggcacgcggcgccggctcgggggcagcttccagctttgcgcgccctgcacctgctgcggcggggccagcggcgcctgcatcctcgcgccctgctgctactccatcaactgcaacatccccaaccgccccttcgggtactgctccttcacgcccaagtcctgccagtgcgtcggatgcaacctctgagctccgtggccgcgggattcattggattggattggtcagagtgtgtttgtgtgtgtgtgtgtgtgagagagagagagagtggggtggtaacgaatctgtataaaaaattccccacatccttagttaagtggcgattgctatta

SEQ ID NO: 112076 - DNA, 945 bp, Zea Mays
actttttacatcttcacttcacttggcctaccagcagtccagcagagtttccgtctccccgactcccgactgccggccctgacctgccctgcgccgcgcggagccgcgtactaccgcccgcccaccaccgaaaccctagagcaagcagggatgcacagtccggtcccgctcctcctcctcctgctcctctgcacggccgcggcggcctccgacggctcccagccccaggcgcaggcaccgggggcggcgcggcgggggatggtgccagtggcccccgcggaggcggagctcggcaccatggtggcgctcgccctcaacggcacgcggcgccggctcgggggcagcttccagctttgcgcgccctgcacctgctgcggcggggccagcggcgcctgcatcctcgcgccctgctgctactccatcaactgcaacatccccaaccgccccttcgggtactgctccttcacgcccaagtcctgccagtgcgtcggatgcaacctctgagctccgtggccgcgggattcattggattggattggtcagagtgtgtttgtgtgtgtgtgtgtgtgagagagagagagagtggggtggtaacgaatctgtataaaaaattccccacatccttagttaagtggcgattgctattacttctacctagtagtattttgctgtgatcactgctacattcgacttagttgaggaaaaaaaagagaaaggggtctgggttgatctagaggtcactactctggggttttgcttttctgtcgccacacattggatgtctgattaggatgctactacttgttcatagtggtttgttgttgatagctggaataaatatacctgtttaggtgcatggatctagtcatctagtgcattttagtggatgccatctcttccgtcctgatcagtgcctactgccctggaatgtgatcgctctagctc

SEQ ID NO: 112077 - DNA, 133 bp, Zea Mays
cgattattgtgttttatgcctaccacatgtattatttacgctaaaaattgtacgattttatgcttgaacaccgagttcgtatatcagtttgttgcatgcatattttttgcatgcacattggaaagacaattcc

SEQ ID NO: 112078 - DNA, 462 bp, Zea Mays
atggacctgcctgcagatgtcaaggaaagggagctacacaacctattgtgctggctcttgggattcgagacgtctgagatgaacttcaagggcaaccagcccatgggctttgcgctcttctccactgtgcaccaggccatcactgcaaaggctatgttccaggatacagtgttcgatgctgagactaaggtggcgctgcaaactgatatggccaagaagaacctcttcgtcaagagatccaaagatcatttatcccgtgcgtttgcggagtgggtggcccgcctcccgttgacgccgctgacaacacagccacaacagcagtgcattgtgccctgtgctttttcactctcaccgagcttgctcaacaattggtgcctggtgcaggatgtggacgatgccggagccgagagaggtcatccgaaggtccatgttggaggtggggaagacaagggtcataaatag

SEQ ID NO: 112079 - DNA, 3438 bp, Zea Mays
tttagtctttataaacaaacactcctaaacgaagtgattaaaataggtcttccaaatataatttttaggaactaaagtttctttctaagggctagtttggcaactccatttttctatgagatttttaatttcttaaggaaaaataaactagtttcccttggaaaaataaaaaatcattaggaaattagggttttcaaactagccttaaaatataagaggatgactgaagaaaccaaacacctgcttacattattttgaaacataatttagtacacggtttaaattttcgtacaaccgaggagtgaaaaacagacttgtgctaacatccttgcaaaacagaacaaaatcagtaaaacgacggaaaagaaaagaaaaaaaacaggaaaaaaggccctcccctccgtcgccaatcccaatcccgatctccaagcaaacccacctccccggctgtcccccactcgccgatccagatctcctccactccaaccggacgcctccgccgccgctggcatcggtcgagccacacgcgcacgccgctgaggaacccggagcgggcgccggcaatggagcagctgcggacgatcgggcgggagctggcgatggggtcgcagggcgggtgggggcagtccaaggagttcctcgacctcgtcaagtccatcggcgaggcgcgctccaaggcggaggaggaccgcatcatcgcgcgcgagcttgagcacctcaagcgccgcctcgccgaccccgacgtgccacgccgcaagatgaaggagctcctcctccgcctcgtctacgccgagatgctcggccacgacgcctccttcggccacatccacgccgttaagatgacccacgacgagtcgctcccgctcaagcggaccggttacctcgctgtcgcgctctttctcgacgaacgccacgacctcgtcatcctcgtggtcaacaccatccagaaggacctcaggtcggacaattacctcgtcgtctgcgcagcgctcaccgccgcgtgccgccttatcggtgaggaggccatccctgccgtgctgccccaggttgtagagctgctcgcgcaccccaaggaggctgtgaggaagaaggccgtcatggcactacaccggttctaccagcgatccccctcctccgtctcccacctcgtctccaacttccgcaagaggctctgtgataatgatccaggggtgatgggtgcaactctttgccccctctatgacctgattttggaggaaccaaattcgtacaaggatttggttgttagttttgttaacatcctcaaacaagttgcagagaggagactaccgacttcctatgattaccaccaaatgcccgcaccgtttattcagtggcgataaacaagcaagtgggcatatgtacactgtattgggtgacatattcaggaaaggtgacactgcaagcaacattggcaatgctatactgtatgaatgcatatgctgtatttcattcattttcccaaaccctaagatgctagaggctgcagctgaaacaacatcaaagtttctgaagagtgatagtcataatcttaagtacatgggtattgatgctcttggccggctaataaaaataaacccagatattgcagaagagcaccagctagctgtcattgattgcctagaggatccagatgacactttgaagcgcaagacctttgagcttctttataagatgacaaaatcaacaaatgttgaagtgattgttgataggatgattgaatacatgatcaacataactgatcatcattataagacagaaattgcatcacgttgtgttgaacttgcagagcaatttgcgcctagcaatcagtggttcatccagaccatgaacaaagtctttgagcatgccggagatcttgtcaacatcagagtggcgcacaatctgatgcggctaattgctgaaggctttggagaggaggatgaaggtgctgacagtcagctaagatcatcggctgtggattcatatctccgcattgtcggagagccaaagcttccttcttcgtttctgcagataatatgctgggttttgggggaatatggaacagcagatggaaaatattcagcttcttatattattgggaagttgtgtgatgtggcagaggcccacctcactgatgacactgtcaaggcatatgcgatctcagcaattctgaagacatttgcgtttgaaatcactcttggaagaaagatcgatttgctgcctgagtgtcaaacattggtagatgaattgtcagcttcacattcgacggacttgcagcaacgggcatacgagctacaggctttactaggcttggacaaaactgctgttgaaagtgttatgcccgcagatgcaagctgtgaagacattgaggtcgacagaagcctctcatttctaaacagttatgtgcagcaagccttggaaaatggtgcgtccccttacattccagagagtgaacgctctggtgttataagtgtcggcagctacagaagccaagaacaacaggaaacatctgcccatactcttagatttgaggcctatgagatgcctaaaccttcgttgccactagcaacttcacaaaccagcatgtccacaccacctactgatctggttccagttccagaggcaggctactacaaggaagacaatcaaacatcaatgtctcaaccaccaagtgatgcaatttctggtgagtttggtgtcaaacttcgccttgatggtgttcaaaagaaatggggaaggccaacatattcttcttctacaccctcaagctcgatctctagtcaaccaacacccaatggggcctctcattctgatgggggagggtcaagttcgcaaccacgggagtcatcatacggttctaagagacagcagggcacggaagtttcagcagaaaagcaacggctggctgcttcactttttggttcagcagcagctaaagctgataggaaagcacaagcttctcgaaagacagcaaaggacagtccctcaactgagaaagtggctaccactaatgtgactgcccagcctgttaaggagcaagtaatccctgctgcaccaccgcctgatctgctggatctgggtgatgagcctgtttcatcgagtccaccgtcggctgaccctttctcacagctagaggggctccttggaccagcatcggctgccccggtgctttctggaactccggctaccagcacttccaaagcaccaggccttctgtcaatcttctcagatgatgtaccaaccggagtgactagtgtgtccaccgatcccactctaggtgatgttaattcgatgggctcccgcaaaggagcagctgcagtggcttcaatgaagggcccgagcctccaagatgccttgcaaaaggatgcggctgcacgacaagtaggagtgacaccaacagtgaacaaccccaatcttttcaaggacttgctaggctga

SEQ ID NO: 112080 - DNA, 3560 bp, Zea Mays
aaaacaggaaaaaaggccctcccctccgtcgccaatcccaatcccgatctccaagcaaacccacctccccggctgtcccccactcgccgatccagatctcctccactccaaccggacgcctccgccgccgctggcatcggtcgagccacacgcgcacgccgctgaggaacccggagcgggcgccggcaatggagcagctgcggacgatcgggcgggagctggcgatggggtcgcagggcgggtgggggcagtccaaggagttcctcgacctcgtcaagtccatcggcgaggcgcgctccaaggcggaggaggaccgcatcatcgcgcgcgagcttgagcacctcaagcgccgcctcgccgaccccgacgtgccacgccgcaagatgaaggagctcctcctccgcctcgtctacgccgagatgctcggccacgacgcctccttcggccacatccacgccgttaagatgacccacgacgagtcgctcccgctcaagcggaccggttacctcgctgtcgcgctctttctcgacgaacgccacgacctcgtcatcctcgtggtcaacaccatccagaaggacctcaggtcggacaattacctcgtcgtctgcgcagcgctcaccgccgcgtgccgccttatcggtgaggaggccatccctgccgtgctgccccaggttgtagagctgctcgcgcaccccaaggaggctgtgaggaagaaggccgtcatggcactacaccggttctaccagcgatccccctcctccgtctcccacctcgtctccaacttccgcaagaggctctgtgataatgatccaggggtgatgggtgcaactctttgccccctctatgacctgattttggaggaaccaaattcgtacaaggatttggttgttagttttgttaacatcctcaaacaagttgcagagaggagactaccgacttcctatgattaccaccaaatgcccgcaccgtttattcagataaaactattgaagatacttgctgtacttggtagtggcgataaacaagcaagtgggcatatgtacactgtattgggtgacatattcaggaaaggtgacactgcaagcaacattggcaatgctatactgtatgaatgcatatgctgtatttcattcattttcccaaaccctaagatgctagaggctgcagctgaaacaacatcaaagtttctgaagagtgatagtcataatcttaagtacatgggtattgatgctcttggccggctaataaaaataaacccagatattgcagaagagcaccagctagctgtcattgattgcctagaggatccagatgacactttgaagcgcaagacctttgagcttctttataagatgacaaaatcaacaaatgttgaagtgattgttgataggatgattgaatacatgatcaacataactgatcatcattataagacagaaattgcatcacgttgtgttgaacttgcagagcaatttgcgcctagcaatcagtggttcatccagaccatgaacaaagtctttgagcatgccggagatcttgtcaacatcagagtggcgcacaatctgatgcggctaattgctgaaggctttggagaggaggatgaaggtgctgacagtcagctaagatcatcggctgtggattcatatctccgcattgtcggagagccaaagcttccttcttcgtttctgcagataatatgctgggttttgggggaatatggaacagcagatggaaaatattcagcttcttatattattgggaagttgtgtgatgtggcagaggcccacctcactgatgacactgtcaaggcatatgcgatctcagcaattctgaagacatttgcgtttgaaatcactcttggaagaaagatcgatttgctgcctgagtgtcaaacattggtagatgaattgtcagcttcacattcgacggacttgcagcaacgggcatacgagctacaggctttactaggcttggacaaaactgctgttgaaagtgttatgcccgcagatgcaagctgtgaagacattgaggtcgacagaagcctctcatttctaaacagttatgtgcagcaagccttggaaaatggtgcgtccccttacattccagagagtgaacgctctggtgttataagtgtcggcagctacagaagccaagaacaacaggaaacatctgcccatactcttagatttgaggcctatgagatgcctaaaccttcgttgccactagcaacttcacaaaccagcatgtccacaccacctactgatctggttccagttccagaggcaggctactacaaggaagacaatcaaacatcaatgtctcaaccaccaagtgatgcaatttctggtgagtttggtgtcaaacttcgccttgatggtgttcaaaagaaatggggaaggccaacatattcttcttctacaccctcaagctcgatctctagtcaaccaacacccaatggggcctctcattctgatgggggagggtcaagttcgcaaccacgggagtcatcatacggttctaagagacagcagggcacggaagtttcagcagaaaagcaacggctggctgcttcactttttggttcagcagcagctaaagctgataggaaagcacaagcttctcgaaagacagcaaaggacagtccctcaactgagaaagtggctaccactaatgtgactgcccagcctgttaaggagcaagtaatccctgctgcaccaccgcctgatctgctggatctgggtgatgagcctgtttcatcgagtccaccgtcggctgaccctttctcacagctagaggggctccttggaccagcatcggctgccccggtgctttctggaactccggctaccagcacttccaaagcaccaggccttctgtcaatcttctcagatgatgtaccaaccggagtgactagtgtgtccaccgatcccactctaggtgatgttaattcgatgggctcccgcaaaggagcagctgcagtggcttcaatgaagggcccgagcctccaagatgccttgcaaaaggatgcggctgcacgacaagtaggagtgacaccaacagtgaacaaccccaatcttttcaaggacttgctaggctgaaggggacagtagggcacaccatatgctctgtgtggcctctttgggtacgtggagttcgtctccgacatggttcgatcaccgaaacgacgccgaactcgctgtttgatcagcgtaggctggggttttagggttacaagggctaatatttgtttgagagtcacaagacacgacctatctccttccaattgtggtttgtggagatttgtggatggttgcgggtattttttttcctttacgctcttgtaattttgtcctgagactggtgtacatgtgtctacatgatgtgtaatttgtacatgaagaccatggtccgtccagaagcgtatgccgtcgtctttttgttcattcatgtaggaggggcatgctcatctgtgctttcagagtttcccatatatgttgattaatataacaattgatgtcattctctggaacttgggtgaaataaaaaaaatggtacgtgcg

SEQ ID NO: 112081 - DNA, 1869 bp, Zea Mays
atggagcagctgcggacgatcgggcgggagctggcgatggggtcgcagggcgggtgggggcagtccaaggagttcctcgacctcgtcaagtccatcggcgaggcgcgctccaaggcggaggaggaccgcatcatcgcgcgcgagcttgagcacctcaagcgccgcctcgccgaccccgacgtgccacgccgcaagatgaaggagctcctcctccgcctcgtctacgccgagatgctcggccacgacgcctccttcggccacatccacgccgttaagatgacccacgacgagtcgctcccgctcaagcggaccggttacctcgctgtcgcgctctttctcgacgaacgccacgacctcgtcatcctcgtggtcaacaccatccagaaggacctcaggtcggacaattacctcgtcgtctgcgcagcgctcaccgccgcgtgccgccttatcggtgaggaggccatccctgccgtgctgccccaggttgtagagctgctcgcgcaccccaaggaggctgtgaggaagaaggccgtcatggcactacaccggttctaccagcgatccccctcctccgtctcccacctcgtctccaacttccgcaagaggctctgtgataatgatccaggggtgatgggtgcaactctttgccccctctatgacctgattttggaggaaccaaattcgtacaaggatttggttataaaactattgaagatacttgctgtacttggtagtggcgataaacaagcaagtgggcatatgtacactgtattgggtgacatattcaggaaaggtgacactgcaagcaacattggcaatgctatactgtatgaatgcatatgctgtatttcattcattttcccaaaccctaagatgctagaggctgcagctgaaacaacatcaaagtttctgaagagtgatagtcataatcttaagtacatgggtattgatgctcttggccggctaataaaaataaacccagatattgcagaagagcaccagctagctgtcattgattgcctagaggatccagatgacactttgaagcgcaagacctttgagcttctttataagatgacaaaatcaacaaatgttgaagtgattgttgataggatgattgaatacatgatcaacataactgatcatcattataagacagaaattgcatcacgttgtgttgaacttgcagagcaatttgcgcctagcaatcagtggttcatccagaccatgaacaaagtctttgagcatgccggagatcttgtcaacatcagagtggcgcacaatctgatgcggctaattgctgaaggctttggagaggaggatgaaggtgctgacagtcagctaagatcatcggctgtggattcatatctccgcattgtcggagagccaaagcttccttcttcgtttctgcagataatatgctgggttttgggggaatatggaacagcagatggaaaatattcagcttcttatattattgggaagttgtgtgatgtggcagaggcccacctcactgatgacactgtcaaggcatatgcgatctcagcaattctgaagacatttgcgtttgaaatcactcttggaagaaagatcgatttgctgcctgagtgtcaaacattggtagatgaattgtcagcttcacattcgacggacttgcagcaacgggcatacgagctacaggctttactaggcttggacaaaactgctgttgaaagtgttatgcccgcagatgcaagctgtgaagacattgagttagggaagacaaacagaaaggtaaagtgcaccaatgatccttaaacttctttttgggggttgggtcgggtgttatctaggtcttaattgcaggatctatatctctagacttattaa

SEQ ID NO: 112082 - DNA, 889 bp, Zea Mays
gcaaaggcagctacctgctcaccgtcctattgtctctgcccccacctaccgtgtgcacgtaccagcagggatgttgaacagcggatcatgcttggccggcggacatgacggcaataacgaccagccgaacggagacggtggtggccagcagtatgaagggaccggcggcaagaagcagctcgagtcctcgaggctcaagaagagcagcggcaacaaagataaagccgacgccgcagaggacgactaccccaaccccaagtactgcaccaacaacaccagcggtggtaccagcgtagccggcgcgccctactgcgtcggcgtcggcgtcggcggaggcggaggcggatacgggaacagctctcgctgcggcggcggtggcgacggcgacagctatggcaacagctgtccctacggcaccggcggcaacgcaccatacaacaacgctcccgccgccttctgggctccccaggacggcgccaggtcgccgttgtacatcaatacccaggcggtgcacgtgtacggcatgccttgtgtgtccaacaacgataacagcaacgacgacgacaagaggacgaagagaggcaacgggttcttcggcccggtgttccatgccgccggccacttcttagatcgaaagttcggcttcgacggcagggactgatgactgatccatatgtagacatggccgacgtgccatctatatatgatcatatatgtttaatttgcttcaccctagccgtctccacatgtagacatctatatatgatcatatatgtttaactagctgaatgcccgtgcgttgcaacggaaatatataataccaatatactgcgataacttatatacaaaatgtgtgttatattgttatgagaaaatgtttcataatcaa

SEQ ID NO: 112083 - DNA, 858 bp, Zea Mays
acagagaagcggttccaacccaaaatacgtacggtcgtctgttggacggcactggtgaagtcgaagtctcgaaggttccagcgagcgactgtgtcgagcaggagagagcgcgatggggaagatgcggcagctgatctgcctcgtggccgccgtcgccgccgcggccatcctcctgacagcgtcggccaagaagtccggcgacgtcaccgagcttcagatcggcgtcaagtacaagcctgagtcatgtacgctgcaagcacacaaaggagacaaaattaaggttcactatcgtgggacactcactgatggatcagttttcgattctagctatgacagaggtgacccgtttgaattcactcttggaaatggccaagtgataaaaggttgggaccaaggattgctcggtatgtgcgtgggtgaaaagaggaagctaaagatacctgcaaagatgggttatggtgagcgaggctccccaccaaagattccaggtggagcaactctgatcttcgacacggagcttatcgccgtcaacgggaagacatccggcggtgcaaaggcagagagtgacagtgagctctgatacaatgcattggagagtttcaaagctcgggggggaatagtagcagcgtcgcatagttcattaggtgaaagggttgctgtttcctccacatagcagtttatgctatagagatgtcacagaaacaagtcaggttttgcccgatggtcgaacagtttcctttccatcttatgaaaactcgaatttgtctataaagctaccatggtcttcaacattgcagcccgtttaaactgtcgttacatcgatccatggcttggagagagagagaaaaatcaaaatgt

SEQ ID NO: 112084 - DNA, 81 bp, Zea Mays
tccgtgccgccaagcgcctgcaccagtgccgtctgaacgtgtcgatggagcacaacaacggagccgtctgaaaaagaaaaa

SEQ ID NO: 112085 - DNA, 2463 bp, Zea Mays
aagcaaattgcatttcaagtcttttgggtttatacagcacagataaaggcggcagcggcagcagcagaccaccctaccttttcccctctccacctcccgcaagcaaactcacggcaccgcccccgcacccactgtcctctagcttcttcctccccgctttcatggcaggaaaggctgaggcgatgatgcccataggccatccagtttgatccatgccatcctggacctctatacatactgcctcagcccgggcactcgcgatctctacttctctaccgccgctgtgcctgtgctagctcctctctctgcttctgcttttgcctcactcagcctgctgcaagcttttgctttggtttaggtgcttcttttgcattcctttactgttccccccccactttcgctcgctttgccacgcacacgaaaagctcctgcctttaccttctcggaccttatctccgccccgtagtgggatttggtgggagctgcgctgcagctgcttgccccctcgcgtttctttgctcaattgggggggtcacagcccgcgggtgtcgcgcgtgctcgtgggcggaattcggtgttcttgcttgcgcggtcctcgtccccgtccccttggcgcgattgcggttgcggacgctcgctgcagatcttcgcgcgactccgggagcgccggagatggactgcgggccgcccgaccagctgccgccgtcgtcggcgccggcgtgcttcctcaacctcaactgggaccagtccatggccgccgccacggctggcgaccacctcgacctggtctcctccccggcgtccaactcgacggcggctgacggcctcgctctccacgggatctcgccgcagccgcagtacggaggcactccgctcagctcgccccgcaagctgaacctctccatgatgggccagttccaccactacccgccgatgggccatctagaccagttcctcgccgacccaggcttcgccgcgcgcgcggcgaggctctccggcttcgacggccgccccggtgggagtggctacggcggcgccgtcccgggacagtttggcctccccgacgccggccccatcggcggcgcattgagggagctggagctcgggaacggccgggacgagtcatcggtgtccgatccggcgtccgccagcgccgagatggcgctcaaggcgccttccgatggcaatgcgaagaaacggaaggctagcgggaaggggaaaggcaaggacggccccgggtccaccgccgccaccaaggaggagtccagtgggaaacggtgcaaatcggcggaggagagcaatggcgcggaggagaactccggcaagggtaaggccgccgcgcagagcaacagcgacaacggtgggaagaagcaggggaaggacggcgcgtccaagcctccggagccgcccaaggactacatccacgtccgggcgaggcgcggcgaggcgacagacagccacagcctcgctgagagggtgagaagggagaagatcagccagcggatgaagcttctgcaggatctcgtcccgggctgcaacaaggtggtcggcaaggcggtgatgctggatgaaatcataaactacgtgcagtccttgcaacggcaagtcgagttcctgtccatgaaactggccaccgtgaatccccagctggacttcaacaacctgcctaacctccttcctaaagatatgcaccagtcctgcggcccgctgcagaactcgcatttcccgctggagacctcaggcgcgccgctgccatacctcaaccaggggaaccctctaataggctgcggcctacccaacggcatggacaacagccagagctccatgcacccgctcgacccggcgttttgccggccgatgagctcgcagcagcaccctttcctcaacggtgtcagcgacgcagcgtccaaggtcgggactttctggcaagatgaccttcagagcgtagtccacatggatatggggcagcagagccagcaggagatggctcccacctcctccaacagctacaacgacggttcgttgcaaacagtgcacatgaaaatggagctttgacgtagctagctgaagaagtccagcccaaagcttcgacgcctcctccccccctgtatatacagaacagagagggagagagaggaggaccagcctgcagcggaaaaaagcactcttgagattccccaccccactggtgtgatgattctttggacagagatgtgaaagatcaatcgccacgccggcggccggtcgatcgcaccacccccgccgcctgttgttagccgcaagatcgccggcgaccaaacgcggtgcatcgcatcccccggtatattctcagatcagacctgaattcgtcttcctctcaagcgagagggggaaaaaaagacctgtaatatcatttgtatcgccattatatttgtagctgattatatataaatatataaaatatcatccctcgtattcctgtca

SEQ ID NO: 112086 - DNA, 2318 bp, Zea Mays
ccctaccttttcccctctccacctcccgcaagcaaactcacggcaccgcccccgcacccactgtcctctagcttcttcctccccgctttcatggcaggaaaggctgaggcgatgatgcccataggccatccagtttgatccatgccatcctggacctctatacatactgcctcagcccgggcactcgcgatctctacttctctaccgccgctgtgcctgtgctagctcctctctctgcttctgcttttgcctcactcagcctgctgcaagcttttgctttggtttaggtgcttcttttgcattcctttactgttccccccccactttcgctcgctttgccacgcacacgaaaagctcctgcctttaccttctcggaccttatctccgccccgtagtgggatttggtgggagctgcgctgcagctgcttgccccctcgcgtttctttgctcaattgggggggtcacagcccgcgggtgtcgcgcgtgctcgtgggcggaattcggtgttcttgcttgcgcgcgccggagatggactgcgggccgcccgaccagctgccgccgtcgtcggcgccggcgtgcttcctcaacctcaactgggaccagtccatggccgccgccacggctggcgaccacctcgacctggtctcctccccggcgtccaactcgacggcggctgacggcctcgctctccacgggatctcgccgcagccgcagtacggaggcactccgctcagctcgccccgcaagctgaacctctccatgatgggccagttccaccactacccgccgatgggccatctagaccagttcctcgccgacccaggcttcgccgcgcgcgcggcgaggctctccggcttcgacggccgccccggtgggagtggctacggcggcgccgtcccgggacagtttggcctccccgacgccggccccatcggcggcgcattgagggagctggagctcgggaacggccgggacgagtcatcggtgtccgatccggcgtccgccagcgccgagatggcgctcaaggcgccttccgatggcaatgcgaagaaacggaaggctagcgggaaggggaaaggcaaggacggccccgggtccaccgccgccaccaaggaggagtccagtgggaaacggtgcaaatcggcggaggagagcaatggcgcggaggagaactccggcaagggtaaggccgccgcgcagagcaacagcgacaacggtgggaagaagcaggggaaggacggcgcgtccaagcctccggagccgcccaaggactacatccacgtccgggcgaggcgcggcgaggcgacagacagccacagcctcgctgagagggtgagaagggagaagatcagccagcggatgaagcttctgcaggatctcgtcccgggctgcaacaaggtggtcggcaaggcggtgatgctggatgaaatcataaactacgtgcagtccttgcaacggcaagtcgagttcctgtccatgaaactggccaccgtgaatccccagctggacttcaacaacctgcctaacctccttcctaaagatatgcaccagtcctgcggcccgctgcagaactcgcatttcccgctggagacctcaggcgcgccgctgccatacctcaaccaggggaaccctctaataggctgcggcctacccaacggcatggacaacagccagagctccatgcacccgctcgacccggcgttttgccggccgatgagctcgcagcagcaccctttcctcaacggtgtcagcgacgcagcgtccaaggtcgggactttctggcaagatgaccttcagagcgtagtccacatggatatggggcagcagagccagcaggagatggctcccacctcctccaacagctacaacgacggttcgttgcaaacagtgcacatgaaaatggagctttgacgtagctagctgaagaagtccagcccaaagcttcgacgcctcctccccccctgtatatacagaacagagagggagagagaggaggaccagcctgcagcggaaaaaagcactcttgagattccccaccccactggtgtgatgattctttggacagagatgtgaaagatcaatcgccacgccggcggccggtcgatcgcaccacccccgccgcctgttgttagccgcaagatcgccggcgaccaaacgcggtgcatcgcatcccccggtatattctcagatcagacctgaattcgtcttcctctcaagcgagagggggaaaaaaagacctgtaatatcatttgtatcgccattatatttgtagctgattatatataaatatataaaatatcatccctcgtattcctgtc

SEQ ID NO: 112087 - DNA, 778 bp, Zea Mays
aaaaacccgcagccaacgtccttggctcttccagcttttattagaactactcacatgcacgcagtgacactggggatgcaatgcatacatacatacatctgatcacacaccacacaggtcgggactttctggcaagatgaccttcagagcgtagtccacatggatatggggcagcagagccagcaggagatggctcccacctcctccaacagctacaacgacggtatggaaagattcagcatatatcctactacataggctgactgacacctatctagcatcgctgtatgtggtggcgagctctgatatcgcgaactgccatccgtctgcaggttcgttgcaaacagtgcacatgaaaatggagctttgacgtagctagctgaagaagtccagcccaaagcttcgacgcctcctccccccctgtatatacagaacagagagggagagagaggaggaccagcctgcagcggaaaaaagcactcttgagattccccaccccactggtgtgatgattctttggacagagatgtgaaagatcaatcgccacgccggcggccggtcgatcgcaccacccccgccgcctgttgttagccgcaagatcgccggcgaccaaacgcggtgcatcgcatcccccggtatattctcagatcagacctgaattcgtcttcctctcaagcgagagggggaaaaaaagacctgtaatatcatttgtatcgccattatatttgtagctgattatatataaatatataaaatatcatccctcgtattcctgtca

SEQ ID NO: 112088 - DNA, 1417 bp, Zea Mays
caccgtcgcaggctcacatcagctcacggtcacgggctcacggcaccacttggcgggcgacatggccgtgtacatccgcctcgacgacgccgtgcgcgcgcgcctccgcggggacgccgccgcggggtgcaccagcagcggcagcgaccacgacgcgtccgcctgcctctccgggctcgtccaggcgttcctcgagacgggcgccagcgcggccgaggcaggcgggccgggcccagcccccaaggagtgcgactccgacgaggaggacgggcccgggcgggcggccgccgccgtggcgtccgtgagggccctgctcgacccgccggccgaggaggacgtgttccggatcaggctggccgcagcggtggcggccgccgcggaggccgaggcggcactccgggcgcacggggcggcgttccggcgcgccgtggcgtggaggctgcgcggcgccgggtacgacgccggcgtgtgccggtcgcggtgggaggcgtccggcggcatcacggccggggcgtacgagtacgtggacgtggtcgcgcccgcgcccgtcggcccgggcgcgcggcagcgggccaggtacattgtggacgccgacttccgcgcggggctggaggtggcccgcgccacgcccgagtacgcggccgtcgtcgccgcggtgccggcgcccgcggtggtcgcgcgggaggaggccgtcggccacgccgtgcgcgtcgcgtccgacgccgcgcgccgctcgctccgcgcccacggcctccacgtcccgccctggcgcaagacgcgctacatgctcgccaagtggctcggcccctacaagcgctccaccgccacctcgccggcggccgtcggggcaatgccgatgcccggcggtgctgggctggacgtcaagtgccgcgccgtcgggttctttgcgcccccgtccaccgcgccggcgcccaggatcaagtagccgggcggcgatggcccaggagatcgctggaatgggaacaaaaatgaaaaagaaaacgcttgtttcagtgtagagaggttcctagtgcgatcgagagtttgattttgactttgagttgctctcggacatgttttgtacatacatttttatttcgagattattatctagaacaaattgtcatcttcttgtttctttgttattttttatgtataaacaaaaggtggcactaggaatcatttaggtactcgagactgatcttccctcactctaaaacaactcgcagctagtttggaaactccattttattaaaggttatattttcttaaaagacattatttcatttttcttttggaaaaaggaaatactttaaaataatggaattgacaaactagctctcagtggtgaaaaagatcgagaaaaaaataaattggcagaaacgatgtacgcggcgggcaggtgttgtgctactgg

SEQ ID NO: 112089 - DNA, 122 bp, Zea Mays
caacaggcgcagccatggcctccccggcggcggcgtgggagcggcctaggcacggccatggcggccggaagcacggccccctgagcgggcccccccggcggcgcatgctctggcggcgcgcg

SEQ ID NO: 112090 - DNA, 212 bp, Zea Mays
tttgagttcatgtgacttattttagaaacttgagctcacaaactttctcttatttggtctctgtatggtggaattatgtcattttataatctctgttcgttcagtcagtcgttgtgaactcttttctaatcgctcacttcattggtcgtgttgtacaaaaacatattggatgaagtaaataataacatcagttagccaaatcaaaaaaatac

SEQ ID NO: 112091 - DNA, 1948 bp, Zea Mays
ctcctaggctcctacacggctacactttggcttcgtctggaacggtcatgtctgaggctgatcgatgcggcctccctgtcccgccgttgcactgccaacgctcctctcccgcctccgtgcgtgcaggtccgcctcccacgcgctccagtgccacgccctcctcctcacctcgggccacctcgccgcgtccccgctgcgcctctccaaccacctcctcctcgccctcgcgtccgtccccagcgccgccgcgctcgcggacgtcgtcttcgcgcgactcccgctgcccgccgcccgcgacccattcgcctggaacacagccatccgcctccatgccccggcgcgcccccgcgccgcgctgctctacttcgcgcggatgcgccgttgcggcgtgcggcccgacgcctacacgttccccgcggtcctcaaggcctgcggctgcgcgcctggctgcagggccggactcctagttcacgccgaggccgtgaggagggggctggccgcggacctcttcacggtgaacgcgctcatcagcttctactgtaggatcctggacatccgctcgggcaggaaggtgttcgacgaggcaggcggcgtttcgcgggatctcgtctcgtggaactccatggtcgctgggtacgttgggtgcggggagatggggctcgcgcaggagatgtttgacgaaatgccgcagaaggacacgttctcgtgggcgaccttgatcgacgggtatgggaagcaaggcggtgctggtgtggaccgtgcacgcgagttgtttgatcaaatgcctgagagggatttggtgtgctggaactcaatgatcgatggttatgccaggcatggtaggatggatgaggcgaggtcactgttcgaggaaatgccggagcggaatgtgatctcgtggagcattgtcattgatgggcatgtcagttgtggagaggcaaaggaggctttggagtattttcagagtatgctacggtgtggcttaaggcctgataggatcgctgccgtgggagctgtcagtgcttgtgctcagctgggcgctttggagcaaggaagatggcttcactcttacttggaaaagaagaagctgctgtctgatgttgtggtgcaaacagctttgatagatatgtacgtgaaatgtgggtgcttggatcttgccatgttgatctttgaaagcatggccgagcggagtgtagtcacttggaatgtgatgattgttggacttggaactcatggttttggtctggatgctgtcacgctgttccatcgaatggaggctgaaagtgttgcagtggatgatcttagtgtacttggcatgctgactgcttgcacacatgctgggttggtctcagagggtttagagatatttcacagaatgaaaaaggattttgggatagatcccaaggtagaacattatggtgcattggttgatctacttggtcgtgctggccgtttggatcaggccaggcatgctatagagacaatgcccatggaaccaactccagaattgtggggatctcttcttgctgcctgtcgaagccacagttgtgttgagctggctgagttatcagtggaacgtcttgcagatcttggagctgatgattctggagtctatgtccttctgtcaaatatctatgctgatgaaggaatgtggggtgatgttttgaggattaggaaattgatgagtgatgagggaatgagaaaggatattggacggagtgtgattgaagtggatggtgaaatacatgagtttgtgaatggagttggctcatatatttgtaaggatgaaatgtacttgatgctgtggaatttgtctaacatggtggcatctatttgatgctcctttgtctaccaattttgtgaaatccttcaccatggtgtatgttgttttaacatcctaaacatgcacatgaccaaattataattacatctgatggttcgtagctct

SEQ ID NO: 112092 - DNA, 943 bp, Zea Mays
cttgtgactggggtggggtattgatactcattgcctgcctgcccgggctcggctcattgaacgctagctgctgctttgggcgctcgcttttcctcgagggctttctgaaaagttcgggtacgtgtgcccccacattctcttcggacaggcctttcggctatgtatagaggaggaacccctgtgctccgctgcccaattccaaccccagctttgactgccctcgcttggtgctcagttctttcctctgctcctccgcctcttctcgcacctcggcaccttcttcggcaactgcgagcgagatggaggcgcaagacgactgcaagtggcggcagatcccggcgttcggcgactggaacgtgtgggacggcgacatgcccgtcacccagtacttccaggcaggggccttcttcttcgcggcgccggcggagaagggcgacgcggatctcttcaaggtgccccagttgcctgccaagccctacggctacaagaagtgcgttgttcgagtgaagggggagaaagaaaccgctgtgccgccggcggcgaggaagggacgcaggaggcgctgcgtgagcgagcagcacaagtggaagcccaagggagctgtggacgaggacctgtacaagatctccccgcagcttctctgcaaggtgaagaagaagaagctgctgaggaatttgcttggagggtgcctcggcttgggctgcatcgcctgatagtgagagatgcagagcttaataagtttcttgaaagttcgcttgcttggtgctctggagagagttgtatagttgtctacgctaatatgagattaatggaaacttactactgcttctgcactcgtttgaatgtaacactagcttgcattccatctttcctacggttgcttcagtgcctgactaagggctgtttgattctgaaaatgtataaattcagccttattgtcttt

SEQ ID NO: 112093 - DNA, 1688 bp, Zea Mays
cttgtgactggggtggggtattgatactcattgcctgcctgcccgggctcggctcattgaacgctagctgctgctttgggcgctcgcttttcctcgagggctttctgaaaagttcgggtacgtgtgcccccacattctcttcggacaggcctttcggctatgtatagaggaggaacccctgtgctccgctgcccaattccaaccccagctttgactgccctcgcttggtgctcagttctttcctctgctcctccgcctcttctcgcacctcggcaccttcttcggcaactgcgagcgagatggaggcgcaagacgactgcaagtggcggcagatcccggcgttcggcgactggaacgtgtgggacggcgacatgcccgtcacccagtacttccaggcaggggccttcttcttcgcggcgccggcggagaagggcgacgcggatctcttcaaggtgccccagttgcctgccaagccctacggctacaagaagtgcgttgttcgagtgaagggggagaaagaaaccgctgtgccgccggcggcgaggaagggacgcaggaggcgctgcgtgagcgagcagcacaagtggaagcccaagggagctgtggacgaggacctgtacaagatctccccgcagcttctctgcaaggtgaagaaggcaagtgccctgtaatcaaatcctccctagctagtttgctctcagatcagtgcgtctctcgctgcatgcacccaacgtgtagctaagtggggttttaccttttgtctagttctcgtcatgtgactgtcctttatctagcctaagctgacccctttgcaagtagcttttgtttggatagcattagatagaacatctacatttgccaaagatgtgacctttttttcaaaaagaaagaagcttaagcgcttcatttttttcacagcatttggacggccttttgtcaaaggccatgagcgataaagctggactgtaaattcaagcgagattttaggcgaggattttattctcatgacctgttcttcgttctgcagaagaagctgctgaggaatttgcttggagggtgcctcggcttgggctgcatcgcctgatagtgagagatgcagagcttaataagtttcttgaaagttcgcttgcttggtgctctggagagagttgtatagttgtctacgctaatatgagattaatggaaacttactactgcttctgcactcgtttgaatgtaacactagcttgcattccatctttcctacggttgcttcagtgcctgactaagggctgtttgattctgaaaatgtataaattcagccttattgtctttcacaggtacgaattggaccttcattaactaatgtgttcagcaagacttgttagcccaagttgaatggttcaggcaagcttgtctgtaaccaagggcacccctgtctgtaaacccctattcaagctagtcatcaatgtacgacaactttcctggtcctgcatcccatgttcccgtttatcttttctcttctctctccttatctctcacgctttactaggatagtgtcactgggcattaataatatgtggagctagttcaaacttgccacaacctttcgtttctctcatcccctccttcctttgtgagccccggaggagaacgtgagatttgggctaaaaaaaaagattaaacctataagtaaattccgaaaataa

SEQ ID NO: 112094 - DNA, 165 bp, Zea Mays
atggaagggggcgtagatggtggcatgggaggaggatggaagggggacacgaatgacgagggcaccgaggatgggagcaaggggcgacaccgaggacaggaaggatgcgaggaggacgagggcggggtcatgggctcgcctgtgcatgactcccttggcctctaa

SEQ ID NO: 112095 - DNA, 356 bp, Zea Mays
aaggaggagatgttcaagcatcatgccatgagaaaaccaaaacctgattctgtcccatggaaaaagagaagacaaaatatatcttctgaggatcaagcacttatctcatcagcggtagcaagcttaaataatttctctgatgatggaagctttgtggaaaaagattagcaatcttgagagcaagaacactaatgtttccactgctggtgctagtgctgatgagcagagggacaatggacagaaatcccctaaggagagttcaaacaaattaccattagtgagcactcagaaatggaaaccagatggctgcaaagattctgcagctccgaatgaaaggcaagaatcgagaacctgaa

SEQ ID NO: 112096 - DNA, 898 bp, Zea Mays
ctcctctcctcctcttcctctgcttctctccccgatctctatttcccatttccgggcggctcccgttctccacctcaattattgcccacccatccccgctccctcctctcctctcctcccgtcccacccatcacctcgcaccagcgccgggggaatggcggccgcgctgtggacgctgctagtggcggtggccctgtcggcggcgctggcctcgaaccgccccgtggcggcgacggcgacggcggcggcggaggcggcgaacgaggtgctccgcgcgcaccagctgccggggggcctgctgccggcggggatcacggcgttccggcacgacgccgccacgggggcgttcgaggcccggctggacgcgccctgcacggcgcgcttcgaggtcggcctccgctacaacgccaccgtctccggggtcatcagccccggccagatcgccgacatctccggcgtcgccgcgcaggacctcttcatgtggttccccgtccacgacatcaaggtcgacatcccctcctccggcgtcatctacttcaacgtcggcgtcgtcaagaagcacctcccgctcgccgtcttcgacgcgccgccggcctgcacgcccgacccgctcctgcagcggctggaggacgtgggcgagggcggattggccgtggtgggcgccgcggcgtcccggcgatgatgggtggaggagaacggaggagggttcgacggcgccggcgagccaggatcacgagcgcagttttgagaggagaacgggcgatcgccggccttcttcgatgcacatagatagcgtgggcatttccatctgttttcttttttctgcttcctactagtggctacactagtaaccaacctcgtctatcattgttcgtttcgtcaagctgttgtcatttcc

SEQ ID NO: 112097 - DNA, 1475 bp, Zea Mays
cgccagcgtcgttgtctcgctgatgcctgcctgcatccgtctccgccgccgtaggagcgaggcctgtgacgcggtctccgtccgttccatcgtggcatggcatcatcccgtccccttcgcgggccggagagagagagagagagagagtgaggtgttgtctgagaaaaagaccatgattcgacatggcagatgctgactagtcccctcgtctctctctgggtatcaccattcaccagtcactaccctacctccctacagcgaatagcaataccgggtctgggtggatggtcacactgtccatgtctgcagtgcagacagacagaagatgcctcctctctatcctaccggctgcagtctcgccaactaattcctcggtgcagcttagctaaccaacccctcgaatctttaatcattactagtatttttttctctatcgaatccaacaacgaaacgaagcgatatagttttactggtagtcgaaagaagtagatctggacatctggtgagctagcgtgtgcatgattgggtggcactgggggttcaggtacgcatgtgacgagtccggggcaataattctcggtcacaagcggacaggatgatgcgcatggagacccaaaatcccctgttcgactaacccgacagctcaggaatatctggatcgcaggagatgccatgccagtgccacacatcgcttgctcccggccggggtggttttggtactagttgcactgatgactggttcgtcgcggtctaaacttgacccggttgcccccctccttttttttcttgctataattaactgttaaagctcgtgtgagttgtgaccactgctccaggaaaggatagccgctgagatgctgacacgcgggtccagctgagaggtgggggtacgtcctacgtgtcagtgctggagtggggagtgacgggcaacagcgacgtgaccggacgcgacgcgattagcgggcgcatcgcatgtgcgagggaggaacgatgacggtaaggagacaagacaagcgtatcaactgcagcttcctgcaggctgccggggtgggttgctgcagtaggtgccgctgctggccaatgccaacgagccatttgcccggttggccgtggtcacctggcgtggctcttccggcctgtggattatgtgggcggaaccgcggaaggatagggatggagcctggaggaggggagagacgcgtccggtgacgtcccctgtccaccgttttgagtaggagcgctgtcaacgtggcgaggattcaaggaggacagacagtccagggcaggttgatcacaatatcaactgtttgttttaggtaggagccctgacaacttgacatccgacaccgtgacattgaggtgtgctccggaggcttctctcggatagttttattttggaacttgattgctggtcgaggtgaaatatatatactccatgtcctgattgccgtgctacccagaggccacactgcctg

SEQ ID NO: 112098 - DNA, 1605 bp, Zea Mays
atggcggcccagcccatccgcaaaccgcacttcgaccgcatcgtccgcgcgctcgcctccgaccacccgccaccgccccgcgccgagctgcacgcgtttctcgtccgctcgcacgccgcggccaccgcgcccgccctcgtccgctcgctcctcaacggcgccatcagccgcctctccaagcggcgcccgcgcgccgcgctcgccttgctcctcatcatgccgcgcctgcccgtgcgccccgaccacttcacgctccccttcgcgctcaacgccgccgcgtcgctccgcctcctcccgctcggcgcctccctgcacgccgtcgcgctccgcctcgcgctcctcccgctccgcctccccgtcgccaacgcgctcgtcgacctgtacgccaagtgcgaggagttccccgccgcgcacgccgcgctggcggacatccccgcccccgacgcggtctccttcaactccctcctctgcgcgcacgcccgcaacgcctccgtgcgtcccgccgagtccctcttcgctgccatgcccaccaggacccaggtctcctggaacgccatggtggtcctctacgtcagcgctggtgacctcgcggccgcttgccgtgtgtttgacgaaatgccgacgagggacacggcctcgtcgatggtgctcattgtcgggtattgtaagtgcgggctggtgcagaatgcgcgtgagctgtttgacaaaatgcctacaaaggatctcgtggcccggacggccatgattaatggttatgcacagactgggcggccaaaggtggcactcgctttatttagggatctggaggctgctgggattgagcctgatggagccacaatggttggggttatctctgcagtttcacagataggcagcacggagttggctgggtgggttggagcttacgtcgacaggaagaagatcgaaaggaatgagaaggttcttacagcactagtagatatgcacgcaaagtgtggcaacattgagcaggcactgagtgctttcagggagatcccacgacctgatgcctatccatacacagcactgattagcggcctggcaacacatggacacgaaaatctggcactttcagtgttcgaaaggatgcgggctgaagacatcaagcctcaccctatcactttcgttggtgtgcttacagcatgcagccacgcagggaatgttgaaaagggactggagtattgggaggcaatggtgcaggattatggtattgagcgccatgcggaccactatgcctgtgtcattgacatgctcgggcgtgcagggaggattgaggaggctttcgagatggttcaaacgatgccgatggggccacatccgggggctcttggtgcactcctgagtgcctgcaagacatatgataacgttgagattgcagaagttgtcgcaaacaagctatttgagttggaaccttggaacactgggaactatatactcttgtcaaacatatatgctgggaaagaactctgggaggaggcagaaagggtcagatcactgatgagaacaaaactgccatttaaaagtcctggatccacttggtttgaggatcgacagagagagcatgctaagatgtctatcatggactga

SEQ ID NO: 112099 - DNA, 210 bp, Zea Mays
caggtaaccccggagcatattgagaaaggcctgacctacccgcccttctccatcatcaggaagatttcagctaacatagttgtccgtgtcgccgcaaaagcttatgatctcagaatggctacccatctccctcgaccaaaagacccggtgaagtacgctgagagctgcatgtacaaccccgtctaccgatcgtacaggtgatgtgagcgg

SEQ ID NO: 112100 - DNA, 1860 bp, Zea Mays
acaaatcgggtttgccgtgcggcacttgcgttttgggtcgggtacggacccgcaaaaagagctccgtcagttcctctacctcctctgtaggagcacacttgtttcggaaaggaacgcagattcacgccacgccgccgcctcaattatatggcgccggcgttctcggcacaggtccccgcgctccgacggggagcactgcgcgtgcggtgggtcacggctgcgctgttctcatcggggattctcgccggcaacaagccgattctggtgcgtgacttcgtgaggtcagcgttgtacgaccccaaccatggctacttctccaagcgggcgggaccggtgggcgttcttgacgccagcatccgcttcaaccagctcgagggtggtctcctaaatctcctacgcgttgcacatttcctaagttcttatcgcattgcctcctccaatgggaagtttagtgtgtgttccggcattgcggggatgggaaggtacttgtgttttgtttcttcgtcgtgctggcatttcaacgaacaggtctcacatttgggacgtgtggtaatggataactccttgccgattgtctgatgctggttccgtgtcgtgctgtgtgttgatatgttgggcatttggtgaagatgtgaaaagcgtgctcgtttttcctttttaactttgacctaaaattcatttgcttcaataccatattaccatgtagggaggagtgcatatatacagcaccttgataagctgtataagaagcatgatatcgcttggtttactcccgtggagctctttaagccatggtatgcctacacaatagcagcatcgattctgcgtacagcaaatctttcagtcccattgaagatatacgagattggtggtggctctggaacatgcgcaaagtgcatacttgattacatgatgctgaatgcgccaccaaaagtctacaatgatatgaaatacattagagattagctcctctcttgctgagaagcaattggaaactgttggtgaagtgcaaagccatttgtcaaagttcacggtggagcaccgggatgcaattaacagacctggatggggccgcacggatcctcatccatgttgggtgcttatgcttgaggtacttgacaatctaccacatgaccttgtctattcaccagatcaggtctctccatggatggaagtgtggattgaaaaagtaaaaggcagttcacaagcttccgaagtctataagccattacaagacccattgatttctcgctgtgttgatattattggcatgaatgaagacaaagcttctgtcagtgaaaaactaacatttgctgcaaaaggagttctatcaaaagtattcccaaagcctcgtagagcttggttgcccaccggctgcttgaaactaatggatactctacatcaagctttaccgagcatgtcccttattgcttcagacttcagctatcttccagacgttagcatacctggtgacagggctccattggtttcatcaaagaaggatgggaagacatcagatcatcgcaactactttgatgctcagggtgacgcggacatcttcttcccaaccgacttccggctcctggagcagatcgaccataactgcgctggcttctcaaaggagcagaagaatcccggcgcattcaaacccgtgaagaagaggagaacgatcatacttgatactgcagccttcatggaggagtttggcatgccgctgaagacgaggaccaaagacgggtataatccgcttctcgacgatttcaagaacacaaagttctatctcagcgtccctacacacaacgttcctacccatagcaggaggaactagtcttctttccttttgctgatgtgtcacgagtc

SEQ ID NO: 112101 - DNA, 1635 bp, Zea Mays
acaaatcgggtttgccgtgcggcacttgcgttttgggtcgggtacggacccgcaaaaagagctccgtcagttcctctacctcctctgtaggagcacacttgtttcggaaaggaacgcagattcacgccacgccgccgcctcaattatatggcgccggcgttctcggcacaggtccccgcgctccgacggggagcactgcgcgtgcggtgggtcacggctgcgctgttctcatcggggattctcgccggcaacaagccgattctggtgcgtgacttcgtgaggtcagcgttgtacgaccccaaccatggctacttctccaagcgggcgggaccggtgggcgttcttgacgccagcatccgcttcaaccagctcgaggggaggagtgcatatatacagcaccttgataagctgtataagaagcatgatatcgcttggtttactcccgtggagctctttaagccatggtatgcctacacaatagcagcatcgattctgcgtacagcaaatctttcagtcccattgaagatatacgagattggtggtggctctggaacatgcgcaaagtgcatacttgattacatgatgctgaatgcgccaccaaaagtctacaatgatatgaaatacatctcagtagagattagctcctctcttgctgagaagcaattggaaactgttggtgaagtgcaaagccatttgtcaaagttcacggtggagcaccgggatgcaattaacagacctggatggggccgcacggatcctcatccatgttgggtgcttatgcttgaggtatgttctgctgggacttctcagtttgttcttgtgttttatgtgtaaaccaaagaagcacaatgacatcatcatgcaccttcacccattatgaactgaggtacttgacaatctaccacatgaccttgtctattcaccagatcaggtctctccatggatggaagtgtggattgaaaaagtaaaaggcagttcacaagcttccgaagtctataagccattacaagacccattgatttctcgctgtgttgatattattggcatgaatgaagacaaagcttctgtcagtgaaaaactaacatttgctgcaaaaggagttctatcaaaagtattcccaaagcctcgtagagcttggttgcccaccggctgcttgaaactaatggatactctacatcaagctttaccgagcatgtcccttattgcttcagacttcagctatcttccagacgttagcatacctggtgacagggctccattggtttcatcaaagaaggatgggaagacatcagatcatcgcaactactttgatgctcagggtgacgcggacatcttcttcccaaccgacttccggctcctggagcagatcgaccataactgcgctggcttctcaaaggagcagaagaatcccggcgcattcaaacccgtgaagaagaggagaacgatcatacttgatactgcagccttcatggaggagtttggcatgccgctgaagacgaggaccaaagacgggtataatccgcttctcgacgatttcaagaacacaaagttctatctcagcgtccctacacacaacgttcctacccatagcaggaggaactagtcttctttccttttgctgatgtgtcacgagtc

SEQ ID NO: 112102 - DNA, 1949 bp, Zea Mays
acaaatcgggtttgccgtgcggcacttgcgttttgggtcgggtacggacccgcaaaaagagctccgtcagttcctctacctcctctgtaggagcacacttgtttcggaaaggaacgcagattcacgccacgccgccgcctcaattatatggcgccggcgttctcggcacaggtccccgcgctccgacggggagcactgcgcgtgcggtgggtcacggctgcgctgttctcatcggggattctcgccggcaacaagccgattctggtgcgtgacttcgtgaggtcagcgttgtacgaccccaaccatggctacttctccaagcgggcgggaccggtgggcgttcttgacgccagcatccgcttcaaccagctcgaggggaggagtgcatatatacagcaccttgataagctgtataagaagcatgatatcgcttggtttactcccgtggagctctttaagccatggtatgcctacacaatagcagcatcgattctgcgtacagcaaatctttcagtcccattgaagatatacgagattggtggtggctctggaacatgcgcaaagtgcatacttgattacatgatgctgaatgcgccaccaaaagtctacaatgatatgaaatacatctcagtagagattagctcctctcttgctgagaagcaattggaaactgttggtgaagtgcaaagccatttgtcaaagttcacggtggagcaccgggatgcaattaacagacctggatggggccgcacggatcctcatccatgttgggtgcttatgcttgaggtacttgacaatctaccacatgaccttgtctattcaccagatcaggtctctccatggatggaagtgtggattgaaaaagtaaaaggcagttcacaagcttccgaagtctataagccattacaagacccattgatttctcgctgtgttgatattattggcatgaatgaagacaaagcttctgtcagtgaaaaactaacatttgctgcaaaaggagttctatcaaaagtattcccaaagcctcgtagagcttggttgcccaccggctgcttgaaactaatggatactctacatcaagctttaccgagcatgtcccttattgcttcagacttcagctatcttccagacgttagcatacctggtgacagggctccattggtttcatcaaagaaggatgggaagacatcagatcatcgcaactactttgatgctcagggtgacgcggacatcttcttcccaaccgacttccggctcctggagcagatcgaccataactgcgctggcttctcaaaggagcagaagaatcccggcgcattcaaacccgtgaagaagaggagaacgatcatacttgatactgcagccttcatggaggagtttggcatgccgctgaagacgaggaccaaagacgggtataatccgcttctcgacgatttcaagaacacaaagttctatctcagcgtccctacacacaacgttcctacccatagcaggaggaactagtcttctttccttttgctgatgtgtcacgagtcaggaaaagacgtctgacaggctagaatcggtctgtcattttgagtagtctgaatttgcaagttttcttaccttaaggtgctgaaaattttatagtttctcttttctgtagaacaaagtttttattatcatttttgacattgatgcatgggtaataaaaggtggaagaagactgactaacaaggagtcaaaccaaatgaatggtaaaagcaattacaggctgcattccacacgtataacgaaagaaaatgttcagtggatacaaaagggtatattctttgcgattaatcttttcgttgccaatacagctgccgccccatactccagggaattacattatcttctaacaaaaaaaagaatggttacatcgaatggctccaatatacagcttctcaccatgctatcagcaaaaccgg

SEQ ID NO: 112103 - DNA, 1361 bp, Zea Mays
cgccgccgcctcaattatatggcgccggcgttctcggcacaggtccccgcgctccgacggggagcactgcgcgtgcggtgggtcacggctgcgctgttctcatcggggattctcgccggcaacaagccgattctggtgcgtgacttcgtgaggtcagcgttgtacgaccccaaccatggctacttctccaagcgggcgggaccggtgggcgttcttgacgccagcatccgcttcaaccagctcgaggggaggagtgcatatatacagcaccttgataagctgtataagaagcatgatatcgcttggtttactcccgtggagctctttaagccatggtatgcctacacaatagcagcatcgattctgcgtacagcaaatctttcagtcccattgaagatatacgagattggtggtggctctggaacatgcgcaaagtgcatacttgattacatgatgctgaatgcgccaccaaaagtctacaatgatatgaaatacatctcagtagagattagctcctctcttgctgagaagcaattggaaactgttggtgaagtgcaaagccatttgtcaaagttcacggtggagcaccgggatgcaattaacagacctggatggggccgcacggatcctcatccatgttgggtgcttatgcttgaggtacttgacaatctaccacatgaccttgtctattcaccagatcaggtctctccatggatggaagtgtggattgaaaaagtaaaaggcagttcacaagcttccgaagtctataagccattacaagacccattgatttctcgctgtgttgatattattggcatgaatgaagacaaagcttctgtcagtgaaaaactaacatttgctgcaaaaggagttctatcaaaagtattcccaaagcctcgtagagcttggttgcccaccggctgcttgaaactaatggatactctacatcaagctttaccgagcatgtcccttattgcttcagacttcagctatcttccagacgttagcatacctggtgacagggctccattggtttcatcaaagaaggatgggaagacatcagatcatcgcaactactttgatgctcagggtgacgcggacatcttcttcccaaccgacttccggctcctggagcagatcgaccataactgcgctggcttctcaaaggagcagaagaatcccggcgcattcaaacccgtgaagaagaggagaacgatcatacttgatactgcagccttcatggaggagtttggcatgccgctgaagacgaggaccaaagacgggtataatccgcttctcgacgatttcaagaacacaaagttctatctcagcgtccctacacacaacgttcctacccatag

SEQ ID NO: 112104 - DNA, 219 bp, Zea Mays
atggaagaaatatctggtatactaggagctctattttcattacagaagcttgctggttcgccgctttggcccacctgggaagagcttcattatccagccaagcacccgttcaacaacctcgtctccttcatccgcatacattgttgcctcgttgatggggcgtgtgtcaattggtttcgccagggcattctcgttagccatcctttgagaagtcaatag

SEQ ID NO: 112105 - DNA, 884 bp, Zea Mays
ctcgcggtcaagggtcaactgatcaagccaaagccgaacaccaccaacaaggcagcagccgaacaccaaacaaggcagcagccgccaccacttcattgcgcgaatcggagcccgtggccgtcgcctccgccttcgcgattcgccgccgttgcccacgagcgaggcttcctcctcttcgtcgccgccgtcgcaggaggggaaagaggataaactgccatggcgggcaggcttctcgcgaatctaatcgtcatgggcggaaccgtggttggcagggccatgctccaggcctaccgccaggccatcgtcaatgcaaacaaaactggagctgcccaagaagctataaatggtattagacgggctagcaaggccatgactgagcaagaagcccggcaaattcttggtatcagtgaaaattcgacgtgggaagagattgtccagaagtacgacacaatgtttgagaggaataacaaaaacggcagcttctatctccagtcaaaggttcatagagcgaaagaatgcctggaacctttatatcaaaagcctgatgtactgaactgagattttgcagacgccctagcttctgtttgaagcggtatgcctaattgatcgatttattagtgtgctcagagatcaacgttcagtttattgatcggtttgccaatgcgcccagagatcaacgttcagttttgagttatgtgttgggcgcatcaggttggttccttgtaatgccagaataatgtttaacaaacataccgaattttggctgattctcattggcaacgtctcagtcactggttttaattcatagtatgttatttcacactttgtcaaccaagcaacactttgaaactttttgtcgataataaatggttcggttcgttcat

SEQ ID NO: 112106 - DNA, 2635 bp, Zea Mays
cgcgccaggggtgagaagtatggtggccgaggagaggctggcgtgggcggtggagcgctcccctcggtcgccacgtgtgtcacgcagccgcatctcggttccctcctctctctctctcttcttctccctctccacctcctgcttgcactgttcgtctcctcagtaactgcacccacctccacacctacacccgagaggcggcggcggcagacacagacaccgtctctctcctccctttgtcgtcgtgtctctctgcatggaagcctccgccggctcgtcgccaccgcactcccaagagaacccgccggagcacggtggcgacatgggaggggcccccgcggaggagatcggaggggaggcggcggatgatttcatgttcgctgaagacacgttcccctccctcccggacttcccttgcctttcgtcgccgtccagctccaccttctcgtccaactcctcgtcaaactcctccagcgcctacaccaacacggcaggaagagccggcggcgagccctccgagcctgcttcggccggagaagggtttgatgcgctcgatgacatcgaccagctcctcgacttcgcgtcgctttccatgccgtgggactccgagccgttcccgggggttagcatgatgctagagaacgccatgtcggcgccgccgcagccggtgggcgacggcatgagtgaagagaaagccgtgccggaagggaccacagggggagaggaggcctgcatggatgcgtcggagggggaggagctgccgcggttcttcatggagtggctcacgagcaaccgcgaaaacatctcggccgaggatctccgcgggatccgcctccgccgctccaccatcgaggccgccgccgcccggctcggcggcgggcgccagggcaccatgcagctgctcaagctcatcctcacctgggtgcagaaccaccacctccagaggaagcgcccgcgcgacgtgatggaggaggaggcgggcctgcacgtccagctccccagcccggtcgccaacccaccaggatacgagttccccgccggcggacaggacatggccgcgggcggcggcacatcttggatgccccaccagcaggcattcacgccgcctgctgcgtacggcggcgacgcggtgtacccgagcgcggcaggccaacagtactctttccaccagggccccagcacgagcagcgtggtcgtgaacagccaaccgttctccccgccgcctgtgggcgacatgcacggcgcgaacatggcctggccgcagcagtacgtgccgttcccaccgcctggggcttccacgggctcttaccctatgccgcagccgttctcccccggattcggcgggcagtacgccggcgccggcgctggccacctctcagtggccccccagcgcatggcaggcgtggaggcctcggcgaccaaggaggcccgcaagaagcgcatggcgagacagcggcgcctgtcctgcctgcagcagcagcgcagccagcagctgagcctgggccagatccaggcctccgtccacctgcaggagccgtcccctcggtccacgcactccggcccggtcacgccgtcagcaggcggctggggattctggtcgccgagcagccagcagcaggtccagaacccgctctccaagtccaattcatcaagggcgccgcctccctcgctggaagcggcggcggtggcgccacagacaaagcccgcgcctgctggtgctcggcaggacgacattcaccaccgcctcgcagcggcttcagataagcggcagggcgccaaggcggacaagaacctgcggttcctgctgcagaaggtgctgaagcagagcgacgtcgggagcctcggccgcatcgtgctccccaaaaaggaagcggaggttcacctgccggagctgaagacgagggatggcatctccatccccatggaggacatcggaacgtcgcgcgtgtggaacatgcggtacaggttttggcccaacaacaagagcagaatgtatctgctggagaacacaggggaatttgttcgttccaacgagcttcaggagggggatttcatagtgatctactccgatgtcaagtcgggcaaatatctgatacggggcgtgaaggtaaggcccccgccggcgcaagagcaaggcagtggttccagcgggggaggcaagcacaggcccctctgtccagcaggtccagggagagccgcagccgccggtgctcctgaagacgccgtcgtcgacggggtcagcggcgcctgcaaggggaggtctccggaaggcgtgcggcgggttcggcagcagggagccggcgccatgagccagatggcggtgagcatctgaaagagcagcagactccgccatatattgatcgatcgaccaatcgatcgttagttctccaagttactattagctagctatagctcgaaacagctgaactgatgatgacgatggtaacctccgtcgtgtgtgctaagcatgtagcgtgctaggagatgatatattaaatataatcgagtagtagagccacccgctgtgtgacgctaaatttgtgtgcatggtttggtttgtgagttgggcccgtgcgtggctgtgtcatgtcgtggttaattagctatactagtcctgtctgtacatgcatggaca

SEQ ID NO: 112107 - DNA, 2717 bp, Zea Mays
cgcgccaggggtgagaagtatggtggccgaggagaggctggcgtgggcggtggagcgctcccctcggtcgccacgtgtgtcacgcagccgcatctcggttccctcctctctctctctcttcttctccctctccacctcctgcttgcactgttcgtctcctcagtaactgcacccacctccacacctacacccgagaggcggcggcggcagacacagacaccgtctctctcctccctttgtcgtcgtgtctctctgcatggaagcctccgccggctcgtcgccaccgcactcccaagagaacccgccggagcacggtggcgacatgggaggggcccccgcggaggagatcggaggggaggcggcggatgatttcatgttcgctgaagacacgttcccctccctcccggacttcccttgcctttcgtcgccgtccagctccaccttctcgtccaactcctcgtcaaactcctccagcgcctacaccaacacggcaggaagagccggcggcgagccctccgagcctgcttcggccggagaagggtttgatgcgctcgatgacatcgaccagctcctcgacttcgcgtcgctttccatgccgtgggactccgagccgttcccgggggttagcatgatgctagagaacgccatgtcggcgccgccgcagccggtgggcgacggcatgagtgaagagaaagccgtgccggaagggaccacagggggagaggaggcctgcatggatgcgtcggagggggaggagctgccgcggttcttcatggagtggctcacgagcaaccgcgaaaacatctcggccgaggatctccgcgggatccgcctccgccgctccaccatcgaggccgccgccgcccggctcggcggcgggcgccagggcaccatgcagctgctcaagctcatcctcacctgggtgcagaaccaccacctccagaggaagcgcccgcgcgacgtgatggaggaggaggcgggcctgcacgtccagctccccagcccggtcgccaacccaccaggatacgagttccccgccggcggacaggacatggccgcgggcggcggcacatcttggatgccccaccagcaggcattcacgccgcctgctgcgtacggcggcgacgcggtgtacccgagcgcggcaggccaacagtactctttccaccagggccccagcacgagcagcgtggtcgtgaacagccaaccgttctccccgccgcctgtgggcgacatgcacggcgcgaacatggcctggccgcagcagtacgtgccgttcccaccgcctggggcttccacgggctcttaccctatgccgcagccgttctcccccggattcggcgggcagtacgccggcgccggcgctggccacctctcagtggccccccagcgcatggcaggcgtggaggcctcggcgaccaaggaggcccgcaagaagcgcatggcgagacagcggcgcctgtcctgcctgcagcagcagcgcagccagcagctgagcctgggccagatccaggcctccgtccacctgcaggagccgtcccctcggtccacgcactccggcccggtcacgccgtcagcaggcggctggggattctggtcgccgagcagccagcagcaggtccagaacccgctctccaagtccaattcatcaagggcgccgcctccctcgctggaagcggcggcggtggcgccacagacaaagcccgcgcctgctggtgctcggcaggacgacattcaccaccgcctcgcagcggcttcagataagcggcagggcgccaaggcggacaagaacctgcggttcctgctgcagaaggtgctgaagcagagcgacgtcgggagcctcggccgcatcgtgctccccaaagaagcggaggttcacctgccggagctgaagacgagggatggcatctccatccccatggaggacatcggaacgtcgcgcgtgtggaacatgcggtacaggttttggcccaacaacaagagcagaatgtatctgctggagaacacaggggaatttgttcgttccaacgagcttcaggagggggatttcatagtgatctactccgatgtcaagtcgggcaaatatctgatacggggcgtgaaggtaaggcccccgccggcgcaagagcaaggcagtggttccagcgggggaggcaagcacaggcccctctgtccagcaggtccagggagagccgcagccgccggtgctcctgaagacgccgtcgtcgacggggtcagcggcgcctgcaaggggaggtctccggaaggcgtgcggcgggttcggcagcagggagccggcgccatgagccagatggcggtgagcatctgaaagagcagcagactccgccatatattgatcgatcgaccaatcgatcgttagttctccaagttactattagctagctatagctcgaaacagctgaactgatgatgacgatggtaacctccgtcgtgtgtgctaagcatgtagcgtgctaggagatgatatattaaatataatcgagtagtagagccacccgctgtgtgacgctaaatttgtgtgcatggtttggtttgtgagttgggcccgtgcgtggctgtgtcatgtcgtggttaattagctatactagtcctgtctgtacatgcatggacatacctgatctctcggccattggtgtcggcgacgtgccattcggctaacaagacgacagctgcagcctgcagcaaaagctagaaca

SEQ ID NO: 112108 - DNA, 1248 bp, Zea Mays
actaaaattattattcatatatacggtatagtatcgactgttaccagtgcaatgtcagtgctttcatcagctgagctccttattgcatgcacgcaggttttggcccaacaacaagagcagaatgtatctgctggagaacacaggtgagaggatcttaacgttatgatttccatccatccgaccttgacaacgattcttcgtcgttatggtctgtctgatctttttttcctgtttttctttctcaacctgcaggggaatttgttcgttccaacgagcttcaggagggggatttcatagtgatctactccgatgtcaagtcgggcaaatatgtatgttcttctattgccgactatttccttgctacataatgctcgtttttctggtccatatgcctgcatcattagtcaactcaaacgtgttgtcgtccttgaaactgcaatccaaatctacgcaaccgttttgcatgccactgtttgtatgtggatgcctggatggcaatcaaggacatagtggcatcttttgatctcgctgttcatggaattggtttacttcagcagcaactcatcaagaaccctgaaaccccccttgtgtcctatatatatccacagctgatacggggcgtgaaggtaaggcccccgccggcgcaagagcaaggcagtggttccagcgggggaggcaagcacaggcccctctgtccagcaggtccagggagagccgcagccgccggtgctcctgaagacgccgtcgtcgacggggtcagcggcgcctgcaaggggaggtctccggaaggcgtgcggcgggttcggcagcagggagccggcgccatgagccagatggcggtgagcatctgaaagagcagcagactccgccatatattgatcgatcgaccaatcgatcgttagttctccaagttactattagctagctatagctcgaaacagctgaactgatgatgacgatggtaacctccgtcgtgtgtgctaagcatgtagcgtgctaggagatgatatattaaatataatcgagtagtagagccacccgctgtgtgacgctaaatttgtgtgcatggtttggtttgtgagttgggcccgtgcgtggctgtgtcatgtcgtggttaattagctatactagtcctgtctgtacatgcatggacatacctgatctctcggccattggtgtcggcgacgtgccattcggctaacaagacgacagctgcagcctgcagcaaaagctagaacattctacaca

SEQ ID NO: 112109 - DNA, 2134 bp, Zea Mays
atgccgcctccggctgcgatgctgctccttacggcggcctcggggcctcccacgctgtcgctgaccctggccgcgaggcgggcgccgctccgggccccaagccggcggaggctgcgggcgctgcggccggcgaggatccgcgccgccgcggcgatcggtggcgagttcggcggcctcggccggcgccgcgtcgtcgtgggagagttcatcgagcgcctgcgcaacgttctgcccgggggcagttggtggcgcctcgaggacggcgatgaggccggggacggggccggccgcgcagaggggagcggtaccaccgccgtgtccgcgctcaggcggatgtgggccctcgttgccggcgacagattggtcatctatgtcggcttcgcgtccctcgtcggcgctgcgctttcggagatcgccataccacatctccttgcagcgtccattttctctgcgcagaatggaggcgcggtgttctaccgaaatgccaagcttctggttgtcctatgtctggtttccggggtgtttaggtatgcaaactggcttgataagctgtatgatgtgagctttcggcagacagtggcttatggaggctggagcctgagcttgaactatctataccattctactcaggtcattggagtggtgattggaggcctagcaatcatgtctgggaagttaactgctgagcagttgacaaaattcacactctatgctgaatggctaattttgtccacatggtggattggggacaactggtcctccctgatgcagtctgtcggagcaagtgaaaaagtttttcgtttaatggatctccttcctagcaagcagcttagctctgaaggcctcaagttagagaagttgaaagggcaaattcagtatgctgatgtatcattttcatatccatcaagacctacggtaccaattttgggaggcttgaatttaacactgaatccaaacgaagtagttgcaattgttggtcttagtggaagtggcaagagcactataatcaatttactacttagattatacgaacctacaaatgggcaaatactaattgatggtgtcccgctcactgagcttgatatcagatggttcagggaaagaattggtttcgtcggacaggaaccacgcttattccgaatggatatcagctctaatattaaatatggttgcccaagagatgtcagtcatgaagaagtgatatgggctgcaaagcaggcctatgctcatgacttcataatggctttgcctgatggttataacaccatcgttgatgatgctcttctcagtggaggtcagaaacaacgtgttgctattgccagggcccttctgagggacccatctatcttactgcttgatgaagccactagtgcgcttgatgctgagagtgaacattatgtcaagagcgtcatcacaaaagttagtcgagattcaaaggctaaaagaactgtggtaatcatagcacacaggctatctacaattcaaacagctgatagaattattgtgatggaaaatggtaatattgtggaggatggtaaacacattgatcttattgagaagggtggtctatattcaagattagccaggcgacaaaatgacgatctcaagtagccctggatcacagaatgtggtttagtgcacgccttctttttaaatggaatggcagaagggagagtcgtctgtcattagtgtattctttgcaagaactgacctggacccaggagctcgaataagctggcattgtttttcccatgaaccagaaacggtttgtgactgatcaaaataaaccaaaacggtttcccccacgaggacgagcacattaagcatcgagagcggcagtatggagaacagacttctaagaggtccagtattgtaaaagtagcttccataacaaagtgtatatgcgtttttatcttgttatcgggaactctgaaacttatcttacactacacacggaggaaacgctccaattttgttacgagcactgtgtgccttatttcctgaattttcgtgtaaaaatgtactccctgcgtcccaaaacagttgacgttataatatttatagttaaacttgtaacttaaattattagcaacataaattattataaaaatatatttaaagatctattgaaata

SEQ ID NO: 112110 - DNA, 1089 bp, Zea Mays
cataaccattctttttgtgtggcagattagcttattacctccatgggtaaaagaaagcggtcgttgtgtcaacaagataaccataatgattctctagccagcaaaataatgagaactagaatcccagatcttcctgaggacatttggtctcatgtacattccctaatgccaatgcgtgatgctggccgtgctgcttgcctatctcgtgcctttttacgttcctggagacgtcatcctaatcttatctttaataaggatacgattggcatgaaaaaaaattcatatggagagaatttccaccacaaaattagccgcattctcaggaatcactctggcattagtttgaaaacattcaagcttgactacagtggcatgtgtgggttcgatggaactatatcttgacagttggcttcaggctgctcttaatccagggattgaagaactcaccctctggttgttccatacaaggagaatatatgaattcccatgctcacttttatctgatggggttcgaaattcacttcggtaccttaaacttcgttgttgtgctctccgtcccacagttgaacttgcccccatgagaagcctaacaagtttacatttgtcctttgtgagcattaaatgggatgggttaaagcgcctcctttccaactcccttgctctggaggaattagagctagtatgttgtgacaagatcgtttgcctcaagataccttctgccctgcagcgtctcaacagccttaatatttttggatgctcggccctcaaagtgctagagagcaaagctccaaatctctctagtctttctcttttacattttggaggcaggctagtcttctcacgtgtgaaaacattgcaaatgaagaaactaatcactgaaagtaccgtctatgatgctcgtaccaggctgccatccactatgcccaatcttgaaactcttgtcataaactcatttgattgggtatgtatgtatgtgtgtgtgtgtgtgtgtgtgtgtatatatatatatatatatatatatatatatatatatatatatatatatatatatatatatatatatatatatactatttaaagatagatgtt

SEQ ID NO: 112111 - DNA, 556 bp, Zea Mays
atcaatttctgcgcatccacattgagaacacctgagcaccaccatggccacctcaggagtgtgaagatatgtggtttcagctctgagaaaagcttatttgaactaacacgttatattcttgagaatgcggtgtcactgaaatttcttacactggacaccttttatggggatcggtgtggtcagggtaagtgtacaagttgtttacccacgcctgatgtttttatggatgtttccaaagcgatctcaggtatcaagacatacatcgagaacaaagttccatccacagttaaactaactgttctggagccttgcagccggtgccatgttagaagagtaatttagacaccatcctagtcatgctacgtcacttccatttaatttaatttaatttgagaagaaccatgcttgtttcctggattatttatagctgtgtcccgatgcacagcaaatttaatctctgatgatggaccgtgcttgtgttttcctgaattaatacatgccaactgtttagtttttgtagtatggcatgtggatttatttaagacaagttgacaaa

SEQ ID NO: 112112 - DNA, 347 bp, Zea Mays
ataaaaaaaggaagccacagctctgcatggtagaagccacgtaccgcaaaacccagcccagaaacaaccacgtgagcgagagagaaaccacaggtggaggcttccatcctcacccatgggccatgctgccgctcggtgtcaaacggggctgggtgattcgccggaggccactgaagctgttcttggcagaggatggcggccgggaacgctcctatgcgatagcaaccgtgccccgcgacaactgcatgcgcgcggccgcaccagcacaatggatgtcacaaaggaccagtcggatgcgggacctctccgcggccgggactctcgtgattgcgcgggctctgaaactg

SEQ ID NO: 112113 - DNA, 273 bp, Zea Mays
atgcacttaatgccgagtagtatacaaatagtcccatactcccacagttcttttgcacacatcaatatggccttcttcctcctaaaggaaaggtatttgatccagacatatggccccggttaccaaacccacctctgcctctcgaccgaaaattgcctcctcccgttgagttcgaagacctggacatggattctaaggcaggattcacaacttggccagcttctcgcagaatcttcactagattccttgagaactttgcatttgcgtgtgtga

SEQ ID NO: 112114 - DNA, 357 bp, Zea Mays
atggcggtgtcgagggccgcgtgcggcgcggcgcagaggagcacggcgggggccgcgcggaggagcatcggggacgaccgcgatgagcagcacagcgcgaccaggatggcattgagggcgctggtcgtgcggtggactgtgcagaacaaggtcgcagcggcggcaaagcggccgtggcgcgcaagggtggacagcaggcggtgctggtgctggcctgttgcgtcaggctgcggtttggagcggcggcacacgcccatcgcagcactggactggatcactgcaatcgtgggcccacgctcgccaaaagtgacgaagctttatatgctcagggaagcagtttcagaaagactatgctga

SEQ ID NO: 112115 - DNA, 1422 bp, Zea Mays
atgcactcgcttgtgaggcgtggcaatggctacggctacggctatggtggttacggcagcagcaatccccatatgaactaccaccgccaaaacaccgagtccgtgaccaccgtcgtcacggagatgaaccgaatggccgtcgacgacaagccctgctacggcggcggcgtgcagaagcaggcctgcaaggtggaggcgttccaggagcacgacgaagcgtacaagggcgccgtggccgtgcagcagaagcactcctccttcaaggaggacaaggaggaggtgcgcggtgctgctgccgccgtcagaagctggcacgacgagttatacaaggaggaggaggaggagaagcgcgtcgtcgacacggagtacggtgcccgctacgggggtgtggccgccgtgaagaagccgggctacaactacaagcagcacgaggcatacggggagaccgaaggtgcagggtacggctacggcgccggcggcgtgaagaagcaagcaggctacagctacgcgcaggaggcgtgcggagagagctacggcggcgctcaccacggtggtgccggtgccgtcgcgcagacgtacgcctacgaccagcagcaggcctacaagcacaagaacgcggcaggggcgggggcggggtacggtgctccctacggtggtggcgccgtgcagcagcacgacggacacaaagatgtgtaccggcacggcgccgccgccggtggcaaagtaaagaagaacggctaccagtaccaagaggcgtacggcggaactgacgcaggagggtacggtgcgcactacggcggcggtggtggcgccgtgcagcagtacgggtacggcggcgccactaccgatggcaaagtgaagaagggcggccaccagtactacggcggaagtggtgcaggagggtacgactctcactacggcggcggcggcggtggcgccgtgcagcagtacggcggctaccataaagatgcgtacgggtacggcggcggcgccaccgccggtggaaaagcgaagaagagcggctaccagtacgaggaggcgtacgctggaactggcgcgggaggatacggcgctcactatggtggtggcgccgccgtcgctcagaagcaaggctacaggcagggcatatacgagagcgagagcgagagcgaaagcgagagcgagagcgacgagagcgactgcgaggaggcgttcctgccgcacggcggccggacgccgcagggcggcgtgcagcacagctacggctacgggggcggggcgtacaagcacggggctggcaacctcggcggcttgcgccgctaccagtcgtacgagagccgcgaggatctcggcggcggacgccgctacgagacctaccagagcaccgtccagtacaccggctccccgaccaagaaccgccacgtcctacgctacggcgcgtag

SEQ ID NO: 112116 - DNA, 1361 bp, Zea Mays
cccactttccagctcggtttgctaacccatggtcgcctcgcctcatcctctcgcccacctccataactttgcatggcctattacatgtcgtccctatccctccctaaagccatcttcttcttcctccttcagtcacccggcctgtcgtgtcgatctcactctcagggtccggtccggtgcatcatatatacccttggtcgatcgatcgaccagatagatacactagatagctaggattgcattgtgttccaccaaaagccagccacaacacatcgacatgatgcaggacttgttctcggtcccttcgtgtttctcggcgggcgagaagcttccggacgtcccggcgtccgctgcggccaccaccaggtccgggcagagcgcggcgacgctggtctaccgcgcgggaatcgccggccacgaccgcctggtgacggtgacgtggtgcaggaacctgctcacccacgggctgaccgtgtcgatcgaagggtcggcgggcggcggcaaggacaagagcggcggcggcagggagtggggcgacgccgacggtggcgcggcctcgtcctccaacaagggctgcagcaccgcctgcaaggtggagatgcagccgtggcacttttggcgcaagtacggcgccaagcagttccacgtcgacggcagggccgtggacgtggtctgggacctcaggagcgcgaggtactccgacgagcccgagccgctgtccgactactacgtcgccgtggtgtcggacgaggaggtggtcctcctcctcggcaacctcaagaaggaggcgttccggcgcaccgggtcccggccgtcgctgcgggacgccgcactggtgtgcaagaaggagcacgtctttagcaagaagcggttcctcaccaaggccaggttccacgacaggggcaagctgcacgacatcagcatcgagtgcagcagcagcaacctcggcggcggcggcgtcgacgtcgacatggtcatcaagatcgacggctacgtcaacgtcctcgtcaggcacctgcagtggaagttcaggggcaacgagtgcatctccatcaaccagctcaaggtgcaggtgtactgggacgcgcacgactggatctttggcacgggggtgaggaacgcgctgttcatcttcaagcccgagccgctgccgtccgccaccaatgagtactctgatttctgcctgtttctgtacgcatggaagcttgagtgagctaggattcctgttcctgcattatactggacacctcaccatatatgttatgaaccaataattcatacgtatcatgtaactgatggattattgggcgatggaagtgtatgcgaaatgaatgattggggccgttttccctttccctttc

SEQ ID NO: 112117 - DNA, 507 bp, Zea Mays
taaatggcctacgacacaagatcatccaatcgagaataatatgcaatgggacaataactagatcgtcctgggatgtttcgctgcagctagagacaacaaacttcggtcgagcatgttctatcaagtgctgcgcagtggggggacgaccgtggatgaaggagctggtttgtttcatctagagaagcagggcgccgccatatgggtgcaattctttggttggctggccctccgcgggtgcttacaatgtcgtgcgaatctcatcatcaagaatgtggtgcctgacatctgtgtggaaacttcagcgcacatcctgttccagtgtcagcgtggctgacctgtggaagccggagttggtgacgccgccgactgccgtggaggagccgagccaccggcgaggggcggaaaacacaggcccgcgacgaaccgtggagggaggcaggaagcaaggcgcagggccgcagggaggtgaggaggtcgccgactgcccggttcgctagttgctagatc

SEQ ID NO: 112118 - DNA, 438 bp, Zea Mays
ggcgaatattgccctccgccaataaatggaaaattcttaaaatgctactatgcttaaaaaatattattattataatgctccatcgctcataagcttaaactgttagtgagaaataaataataaaaataaatccatcatatgctccatcgctcatgagcttaaactgttagtgagaaataaataataaaaaataaatccatcatatgctccatcgttcatgagcttaaacggttagcgagaaatgaataagaaaaaaaaccatcatatgctaaaaaaaccatcatatgctccaatgctttaagagcctaaactgcaagtgccaaaaacaaaaaaaataataaatccaccatatgatccaatgcttcatgagcctaaactgtaagcaacaaaaaaaaattaattacacatgctccatcgctcatgagcttaaaatgttag

SEQ ID NO: 112119 - DNA, 1743 bp, Zea Mays
acagcaatgcgaggttattaagagctacactgattttgaggtggagcattatcatggtgcaaagggtgttgatcaatggaaggctcatagctggcaacagcaactcttaaagtatcaggttatggtcatgacaccacaggtgttgctagacgctttacgccaagctttcttgatcttggacatggttagtctcatgatatttgatgaatgccatcacgcaactggtaaccacccatatactaggataatgaaggagttctatcatggatcagagcataagccaaatgtgttcggtatgacagcctctcctatcataagaaaaggggtctcctctgatttggattgcaaaaatcagctatctgagctggaaaatattttagattccaagatacactctgtggtggatagagaagagatagaactttgtgttccttctgcaaaagaagtgaatagatactatgagccaagaactgtttcttttgacgatttaagtgaagaactggaaattttgtgttccaagtatgatgggctgatcatacaattgcataacagatcgaccaatcagtacaaagatgctgatgaaataacaaaagaatcacggaaacgtctctcaaattctttagcaaagatttgctattgcctagaagatgctggtcttctttgtgctagtgaggctactaaaatctgcattgaaaggggccagagaaaaggttggctgaaggggggcagtgacaccactgatcagcaaagtggtcaaaatggacctatcctgtttgcagaaatttcaatgcttcatatggagttttttcaggaagtgttggatataatcggcaaacgcgtccaacagcaacaaggaattgatgcccttctgaactcagagcgtggatgtgtggaagcaaaaaatatgggctatatttcaccaaagctctatgagctcatgcaagtatttctctctttcagtgaccctgataacgttagatgccttattgcttagggatctagaggaaaaaggacttataattccaaggaatgcaagcagagtggaacaacttgaaaagaattctggtactgtaaaacattgcaacaacgtgcttgatgttatggacacacaaaacgtagcaccacctaggcaaaaggaagtagctgtgttaagtaccaccactcctggctctgttcttgataagccattggttgtgaaggttaagttgagcaaaggaggacctcgtatatcattgtacgagtcgtgtaaaaagcttcagtggccaatgccgacctttgaattcgtgaaggtcgaaccaagcgtgtgctcctcttcctgtggttcgtcacaaaaggttgcgccccaaggattcgcatttgcttcgacaataacgttgcatataccgaacggcgatgtcatcagcctcacaggagatgggcgtgcggataagaagagctcacaggattctgctgcgttgctcatgctctatgagctgcagcggcaacgtagattccaagttcaagaagtatgaggaatcacctcgtggttccatcaccaaagatgcaatgttaccgccaccggcgattattgcttgggcatcttggagtaatgtcaccgccaaatcagtctttagtcgtcagccgcacgggggtgtaagaaaataatgtacttcattctgattctaaattataagacaccccgaattatgtaatctaattatcataatgtcctataatttgaaatggagcggtgttggttactct

SEQ ID NO: 112120 - DNA, 2058 bp, Zea Mays
gagattctgatatatcaagcttcgtgattttggaagctatgacaacacttagatgctgtgaggacttctctatggagcgattagagttattgggggactctgttcttaagtatgcagtgagtgcccatcttttcatgacatttcttaataagcatgagggacagttatcgtccagaaggcaagaaacaatatgtaatgccacactttataggcttggtattgaacgcaggatacagggttacatacgtgatgctgcatttgatcctcgtcgatggcttgctcctggacagctgtccagacgtccttgtccttgtgaatgcccagtaaattctgaggttgtaactgaggatattcataggattgatgacaagtctataattataggcaaggcgtgtgacaagggacacagatggatatgttcgaaaaccatctctgattgtgttgaggctctaattggggcctattatgtcgaagggggattaaaagcagcttttgctgttctcaaatggttccagattgagactgaaatcgaggaagagttaattatggaagctctgtcgagtgcttcagtgcgaaactatcttccaaaagttgatgtagttgaattgcttgaagcaaaactaggctacacttttcaaatgaaaggtttgttaatagaggctctcacccactcatcacagcaagaatctggagcaacatactgctaccaacgcttggagttccttggtgatgcagtcttggatattttaataactcgccatctgttccttagtcataaagacacagatgagggggagctgacagatttacggtctgcatcagtaaataatgagaattttgcacaagttgcggtaaagcacaatctccatcagtttctacaacattcttcggggttcttacaagaccaaattactgaatatgtgaatagtcttgaaagttcgtccatggacagagccagccttttatccagtggaccatgtagggggccaaaagttttaggtgatattgtagaaagtatagcaggtgctattcttattgacagcaaacttgatttggatttagtttggcgggtttttaaacctcttctttcaccaattgtcacacctgagaatttggagttgccccgattcagagaacttaatgagtggtctgacaagaatgggtactttattggaattaagtgtgaaaatcgaggagacagcacaatggctatccttaacttacaactcaaggatttgcttcttgtgaggcaaggttgtgggaagaataaagtagatgcgaaagcacatgcagcttccttattgcttagggatctagaggaaaaaggacttataattccaaggaatgcaagcagagtggaacaacttgaaaagaattctggtactgtaaaacattgcaacaacgtgcttgatgttatggacacacaaaacgtagcaccacctaggcaaaaggaagtagctgtgttaagtaccaccactcctggctctgttcttgataagccattggttgtgaaggttaagttgagcaaaggaggacctcgtatatcattgtacgagtcgtgtaaaaagcttcagtggccaatgccgacctttgaattcgtgaaggtcgaaccaagcgtgtgctcctcttcctgtggttcgtcacaaaaggttgcgccccaaggattcgcatttgcttcgacaataacgttgcatataccgaacggcgatgtcatcagcctcacaggagatgggcgtgcggataagaagagctcacaggattctgctgcgttgctcatgctctatgagctgcagcggcaacgtagattccaagttcaagaagtatgaggaatcacctcgtggttccatcaccaaagatgcaatgttaccgccaccggcgattattgcttgggcatcttggagtaatgtcaccgccaaatcagtctttagtcgtcagccgcacgggggtgtaagaaaataatgtacttcattctgattctaaattataagacaccccgaattatgtaatctaattatcataatgtcctataatttgaaatggagcggtgttggttactct

SEQ ID NO: 112121 - DNA, 1692 bp, Zea Mays
gaattcgaccccgccgctaaaccccgcaccggttgccgaggcgtctcccgctccagctccgactctcacgcgactagggttctgtgcgtccacttccccgtcggcgcaatggaggtcgggggtcaagaagtgaagccaggagccacggtttcttgcaaagttggtgatggcttggttatccacctttcacaggctgcactgggggaatcaaagaaagcgagtgagaatgccattttgtctgttaatattgatgataagaaactagtgcttggaaccttatcagttgagaagcatcctcagatctcttgtgatcttgtatttgataaggattttgagctaccacacaattcaaaaacacgtagcgttttcttccgtggctacaagtcccctgttcctctgtttgagtctaattctggtgaagatagttccgatgaagagctaaaaaccgatcaaattccattgcagaataatgaaattaaaatttctgcggcaaaggttcctgcgaaggatgatgatgatgatgttttcattattctagcgatgatgatgatgatttatagcagtgatgatgatgatgatgatttcactactagtgatagtgataatgaaatgtctgaggaagatgactccagtgatgaagatgaaatgtctgaggaagatgactccagtgatgaagatgaaatgtcaggtggtgctgatcctagtgatgattccagtgatgaatctggttcagaacatacttctgccccaaagaagactgatgtagtagttggcaagaagagagcaatcaaagctgaggcaccttatggtaagaaggctaagtctgaacaatcttctcagaaaacaggtgagctactacttttatgttcttataaagcccaactaaaaacaggtgagctactacttttatgtagactatcttcagtagacgaccatatctcactctctatttcaaacttcactctgcaaacagtgcaatctacagtataaaacaatattttacacggcctgctggagatggccttaaagcccaactaatggatgtgtaacgttaacatgtgaattgaactcttttttgtccttacaaagaccactctttttatgttcttataaagcccaaactctaagggatgtgtaaggttaacatgtgaatgtttaactatattttcgtttacctaaggtgacaaggcttcaacttctcatcctgcaaagcagtccatcaagactcctgcagacaaatctaggaagacccccacagctgacaagaaatcccccaaatctgggagccatggctgcaagtaacgcaacaaatctttcagcagtgcgtcagcactttagtcccatcagaagccaaaaaagcatgaagcctagaggagcatgtgctgtaccttataggttgatctacttgaattatcaaaatcagtggtcttatttttgaacttgaaaatatcaagtttggaacttgcctagtagttatgcgattagtggtcttactatttttaaacttaggaaatctcaagtttggaacatacctggtatgtcttgttaataacatggcaaatagctaacaatgggaaacgtcaaaggttggcccagtattggtcgtggttgaatgatgctaatgtttgaattgagtatgtgacccgtaagggagaatctttgctatctggtagtggcctaacgaagaccaga

SEQ ID NO: 112122 - DNA, 1359 bp, Zea Mays
gaattcgaccccgccgctaaaccccgcaccggttgccgaggcgtctcccgctccagctccgactctcacgcgactagggttctgtgcgtccacttccccgtcggcgcaatggaggtcgggggtcaagaagtgaagccaggagccacggtttcttgcaaagttggtgatggcttggttatccacctttcacaggctgcactgggggaatcaaagaaagcgagtgagaatgccattttgtctgttaatattgatgataagaaactagtgcttggaaccttatcagttgagaagcatcctcagatctcttgtgatcttgtatttgataaggattttgagctaccacacaattcaaaaacacgtagcgttttcttccgtggctacaagtcccctgttcctctgtttgagtctaattctggtgaagatagttccgatgaagagctaaaaaccgatcaaattccattgcagaataatgaaattaaaatttctgcggcaaaggttcctgcgaaggatgatgatgatgatgttttcattattctagcgatgatgatgatgatttatagcagtgatgatgatgatgatgatttcactactagtgatagtgataatgaaatgtctgaggaagatgactccagtgatgaagatgaaatgtctgaggaagatgactccagtgatgaagatgaaatgtcaggtggtgctgatcctagtgatgattccagtgatgaatctggttcagaacatacttctgccccaaagaagactgatgtagtagttggcaagaagagagcaatcaaagctgaggcaccttatggtaagaaggctaagtctgaacaatcttctcagaaaacaggtgacaaggcttcaacttctcatcctgcaaagcagtccatcaagactcctgcagacaaatctaggaagacccccacagctgacaagaaatcccccaaatctgggagccatggctgcaagtaacgcaacaaatctttcagcagtgcgtcagcactttagtcccatcagaagccaaaaaagcatgaagcctagaggagcatgtgctgtaccttataggttgatctacttgaattatcaaaatcagtggtcttatttttgaacttgaaaatatcaagtttggaacttgcctagtagttatgcgattagtggtcttactatttttaaacttaggaaatctcaagtttggaacatacctggtatgtcttgttaataacatggcaaatagctaacaatgggaaacgtcaaaggttggcccagtattggtcgtggttgaatgatgctaatgtttgaattgagtatgtgacccgtaagggagaatctttgctatctggtagtggcctaacgaagaccaga

SEQ ID NO: 112123 - DNA, 1352 bp, Zea Mays
gaattcgaccccgccgctaaaccccgcaccggttgccgaggcgtctcccgctccagctccgactctcacgcgactagggttctgtgcgtccacttccccgtcggcgcaatggaggtcaagaagtgaagccaggagccacggtttcttgcaaagttggtgatggcttggttatccacctttcacaggctgcactgggggaatcaaagaaagcgagtgagaatgccattttgtctgttaatattgatgataagaaactagtgcttggaaccttatcagttgagaagcatcctcagatctcttgtgatcttgtatttgataaggattttgagctaccacacaattcaaaaacacgtagcgttttcttccgtggctacaagtcccctgttcctctgtttgagtctaattctggtgaagatagttccgatgaagagctaaaaaccgatcaaattccattgcagaataatgaaattaaaatttctgcggcaaaggttcctgcgaaggatgatgatgatgatgttttcattattctagcgatgatgatgatgatttatagcagtgatgatgatgatgatgatttcactactagtgatagtgataatgaaatgtctgaggaagatgactccagtgatgaagatgaaatgtctgaggaagatgactccagtgatgaagatgaaatgtcaggtggtgctgatcctagtgatgattccagtgatgaatctggttcagaacatacttctgccccaaagaagactgatgtagtagttggcaagaagagagcaatcaaagctgaggcaccttatggtaagaaggctaagtctgaacaatcttctcagaaaacaggtgacaaggcttcaacttctcatcctgcaaagcagtccatcaagactcctgcagacaaatctaggaagacccccacagctgacaagaaatcccccaaatctgggagccatggctgcaagtaacgcaacaaatctttcagcagtgcgtcagcactttagtcccatcagaagccaaaaaagcatgaagcctagaggagcatgtgctgtaccttataggttgatctacttgaattatcaaaatcagtggtcttatttttgaacttgaaaatatcaagtttggaacttgcctagtagttatgcgattagtggtcttactatttttaaacttaggaaatctcaagtttggaacatacctggtatgtcttgttaataacatggcaaatagctaacaatgggaaacgtcaaaggttggcccagtattggtcgtggttgaatgatgctaatgtttgaattgagtatgtgacccgtaagggagaatctttgctatctggtagtggcctaacgaagaccaga

SEQ ID NO: 112124 - DNA, 1816 bp, Zea Mays
ctccggtggtgctgctggaggtttgtcccgctagggcaaagaggcgcgtgagaggtcggagcctgcaccgccgccgccatgctccgcctccaaaaacacctctcccttcgcctgcaagaacatctccttcccctgcaccgctccgcctccctcatacagctctccctccagcgctctctcctctccaccggctccgcgacatattcctctccgggtcacttcgccgccgatgactacctcgtctccacatgtggcctcacccgggagcaagccgcgaatgccgccaagtgcatctcccactggaagtcgtcctccaacgccgacgccgtgctgtccttcctaaccggcccggcgctcggcctctccaatgctgagatcgcgctgctcgtggccaaagacccgcgcgtcctcagctgcagcgtcgacaacaccctgcgggcccgcttggcccgcttccgcagtcatggcttctccgccgcgcagatcagcgaattcgtccgcgtggccccctgcttctttcgcaaattcaacatcgacgtgaagctcggcttctggatgcccttcctcggctcgcccgacaggttcctccgcctcgtcaagcgtaacttctacctcctcagctccgacctcgacaaggtggtgaagcccaacatccagctgctccaggagtgcggtctatctatccaggagattgggagcctgtgcgtggctaacccgaggctgctcaccagcaagccggacagaatcagggccgtcctcgtgcgtgccggtgagatgggcgtgccccgcaagacgcttttgttcaggcacgctgtgaccgcggtggcgggcctctgtccggagacctttgcatctaagctcaagatgatggccaatattctcgggtgctcagaggctgaggttgccagaatggtgcaaaagaacccgttggtgctgaggcgctccatggagacgattcagcgcgcctgtgagttcctgatcaatgtggtcggtgtcggtaccaacttcattctggacaagcccacaatcctgatgtacagtctggaacgccggctggtgccccggcattacgtgatgaaggtgctccaggacaaaggattgatgcgaaaagatcatagcttctacactttggccgcgattagtgctagcgtgttctgctccaggtatgtacatcctcataagaatgttcttcctaatcttgccgctgcatacgcatctggttgcaatgggaaaatagccatctgaggtgcgcgattccagcaaactggctatatgggcagcagctgcagttgtatcttgcatgtcattcttaacacattcagataccctgatgtgtactctgcgaggctgcagctccgtacttggctcatagcttcagaattgcagaaattcagcataacaagtttaagaactcatgaatgaccaaagcacgatgttgtcaatttcatataccttgtttaggattctggcgatgaattttatcgtgtttcaactcatgctactggcacgcagaatgatatggttcggttcagaaattctgccatggttatgtttttatggtgatcatcaacgaactatggatctgttagcattttcactaaccagcaacgtcctctaaattctatttccgtcctatacaacacgctctaaaagattctatcctccgtatctttttcattgcagcaacgtcctttaaattcagtcctctatatctacagtataccggattttataatacacattgtttttacatgtcgcttatagaaaaattaattatgtatgttgcgattattttatatacaaattactcatcagt

SEQ ID NO: 112125 - DNA, 2304 bp, Zea Mays
aacttcgcacgacttgcgatgcgagttccaaagggctgagcagcgcggctgcgcctctctacctctgccaaatccaaacgagacggtcgccggaggaaggatacccgaaactcacctgagtcacctcccctcgcctcttcttattacgatctcgcgaggcggcggcagccgtcgcgtagccgctttcacacattcggtctccttcgccgccgcctatactcctgcagaaatagccccagagcgaaggcggttgctgcttcttcgtgttccttcgcccgcctcacacgggatccatttgaccgatcgaccgacccacacacaccgagagccagccatggggcaaaaccacagcgcgcaggacgggagcggccacggccggcgctccttccagcagcagccgtcggcgcagtggggcgccggaggaggggggtactacgcccaggacccgaacgccggctactgcggcgcgccggtgccacaacagggaggagggtacgccgcgccttacctgcccccggcgtaccagtaccagcccaccgccgctgctccggcgccgcaagtcgcgaagccgcggcagctggaccggcggtactcgcgaattgccgacgactatcactcggtggaccaggttactgatgctctagctcaagcaggacttgaatcatcaaatcttattgttggcgttgatttcacaaagagcaacgagtggacaggcaaattctctttccatggacgtagtctacatcacattagcaacacaccaaatccgtatgaacaagccatctcgattattgggcgaacactatcgaaatttgatgaagacaatttgattccatgtttcggatttggagatgcatcaacacatgatcaagacgtcttctgtttctctcctgacgagagaccatgcaatggatttgaagaagctcttgatcgatatagggaacttgtaccacatttgcgcttagctggaccaacatcatttgcgccaattattgagatggctatgaccatcgtggagcaaagtggcgggcaataccatgtcctattgataattgcagatgggcaggttacaaggagtgtagatactgcatctggacagctgagttcgcaagagcagaagactgttgatgccattgtgaaggccagtgaattgcctttgtccattgtgttagtaggagttggtgatggcccctgggacatgatgaaggaatttgatgacaacattccttctcgagcttttgacaatttccaatttgtaaatttttcggagataatgtccaagaacatggcacagtcaaggaaagaggctgcatttgctctttcagcattgatggagataccacaacagtataaagcaaccgtggaattaggaaatttaggcagtcgtcgctcttccaagtctcccaacagagttcctctacctccgccttccgcaagtcatgatgcttattcctattcatctaaaagctttagcaaaccaactacctaccctcagagttcttcatcctcatcagcctatcctcaatatggaactccacatacagccaccccggccgcaccttcgtccacttatgacaaccaggtctgtcctatctgtcttgtgaaccccaaagacatggcgtttggctgtggacaccagacctgctgtgactgcggacagagtctcgagtcgtgtccaatctgtcgcactcccatcaccacaagaataaagctatactagcaagtggtggctttggatcattgccaatgggtggtatactggagccaccctgcctcacactggaggatcgcgacggcatgtcccagtaaccgtcggaacacccgctccgtagatcgattggagctaaggattgcagggccaagcttggatcgattggagctgaggattgcagcgttggtctatcggacagggttgccccagtattcatatccacgagtaatgatccaaatcgcagcttgcaaaaaacaatctctatataaacgagaagaaagagagaggagaacacaaaggtagtggtgtggtggagcagtcaattgcgtgtcgggccatgacacgcaacttcccttggtgccttcgttacttgtcaaaccagcaacactagttgtacatatcagaatttcgtgcttatctggacttctgatgccaggcttagaggattctttatttgtgcgcgtacttttagtttcgtccgagatatatgttgatttgttctttgcttgcaattgtgtaaaaaattcaatccgcaaaattttgttttggtgaatcagaaaaaaaaagtatttggtagaaatagaaaaacgaaa

SEQ ID NO: 112126 - DNA, 2301 bp, Zea Mays
aacttcgcacgacttgcgatgcgagttccaaagggctgagcagcgcggctgcgcctctctacctctgccaaatccaaacgagacggtcgccggaggaaggatacccgaaactcacctgagtcacctcccctcgcctcttcttattacgatctcgcgaggcggcggcagccgtcgcgtagccgctttcacacattcggtctccttcgccgccgcctatactcctgcagaaatagccccagagcgaaggcggttgctgcttcttcgtgttccttcgcccgcctcacacgggatccatttgaccgatcgaccgacccacacacaccgagagccagccatggggcaaaaccacagcgcgcaggacgggagcggccacggccggcgctccttccagcagcagccgtcggcgcagtggggcgccggaggaggggggtactacgcccaggacccgaacgccggctactgcggcgcgccggtgccacaacagggaggagggtacgccgcgccttacctgcccccggcgtaccagtaccagcccaccgccgctgctccggcgccgcaagtcgcgaagccgcggcagctggaccggcggtactcgcgaattgccgacgactatcactcggtggaccaggttactgatgctctagctcaagcaggacttgaatcatcaaatcttattgttggcgttgatttcacaaagagcaacgagtggacaggcaaattctctttccatggacgtagtctacatcacattagcaacacaccaaatccgtatgaacaagccatctcgattattgggcgaacactatcgaaatttgatgaagacaatttgattccatgtttcggatttggagatgcatcaacacatgatcaagacgtcttctgtttctctcctgacgagagaccatgcaatggatttgaagaagctcttgatcgatatagggaacttgtaccacatttgcgcttagctggaccaacatcatttgcgccaattattgagatggctatgaccatcgtggagcaaagtggcgggcaataccatgtcctattgataattgcagatgggcaggttacaaggagtgtagatactgcatctggacagctgagttcgcaagagcagaagactgttgatgccattgtgaaggccagtgaattgcctttgtccattgtgttagtaggagttggtgatggcccctgggacatgatgaaggaatttgatgacaacattccttctcgagcttttgacaatttccaatttgtaaatttttcggagataatgtccaagaacatggcacagtcaaggaaagaggctgcatttgctctttcagcattgatggagataccacaacagtataaagcaaccgtggaattaggaaatttaggtcgtcgctcttccaagtctcccaacagagttcctctacctccgccttccgcaagtcatgatgcttattcctattcatctaaaagctttagcaaaccaactacctaccctcagagttcttcatcctcatcagcctatcctcaatatggaactccacatacagccaccccggccgcaccttcgtccacttatgacaaccaggtctgtcctatctgtcttgtgaaccccaaagacatggcgtttggctgtggacaccagacctgctgtgactgcggacagagtctcgagtcgtgtccaatctgtcgcactcccatcaccacaagaataaagctatactagcaagtggtggctttggatcattgccaatgggtggtatactggagccaccctgcctcacactggaggatcgcgacggcatgtcccagtaaccgtcggaacacccgctccgtagatcgattggagctaaggattgcagggccaagcttggatcgattggagctgaggattgcagcgttggtctatcggacagggttgccccagtattcatatccacgagtaatgatccaaatcgcagcttgcaaaaaacaatctctatataaacgagaagaaagagagaggagaacacaaaggtagtggtgtggtggagcagtcaattgcgtgtcgggccatgacacgcaacttcccttggtgccttcgttacttgtcaaaccagcaacactagttgtacatatcagaatttcgtgcttatctggacttctgatgccaggcttagaggattctttatttgtgcgcgtacttttagtttcgtccgagatatatgttgatttgttctttgcttgcaattgtgtaaaaaattcaatccgcaaaattttgttttggtgaatcagaaaaaaaaagtatttggtagaaatagaaaaacgaaa

SEQ ID NO: 112127 - DNA, 1876 bp, Zea Mays
gggtttgttattttcactcaaaccccagcatctcctcccagccggcagcacctaacccgtcacgagcgcaccgccgcacgttccggattccccaccgccgccgggatcccgaccggatccctaattccaaggggtaaacgatgaggccgcacgcggtggggacgggcggcggtggcgtggggaggcggaaggcgggggccgccgctgctgccgcaagccgggagtggatggtggtgccggcgtcgggtccggctcgggtggaggaagccgggaagcacgcggtgatggcgcgtacagggcttcccgcgcgcgatctcagggtactcgacccgttactctcgtacccgtccacgatcctgggccgcgagcgcgccatcgtcgtcaacctggagcgcgtcaaagccctgatcacagccacagaggtgctgcttccaaacaccaaggatcccgcctttgcgcgcttcgtccgcgacctccagacccgtgtcctcgcatcttcgtctgaccaggcagctgagttcactgacatggaaggtgaatcatctaatgttgcttcaccatttcccctaccaagtgcatccaaaggacatgaaatggagatgactaagaagactactgctgttgtgcctgagatgactagtagcagcagtatgcccaatttagctattgcaaaagatggaaacaccaacgttttgcctttcgaatttcgagctcttgaagtgtgccttgagtcagcctgcagatctttggaagatgaaacttctactctggagcaagaggcatatccagcattagatgagctgacatcaaagatcagcacattaaaccttgaacgagttaggcaaatcaagagtcgtctggttgcgatatctggtcgagtacagaaggtgagggatgagctagagcatttactggatgatgaaatggatatggctgaaatgtacttgacagagaagcttactcaacaagaaattagtgaggcttcatctagagctgaggttgatgatccatctcaaacagaagaggatagggatgaagattatagaagtgagccagatggaagcaatgatagctttattggttataagcctaatattgaagaactagagatgcttctagaagcttattttgtgcaaattgatggcacacttaacaagctatcacatcttagggagtacgttgatgacacagaagattatatcaatataatgttggacgacaagcagaatcagctgttgcagatgggagttatgctctcaactgctactgttgtcatcactgctggagtggctgtagttggcctttttggtatgaatattggcatatcactttacgcagacccaacaactgaggaggaaactcgagcagcaaacagaaaattttgggaaactacttttgggaccgttgctggctgcgtgattttgtacatcatagccatgggttggggaaagagaagtggattactgcaatgaggtggaaactcatgcaatgaggtggaaacatgagtgttctgcacccaatgaaaactggtttgacaaaaatctccaagatgagatgttgcattggcatgccgctcaaatacagtacgtcctattccactatgccgggaaagaaacatcttgtgtacgctagtagtaatgtgtgtgaaataaaactattgtacaatttgttgcccctcacctgtcatggcaactcagtaattctgtacctgtttaccacggtagctgcggtttttgctcttgcagttgtaatcatttctgtaactgttgtaactgtatccaccgaactgtaatatgtaaaggaagtatatgagaaagctgcactcttgtctgcatggagatcttgtcattaagctgcaatatttggttccctaact

SEQ ID NO: 112128 - DNA, 227 bp, Zea Mays
ttcatgcctagaagaagctacatcccgcagccattgcaaaatccccaaatcgatggtggagccgaaggaaggggcgcaactagagagatcaaagaagggaaagaatatggtgcgggtggcgacctacttcgcgatgaccttcggtgcgtacctcttctggcagtccagatagggtccacatatggactgcccttcactaggacaaaaaggtactatgtggtgacaca

SEQ ID NO: 112129 - DNA, 1170 bp, Zea Mays
gccgcacacggcacatctcagcgcctcgcctccaccagtccacctccacaacgtcaccttcacctcctcgccgccagacgcgcccgccgccaccccgtgagccggcaacctcccaccatctagcctctgcgcccgcccggccaccgggcactggccacgtccggccgacggccgcctgaggcagtgaggcctgaccacgccctcccttctccactttgtgtctgtgcccggtcttggattcgtggttgtctccgccactgatctcctcctagcacggcagcaccccagagccctagcgcaagcctggtgctccagatctccaccctgaccatgtcggggcggagacaggcctggcagtttgcggccgcgctggtcttcttccacggctccgagtacgtcctcgctgccgctttccacggccgccagaacgtcaccgctacttcacttcttattagcaagcagtatgtattggcaatgggttttgcaatgctggaacacctgacagaaattcttattctcccggaagtaaaggagttctggtttgtcagtaatattggccttctaatggttattatcggtgaaattatccgtaaacttgctgtagtgacagctggacgtgccttcacacacgttataagaacttattatgaagatcagcatcaattgatcacgcatggactgtataggtttatgcgccaccctgggtattctggctttcttatatgggcagtaggaacccaggttatgctgtgtaatccattatcaacagttgcattcacattggtcttgtggcgattcttttcaaaacggataccgtatgaagaatttttcttgaagcagttctttggctctgaatacgatgaatatgcacagagagtacactctggaataccatttattaaatgaaagtatggcacttgcaaaaaagaggatgtaaagggaatgcaggtagagctaatggcccaagctaaaagaatgaatcatgattatcattcgaggcaattcctttatcatatttcatctgctgtattctccaagtgacattttcactgatgtatgctcgataactccaataaaggcataaagcgagagatgctacagctttgttgaatgcaaacaggtttgctcgtgttgaattattgtaaggccgcgcatagcagagcgtgcata

SEQ ID NO: 112130 - DNA, 1667 bp, Zea Mays
gccgcacacggcacatctcagcgcctcgcctccaccagtccacctccacaacgtcaccttcacctcctcgccgccagacgcgcccgccgccaccccgtgagccggcaacctcccaccatctagcctctgcgcccgcccggccaccgggcactggccacgtccggccgacggccgcctgaggcagtgaggcctgaccacgccctcccttctccactttgtgtctgtgcccggtcttggattcgtggttgtctccgccactgatctcctcctagcacggcagcaccccagagccctagcgcaagcctggtgctccagatctccaccctgaccatgtcggggcggagacaggcctggcagtttgcggccgcgctggtcttcttccacggctccgagtacgtcctcgctgccgctttccacggccgccagaacgtcaccgctacttcacttcttattagcaagcagtatgtattggcaatgggttttgcaatgctggaacacctgacagaaattcttattctcccggaagtaaaggagttctggtttgtcagtaatattggccttctaatggttattatcggtgaaattatccgtaaacttgctgtagtgacagctggacgtgccttcacacacgttataagaacttattatgaagatcagcatcaattgatcacgcatggactgtataggtttatgcgccaccctgggtattctggctttcttatatgggcagtaggaacccaggttatgctgtgtaatccattatcaacagttgcattcacattggtcttgtggcgattcttttcaaaacggataccgtatgaagaatttttcttgaagcagttctttggctctgaatacgatgaatatgcacagagagtacactctggaataccatttattaaatgaaagtatggcacttgcaaacacacatctggagataggatattcatattgtgttcgtatcaaatgcacatgacccatcacccatctggagtgcacatattaaatctggacccttcgttcaacaattcagcaatcaatgactgaaagaggatgtaaagggaatgcaggtagagctaatggcccaagctaaaagaatgaatcatgattatcattcgaggcaattcctttatcatatttcatctgctgtattctccaagtgacattttcactgatgtatgctcgataactccaataaaggcataaagcgagagatgctacagctttgttgaatgcaaacaggtttgctcgtgttgaattattgtaaggccgcgcatagcagagcgtgcatatgttgaattattgttgaatgcaaacattgttttgtaccgtagactatattgtttacagagtagagtttgaaatagattagagtttgaaatagagtaaagtttgaaatagagtagagtttgaaatagtgagtaagataggagatgagatagagaggctgctggagatagcctatcgtattacaagtgcagaaacttgctccagcttgcttgggacaaaagaatctgatgccatttttgttgttattccagaacagcacaactcaactatcagggtttttttatctggttataagctgttgttttgtactgagatttcattgttcacttgaagaaacccttgctgggagagcagaatgcatggtgctgtttaagtga

SEQ ID NO: 112131 - DNA, 490 bp, Zea Mays
gttacaacgctttaccacctcagtagcgcttaaaaggcgcttaagcgcctttttaataacactgctactttgtgaaaggaaaaatagttttgagatccaccagtaagatttccaataaactatttcttgaaaaatgtggcatgaccacacttcaataaacatatcttgtagtctgtgtactgtggttactagtgaaacagctcatttttgttcttcctttttaaatacagcacacatctggagataggatattcatattgtgttcgtatcaaatgcacatgacccatcacccatctggagtgcacatattaaatctggacccttcgttcaacaattcagcaatcaatgactggtatattttcgaaaaaaaaaccttcgatgctcttcaaataaaaaaaccttgcacgttcaactgatgattgttgtgcgaattgaagggagatacggtgcttaggatattaaatctggactgtgcatttatatttgtctg

SEQ ID NO: 112132 - DNA, 551 bp, Zea Mays
atcggggccaggccaaccggcacgtttccgaagcctcacggacgggacgggtcacgggtgcaccattcttgacgcccacccaaatccatggcgagctcgccgcgatctccgccggcgcctacgccggaattcgagatctctcggcagtcccgcctctttgcggcgctgctactgggctatctgcccaatgaccgcgcgctgtggcctgtggctgtgggagcagaggagctggcaaagaagagaggacagtacgctgctttcaaaggcgagttccttagaaaccctgtaagtcactgcagattctgctcatacttatggtatcttgattgcagtttttgttgcacatatggtatctagtttatggccaccaatgcctgactagatagatcctctcccaaaaatagagaccccgaatcctgaatttgctaaagtgcaaacagaaggccccactacaacgtaaatgcagaacatgttcacaatgggttcctgcacaggtcagagtaacccgagaggagcaccctttaagccttgggaagaccagtgcttggaat

SEQ ID NO: 112133 - DNA, 1208 bp, Zea Mays
atcggggccaggccaaccggcacgtttccgaagcctcacggacgggacgggtcacgggtgcaccattcttgacgcccacccaaatccatggcgagctcgccgcgatctccgccggcgcctacgccggaattcgagatctctcggcagtcccgcctctttgcggcgttgtccaagaaggtgatataggtctcgatgaactgaggatgctggcggctcagggagtccagacgcggcgggcgtccaggcgaccgtgtggaagctgctactgggctatctgcccaatgaccgcgcgctgtggcctgtggctgtgggagcagaggagctggcaaagaagagaggacagtacgctgctttcaaaggcgagttccttagaaaccctaagtgcaaacagaaggccccactacaacgtaaatgcagaacatgttcacaatgggttcctgcacaggtcagagtaacccgagaggagcaccctttaagccttgggaagaccagtgcttggaatcagttttttgagtactcggagattatggagcagattgaccgcgatgtaaagcgcgcccaccctgacatgcatttcttctgtagcgactcgtcttttgcaaagtccaatcaggaatctttgaaaaatgcactgttaatctttgccaagctgaatgctggaataggatatgtacaaggatgaatgaaattctggcaccgctctttgtatttcggagtgatccggatgataaaaatgctgtatggagtaagagattgtttttaccaagttcttagtgccctacatatagtactgctgatagccgaagctttcctgttcagtttggtcattactatcttttgttgcataatgctgcctggaatccttgttgaaatttgcggaagcgggttcattgttttgtttcgtcgagctggttagtgggtttagagacaacttctgccagaaactagacaacagtgctgttggagttcgagctacactagctgactagccaagttatcacagcttgtagcaaagcatgatggaggtctccaacaacatttggaaataactacagaactctctgtaggttaatccccagttctatgcgttcagatggataccgttaccgctgacccaggaattcaacttcgcagataccattcacattttgggacacagtattaagtgatcgtgatagcctccaggataccttgctcagaattacctg

SEQ ID NO: 112134 - DNA, 2277 bp, Zea Mays
atcggggccaggccaaccggcacgtttccgaagcctcacggacgggacgggtcacgggtgcaccattcttgacgcccacccaaatccatggcgagctcgccgcgatctccgccggcgcctacgccggaattcgagatctctcggcagtcccgcctctttgcggcgttgtccaagaaggtgatataggtctcgatgaactgaggatgctggcggctcagggagtccagacgcggcgggcgtccaggcgaccgtgtggaagctgctactgggctatctgcccaatgaccgcgcgctgtggcctgtggctgtgggagcagaggagctggcaaagaagagaggacagtacgctgctttcaaagtttttgttgcacatatggtatctagtttatggccaccaatgcctgactagatagatcctctcccaaaaatagagaccccgaatcctgaatttgctaaagtgcaaacagaaggccccactacaacgtaaatgcagaacatgttcacaatgggttcctgcacaggtcagagtaacccgagaggagcaccctttaagccttgggaagaccagtgcttggaatcagttttttgagtactcggagattatggagcagattgaccgcgatgtaaagcgcgcccaccctgacatgcatttcttctgtagcgactcgtcttttgcaaagtccaatcaggaatctttgaaaaatgcactgttaatctttgccaagctgaatgctggaataggatatgtacaaggatgaatgaaattctggcaccgctctttgtatttcggagtgatccggatgataaaaatgctgtatggagtaagagattgtttttaccaagttcttagtgccctacatatagtactgctgatagccgaagctttcctgttcagtttggtcattactatcttttgttgcataatgctgcctggaatccttgttgaaatttgcggaagcgggttcattgttttgtttcgtcgagctggttagtgggtttagagacaacttctgccagaaactagacaacagtgctgttggagttcgagctacactagctgactagccaagttatcacagcttgtagcaaagcatgatggaggtctccaacaacatttggaaataactacagaagttaatccccagttctatgcgttcagatggataccgttaccgctgacccaggaattcaacttcgcagataccattcacattttgggacacagtattaagtgatcgtgatagcctccaggataccttgctcagaattacctgccaacgaacatcagccataacctctactccgccaacaaattgcagtgcaccgatctcttttgcgcccgaagcgctgctgtgtttgttcagccgggtgtggctgagtcccagcagcattgcaaaaggaatacagaactgaacccttgcggcgacggtttatttatcatgaccattaacctgacgccctgcatgttgtagcctgtacatgttcacctgacaacgatttattgcatcccagttaatcaaggtgaataataaattgtatcctgccatgtttacgctacacctgggacacatacaacagaacagaacagaacagttggcggcaatcacacaacacagtgtagatctcaccattgttggtttgctgctgccattcttctgcactgtacggtttcttttactactgctgaagtatcactacagggatagaactgagaacccatgtatggtgcgcgttagtgtccccccccagaattccataccccagaacagtgctgtgttttggtggagggaggaagggggcagcttcggtgacgccgaaaggctacaccgctacgactggccctttgcccctcgttcccagagctgctcagcttcagcttcacagctccagaagtgccggcgcgcgtgccgcttcctccgcattgggcgatgcccagctggctggcagttggagctgcggacggacgcggccgccggcgcagccgcgctggtgcagggtgttgagatcctcaagccggaaggccggaaccggaagttgtccggaaccggtctcggtgcaagtgacaggcgagctgctgcaccgcagcaccgtcgtcgtcgatacgcgcgcatgaatgctcggcgttgtgttgcccggcgtggcgtcagaaacggatcggcgatggagatggagttgcagttgctcggagggtgcaatgcaagcacaaacaaagcacagcacaagacgaagcaagcaacacatgacacatgcatagtggcatacgggtgcgaccgctag

SEQ ID NO: 112135 - DNA, 2344 bp, Zea Mays
atcggggccaggccaaccggcacgtttccgaagcctcacggacgggacgggtcacgggtgcaccattcttgacgcccacccaaatccatggcgagctcgccgcgatctccgccggcgcctacgccggaattcgagatctctcggcagtcccgcctctttgcggcgttgtccaagaaggtgatataggtctcgatgaactgaggatgctggcggctcagggagtccagacgcggcgggcgtccaggcgaccgtgtggaagctgctactgggctatctgcccaatgaccgcgcgctgtggcctgtggctgtgggagcagaggagctggcaaagaagagaggacagtacgctgctttcaaaggcgagttccttagaaaccctgtaagtcactgcagattctgctcatacttatggtatcttgattgcagtttttgttgcacatatggtatctagtttatggccaccaatgcctgactagatagatcctctcccaaaaatagagaccccgaatcctgaatttgctaaagtgcaaacagaaggccccactacaacgtaaatgcagaacatgttcacaatgggttcctgcacaggtcagagtaacccgagaggagcaccctttaagccttgggaagaccagtgcttggaatcagttttttgagtactcggagattatggagcagattgaccgcgatgtaaagcgcgcccaccctgacatgcatttcttctgtagcgactcgtcttttgcaaagtccaatcaggaatctttgaaaaatgcactgttaatctttgccaagctgaatgctggaataggatatgtacaaggatgaatgaaattctggcaccgctctttgtatttcggagtgatccggatgataaaaatgctgtatggagtaagagattgtttttaccaagttcttagtgccctacatatagtactgctgatagccgaagctttcctgttcagtttggtcattactatcttttgttgcataatgctgcctggaatccttgttgaaatttgcggaagcgggttcattgttttgtttcgtcgagctggttagtgggtttagagacaacttctgccagaaactagacaacagtgctgttggagttcgagctacactagctgactagccaagttatcacagcttgtagcaaagcatgatggaggtctccaacaacatttggaaataactacagaagttaatccccagttctatgcgttcagatggataccgttaccgctgacccaggaattcaacttcgcagataccattcacattttgggacacagtattaagtgatcgtgatagcctccaggataccttgctcagaattacctgccaacgaacatcagccataacctctactccgccaacaaattgcagtgcaccgatctcttttgcgcccgaagcgctgctgtgtttgttcagccgggtgtggctgagtcccagcagcattgcaaaaggaatacagaactgaacccttgcggcgacggtttatttatcatgaccattaacctgacgccctgcatgttgtagcctgtacatgttcacctgacaacgatttattgcatcccagttaatcaaggtgaataataaattgtatcctgccatgtttacgctacacctgggacacatacaacagaacagaacagaacagttggcggcaatcacacaacacagtgtagatctcaccattgttggtttgctgctgccattcttctgcactgtacggtttcttttactactgctgaagtatcactacagggatagaactgagaacccatgtatggtgcgcgttagtgtccccccccagaattccataccccagaacagtgctgtgttttggtggagggaggaagggggcagcttcggtgacgccgaaaggctacaccgctacgactggccctttgcccctcgttcccagagctgctcagcttcagcttcacagctccagaagtgccggcgcgcgtgccgcttcctccgcattgggcgatgcccagctggctggcagttggagctgcggacggacgcggccgccggcgcagccgcgctggtgcagggtgttgagatcctcaagccggaaggccggaaccggaagttgtccggaaccggtctcggtgcaagtgacaggcgagctgctgcaccgcagcaccgtcgtcgtcgatacgcgcgcatgaatgctcggcgttgtgttgcccggcgtggcgtcagaaacggatcggcgatggagatggagttgcagttgctcggagggtgcaatgcaagcacaaacaaagcacagcacaagacgaagcaagcaacacatgacacatgcatagtggcatacgggtgcgaccgctag

SEQ ID NO: 112136 - DNA, 2252 bp, Zea Mays
atcggggccaggccaaccggcacgtttccgaagcctcacggacgggacgggtcacgggtgcaccattcttgacgcccacccaaatccatggcgagctcgccgcgatctccgccggcgcctacgccggaattcgagatctctcggcagtcccgcctctttgcggcgttgtccaagaaggtgatataggtctcgatgaactgaggatgctggcggctcagggagtccagacgcggcgggcgtccaggcgaccgtgtggaagctgctactgggctatctgcccaatgaccgcgcgctgtggcctgtggctgtgggagcagaggagctggcaaagaagagaggacagtacgctgctttcaaagtttatggccaccaatgcctgactagatagatcctctcccaaaaatagagaccccgaatcctgaatttgctaaagtgcaaacagaaggccccactacaacgtaaatgcagaacatgttcacaatgggttcctgcacaggtcagagtaacccgagaggagcaccctttaagccttgggaagaccagtgcttggaatcagttttttgagtactcggagattatggagcagattgaccgcgatgtaaagcgcgcccaccctgacatgcatttcttctgtagcgactcgtcttttgcaaagtccaatcaggaatctttgaaaaatgcactgttaatctttgccaagctgaatgctggaataggatatgtacaaggatgaatgaaattctggcaccgctctttgtatttcggagtgatccggatgataaaaatgctgtatggagtaagagattgtttttaccaagttcttagtgccctacatatagtactgctgatagccgaagctttcctgttcagtttggtcattactatcttttgttgcataatgctgcctggaatccttgttgaaatttgcggaagcgggttcattgttttgtttcgtcgagctggttagtgggtttagagacaacttctgccagaaactagacaacagtgctgttggagttcgagctacactagctgactagccaagttatcacagcttgtagcaaagcatgatggaggtctccaacaacatttggaaataactacagaagttaatccccagttctatgcgttcagatggataccgttaccgctgacccaggaattcaacttcgcagataccattcacattttgggacacagtattaagtgatcgtgatagcctccaggataccttgctcagaattacctgccaacgaacatcagccataacctctactccgccaacaaattgcagtgcaccgatctcttttgcgcccgaagcgctgctgtgtttgttcagccgggtgtggctgagtcccagcagcattgcaaaaggaatacagaactgaacccttgcggcgacggtttatttatcatgaccattaacctgacgccctgcatgttgtagcctgtacatgttcacctgacaacgatttattgcatcccagttaatcaaggtgaataataaattgtatcctgccatgtttacgctacacctgggacacatacaacagaacagaacagaacagttggcggcaatcacacaacacagtgtagatctcaccattgttggtttgctgctgccattcttctgcactgtacggtttcttttactactgctgaagtatcactacagggatagaactgagaacccatgtatggtgcgcgttagtgtccccccccagaattccataccccagaacagtgctgtgttttggtggagggaggaagggggcagcttcggtgacgccgaaaggctacaccgctacgactggccctttgcccctcgttcccagagctgctcagcttcagcttcacagctccagaagtgccggcgcgcgtgccgcttcctccgcattgggcgatgcccagctggctggcagttggagctgcggacggacgcggccgccggcgcagccgcgctggtgcagggtgttgagatcctcaagccggaaggccggaaccggaagttgtccggaaccggtctcggtgcaagtgacaggcgagctgctgcaccgcagcaccgtcgtcgtcgatacgcgcgcatgaatgctcggcgttgtgttgcccggcgtggcgtcagaaacggatcggcgatggagatggagttgcagttgctcggagggtgcaatgcaagcacaaacaaagcacagcacaagacgaagcaagcaacacatgacacatgcatagtggcatacgggtgcgaccgctag

SEQ ID NO: 112137 - DNA, 103 bp, Zea Mays
ggagatacatgctaccatcatgaattcagcattggaccattccctgtttatgaccctgcaagcaataactacagactaagccgaacaccacaataaaaaaaaa

SEQ ID NO: 112138 - DNA, 2538 bp, Zea Mays
tttttatattgtttccgaggaaaatatgaaaatgaaaataattttagtgtttatctatcgttaccaaccgttttcgccctactcacacatagcgtgatcgctagtgatggcagaacacatgcagtcatgcacatccaaacatgcaaatgcaatgcaacaactgctagcttacgcatagctccattcaatataccatatcccggtgcatatgcgacaccgtattacgttacattacaagcacaactttgatatcacactcctaggggctgtttggtttgtagctaaatgtgcatcactttgtctaaggttagtcgttcgaattgaataactaaccttaggcacaaaagttaggcaaagtgtggcaagttaggcatcaaatcaaacaggccctagtctttgttgcgcacacgcgctgctatattttattctagcatgtgtatatcgtctctgatcgagactggcacaatcaaacctacaaacacaatcgaaaatagtacaagcaaacagcagcagcaggatgtcatcctgtcaacgtactcctacttacgtgccagtagtacgagttcgacgccgagatggatcagcctgtcactgggaagaggcgtccctggtgatgagcgcgcggcggggcttgcgcgacgggttgggcgaggtcttgatgggaaaggacgcctccatggcgatgccgcagaggccgccgttgccggtgccgcgctgcatccggatgtagccgccctctccccaggaagggccccacgagttcttgacgatccagtagggcgtgccgtcgtcgctgacgccgtagccgaccgccgccacgccgtggtccaggtccgtgccgcagtcgcccgtgaacacgccctccgagtagaactgcagcgcctggccccccgcgtcgatggccacggacaccggttggtgcgccaccgccttggccagcgcgtcctcgctgccggccggcacagcctggtggccgtcgatcgccacgacccgcccgcgccgggcccgcgcgccgtcgcaggtgccgttggaggcgtggtacgggtacgcggactcggtggtgatgccgccgtgggacttgatgaactcgaaggcgttctccatgagcccgccctggcacccgttctcgtccgtgtcgcagtcgatcagctcctgctccgacagcgacaccaggctccccgtccgtatggcgttgatgccctccacggccaccactgtggagaaggcccagcagctgccgcagcggccctggttcttgacggccgtcaccgcgcccttctgccgccagtccacggaccgcggcaggtcggtggcgtcgtcgtacatgaaccccggcacggccggcgccgcggtgggctcccggcggaggtcgttgatgcgggagtcggcgaacccggaacggaattcctcacggcccatgtcgccgaagcggttcaggcggaggcggtagggtcggtcgccgcgcttgttgtgcgcgtggatgaagcgcgcgttctccttgaaggtcccgaaccggcggcccttctcgccgtggtgtcggtgcacccggtggtgcgtctgccaccgctcgtacaggtcccacagcgcctcgtccgatgccaggtcccgctcgtcgaactcgatggcgcggcacagctccaccgccgacacgaccaccagggccacaaggagaagcgtcttagcgacctgcgccatcctgcaagtgcttgcaacctaccagcaccgtcgtgtgcagtggccggctgtgctagcgaccggggagctcgatcgctcggctgccggagtgtgagctgatgggtttgcgtctttgggacgacgaggagctagccgtatttatagcgcggagcgggcgagaggctccttgccgcctttgcctttgcggcggcaacgatttggtttgaatttatggcggtaacagaaagcggaagggagatggtgtcagattcagctcgggagttgaggttgaggccggccgatagcggctgcgtcggctgggctctcttgggctgcccaccaggaccggagcgtcgaagattcatccgcgtctccttccaattccatggatcgtttgcgtccggtgccttcgtggtgggagtgggagtggccggtccggccgtattggtatgtgtgcagcagttttatgaatgctactactgctcggtaacctgggtgtggtggccgtcgaggatatcactgacgacaggcggcgttaatggcgatggtcgctgaggccgaggaggtatgagtcggcaagttcgtcgagagattttttttgtactcttcatacagaaacagatatttcaataaaaaaaacttcgacggcttctttgtttagttatttaaatatagtcgtatattattctaaaatatagtcatgtttaaatatagaaaacgagaacgactctaaagcatgcacaggatagaggacaaatgtgagagtgaaaagatataactacttttatgtaagagcaactccaaaagaatgttaaaatttttaccccaaaaactgattattaagagtaggctaaaatgttttaa

SEQ ID NO: 112139 - DNA, 2449 bp, Zea Mays
tgcttttgcaaaattgctccagtcaagggctagtccagtgccccctgaacccgcatccggagctcagaaacccccgccaccggagcccggacggagacgatgccggagacccatccgccgccgccgaggccggtgatgctcgccgacctcaactttgaaccagcggagagcgacggcgaggaccgcccaccgacccccgcacccaaccccgccgccgccgccgccgccgctgcggctccggcggtcgccgctgactcgtccacgaagagtggcaatgaagagggtggtttgacaaaaactgtgatcactacaaaggataccgacactgttgaatgtgaagatgttgatcaacattgtcaaggggcttctgctccacgtgaggaaaaagttagcaacctgaaagctgctttggttcatgtggcccgaaaaatgcctaagaatgctcatgcacattttatgttgggtttgatgtatcaaagacttggtcaggcacagaaggcaatagcatcatatgaaaagtcaactgaaatactgctacaagatgaagaagaagtgcggagacctgatttactctcatcagtgaggatacaccacgcacagtgcattttgcaagcaagcatgggggatagttttgatgaagagcttgaaactggtgagttagatgacattctttcgaagttgaagagttcagttgagttagatcacaggcaagcagctgtttggaatatcctaggtttagttcttcttcggggtggtcagatacagagtgctatctcagttctatcttctctcacggctgttgctccagactacttggactcccttgcaaatcttggcgttgcatacattcaaagtgggaagctagagctgtctgcaaagtgctttcaagaacttcttctaaaagatcaaaaccaccccgctgctctggtgaactatgcagttcttcttctgtgtagatatggatctttgtctgcaggggcagggggcaatgtcagcacaggtccttacgtgcatcagaaagaagccttagttgttgcaaaagagtgcttgcttgcagcagtgaaggctgatcctagagctgcatcagtttgggttaatcttgcaaatgcatattacatggatggtgagcataagaactcaaagaggtgcttggagcaggcagcaaaattggaacccaatcatatgcctgctcggtatgctattgcagttcaccgtatcagagatgctgtaaggtcacaatgttctgatgatcaacttctttgggctgcaaatgaaatggcaacagttctaaaagaaggagacccttccgcagttgacgccccaattgcatgggctggattggcaatggctcacagggcacaacatgaaattgcagccatctatgatactgaaaacatcaatcttaatgatgcagaagagcgagctcaatatacactaaaacaggcaatccaagaggacccagatgatgctgttcaatggcatcaacttggcctgtacaatatttgcatgacccggttcagcaggtctgtaaattttcttaaagcagccttagcccgttccccagattgcagttatgcttggtcaaatcttggtattgcgttgcaactatcagacgatccatcctctgaaactgtatataagcgggcactggtactatcatcaactcagcagctgcacgcaatcttctctaatcttggaattctttatcggcaacataggaactatgaatttgcaaggaagatgttattaaggtcgttggaactgtgtcctggatttgcaccagctagcaacaacctgggtcttgtatttgtcgctgagggccgttgggaggatgctaaaagctggtttgagaaagctctgcaatctgatcccctgcttgatgcggccaaatcgaacttgttaaaagtcctcacattgtctacgaaacagtagaacaagagaagacctaactcctaaggaaattgccactgaagcctcagagttcagacacggaagcgcggtcaccaaatctctgttctgaagtgtctcaactgccagctcaaaattgatgcttggtgcctctagtctactgctcattgctcacagagtcacaggtgtaggaagtttcagaagtgcggcttcgaagactgcatttgattttgactgagttgctgcctatatgacaatcaaagctgcacaggctccgaagtggctgtgatgtgttcttaaagagtcgcatcagcgcaggaagagcccagattttgaagttcatgtgtagctaaatttcgatataagcttgaacggcttcccttagctgatgtatataaataaatatactccaacttgaggtgtactccaagttgagcatgtgcaagttataggttcagtgttccagagcaacttatggttctgtgcggtgaaactaacagcatctaaacctcaaatttggcagcaatttcactttggagtc

SEQ ID NO: 112140 - DNA, 93 bp, Zea Mays
cctcccaatttcttccaccataaggatcatttacacgctcagctatttcaaggaaatttaccaataatttttagttgtttatatttatcaata

SEQ ID NO: 112141 - DNA, 595 bp, Zea Mays
gcgggctattggactccgcgcccacccgttgaacggccgagctgccaacgacggggagtagtacccgccggcgattccacctctctcgccaccacctcccctcgcgtgcgcgaggggaagcccggcgcccgttcgccgccagatcagctcctccgcaccaccctccccttccagatccttctagacctcgccagatcctccgagcgcgggcgcgcggggcggagatctcgccggagaaatggacaagtccagcgctctcgaatacatcaaccagatgttccccactgaggcgtcgttgtcgggcgtggagccgctgatgcaaaagatacagagcgagattcgcagagtggacgccagcatccttgctgctgtccgacagcagagcaactcgggaaccaaggccaaggaagaacttgctgctgcaacaaatgctgttcaggaattaatgcataagatacatgaaataaaaacaaaggctgagcaaagtgaaactatggttcaagaaatctgtcgcgacatcaaaaagttggattgtgctaagaggcacataacaactacaataaccgctcttcaccgtcttactatgcttggttag

SEQ ID NO: 112142 - DNA, 2433 bp, Zea Mays
tcaggttatggatcaaaacggcagtataaagaagcatctgcacagcgggaggcagtgaaccaactatgcagtcattttgaagcctatagagatgtgcccaagataacagaattgagagagaaattcaagaacatcaagaaaatcctcaaatctcatgtattttcagatttttcaagcttaggaactgggaaggaaacagaagattccatgctattgcagcagctatctgatgcttgtttggtggttgatgcattggaaccatctgtaagggaagaactagtgaagaacttttgcagcaaggaactcacctcatataggcagatctttgaaggagcagaacttgccaagttagacaagaccgaaagaagatatgcatggattaaacgtcgactaaggtcaaatgaagacacctggaaaatatttccaccttcctggcatgtcgactatctgctgtgtatccagttctgtaagattacaagggcccagcttgttgatatccttaataatctcaaagaaaaaccagatgttgcaactttgttattggcgttccagagaaccattgaatttgaggaagaattggcagagaaattcagtggtggaactacaaatgctagaaataaagagacaacaagtgatgatgaagatgagggtgggggacacaataaaattgtttcggacatacgaaagaaatatgagaagaaattggctgcacccagtgatgaggttggacaagacaaagataagcagaaagatttgtcagttcctggtgctgggttcaactttcatgggatcatatcttcttgttttgaaccatatatgactgtatacattgaacttgaggagaaatctttagtggatcaattagaaaaacttgtccaggaagaaagatgggaaatcgaggaaggaagtcagacgaacattctatcaagcagcatgcaggttttcttggtgattagaaaaagcttaaagaggtgcagcgcattaacaaagaaccaaacattgttcaacttatttcaggtatttcaaagaatactcaaggcctatgcggctaagttatatgccagattaccaaaaggtggaactggtattgttgcagctgccactggcactgatggacagatcaggacctcagacagggacgagagaatgatatgctacattgtcaacactgctgaatattgtcatcagacatcaggtgagctagctgagaatgttgctaagatgattaaccctcagtttgctgacaaggtggacatgtctgaagttcaggatgaattctcagccgtgatcacaaaagcactaatgactcttgttcacggacttgaaaccaaatttgatgctgaaatggttgcaatgactcgcgttccatgggctacccttgaaagcgttggtgatcaatcagaatatgtgaatggtatcagctctattctgtcaagcagtattcctgtgcttggtaccctgctttcacctacctacttccagtatttcctggacaaacttgcagcatctcttgggcctcggttttatctcaacatatacaagtgcaaacatatatcagaaactggtgcacagcagatgcttttggacacccaagcagtaaagactattctcctagacatcccagctcttggaaaacagagtacaggtgcagctagctactcgaaatttgtcagccgagaaatgggtaaagccgaagctctacttaaggtcattttgtcgccagttgattctgtcgctaacacataccgtgccctccttcccgaaggcacgcctcttgagtttcagcggatacttgacctcaagggcttgaagaaagcagaccaacaagctatcctggaggacttcaacaaacacgcccctgcaccagcccccgccatcaaacaccctgccgttgctccgacggtggcgacaccagttgccacagcatctgtccagattgtgccctcggtggcaactccagctgtttcgattacaccaagcatggcctccttgaagggagcactggcgaaccaagaggacgtcctcgcccgagctgccgcccttgggcgcggagcagccaccacgggcttcaagaggttccttgcattgacagaggccgccaaagatcgcaaggatgggccgttccgcaagctcttcaacgcctaaaatgtcgctcaccgttgtgttcatagttcgtgcccctcgtgcagtgaacatagatataggaaatcctttccacatcgtgtacacaccattaccgttaaccgacagtctataacaaccattttgacagattatcctatcccatcctgcggagaacgattagctcagttgtagcatagagattttgagacagtttgagctattagataagtttttccccctggttttgtgcatgcaaacccaagattctatactcgtgattgaataatcgtttctctccttttttttttc

SEQ ID NO: 112143 - DNA, 1480 bp, Zea Mays
cttgttgtgtgacatgcatgcgttaactgagttcgtctcaaactgactactcattagctttctctataaattttacagtcaggtgagctagctgagaatgttgctaagatgattaaccctcagtttgctgacaaggtggacatgtctgaagttcaggtggccagtcttgtttttgtccctaacttatgtgaatattttattgatattactgttggagataaggcctcaatacctcaatacttgcaggatgaattctcagccgtgatcacaaaagcactaatgactcttgttcacggacttgaaaccaaatttgatgctgaaatggttgcaatgactcgcgttccatgggctacccttgaaagcgttggtgatcaatcagaatatgtgaatggtatcagctctattctgtcaagcagtattcctgtgcttggtaccctgctttcacctacctacttccagtatttcctggacaaacttgcagcatctcttgggcctcggttttatctcaacatatacaagtgcaaacatatatcagaaactggtgcacagcaggtacatgttaaatgccaggctaattttattttatttactactcattcggacatatctcattgctttgcattttgcccccaagatgcttttggacacccaagcagtaaagactattctcctagacatcccagctcttggaaaacagagtacaggtgcagctagctactcgaaatttgtcagccgagaaatgggtaaagccgaagctctacttaaggtcattttgtcgccagttgattctgtcgctaacacataccgtgccctccttcccgaaggcacgcctcttgagtttcagcggatacttgacctcaagggcttgaagaaagcagaccaacaagctatcctggaggacttcaacaaacacgcccctgcaccagcccccgccatcaaacaccctgccgttgctccgacggtggcgacaccagttgccacagcatctgtccagattgtgccctcggtggcaactccagctgtttcgattacaccaagcatggcctccttgaagggagcactggcgaaccaagaggacgtcctcgcccgagctgccgcccttgggcgcggagcagccaccacgggcttcaagaggttccttgcattgacagaggccgccaaagatcgcaaggatgggccgttccgcaagctcttcaacgcctaaaatgtcgctcaccgttgtgttcatagttcgtgcccctcgtgcagtgaacatagatataggaaatcctttccacatcgtgtacacaccattaccgttaaccgacagtctataacaaccattttgacagattatcctatcccatcctgcggagaacgattagctcagttgtagcatagagattttgagacagtttgagctattagataagtttttccccctggttttgtgcatgcaaacccaagattctatactcgtgattgaataatcgtttctctc

SEQ ID NO: 112144 - DNA, 270 bp, Zea Mays
gcttcgatccttaaatcttatagtgcaaaaattatagcccattgtcagccctaccggggaggttccggggtcatgttgtgttgtgcggtgcgccggttccgcggtgccgttcgttttcggcaacggcaagactgctgccaacgcagccctcgcgtgcgtatgtgcgaccgaggtttagttctatactcgatgcggtttctatatacacatctttcgttctcaaatatttatcgtccgctaattcattttaaattaaaacgtggtaaataa

SEQ ID NO: 112145 - DNA, 1697 bp, Zea Mays
gccgcgtcgacgagactgcacatgaaaaccgggggcagcgccgcgccgaaccgggcgcgccgcacaaggttcgatccgccggctccggtggcgcacccagatcagatccccctttcgctggtttctttccccttggccaagcccaaaccgtctttaaatacacccgtcgtcgtccgcatcccccgcctgccttaaccattcctcccaacaccacctcgcctgcgatcttcgtagcctccgtcgcgtcgagcatcgatcatgtcggcctactgcggaaagtacaaggatgagctcatcaagaatgctgcctacattggcacccccggcaagggtatccttgctgctgatgagtccactggcaccattggcaagcgcctttccagcatcaatgtcgagaacgttgaggagaaccgccgtgccctccgtgagctcctattctgctgccctggtgctctccagtacatcagcggtgtgatcctcttcgaggagaccctgtaccagaagaccaaggatggcaagccttttgttgatgtcctcaaggagggaggcgtcctccctggcatcaaggttgacaagggcaccattgaggttgttggcactgataaggagaccaccacccaaggccatgacgaccttggcaagcgttgcgccaagtactacgaggcaggtgcccgctttgccaagtggcgcgctgttctcaagattggccctaatgagccatcacagcttgccatcgacctgaacgctcagggtctggctcgctatgccatcatctgccaggagaatggtctggtgccaattgttgagcctgagatccttgttgatggccctcatgacattgatcgctgcgcttacgtcactgagaccgtccttgctgcctgctacaaggcgctcaacgagcaccatgtcctcctggagggtaccctcctgaagcccaacatggtgactccaggctccgactccaagaaggtgacccctgaggtgattgctgagtacaccgtccgtaccctccagaggaccgtccctgctgctgtgcctgctgttgtcttcctctctggtggacagagcgaggaggaggccacccgcaacctcaatgccatgaacaagctcagcaccaagaagccgtggtccctgtctttctccttcggccgtgccctccaggcgagcaccctcaaggcctgggctggcaaggtggagaacctggagaaggctagagctgccttcctcgccaggtgcaaggccaactctgaggctaccctcggcacctacaagggtgatgctgccgccgacaccgagagcctccacgtcaaggactacaagtactgagttgcttctctttgcgtgcccgttttggaactcctgcctacgagctaggttgcggagtgtggtttgctcgttagagcttattttcggacatccaaaaaacatgcttcctatgtgggatgatggttatctttatatttgtatgttaattagtctctttgctgttaaatttcgtgtaagttggtcctgccgatggagaatcgagcagctccctttttttgttctatcaactatgctgtaattctggctatgtatcggcaaaaacaattctatatgctgagttggagtcggcaaaaattcatatatgctgagttggagacagcaacttgtttggatcatattttgctgagacactcgtgagagattggcatagc

SEQ ID NO: 112146 - DNA, 1044 bp, Zea Mays
ggcggaatgaatcagcttgattcgtactggacctgcccttgcttggatgagatgattttagagaagccaagctggattcgccatgaggggctgcagatcttctccattgacatccagaccggcggcctccgcttcgccacaggtcgggactacaccatcgtgatcagccacaaccctgataacggcacctcaaggaaatcagcagtcaacattccaaattccattgtatgtttatatcactatctggaagaagaagccactgaggaggatgaggatgaaaaggagataacacaatgggaggccatctgctggctttttatgttgactatttggatttcaatactcaggtggatgcttcaaactcctgttgcaacaagttacatggctcattactacaaggatgagactgcttctactggctcatgtggtgtatgtgttgttggtgaaaggaaatatgcttattgcatgatatgtgctcacattacaatgcttgcaaatggcctgtttatttggctcgctgagtggataaaaacaagctccatagaatcagaaaatgtaagcaaggccctttgtgaagatattagcaaactgtcaaacaagatcaggcaacactttcacagaccaaggcgtgcgacatccatacgagaagaagcgcaggcgcgcgcaataggccgcgcattcttcgacaagctcgtctgttgctgcctgcgggagcgggagcaagagcggcatggctgcagctgctgctcaggctggagggagtagcgctacaccgagcactacttgagagtatagtagacctatatatctttgtttaattatcatctctatatcgcaagattaatttgagcttccattctacatttgctccacatatgcttcttgtttctttttctctctcgatagtttcatctttttagcttgtttttagatcttttttctttccaatctattagataggtcagtatatatggctagaatttgtagtaggcgatgggtgagaggtggaatgggttgattaatcggtctggattggattgagtc

SEQ ID NO: 112147 - DNA, 2101 bp, Zea Mays
catgcagccagcaacggacacggaggtggtagggggagctgtgaagaaagagccagaagagatcgtggtcgaagtagacggcgacggggacgaggaagccgagaaggtggtcaagaggaggcggaggaggaggaagaagacgacggcctgggatccgcacaagaagcgcgcatgcgtggattgcacgaagaggtgcgcccggatccatggccagcctgcttcgccgtccgcattggcgtcgtcttccagcaacgcgcggccggtcccggcagtgccgtccttcttcaaggtcatgttgggctacttctccgaggacatggatataccacccccttttgccaagacaatctgggacctggcaggctccaacgtctttctcgaagacgcgttcgggctccgctggcgcgtgcggctctgcctgcgcgacggcgtgctgtcattcgggcacggatggaagaacttcgtgctggaccatgccgtcagctgcggcgagttcctggtgttcaggcagatcgccaggtcggtcttcaccgtgcagatgttcgccccatcagccgtcgagaggctgcacctctgtgagaggaacaagaggcagagccggaagaggaagcccaggccgcagagacagagaacaagctctcccagtatccagactgtcaaggcgaccaagaacagagtgaagaacagtaataagaagagacagcgtactgatgatcaccaaaacggtgtacgcccgagaggccataagagcaagacggcagctcaggtctgcgtcgacgactctgacgtccccgatcctgcgtctgaaccgaagtgtccagacacgtcggaaagattgccggaggctgaagtcacagaaccgcaagaaatttctgagccccctgcgggacgacatgagcgtgaagctcagaaggtgttagacggagaggcagaggtagcagacgacagcgcaatgcttgaagagactgaaaccatctacaacgctagacttacggagcaccaggttcctgctgccaatgaaacagagcatggcgagtgcttggcaaatttcgatgctagcatacctcttgctatgatggatctgaatgaagtgagcatagacgatatatttctgtcggctgatacgtacgaatttggaagtgacatgtgtaacccagaaccgttttctgttggtctgaacatggaaggcaccactactggccaaaactcgggattcagttgccttgaggagctggataccccacagaaccacctttcttccatgggagatggccattgttctctggttccagaagcaggaccatgtaccgaaaacaacaaagagaaggctgatgcactagaaacgggagcatcgtatttctgtgactcctcgtttcatgatatagacatcaacgcgttgcccgctaaggagccgccgtcgtttggagaggatagcccttctcctcgagctggcgctgaaatgcatcctaatgaatgtggattaagcagctgtagtcaggatagaggcaatagttccctccttatcatcaacaagcaagctgcacataaagaatcagattctttcatgacgacgaagcaggataaaccacaaggtggacaatgtagcatgcaggatggggtaggacgacagcatcctactgaaatcacgtcgagaaatgcaaagcctcgtgaatctcctgaactcacgcggaatcctctgggaactggaactggctctgaatccacccacagcggaacctctgaatctggtggtcttctcgcgctcacagaaaacatcaccaaattctgcatcgctgtgcctgcaccagggcaaacatggcttgagattcccggccgactgccggtcattccaagaacgaagaaacatgggaggaaggttgtgatgctcaaggacccacgcatgagactctggcctgtgctctaccaatgcaccccgaggttcaacggcatcatcactggctgggttgacgtctgcagggagaacagaatcaaggaaggtgacacctgcgagttcgaactcagcggtaactctgaactctcattccaactccaagtgcgcgtgcccaatacgcacccagaatgttgaccttatctatcgtat

SEQ ID NO: 112148 - DNA, 2079 bp, Zea Mays
gcctctcccacactccccacttcaccttcgccctcccccgcctgcgagcgcgaggcgcggaggggctagcgcgctagcggcgccatggccctgaccgacgccaccgcgttcccctacggcctgcgggtcctcgtcgtcgacgacgaccccacctggctcaagatcctcgagaagatgctccgcaagtgttcatacgaagtcaccacatgcggtttagccagtgttgctatccaaattctccgggagaggagaaacaagtttgacattgtaatcagtgatgtcaacatgcctgacatggatggtttcaagcttctcgaactcattgggcttgagatggatctacctgttataatgatgtccatagacggagagacaagtagggtgatgaaaggtgtccagcatggtgcatgtgactacctcctcaagcctgttcggatgaaggaactccgaaacatttggcaacatgtgtataggaaaaaaatgcatgaggtgaaagagattgaaggtaatgacagctatgatgatctccaaatgtttagaaatggtgtagagggattcgacgagagggacctatttatgagagctgactctgatactatgaggaagagaaaagacgtgaataaggaccatgcagatcaggactcaagtgatggagctactgttaagaaggctagagttgtctggtctgttgaccttcaccagaaatttgtaaatgctgtcaaccaaattggatttgacaaagtcgggccgaagaaaatactggatcttatgaatgttcctggcctgacaagagagaatgtggccagtcatcttcagaaataccgcctctacttgagtaggttgcaaaagcagaacgaggaaaggataatgggtgctgctaggcaagatttcaatcaaaagggaccatcggatcatcttaacctccgaagttccttccaagagcaaccaggcaacctttccaatggatgtcagcatagttctcagaaggtcgaagctcagaccaacattctcgatcctcatctggacgacacgaagacttcaatgcccttgaaggtgccagataaaaatggaatttcagcaagtgatgctgttgaccctcacaatatcaccactgcttcacctttaagtggggtgttctcttttgaaagaatgccagtgaatcaggacaggaagctatcagaaaccatgatcttggaatgtgagtcctggagtggaagtgtgccaccaaagcagttcatgcagtatccaaagcataaccatgagcgctgcgaccttctaggagactattcttgcttgcctaaaccggacttggagcacccaattgcccctggtcatctgtatgccccaccgccagtaatttcgatgagttacaatgtggagaaagatgtcagagacttctcagatgtaaaaccagatcttcttggctgtatgaagtccttatcaccagcactgacatgtacagttgagtcggtttctgctcaacttagtgacagtgttgtgacctcaactaacagtgaccggaagttttccagcgtggaggggttgtccagcattaaagattgtgactttgatcaggaaaggaacggagctattttgtttacttcagaagaggcaagtatattatgcggcactgattttacttgtctacctgaagacctgtccggctatcaacttcaaggtgtctccttcgggaataaaggattgaacagcatcgatttatatcagtgcaatgatacaatgttaatacctggactgcagaataattggtatgatgatgatgtagagtttagcagtgaaaccgtggagttcccattgctagacggaggcctgtttgcataaatgcctcatctggccctatctttcaaccatgcccttatgtcagcagggatgatgttcattggtatgttcccctatagcgcctcctgtagggctatatttaacctaacttgatcctgtggtggaaggatttaatttgtagtctcgccacttttgataattgtctgtattatagactgtgccatggcacaatgactgcaatatatactcttcacggtgatcaaaattacatatgaagactgt

SEQ ID NO: 112149 - DNA, 2777 bp, Zea Mays
atggcggcggggatcgccggcgcggtggtggcagcgctcctgcttctgtatccggccagggcagcggcagcggcggcggtgggggaggggcggcggttgcacactctgttctcggtggagtgcggcgactacttcgactggcaggcggtggggctcctccacagcctccgcaaggcccggcagcccggcggcgtcacccgcctcgtcagctgcgcggaggaccagctcccgtcctaccgcggcctccgcatcggccacaccctccaggtcccctccttcagccgccacccacgcaccggcgactggtacccagccatcaacaagccagcaggggtagtgcattggctaaagcatagtccagaggccgacaatgttgattgggttgtaatcttggacgcagatcagattattcgagggcccattattccttgggaactcggagcagagaaagggaagccttttgctgcttattatgggggcattgagtacctatccatctacttgggacttaactttgtttggaatagtggttttctaactagggacattgaagaacaatatgatctcggtggcagcagcggtggcagatccttagctggtcgcctaaacccgaccattgatgtgttggtggcacatgttgtgtcatggctccaactctacgacaatggaagcttgggtggcaatcggacgtcactgggcatgagtcgtgggctgggctgtgataacatcctagcacagcttcacactgcacatccagaattttgtgacaaagttggaggaattctagccatgcatattgatgacttaagggctttagcacctctgtggctctcaaaaactgaagaagtgaggcaagataagtcccattggtcaaccaatattactggcgatatatatggcatgggttggatcagtgagatgtacgggtattcatttggtgctgcagaagtaggtctacggcacaagataaatgatgacataatgatctacccaggttatactcctagacctggcattgagccacttatcttgcactatggtttgccatttaaagttggaaactggtcattcagtaaattagaacaccatgaagatggaataatttatgattgcaaccgcttgttcgatccacctccttttcctagagaggttgagatgatggaatctgacccaaatataaaacgtggcttatttctaagcatagagtgcattaacaccttgaatgaaggactcttgttgcatcatgcatctgctggatgccctaaaccacagtggtcaaaatacctgagttttcttaaaagcaggaggttttcagagcttacaaaaccaaaatactggaagggtgaacaggttgacagcataatgaccatgcaacatgttgcattgtccaaggcaaacaatgaatatccaaaaatacacacccttttctctaccgaatgttcatcatattttgactggcaaactgttggacttatgcacagttttcgtttaagcggacagcctggtaacatcacgcgcttattgagctgtacggatgaggacttaaagaactataaaggacatgatcttgctcccacacattatgttccatctatgagccgacatccattgacaggggactggtaccctgcaataaacaaacctgcagcagttctccattggctcaatcatgtgcagactgatgctgagttccttgttatcctagatgctgatatgatcatgagaggccccatcaccccatgggaatatggtgcaaaacgtggccatcctgtttctactccttatgagtacctcattggttgtgataacatacttgcaaagatacacactcgcaatccctccgcgtgtgataaggttggtggtgtcattatcatgcatatagatgatcttcggcgttttgctctactgtggcttcacaaatcagaggaggttcgtgcagacaaagctcactatgcaaccaacattactggcgatatatataattctggctggattagcgagatgtatggctactcttttgcagcagctgagattaacctgcgacacatcattaggagggacataatgatatatccaggttatgttccactgcccagggcaaaatacagggttttccattatggtttgagatttggagttggtaattggagctttgacaaggcggattggagaaacgctgatgtagtaaatacatgctgggccaagttccctgaaccacctgatcctgctacgatcacgaaacaagatctagatgcacgggagagggattttctcagcattgaatgcgggagagctttgaacaaagccctatacctgcaccataagcgcagaaattgcccccggctagacaccattagcagcacatctaagaaaactgatcaagtttctgcttctaacaaaattgtgagtgttgcacaaaagtcaagaagtataagtagaggaaacatcgaatccatggacgagggaaggttgaagactgtcaagaggactgcagcttctgtacaacctctacatagatcaaggagactggccaggtcttctaggatgtggataattgctgtatgggcattatcaattgtggtgttcctattagtaatctccatgtttttcactgagcaaaggagaaacgcttcgagatctagggtttctagaagtttaaaggctcatgtctgagtattctctttttctaccgacacaatttctgactatagagcagacaatattcacaaactgttactttgtggacgtatataatacataaaaggattttgccaaaa

SEQ ID NO: 112150 - DNA, 714 bp, Zea Mays
atgttggatctggcacaagctattcatttccatctcaagattcctgggctttggatctatgcagcaacatgggaattcgatcagaatccaaatgacttggcacattctaatgagttaaaactagaggtcctggatgacctaagagagattcctctcataacgaggactagctactgggattggtttgctaggcttcagcttagcaacttgaacagtttagtaattccaatagaaaagatgctatatcaagaatatttttcaatgtcaaggcactactcatatcatatgttgaagtcttgtgctcgcatgggcttcttcgtgatccatatctacattttcaggtgttgcatattggtgacacagatcaaaagctgcagagatgatacgtctgaaattgatgtcaaacctgatggttccaggagagttaaggacagagctgaactaaagaaccttacacagtggcatctaccagatggtactctctcagtgtccagtagtgttcaccatttcgctcgagaaacaccgtgcaaacgaaatggtgaaccccgatgtccacttatacatcagccaaacccagaatgtgtatacgcaaggctgtggagcaatgatagtgatgaagatggtggtgacgatgacatacctagatcggatggcattgaagatgacccagagttcattgatgatggtggcatctttgaagggggtggggcttga

SEQ ID NO: 112151 - DNA, 2172 bp, Zea Mays
gttggtcctgacaatgtaacattagctctagaattggttggatatggtgaggaagtaaagaatgccgtggcttttgtctttggctcaacatttgtgtgtcgtaatatggatgcggcaaaagaggttgcgtttaataggcaaattagcagtactagtgtgactcttgagggtgacacttatcagccaagtggtcttttgactggaggtagtaaagggggtagagggaacttgctaaggaaactcgacgaactagctaaagctgaggctgatctatctgatcatgagaaaaagctctttgtcattgaacagcagattggagcccttttaccattgcagaaaaggcacactgagttgaaatctcagtttgaactgaagtcatatgatctctcgctgtttcagaacagagttgagcaaaatgaacatcacaagttaggtgagctcgtaaagaaaattgaacaagagcttcaagaatctaaacaagagttgacagaaaagcaagtgcagcatgaaaaatgtgtgtccacagtttctgagttagagaaaactatcaaaacttatggcacggaacgagagggcaaactcaaagcgctggaaaaaagaatcaaatcaattaaatcagagatgcagtcgatgtcgaagcaactaaaggcttatgaaagtgacagggagaggctgatcatggagaaagatgcggttgttggtgagcttgctacactggaagagcagctaacgacttcaaaagctcagattacttctctgtctgaaaccttggaaaaacagaaggacaagttaaatatgctttgtgctcatgaaacaggttacatccataaagcaagattatgatcaagctgaaagtgagctcaacgttgggcgttctaaactgaaggaatgtgactcacagataaaccgtatggccaaggaacagcagaaacttcaacagaagttaagtgattcaaatgttgagaggaagaaaatggaaaatgaggttaagaggatggagatagagcagaaggattgctcttcaatagttgataagctagtcgagaaatataattggattgcaactgagaaacaattgtttgggaaaagtggtacagattatgattttgaatcttgtgaaccacataaagcccgagaggaacttgaaaatcttcaagctcaacaatccagtcttgagaagagggtcaataagaaagtaatggcaatgtttgagaaggcggaggatgagtacaatgatttgatgtcaaagaaaaacatcatcgagaatgacaaggcaaaaatcaagaaagtgatagaggagttggatgagaagaagaaggaaacattgaaggtcacttggctcaaagtaaacaaggatttcgggtctatattcagtactcttttacctggtacaatggcaaaacttgatcctccagaaggtggtacttttttggatggtcttgaagttcgtgtggcatttgggacagtttggaagcagtctctgtctgaacttagtggaggacaacgatcccttcttgctcttagtcttatcctggctctgcttctttttaaacctgcaccactttacatattggacgaggttgatgctgctcttgatctgagccacactcaaaacattggtagaatgatcaaggctcattttccgcactctcagttcatagttgtctctttaaaagagggtatgttcaacaacgccaatgtgatatttcgaacaaaatttgttgatggtgtgtccaccgtgacacgaacagtgccttcgaaacagagatgaccagtttacacatcatgcatcttctgaaccaaaactaggcatacaattccaaaactgtcattttaaggagctgctataatcaaacattttcgctgtttattcagccatgtttattcagccaggaaaattattccatgaaagctgaaccccacaattacttgacgctgatgcctcaagcccctcgcttgtcaggcaatgacatcaaaataggtgctgtaactgtaatctcatggcgtgacgttcatgatgacctcgactggcttctacattatgcgctttcttctgacctgatgtgtaattagcggttgaactattttgtgttgaaggtcgaccgtgtagcatgtatgtaacagccatttataaccaaggtcatgtataattctgacttgcaaatttaccct

SEQ ID NO: 112152 - DNA, 2244 bp, Zea Mays
gttggtcctgacaatgtaacattagctctagaattggttggatatggtgaggaagtaaagaatgccgtggcttttgtctttggctcaacatttgtgtgtcgtaatatggatgcggcaaaagaggttgcgtttaataggcaaattagcagtactagtgtgactcttgagggtgacacttatcagccaagtggtcttttgactggaggtagtaaagggggtagagggaacttgctaaggaaactcgacgaactagctaaagctgaggctgatctatctgatcatgagaaaaagctctttgtcattgaacagcagattggagcccttttaccattgcagaaaaggcacactgagttgaaatctcagtttgaactgaagtcatatgatctctcgctgtttcagaacagagttgagcaaaatgaacatcacaagttaggtgagctcgtaaagaaaattgaacaagagcttcaagaatctaaacaagagttgacagaaaagcaagtgcagcatgaaaaatgtgtgtccacagtttctgagttagagaaaactatcaaaacttatggcacggaacgagagggcaaactcaaagcgctggaaaaaagaatcaaatcaattaaatcagagatgcagtcgatgtcgaagcaactaaaggcttatgaaagtgacagggagaggctgatcatggagaaagatgcggttgttggtgagcttgctacactggaagagcagctaacgacttcaaaagctcagattacttctctgtctgaaaccttggaaaaacagaaggacaaggttacatccataaagcaagattatgatcaagctgaaagtgagctcaacgttgggcgttctaaactgaaggaatgtgactcacagataaaccgtatggccaaggaacagcagaaacttcaacagaagttaagtgattcaaatgttgagaggaagaaaatggaaaatgaggttaagaggatggagatagagcagaaggattgctcttcaatagttgataagctagtcgagaaatataattggattgcaactgagaaacaattgtttgggaaaagtggtacagattatgattttgaatcttgtgaaccacataaagcccgagaggaacttgaaaatcttcaagctcaacaatccagtcttgagaagagggtcaataagaaagtaatggcaatgtttgagaaggcggaggatgagtacaatgatttgatgtcaaagaaaaacatcatcgagaatgacaaggcaaaaatcaagaaagtgatagaggagttggatgagaagaagaaggaaacattgaaggtcacttggctcaaagtaaacaaggatttcgggtctatattcagtactcttttacctggtacaatggcaaaacttgatcctccagaaggtggtacttttttggatggtcttgaagttcgtgtggcatttgggacagtttggaagcagtctctgtctgaacttagtggaggacaacgatcccttcttgctcttagtcttatcctggctctgcttctttttaaacctgcaccactttacatattggacgaggttgatgctgctcttgatctgagccacactcaaaacattggtagaatgatcaaggctcattttccgcactctcagttcatagttgtctctttaaaagagggtatgttcaacaacgccaatgtgatatttcgaacaaaatttgttgatggtgtgtccaccgtgacacgaacagtgccttcgaaacagagatgaccagtttacacatcatgcatcttctgaaccaaaactaggcatacaattccaaaactgtcattttaaggagctgctataatcaaacattttcgctgtttattcagccatgtttattcagccaggaaaattattccatgaaagctgaaccccacaattacttgacgctgatgcctcaagcccctcgcttgtcaggcaatgacatcaaaataggtgctgtaactgtaatctcatggcgtgacgttcatgatgacctcgactggcttctacattatgcgctttcttctgacctgatgtgtaattagcggttgaactattttgtgttgaaggtcgaccgtgtagcatgtatgtaacagccatttataaccaaggtcatgtataattctgacttgcaaatttaccctatgttgatttaccttttattacttagaacaaaaatctcatcatagttttagaaagtcaatgctctaaacacttcataatattattgactatcgtgtgcat

SEQ ID NO: 112153 - DNA, 2009 bp, Zea Mays
cttctcggcacggcatgtggcgtgcaggtgtgcgggctgccatgctagcgcacaaatggcgttcgggcaccgtgtaccctggcccccactcgaaaaaggggaaacccgtcaggcctcgctcctcaccgtaggccgatagccaaccagccagacaacacgtggacacggcagcggcagcggcagcgccctccgacccccgccgggccaccaggcagaaaaggaacggaacggcgcagccgcggcggcggcggcggcggcggcggctgtaggttcccgcaccagcgactggcggacacgtatatccaatcatccatcttctctcgcacggccgcacccgtcctcggactcgttccgtctgctagcaatgccgctggcgctcgcgcagttgcaggacctgcgggaccgcatctccgaccgcctccgcccatggagccgctccgcgcagttctgggtccgcgccgcggacatctacaccagctacaaggtgtgccagctgcgggctgggtttgtgaaggatgaggacgagcgggaggccatgtgggagcagcagcacgagctcggcgcccagaagatgtattccctctgctccgagctcggcggtcttttcctcaaggctgctcaaattctggggaaacctgacctggcacctatggcttgggtgaagagacttgttacgctgtgtgacaaggccccagccacgccatttgatgtggttagagatgttgtggagaaacagttcatgaagaatttcgatgacatattcgaattcttcgatgttgagcctgttgggtctgcttctattgcacaggtgcatcgagcaaggcttaaattgtcaaatactgatgttgctgtcaaggttcaacatccaggagccgaacatctgatgatggttgatattcggaatatgcaagcaatggccttgtttctgcagaagtatgacataaacttcgatctattctctgccacgaaagagatggaaaagcagatatgctatgagtttgactttgtgcgcgaagcaagtgcaatggaaagaattcgagaattcctacgtatcaccaataagaaacctccggttatggtgccccgtgtgattcctgggatggttaccagagaggttttggtaatggaattcatcaaagggaccccaataatgaatcttggcaatgaaatggctagaaggggcatagatcctagcggtaagattgcagccatggcaaagcagaagattttgtcagatcttactcttgcatatggtcaaatgatcttgaaggatggctttttccatgcagatccacacccaggaaacatccttatctgtaaggatacagaggtggctttacttgattatggacaagtgaaagaaatgccagaagatttacggcttgcttatgcaaatcttgtagttgcaatggctgatgatgatttcttgagggctgaggaaagtttcagggagcttggtattcgaacatgggccatatctgacaacaagttagaagaattgtttcagttatccctgcgaatgtttgatacaagattaccaccaggtgtaactgttatgtcaccttttgctgatgattcttcgcttactaaaattggagtggagagtttcccagaagagctattttcagtgcttcgaacaatccagcttttgcgagggctgactgtagggatgggccttacattctcgtgcgctaagcattggagatcaatcgctgaggatgcattgttgaaagcaggaagacaaagcgcttcaaaatcaagaaagcaaaagagaagttttctcaggagactgttttggtgaagtagggataggggctatcaaagaacatgatatacggacattctgtgatgaaagtatgaaacggaattagccaacagctcaagccttcgattcttatattcacagtacatcagttcacaattcatttactttgggtgcttgttatttgactcaacgatgttgctcattcctttataacaatgtgttatttggattttagtatatgttt

SEQ ID NO: 112154 - DNA, 1704 bp, Zea Mays
atggtctttatagatacatacactatactagtccacagtcttcttgtatgtgtaccatcgtgcgatgagcaggtagacgccgaagtttccggcgcagagcatggccagcagccagaagaagttgtcaaggtgcgcccggttgatgtcgtcggggatccagccatcccgcccgccccgcgcggtggcgcgcgccaccacggtgacgagcgcggagctgacgtagttcccgagcgcgaaggacgtcatggagagccccgagcagaggctccgcatcgcgtcgggcgcctggtcgtagaagaactccatctggcctatgaacgtgaacacctccgacgcacccaccaccacgtactgcggcacctgccagaagatggacagcggcaggtactcgccgtccccgccggcgcccgtgttggtgtcgtacatgtcgtggcgcgcgatgacgcggcgccgcgccacctccagcgcccccgcggcgagcatggcggcggtgagcacgacgaggcccacgcccatgcgcgccagctgcgtgaacccgcggtcgtggcccgtggcgcgccgcgccagtgggaccaccaggcggtcgtagagcggcacccacagcatgacgctgagcgtgtcgaagacggagagcacggcggcgggcacgcggaagccgcccacgtacgggtccagcgtgtcgccctgcaggacgaaggtggtggtcatctgcgtgtacgccgccgcgaacacgatcccgctcgcccacaccggcagcagccggagcacgcacttgagctcctccacctgcgtcaccgtgcacagacgccacgcgctcgccggacgcgacttgtcgtccgatggctccaccgacgctgccttgtccaggaacctgaactgatcggtgtgcgcgagccggcggctcccctgtatcgcggacatgccgccgacgtcctcgcactcgtgcagcgtggacgcgtcttccggcacctggacgccgcacttcctgcacgcggcgacgacgacctgcgcgaccctggtgagcgggctgcctgccggcggctggtggcggcggtacgtggcggtgccggccaggaacgccgcgacggccagcgcgctgaagagcgccgggatgccgtacccgagcccccagctgacgctggactgcacccacaccagcacggtgccgccgaccagcgagccgacgttgatggagaggtagaaccagttgaagaaggagctctggcgcccgcgctcctcctcgtcgaactggtcggcgccgaacgacgacagcaccggctgcagcgccccgcccagcgccagcaggtacagccccgcgtagaaggccgcgctctccagcgccgccgccgcgctcaccgtgagcaccacgtaggccaggacggagatgaccaggaagagcgcgatggtccagtatctgccgaggaaggcgtcggcgaggaaggcggcgacgagcggcgtgatggcgctcgtgcccatccagttggtgacgccgttcgcggcggctttgctgccctggtgcaggcggtccttgaggtagttcaccaggttcgtcgacacggcgaagtaggcgatgaactggaagcagttactcgctggtgtgatgtccggccgagtcccgccatcgccgccatgaatgcatgtacgggtgcatgcagtgcagaggccacagccagacggtttgagggcgagcgaggccatatataa

SEQ ID NO: 112155 - DNA, 1963 bp, Zea Mays
caccacacaagcaccagccttcccatcttttccttccttccacctcttcctcctctgtcacccacccctgtttcctctcgattgttcgttagttccttgcttgcctcgccagacagcctctatcctcctccccctcccccgtatccgtcgagtagcaccttacgctgccgccgtcgtcatccgggcgaccaccctgccaaccaccatttcgctccgcccgcctcgcttttccctccccccaaccaaccactcccctcgtcccacttcttgcgtcaccgacccaatccgatcctatcccacccgcacggccgcacggcaacccgccgccgccgcccgagatcccgccccagtgttccgtcccgtgtgatgcgcggatccggctgagggcgagccatgccgagcgtcggcgtgaagatctacagcgtcttcttcaagctcttcctccgccaccgcctccagtcgctggccgccgccgccgcgggggaccccgacaacgcggccttcggcgtctcctgccgccccgacgaggccaccgcgccgcccaacccggccttctccgctgccgccgacggcgtcgcctccaaggacctccacatcgaccccaactcatcgctctccgtccgcatcttcctccccacgcccccgccgccttccccgcacgcccacctcctcgcgcacgcgcacccgcgccgcgccagcgaccccaccccgacgacccccgcgcccgcgcccgccaacggcgcgccgtaccgagggtacctcccgcacgccgtctcctcgccgcgcgccgccgcgtcggcgcgccggaggctgcccatcgtcgtgcagttccacggcggcggcttcgtcaccgggagcaacactgccgcggccaacgacgccttctgcaggagggtcgccaagctctgcgatgccattgtcgtcgccgtggggtacaggcttgcgccagagagccgataccctgccgcgttcgatgacggggtcaaggtgctcaagtggatcgccaagcaggccaatctcgccatgatgaccaaggtcgggggtggtgttgacaccttcggtgcatccactgttgagccgtggattgctgcacatggtgatccagctagatgtgttctacttggtgcaagctgtggtgcaaatattgctgattatgtcactcggaaggtggtcgaagatgggaaaccgtttgacccggttaaggttgttgcacaagttctgatgtatccatttttcatagggagtgttccgacacactcggaaattcggcttgcgaactcatacttctacgacaagtccacatgtttacttgcttggagactatttttgtcagagaaagagttcaacctagaccaccctgctgccaaccctctggcgcctagcagacgagctcccccactgaagtgcatgccgccgaccttgacagttattgccgagcatgactggatgagggatcgagcaattgcttactctgaggaactccgcaaggttaatgttgactcgccagttcttgactacaaggatacggttcatgagtttgcaaccctggatgtgttcctaaaaacaccacaggcccaggcctgtgccgaggacattgccatatggatgaagaaatatatatccctccgagggcatgagttctcgtattagttgtagacccttcactgggaagcatcagtgtgttcttctcaactggtggaaagagggatgtttgattacagttgagtaaccagttagcttaatgtgactccttcagtgatttctgtgggagaatgtagtgtgcaaagttgtagactgtaatcaaaaggtactcttttcctgtagagctcaattctttcattccttttgtatcatttgtgcattacggaattactggtgcttgaggttaccatttttttgagaagaaatatcaatctcagtggtggagctgtgaagcactgagctccacacaacaacatcgtcc

SEQ ID NO: 112156 - DNA, 1401 bp, Zea Mays
cacaagcaccagccttcccatcttttccttccttccacctcttcctcctctgtcacccacccctgtttcctctcgattgttcgttagttccttgcttgcctcgccagacagcctctatcctcctccccctcccccgtatccgccgacggcgtcgcctccaaggacctccacatcgaccccaactcatcgctctccgtccgcatcttcctccccacgcccccgccgccttccccgcacgcccacctcctcgcgcacgcgcacccgcgccgcgccagcgaccccaccccgacgacccccgcgcccgcgcccgccaacggcgcgccgtaccgagggtacctcccgcacgccgtctcctcgccgcgcgccgccgcgtcggcgcgccggaggctgcccatcgtcgtgcagttccacggcggcggcttcgtcaccgggagcaacactgccgcggccaacgacgccttctgcaggagggtcgccaagctctgcgatgccattgtcgtcgccgtggggtacaggcttgcgccagagagccgataccctgccgcgttcgatgacggggtcaaggtgctcaagtggatcgccaagcaggccaatctcgccatgatgaccaaggtcgggggtggtgttgacaccttcggtgcatccactgttgagccgtggattgctgcacatggtgatccagctagatgtgttctacttggtgcaagctgtggtgcaaatattgctgattatgtcactcggaaggtggtcgaagatgggaaaccgtttgacccggttaaggttgttgcacaagttctgatgtatccatttttcatagggagtgttccgacacactcggaaattcggcttgcgaactcatacttctacgacaagtccacatgtttacttgcttggagactatttttgtcagagaaagagttcaacctagaccaccctgctgccaaccctctggcgcctagcagacgagctcccccactgaagtgcatgccgccgaccttgacagttattgccgagcatgactggatgagggatcgagcaattgcttactctgaggaactccgcaaggttaatgttgactcgccagttcttgactacaaggatacggttcatgagtttgcaaccctggatgtgttcctaaaaacaccacaggcccaggcctgtgccgaggacattgccatatggatgaagaaatatatatccctccgagggcatgagttctcgtattagttgtagacccttcactgggaagcatcagtgtgttcttctcaactggtggaaagagggatgtttgattacagttgagtaaccagttagcttaatgtgactccttcagtgatttctgtgggagaatgtagtgtgcaaagttgtagactgtaatcaaaaggtactcttttcctgtag

SEQ ID NO: 112157 - DNA, 161 bp, Zea Mays
ctgcaccaaaaactgaagaaatcttgttgcttcaggacctattctctcgcctttcactgtaaatgcttttatgacacgataaacatcttcacgctgcctggtcacctcgcaggaaatacatgttcagcaaattgttgcatcggttgagatagaagaaaggt

SEQ ID NO: 112158 - DNA, 1709 bp, Zea Mays
cagcgtgcactttatggaagatcagctataaatttatgattcaagtctgaacaggtgtttatactgtttctcatgcagaagtaagtttgatttcttcttgtttttttaaacaaaggtacaaggagaacaggtgggatcccaagcagcttatcggctctggtggcatgccatcatcacattctgccacggttacagcactagcagtagcgattgggttgcaagatggctttaactgctccctctttgcaacagcaactatatttgcaagtgtggtaatgtacgatgcttctggtatcagattgcatgctggaaagcaagcagcggtactgaaccaaatagtttgtgaacttccttctgaacatcccttgtctgaaacaagaccactgcgagaacttttaggccatacaccaacccaggttgttgctggcgcattgcttgggtgtacgatagccacagcaggacaattattcgtttgaactccgaaggtgcaggagaaatgttgtagcatttgcatcgcggggacttgagaagaagtttctctagtgttctgctactttaggtattggtaagattttcaacttggtgctgtagtgttgtcgaatgttgtaagctctgatggaacgtgattatttgtcaaggtgatgttcacaggattgttgtacagaacatttgttcgataatgtcatggttatgattgatgaaatctaaaatgtgattagaatagtgatgatttgtgaccaatagaaatggctctgaggtgagattttaggaagacaacgggcttgggaatgagactttaaaacaccagtacctaggattatatagcataacaagaagaaaattcataaccatcgtagaagttttatcaaccccacaaccaaatatttcttggcggagatctgtgataggaccaagattaatagcgtggaacgaattgtattcaggtatcgcgagggtccagctagaccagggtgaagatgagttcacctggggtctaactaagtcaagaaaattatcagttaagtcgctctaccaggccttgatcaaaatcaacatcccaaatcataataaagttatttggaagctaaccccccctaaaaatcaaagtatccttgtggtatctaaaaaggggagtcattctgacaaaggataacttagcttctatcacaaaacgagacgatcaggcatcttctttttgactgtcattttgcgaggcgagtttgggacatcatttttgtagcttttggtatttctaaaccttctaacatccataatatgtttgggaactggatatgatgcttcggaaatgaccataaaggtctagctctacttgggacaacaattgtatgttggtctatctggctaggtagaaatgagttaattttttaaaacaaaatttctttatcttctttgcaggttatttttactgtagcctagaggcttcacacatgggctgtgctgcggaggtagaactgatgcaatttttttggtaatggttacgtaacatttgactcaagtgaccaaggagtttttttccttggaagcatgcttggcggtctagtcttcggattgatagccactagtgtgtatctttagattctgctggtctgtgtggctcttgtgggcagaggacggaagtgacttttaaggactggtatcacctcgatgtactgttcttgaataaataaaaatccttccttttcaaaaaa

SEQ ID NO: 112159 - DNA, 2037 bp, Zea Mays
cacaaacagactctgctcatcaggtattttcgggtctacggtcggtcaatcggagtgtacacagcaagcgccggcccgcgggcgctctcccgaatcccgacacccggagttggagttggaggagcccggagaggcggcggagcgcagccaaaaaaaaaaaaaaaaaaccctgagtcccgcaaaacccctaaaccctagcccctcacctctcgcctccgccctcatccgcgcgacttgcagcggttggaggcgaagccggctccatgacgaccctcctcaggcgcgcgtcgctgcggcgcgtcattgccgccgccgccgcctcttcttttcaccctgagagctataagcaagggatctgtggctccacatttcattgccgagagttcgcatcaaaagcaaaaaagaagtcaagtggaacagactctggggaggagaacatgtcaaagaaagacttggctttacaccaggctattgatcagataacgtctgcatttgggaagggggcaataatgtggcttgggcgttcacaaggccatagagatgtaccagtcgtgtctactgggtctttggatttggatatggctctaggaactggtggtcttccaaaggggcgtgttgtagaggtatatggtccagaggcttcaggcaagacaacgcttgctctacatgtcattgcagaagcacaaaagaatggaggttactgtgcctttgtagatgcagagcacgctttggatccagctctcgccgagtcaattggtgttgacactaacaatttactcctttctcagcccgattgtgctgagcaggcactcagtcttgtggacacactgattcgaagtggatctgttgatgttgttgtagtagacagtgttgctgcgcttgttccaaagactgagcttgatggtgagatgggtgatgcacatattgctcttcaggctaggttgatgagtcaagcccttcgcaagcttagccactccctttcactttcacaaacaattttgttatttattaatcagatcagggccaaggtagccacatttggatttggaggaccaactgaggttacttctggtggcaacgccttgaagttttatgcatctgttcgcttgaacatcaggcgtattggtttggtaaagaaaggcgaagagacaataggtagtcagattgctgtgaagattgtaaaaaacaagcatgccccacccttcaagactgcacagtttgagcttgaatttggaaaggggatatgccgcagttctgagctttttgaacttggattgaagcacaagcttatccgaaagagtggtggttcgtattatagtttcaatggtaaggctttcaatggtaaaagtaaccttaaatcttaccttactgaaaacaagagtgttgccaatgatctggagatggaactaaagagattgatgggaactgatgcgtctaaagagcaggaggcaggagacagttcgcagagtgattttcctgaagagagtgtcacacctgaagcatcgtcagaagaggatctgggagccataattgaaggttagccagtgatctgatgtgctggcaagtgggaacagaatttctggagcagttgttcctgtaaaacaatatcttgggtcctgaagtcaccaccgtttggatcgacatgcctgtggtgttctggtgatctcatcatagcagacttcagtctttactgtgcttatacagtagtgcagcaggaagagaattcacattgtgtgaaatcatggtgatatctgagaggtggaagttgtagtaagccgggaagggtgaggtattgtggtccgtggcatttaaacttcagtaagcaaacgccgtgtatatatgatgtgcacattttgaaaccgggcattctttattgactgctgctagatttacattgagctccctccacttccaatacctaccttttttttgcgtggagctagttttttggatggtgcttctgcggaagcctgttgctggaagatccaatgtcgtagagctggggcatttctgaccttggctgatctatgttcgccg

SEQ ID NO: 112160 - DNA, 3123 bp, Zea Mays
ggccgccccacgctcttcctcctcctcctcgctcgtcgacggtgacccccgcggagccgcgtggatacctcgccggggagatctgcctgccgtctctacgggcaggtaccagagttggagcgtggttactggcaggctgtggctgcattcggcctcccgctcctcctacacgcgcgcgcccggcctccttcaaggttggctctgaagacaaagcccaagctccctgcgctgctgcgcaagcggccgaccttcctgccggcggtactccctgtgctggatcctctgtctagtgttgcagctgccagcgcttctcatcctcactctaccggagtggagatccgtccgggcgtgggttgattccttcttttcgggtcagatgttggagcttaggtagtagccaacgatggaagcaatggaggccgaagaaggtccttttctggctaatgatgccaagttgcacgcaggaatttgtagagcatttcatccttctgtatctaagctttccgccattttcccctttatcgaagcatcaagacccagaagcaagcctggtatacaagcattgtgttcactacatgtagctcttgataaagccaaagggcttcttcaacattgtgcagactgcagcagactctacttggccatcacttcggaaactgtgcttttaaagtttgagaagtctagaagccagcttcaggagagtctaaggcgcactgaaagcatagtaactgaagatattggctgtaagattgtggagattgttggtgagctggaggaaattgtttttacattagatagatcagagaaggaagctggtgatgagctgatcaaattgctccagagaaataataaaacaaatggttccagtgacagtggggagcttgaggtattccatatgtctgctcttaaattgggaattacatcttctagggcagcactcaccgagagaagagcccttaagaagctaattgagaaggcccgttctgatgaagacaagcggaaggagcttgttgtgtcatacttgtacaatctcatgaggaagtactcaaagttcttcagaagtgagactggtgatgatacagattctcagggatcgtctccatgctcgccaacagtattaggcatggatgatatgtatgggccgtacaacaatggtcgggcatttagtagacagctttcgagcattcagtctttcaattcaaggtttggatctttcaattctaggcttggatcattcaattgcagacgtggtggtggtccaaggtctgagaatatgtcaatccctcctgaagaacttaggtgccctatttccttacaactcatgtatgatccagtcatcatttcatccgggcagacttatgagcgtatttgcattgagaaatggttcaacgatggtcacagcacatgtcctaaaactcagcagcaacttgcccacctgtcattgactccaaactactgtgttaaggccctcattgcgagctggtgtgagcagaacgattttccagttcctgatggtccaccagggacttttgatgtaaactggagacttgctttgtctgacactgaggccgcaggctgtgtgtcagttgaaagttttgattgtgctaatgcaaagagtgtcaaggttgtcccaatggagaacgttagaaaggaggagccagcaaacagtgaatcgggaactctggatgacggctcctgtaacgatttcgatttgaacgaaggctatgggaacttgctgctcctgctccatgaaagaagtaacatgaacaagcagtgcaggttggtggagcagataaggtatcttttgaaagacgacgaggaagcaaggatccagctgggctcaaatggctttgccgaggcactggttgagttcttgaggaatgctgtgaatgatggaaatgagaaggcacaagaagttggtgcaatggctcttttcaatcttgcagtcaacaacaacagaaacaaggggctcctgttatctgctggagtcaccgatctacttgagcagatgatatcgaatccacggctatctggtcctgccacagcactctacctgaatatttcctgccttcctgacgcgaaggccgtcatcggttcgagccaggccgtgccgttcctagtcgaccgtctgtacagccaagacggcagcgacacgagaggaagctcctgcaagcacgacgccctgtacacgctgtacaacctctcgagccaccaggccagcgtgccggcgcttctagccgcgggcatcgtggacgctctccactgcctcgtcacggagtctccagggtcggaggaggggcttggctggacagagaaggctctggcggtgctcatcagcctcgcggccacccaagctggccgaaaggagatcatgtccacccctggcttggtcagcacgctggcgatgctgctggacacgggcgagtcgacggagcaggagcaggcagtgtcgtgcctcctggtgatgtgcggcgccgacgacaagtgcatcgcgccggtgctccaggaaggggtggtcccgtccctcgtctccatctcggcggccgggactgggaggggcagggagaaggcccagaagctcctgaagctgttcagggagcagaggcagcgggacacgccgccgccacagcagcagcagcagcagctgctgcagagccagctggcggagggcgggaacggtggtggtggagctatcgtgtgccaccgggaatcgaagccgctgtgcaagtccaagtccaggaagctgggcaggacgctgagctcgctgtggaagaacaggggcttctcgctgtaccagtgctaggagatgcatgctagagtagtgttttgagttgatcagtgggtctgcgtctgtacatcatcttctgccttgtttttctcaactggtcctttcttccccccttcttctctgggggtgttgttttatttgaggtaaaaaaaacttgatgttcttccccccctcctcggttgggtgatgtagggcattttcttccatctcggccatgacaggtcatttgtacagttgctgctgcttcagtctatctgatactcagtctcccccttttcagatcaggcgcttcttcccattcaattcaaaacccaacacggcttgcagcttgcaag

SEQ ID NO: 112161 - DNA, 2945 bp, Zea Mays
ggccgccccacgctcttcctcctcctcctcgctcgtcgacggtgacccccgcggagccgcgtggatacctcgccggggagatctgcctgccgtctctacgggcaggtaccagagttggagcgtggttactggcaggctgtggctgcattcggcctcccgctcctcctacacgcgcgcgcccggcctccttcaagtcagatgttggagcttaggtagtagccaacgatggaagcaatggaggccgaagaaggtccttttctggctaatgatgccaagttgcacgcaggaatttgtagagcatttcatccttctgtatctaagctttccgccattttcccctttatcgaagcatcaagacccagaagcaagcctggtatacaagcattgtgttcactacatgtagctcttgataaagccaaagggcttcttcaacattgtgcagactgcagcagactctacttggccatcacttcggaaactgtgcttttaaagtttgagaagtctagaagccagcttcaggagagtctaaggcgcactgaaagcatagtaactgaagatattggctgtaagattgtggagattgttggtgagctggaggaaattgtttttacattagatagatcagagaaggaagctggtgatgagctgatcaaattgctccagagaaataataaaacaaatggttccagtgacagtggggagcttgaggtattccatatgtctgctcttaaattgggaattacatcttctagggcagcactcaccgagagaagagcccttaagaagctaattgagaaggcccgttctgatgaagacaagcggaaggagcttgttgtgtcatacttgtacaatctcatgaggaagtactcaaagttcttcagaagtgagactggtgatgatacagattctcagggatcgtctccatgctcgccaacagtattaggcatggatgatatgtatgggccgtacaacaatggtcgggcatttagtagacagctttcgagcattcagtctttcaattcaaggtttggatctttcaattctaggcttggatcattcaattgcagacgtggtggtggtccaaggtctgagaatatgtcaatccctcctgaagaacttaggtgccctatttccttacaactcatgtatgatccagtcatcatttcatccgggcagacttatgagcgtatttgcattgagaaatggttcaacgatggtcacagcacatgtcctaaaactcagcagcaacttgcccacctgtcattgactccaaactactgtgttaaggccctcattgcgagctggtgtgagcagaacgattttccagttcctgatggtccaccagggacttttgatgtaaactggagacttgctttgtctgacactgaggccgcaggctgtgtgtcagttgaaagttttgattgtgctaatgcaaagagtgtcaaggttgtcccaatggagaacgttagaaaggaggagccagcaaacagtgaatcgggaactctggatgacggctcctgtaacgatttcgatttgaacgaaggctatgggaacttgctgctcctgctccatgaaagaagtaacatgaacaagcagtgcaggttggtggagcagataaggtatcttttgaaagacgacgaggaagcaaggatccagctgggctcaaatggctttgccgaggcactggttgagttcttgaggaatgctgtgaatgatggaaatgagaaggcacaagaagttggtgcaatggctcttttcaatcttgcagtcaacaacaacagaaacaaggggctcctgttatctgctggagtcaccgatctacttgagcagatgatatcgaatccacggctatctggtcctgccacagcactctacctgaatatttcctgccttcctgacgcgaaggccgtcatcggttcgagccaggccgtgccgttcctagtcgaccgtctgtacagccaagacggcagcgacacgagaggaagctcctgcaagcacgacgccctgtacacgctgtacaacctctcgagccaccaggccagcgtgccggcgcttctagccgcgggcatcgtggacgctctccactgcctcgtcacggagtctccagggtcggaggaggggcttggctggacagagaaggctctggcggtgctcatcagcctcgcggccacccaagctggccgaaaggagatcatgtccacccctggcttggtcagcacgctggcgatgctgctggacacgggcgagtcgacggagcaggagcaggcagtgtcgtgcctcctggtgatgtgcggcgccgacgacaagtgcatcgcgccggtgctccaggaaggggtggtcccgtccctcgtctccatctcggcggccgggactgggaggggcagggagaaggcccagaagctcctgaagctgttcagggagcagaggcagcgggacacgccgccgccacagcagcagcagcagcagctgctgcagagccagctggcggagggcgggaacggtggtggtggagctatcgtgtgccaccgggaatcgaagccgctgtgcaagtccaagtccaggaagctgggcaggacgctgagctcgctgtggaagaacaggggcttctcgctgtaccagtgctaggagatgcatgctagagtagtgttttgagttgatcagtgggtctgcgtctgtacatcatcttctgccttgtttttctcaactggtcctttcttccccccttcttctctgggggtgttgttttatttgaggtaaaaaaaacttgatgttcttccccccctcctcggttgggtgatgtagggcattttcttccatctcggccatgacaggtcatttgtacagttgctgctgcttcagtctatctgatactcagtctcccccttttcagatcaggcgcttcttcccattcaattcaaaacccaacacggcttgcagcttgcaag

SEQ ID NO: 112162 - DNA, 2856 bp, Zea Mays
ggccgccccacgctcttcctcctcctcctcgctcgtcgacggtgacccccgcggagccgcgtggatacctcgccggggagatctgcctgccgtctctacgggcagtcagatgttggagcttaggtagtagccaacgatggaagcaatggaggccgaagaaggtccttttctggctaatgatgccaagttgcacgcaggaatttgtagagcatttcatccttctgtatctaagctttccgccattttcccctttatcgaagcatcaagacccagaagcaagcctggtatacaagcattgtgttcactacatgtagctcttgataaagccaaagggcttcttcaacattgtgcagactgcagcagactctacttggccatcacttcggaaactgtgcttttaaagtttgagaagtctagaagccagcttcaggagagtctaaggcgcactgaaagcatagtaactgaagatattggctgtaagattgtggagattgttggtgagctggaggaaattgtttttacattagatagatcagagaaggaagctggtgatgagctgatcaaattgctccagagaaataataaaacaaatggttccagtgacagtggggagcttgaggtattccatatgtctgctcttaaattgggaattacatcttctagggcagcactcaccgagagaagagcccttaagaagctaattgagaaggcccgttctgatgaagacaagcggaaggagcttgttgtgtcatacttgtacaatctcatgaggaagtactcaaagttcttcagaagtgagactggtgatgatacagattctcagggatcgtctccatgctcgccaacagtattaggcatggatgatatgtatgggccgtacaacaatggtcgggcatttagtagacagctttcgagcattcagtctttcaattcaaggtttggatctttcaattctaggcttggatcattcaattgcagacgtggtggtggtccaaggtctgagaatatgtcaatccctcctgaagaacttaggtgccctatttccttacaactcatgtatgatccagtcatcatttcatccgggcagacttatgagcgtatttgcattgagaaatggttcaacgatggtcacagcacatgtcctaaaactcagcagcaacttgcccacctgtcattgactccaaactactgtgttaaggccctcattgcgagctggtgtgagcagaacgattttccagttcctgatggtccaccagggacttttgatgtaaactggagacttgctttgtctgacactgaggccgcaggctgtgtgtcagttgaaagttttgattgtgctaatgcaaagagtgtcaaggttgtcccaatggagaacgttagaaaggaggagccagcaaacagtgaatcgggaactctggatgacggctcctgtaacgatttcgatttgaacgaaggctatgggaacttgctgctcctgctccatgaaagaagtaacatgaacaagcagtgcaggttggtggagcagataaggtatcttttgaaagacgacgaggaagcaaggatccagctgggctcaaatggctttgccgaggcactggttgagttcttgaggaatgctgtgaatgatggaaatgagaaggcacaagaagttggtgcaatggctcttttcaatcttgcagtcaacaacaacagaaacaaggggctcctgttatctgctggagtcaccgatctacttgagcagatgatatcgaatccacggctatctggtcctgccacagcactctacctgaatatttcctgccttcctgacgcgaaggccgtcatcggttcgagccaggccgtgccgttcctagtcgaccgtctgtacagccaagacggcagcgacacgagaggaagctcctgcaagcacgacgccctgtacacgctgtacaacctctcgagccaccaggccagcgtgccggcgcttctagccgcgggcatcgtggacgctctccactgcctcgtcacggagtctccagggtcggaggaggggcttggctggacagagaaggctctggcggtgctcatcagcctcgcggccacccaagctggccgaaaggagatcatgtccacccctggcttggtcagcacgctggcgatgctgctggacacgggcgagtcgacggagcaggagcaggcagtgtcgtgcctcctggtgatgtgcggcgccgacgacaagtgcatcgcgccggtgctccaggaaggggtggtcccgtccctcgtctccatctcggcggccgggactgggaggggcagggagaaggcccagaagctcctgaagctgttcagggagcagaggcagcgggacacgccgccgccacagcagcagcagcagcagctgctgcagagccagctggcggagggcgggaacggtggtggtggagctatcgtgtgccaccgggaatcgaagccgctgtgcaagtccaagtccaggaagctgggcaggacgctgagctcgctgtggaagaacaggggcttctcgctgtaccagtgctaggagatgcatgctagagtagtgttttgagttgatcagtgggtctgcgtctgtacatcatcttctgccttgtttttctcaactggtcctttcttccccccttcttctctgggggtgttgttttatttgaggtaaaaaaaacttgatgttcttccccccctcctcggttgggtgatgtagggcattttcttccatctcggccatgacaggtcatttgtacagttgctgctgcttcagtctatctgatactcagtctcccccttttcagatcaggcgcttcttcccattcaattcaaaacccaacacggcttgcagcttgcaag

SEQ ID NO: 112163 - DNA, 3046 bp, Zea Mays
ggccgccccacgctcttcctcctcctcctcgctcgtcgacggtgacccccgcggagccgcgtggatacctcgccggggagatctgcctgccgtctctacgggcaggtaccagagttggagcgtggttactggcaggctgtggctgcattcggcctcccgctcctcctacacgcgcgcgcccggcctccttcaaggttggctctgaagacaaagcccaagctccctgcgctgctgcgcaagcggccgaccttcctgccggcggtactccctgtgctggatcctctgtctagtgttgcagctgccagcgcttctcatcctcactctaccggagtggagatccgtccgggcgtgggttgattccttcttttcgggatgttggagcttaggtagtagccaacgatggaagcaatggaggccgaagaaggtccttttctggctaatgatgccaagcatcaagacccagaagcaagcctggtatacaagcattgtgttcactacatgtagctcttgataaagccaaagggcttcttcaacattgtgcagactgcagcagactctacttggccatcacttcggaaactgtgcttttaaagtttgagaagtctagaagccagcttcaggagagtctaaggcgcactgaaagcatagtaactgaagatattggctgtaagattgtggagattgttggtgagctggaggaaattgtttttacattagatagatcagagaaggaagctggtgatgagctgatcaaattgctccagagaaataataaaacaaatggttccagtgacagtggggagcttgaggtattccatatgtctgctcttaaattgggaattacatcttctagggcagcactcaccgagagaagagcccttaagaagctaattgagaaggcccgttctgatgaagacaagcggaaggagcttgttgtgtcatacttgtacaatctcatgaggaagtactcaaagttcttcagaagtgagactggtgatgatacagattctcagggatcgtctccatgctcgccaacagtattaggcatggatgatatgtatgggccgtacaacaatggtcgggcatttagtagacagctttcgagcattcagtctttcaattcaaggtttggatctttcaattctaggcttggatcattcaattgcagacgtggtggtggtccaaggtctgagaatatgtcaatccctcctgaagaacttaggtgccctatttccttacaactcatgtatgatccagtcatcatttcatccgggcagacttatgagcgtatttgcattgagaaatggttcaacgatggtcacagcacatgtcctaaaactcagcagcaacttgcccacctgtcattgactccaaactactgtgttaaggccctcattgcgagctggtgtgagcagaacgattttccagttcctgatggtccaccagggacttttgatgtaaactggagacttgctttgtctgacactgaggccgcaggctgtgtgtcagttgaaagttttgattgtgctaatgcaaagagtgtcaaggttgtcccaatggagaacgttagaaaggaggagccagcaaacagtgaatcgggaactctggatgacggctcctgtaacgatttcgatttgaacgaaggctatgggaacttgctgctcctgctccatgaaagaagtaacatgaacaagcagtgcaggttggtggagcagataaggtatcttttgaaagacgacgaggaagcaaggatccagctgggctcaaatggctttgccgaggcactggttgagttcttgaggaatgctgtgaatgatggaaatgagaaggcacaagaagttggtgcaatggctcttttcaatcttgcagtcaacaacaacagaaacaaggggctcctgttatctgctggagtcaccgatctacttgagcagatgatatcgaatccacggctatctggtcctgccacagcactctacctgaatatttcctgccttcctgacgcgaaggccgtcatcggttcgagccaggccgtgccgttcctagtcgaccgtctgtacagccaagacggcagcgacacgagaggaagctcctgcaagcacgacgccctgtacacgctgtacaacctctcgagccaccaggccagcgtgccggcgcttctagccgcgggcatcgtggacgctctccactgcctcgtcacggagtctccagggtcggaggaggggcttggctggacagagaaggctctggcggtgctcatcagcctcgcggccacccaagctggccgaaaggagatcatgtccacccctggcttggtcagcacgctggcgatgctgctggacacgggcgagtcgacggagcaggagcaggcagtgtcgtgcctcctggtgatgtgcggcgccgacgacaagtgcatcgcgccggtgctccaggaaggggtggtcccgtccctcgtctccatctcggcggccgggactgggaggggcagggagaaggcccagaagctcctgaagctgttcagggagcagaggcagcgggacacgccgccgccacagcagcagcagcagcagctgctgcagagccagctggcggagggcgggaacggtggtggtggagctatcgtgtgccaccgggaatcgaagccgctgtgcaagtccaagtccaggaagctgggcaggacgctgagctcgctgtggaagaacaggggcttctcgctgtaccagtgctaggagatgcatgctagagtagtgttttgagttgatcagtgggtctgcgtctgtacatcatcttctgccttgtttttctcaactggtcctttcttccccccttcttctctgggggtgttgttttatttgaggtaaaaaaaacttgatgttcttccccccctcctcggttgggtgatgtagggcattttcttccatctcggccatgacaggtcatttgtacagttgctgctgcttcagtctatctgatactcagtctcccccttttcagatcaggcgcttcttcccattcaattcaaaacccaacacggcttgcagcttgcaag

SEQ ID NO: 112164 - DNA, 1165 bp, Zea Mays
gcacaggtcagtggatcaactgccctcctgctgctttaatctccgtccacccatgaccacgaggttaatttgaaacccacgggccagcaattatttgtggcgggaaagcaagcctgctagaacgatagacaacggctccgatggaccgaaggcaaggcgaggcctccacggctccacctccactgtctccactcaaccgagcgagcggtagaaaaaagttcggaagagcgaaagaggccgcggaaaaggcgtgcaagcggccgcgagggaatccaattccaattccaattccagcctcacgtcctcccctcccctctgccctgccctgccctgccccgctttgttttacattccattccatcccatcccattttgcagctcctccttccgcagcggcaggggcaggaggagacgacggtcgccaccggcgccctgcaccggcggatgtcggatcgggagctccgccccctgcgctccatcagaatcacaggggacggtcgatgcctgttcaggtccgtcgcctacggcgcctgcctgaggagaggaaagcatgcgcccagcgacagcgcccagaaggaactggccgacgagctccgagccaaagtagctgatgagttcgtcaagcgaagaggagacaccgaatggttccttgaaggcagctttgagagttatgtgagacagatgagaaagcctcatgcttggggaggggaacctgagctgttcatgtgttcccacgttctcaggatgcccatcaccgtctacatgtatacgggcagctccgacggcccaaggatcatagcggaatacggccaggaatacggaaaggacgatccagtccgcgttctctacgacggctacgggcactacgacgcactccagccatctctcgtaagaacacaatcatcgagactgcgaggtgtgtaggtcaccgggggctgcgctgcctaagcttcttctacaggacagctgcgtaactgcgagcagctcaagatttgacgacgctatttttttactccagttccacacagccgtatagccaatacgaaactatgcctggcggctttgactgtaccagccttttctgttcttcaacgtttgatgtataaataaacacacacacacacaaaaaaaaactcgtcacccgagtcagaaaatcagttgagct

SEQ ID NO: 112165 - DNA, 1322 bp, Zea Mays
gcacaggtcagtggatcaactgccctcctgctgctttaatctccgtccacccatgaccacgaggttaatttgaaacccacgggccagcaattatttgtggcgggaaagcaagcctgctagaacgatagacaacggctccgatggaccgaaggcaaggcgaggcctccacggctccacctccactgtctccactcaaccgagcgagcggtagaaaaaagttcggaagagcgaaagaggccgcggaaaaggcgtgcaagcggccgcgagggaatccaattccaattccaattccagcctcacgtcctcccctcccctctgccctgccctgccctgccccgctttgttttacattccattccatcccatcccattttgcagctcctccttccgtgctcgctgcgccctcctgcttccacccccggcagcggcaggggcaggaggagacgacggtcgccaccggcgccctgcaccggcggatgtcggatcgggagctccgccccctgcgctccatcagaatcacaggggacggtcgatgcctgttcaggtccgtcgcctacggcgcctgcctgaggagaggaaagcatgcgcccagcgacagcgcccagaaggaactggccgacgagctccgagccaaagtagctgatgagttcgtcaagcgaagaggagacaccgaatggttccttgaaggcagctttgagagttatgtgagacagatgagaaagcctcatgcttggggaggggaacctgagctgttcatgtgttcccacgttctcaggatgcccatcaccgtctacatgtatacgggcagctccgacggcccaaggatcatagcggaatacggccaggaatacggaaaggacgatccagtccgcgttctctacgacggctacgggcactacgacgcactccagccatctctcgtaagaacacaatcatcgagactgcgaggtgtgtaggtcaccgggggctgcgctgcctaagcttcttctacaggacagctgcgtaactgcgagcagctcaagatttgacgacgctatttttttactccagttccacacagccgtatagccaatacgaaactatgcctggcggctttgactgtaccagccttttctgttcttcaacgtttgatgtataaataaacacacacacacacaaaaaaaaactcgtcacccgagtcagaaaatcagttgagctactacctggtaccatgcccagcatcgagtgaccgaccgtgtaaagtttcttcgatcgtttttgctcaacaagaatgctgcatagaaaaaaaaaagctgaataatgctcaagttgtcatactaaaa

SEQ ID NO: 112166 - DNA, 700 bp, Zea Mays
ctaatgtcaaaagaacatgctccagctcccaatatacaaagacgactatgtcttattaactcctttccaatcttaggttccttgaaggcagctttgagagttatgtgagacagatgagaaagcctcatgcttggggaggggaacctgagctgttcatgtgttcccacgttctcaggatgcccatcaccgtctacatgtatacgggcagctccgacggcccaaggatcatagcggaatacggccaggaatacggaaaggacgatccagtccgcgttctctacgacggctacgggcactacgacgcactccagccatctctcgtaagaacacaatcatcgagactgcgaggtgtgtaggtcaccgggggctgcgctgcctaagcttcttctacaggacagctgcgtaactgcgagcagctcaagatttgacgacgctatttttttactccagttccacacagccgtatagccaatacgaaactatgcctggcggctttgactgtaccagccttttctgttcttcaacgtttgatgtataaataaacacacacacacacaaaaaaaaactcgtcacccgagtcagaaaatcagttgagctactacctggtaccatgcccagcatcgagtgaccgaccgtgtaaagtttcttcgatcgtttttgctcaacaagaatgctgcatagaaaaaaaaaagctgaataa

SEQ ID NO: 112167 - DNA, 2033 bp, Zea Mays
aaaaagatgagctcgatgaaaaatggagcacagatgatattcctacaacaattttaccagcaacaacaatcccagtcgcgttgaaagggaggacttctttacacgaaagccagagccaccgcgtcgcggtaactaaattacaacatcgtcctacttgttatctcctagtcttcaagccgttggcaccccggtcgctagtccgtggaacaaccaagaaaagaggaagctgagtcatggaagccgctccacatgtcacgcacttctgcccgcggcctggtctcctgaagcaacagctctggtttaacagtcacattgttacggcgtaaaaaccctcctccgtctgcttctccagcatcagcagcagctcttgttgcctaggcaacagcagtttgcttggtcgtgttttagcttctgcaaggatccatgtttttttaggcatggtaagagatagtgtatttttgtttgtaggcatgtcgagataaagactcaagtcacaaatatatatatattttttgtttgcacaccaagcgatacgtacgtacctcaacttggtccttgagctctttgatgtactccacagcaaggtccaacatgtccgacgtattcgtttgctgcgtgttcacgagaaacaccaataaacacgctgacgaaaatgggcgatggcaacgaacaacaacgagaacaggttgttcagcaatcccgcacgggaaaaatctacggatgacgataatgaatggctatggctcattgcagatcttaagctcagcttaccttgtccatgttgggcacgaggtcttgcagcttcttcagcctcttgctgatcctcgtccttctttcctgaacgtacgccagcgaacaaggaaaacgaaattggtttctgtgctgacatccagctagcatcaaagctggcagagtgtggcaccatatattgcgccgtgcttttttttagcgaatcgtttgggaaggaccgaaggatcgagtagatgaactgaccctctcggcaatgctccgtgggtgagtcgcgcagccacgcctcgcacgcactctgcaggcgacggagtcctgctgcagctgcaggtagtcgtccatgccgggcagctccagggacgagttggacaggccgaactggacatacatacagcaaggccaaaaaaaaaacagctcactcccgtcagcatggaaccacgccgtcgatgatgcatgacgccggggagcggcaaagtaaggccagagctaggcacggaaagcggcgcgcgctgacctgcgggtcaatggtgctgaagttggtgaccatgtcgtcggcgccggcggcggggtccaccttgggcttcttgcagggggcagacgagaacatgatggagttggtgtcgtcccaggagccgacggagaaggtcctggagaggtaggaggaggactgcgcggcgtcgctggagctgttgcacccgccggcgcccacgatgctctccccgatgtcggccggtatcatccccatctccgagatctgcggcaggtcctgcctggagaagctccactgcgagctgagctgcgcgtggccgtggccgtggccggggcccagcgcggcgtcgctgcccgcctgcgtgtagctccccatcgctcctccgctcgccgccattcctgcagtgggcgcatccggaagatcgtcgaacacacgtcaaacaggtagactatagctgacccgtgcccgcatgtcagcgactgttcgtcgagcttgaggtaaaaggcattcttttggtatatttattttagtagtatcgttcctttttttcacgctttcttcctttttttcattttaagaaaaacaagaacattgtaccatcgatgatttttcttctttatcgcgttctagctagaaagtagttggatgaacggctggtgagtgctgctgacaagcgctgcccagcccccagcaggttcgccgtagctacagccggattcgcagcgggacggccaggaacggtcgccctcacgtcacctaggtcggcagcatataggccgcctttccgaaaaccgaa

SEQ ID NO: 112168 - DNA, 297 bp, Zea Mays
gttttgtgtgtatgtaccaacaactaaaatgtaaacacgacattatcatagttgagtacatgaataattattatatcttattgtaaaatctgaaacagttctcctgtagatggttagcttgcattttacgctacaattacctcagatcacttcttgttgtatcttacaccaatttacgaaatttcttgatgcgttttatgacaacctcgtgcgctgagagatacattcaatctacattcgttattatgaaacagatggacgatttacgctaaaattcgtactcatttacgttgtttt

SEQ ID NO: 112169 - DNA, 2127 bp, Zea Mays
tctaccatggccactgtgaacaactggctcgctttctccctctccccgcaggagctgccgccctcccagacgacggactccacgctcatctcggccgccaccgccgaccatgtctccggcgatgtctgcttcaacatcccccaagattggagcatgaggggatcagagctttcggcgctcgtcgcggagccgaagctggaggacttcctcggcggcatctccttctccgagcagcatcacaagtccaactgcaacttgatacccagcactagcagcacagtttgctacgcgagctcagctgctagcaccggctaccatcaccagctgtaccagcccaccagctccgcgctccacttcgcggactccgtcatggtggcctcctcggccggtgtccacgacggcggttccatgctcagcgcggccgccgctaacggtgtcgctggcgctgccagtgccaacggcggcggcatcgggctgtccatgatcaagaactggctgcggagccaaccggcgcccatgcagccgagggcggcggcggctgagggcgcgcaggggctctctttgtccatgaacatggcggggacgacccaaggcgctgctggcatgccacttctcgctggagagcgcgcacgggcgcccgagagtgtatcgacgtcagcacagggtggtgccgtcgtcgtcacggcgccgaaggaggatagcggtggcagcggtgttgccggtgctctagtagccgtgagcacggacacgggtggcagcggcggcgcgtcggctgacaacacggcaaggaagacggtggacacgttcgggcagcgcacgtcgatttaccgtggcgtgacaaggcatagatggactgggagatatgaggcacatctttgggataacagttgcagaagggaaggacaaactcgtaagggtcgtcaaggtggctatgataaagaggagaaagctgctagggcttatgatcttgctgctctgaagtactggggtgccacaacaacaacaaattttccagtgagtaactacgaaaaggagctcgaggacatgaagcacatgacaaggcaggagtttgtagcgtctctgagaaggaagagcagtggtttctccagaggtgcatccatttacaggggagtgactaggcatcaccaacatggaagatggcaagcacggattggacgagttgcagggaacaaggatctttacttgggcaccttcagcacccaggaggaggcagcggaggcgtacgacatcgcggcgatcaagttccgcggcctcaacgccgtcaccaacttcgacatgagccgctacgacgtgaagagcatcctggacagcagcgccctccccatcggcagcgccgccaagcgtctcaaggaggccgaggccgcagcgtccgcgcagcaccaccacgccggcgtggtgagctacgacgtcggccgcatcgcctcgcagctcggcgacggcggagccctagcggcggcgtacggcgcgcactaccacggcgccgcctggccgaccatcgcgttccagccgggcgccgccaccacaggcctgtaccacccgtacgcgcagcagccaatgcgcggcggcgggtggtgcaagcaggagcaggaccacgcggtgatcgcggccgcgcacagcctgcaggacctccaccacttgaacctgggcgcggccggcgcgcacgactttttctcggcagggcagcaggccgccgccgcagctgcgatgcacggcctggctagcatcgacagtgcgtcgctcgagcacagcaccggctccaactccgtcgtctacaacggcggggtcggcgatagcaacggcgccagcgccgttggcagcggcggtggctacatgatgccgatgagcgctgccggagcaaccactacatcggcaatggtgagccacgagcagatgcatgcacgggcctacgacgaagccaagcaggctgctcagatggggtacgagagctacctggtgaacgcggagaacaatggtggcggaaggatgtctgcatgggggaccgtcgtctctgcagccgcggcggcagcagcaagcagcaacgacaacattgccgccgacgtcggccatggcggcgcgcagctcttcagtgtctggaacgacacttaa

SEQ ID NO: 112170 - DNA, 1818 bp, Zea Mays
cacccacttcactccatcccctacctgctctcgatccctcaaacctcgctgcaaccatgggcatcggcagcaatataaatagccatcaacattttgaggccaaaaccatccacatcctctccttctcccgctcggcaaagcacggtctagctatgaagatgagcacgagaggccagccagcagagggtcacctgtggctggtcttcaccatgctgttcgtcacttctgcggtgcgcagcgtgggggcgagcagctttgctcctccaccgtctgtctccgtatcatccccagcgtacgatcctgttatcaaggtggtagggaaggtgtactgctacagatgcttcgatgaggcgcacccagatgaatcgcatgggaagaagcacctgcaaggagccatggtgaaggttacttgccaggcagatgaccaagcgctagtggcattcggctacaccagaagcaacggcaaatacagcgtggtcctcaagggactgccgattagtagcagcagcagcagcaactacggggctgctgactcgtgtaaggtcgagctacacggagcgccaggaggatcggactgcaacgtgccgatcgagctaaacctgtcagggctcagcgtctactcccgatcaagcgaggaggtggtcttcaaagcgaaccagataatggcgttcgcgtccaagaacgcgtttggctgttcatcgaaaccacagacgcagtcgtcatcaccggttcatccctactacagctccccaccactcatccctcaccagtacccctcgcctccggtgccggcggctacccacaggtctccaccaccgttgccgttgccgttgccgttgccttatcagtattcagcaccaccaccagcagcacctgctgctaaccagcttccatccccagcgtaccagtacatttcgccaccgccttaccagcagcagcagtccatgcttcccaatagctaccagactccaccacctccacagggcacggagtctccagtactacaaccccgcaagtatctaccacctccatactactactacaactctccaccagcaccacaacaccaccagcacagctacgtacctccaccaccgctagcttaccagtaccctccacctccactcatccacaagtcgccgcttcttccatcgtcgtcaccagcggctccataccactacaactctccacctacctaccagtatccaccacctccgtatagctaccaaccttcgccgccacctgccggcctgtactctccaccattattgcctccaaatgctccggaacacctgcatccaaatgtcccccatgcgaaatctccacagccgcctctccacaccccaccacctccgaacggtgccgtgccgtcgccgtcgccgacgacaccacctctgcgctactacacatccccgccgccgacggaccagctctcttgagcacgatcagctagcaccggcctgtgctatttaattaagtgaccatgcatgcatgagcagacaaacgaaacaagctgaagcccatgttgagaatctcaagattgaaggagcgtcatagccggagccttcagatcccatcagtaatctatatgtagagtctgcctattgaattatctagagtcgttgcaacttccgtttcagtatatttcaatgcctatagctatttcagcgttgtaaccgtaagctaaatgagctttcttagtagctctatcaatccaatatatggtgtgttagtgtgtgctccttgcggctaaaaaatccagccctcttgtttctcacttatcatttgtcaagaaaatggaacggatcagaaattcag

SEQ ID NO: 112171 - DNA, 819 bp, Zea Mays
ggtatagatcggcgctgttaacaattggtatcagagctccaacgatcctcggaccttcttcctccatggctactgcttcatcaccgatcgacgcccagctcactcaagcgctggaacaccaaacccgtgccattctcgccgagctcgacaaacgcttttccgccatcgattccaagtgggagctccgcgtcggtgccctggagtcccaagcgaaagagttcgcccgccaccacgaggacatctcctccacgatccgggcggatgtcgaggcgcacctctcagcggccgatgcggataccctggaccggatccgctactgggaggcatccacaggtgctcgcgttaccgccctggagtccgccatccacctgctcgatacttggcgtcctcgaatggggtcttcagtggatgctttccacacctccatggatacagttcacgctgaactgtccaaaatggagatccaatggtccaatggagcgcgcgttgacggcttctccaggcccagcctccttgacgcgcgcgaatcggcaccggcgcgctcacctgcgcccgtcagcttcgccgatggctcatgttttgggccccgcctttcctctactaaccgggactgtggatttgggccctatgtggtcgatctccacttcccggtcaagggtttcggcgacggcgcagcgacgctcggattcggaggcatcgcaagaagcaagcagatccggacggtttgggttggcttcggccacgcagaaccgttgggcctgcctttggaccaggccgtcactgggccagtatcgtcgccgccttagcgtcactcacact

SEQ ID NO: 112172 - DNA, 757 bp, Zea Mays
cccagctcactcaagcgctggaacaccaaacccgtgccattctcgccgagctcgacaaacgcttttccgccatcgattccaagtgggagctccgcgtcggtgccctggagtcccaagcgaaagagttcgcccgccaccacgaggacatctcctccacgatccgggcggatgtcgaggcgcacctctcagcggccgatgcggataccctggaccggatccgctactgggaggcatccacaggtgctcgcgttaccgccctggagtccgccatccacctgctcgatacttggcgtcctcgaatggggtcttcagtggatgctttccacacctccatggatacagttcacgctgaactgtccaaaatggagatccaatggtccaatggagcgcgcgttgacggcttctccaggcccagcctccttgacgcgcgcgaatcggcaccggcgcgctcacctgcgcccgtcagcttcgccgatggctcatgttttgggccccgcctttcctctactaaccgggactgtggatttgggccctatgtggtcgatctccacttcccggtcaagggtacgtggtctcctcaaccccatggttcatttgagtttcctgcccaccataatttcagtcctggagaactagagcgtcgtggactctcgagtcgcgggttgggtggccttcctaaacttagtttcccagtattcaatggtacttgtcgcaaattatggcaaaaacggtgtgaagactattttgatatgtatgc

SEQ ID NO: 112173 - DNA, 1011 bp, Zea Mays
aatgttctaatcgtgatgaaagcttgccctgcgctgtgcgtgtaggatgcgcaaattaccaaaagggccctgggctactgagttggcggctgctctctcggtggtcccaaagggaagagggggaaccgggcagagagcagcgcaggacaagacaggcagagaagtcgctagccagactagtctgcgcggtgatccgtcttccctggggtgttccgccgtcctgcagcagaggcagggggttgccgctctcgccgccgcacgctgcggctctgctctgctccgcctgatccttcctgcggcccttgttttttcctctcgtttcaggtggccagccttggttttgcagaactcattcagtggcctctgctgaaaagtgttcaatggcgtcaggagccaccttaagctgggttaaaaccccatttgacacccgaagatttcatgacctatctaatctaagtttccgctgccgaaacccttttggatcaattcagccctggtggctgcaaactgatcaagactcatccctaatcaaggttcgcgtggctgctgattattcagactcaatgccagattcaaagtacacgagagatcggggttatcaccctcttgaagaagttaaagaacgtccaaagaagaaggacctgttgctgacagatattgaaacagctagaacagtagtagaggtatggtaacctggtgcaactaaatagtgtgtttcttatgcacctagctatttaatgtttcataggtatggttatggcctgtagtatagagttcttcaaactaatccaaatatttgttgtaaaaacctgcacaaattcctccaggcgcgtaacaaacaaaatgatggtttatacctttataagacatgccagtgagtatctgagcctaggtaacgtttgcaatcttccttctctaggcaaatagcaaggggttgcttgtatttcctgctagggtacacaatgaacctcatggacatgtttcttggtcggagtttcaatatgttgttga

SEQ ID NO: 112174 - DNA, 2275 bp, Zea Mays
aatgttctaatcgtgatgaaagcttgccctgcgctgtgcgtgtaggatgcgcaaattaccaaaagggccctgggctactgagttggcggctgctctctcggtggtcccaaagggaagagggggaaccgggcagagagcagcgcaggacaagacaggcagagaagtcgctagccagactagtctgcgcggtgatccgtcttccctggggtgttccgccgtcctgcagcagaggcagggggttgccgctctcgccgccgcacgctgcggctctgctctgctccgcctgatccttcctgcggcccttgttttttcctctcgtttcaggtggccagccttggttttgcagcatgtttaaattgtgtcaagactggagaaataccatccatgcagaatcatccatattataactcattcagtggcctctgctgaaaagtgttcaatggcgtcaggagccaccttaagctgggttaaaaccccatttgacacccgaagatttcatgacctatctaatctaagtttccgctgccgaaacccttttggatcaattcagccctggtggctgcaaactgatcaagactcatccctaatcaaggttcgcgtggctgctgattattcagactcaatgccagattcaaagtacacgagagatcggggttatcaccctcttgaagaagttaaagaacgtccaaagaagaaggacctgttgctgacagatattgaaacagctagaacagtagtagaggcaaatagcaaggggttgcttgtatttcctgctagggtacacaatgaacctcatggacatgtttcttggtcggagtttcaatatgttgttgatgaatatggagacattttctttgaagtacctgacagtgagaacatcctggaagatgatactgcaaacaatcctgtgacagttttgattggaatggatggacccattattggagaaagtagtgtggcgattagtgatttcagtgattacatggatggtgaaaattttatggacgttcctgatgagcaccacaccaagattgatacagaaataactgatattctcatagagtgggggatgcctgcaacaatgcgtgcaatacatccgatttactttgccaaatgtttgacaaaggccattcataataataatggggagaagatggatagtccatcaaacggtctctctattgtaggatatctgagacctgctttcatagaggaagagtcttacttgaggagcatgtttcatggtgacaatggtggttattcatctgactggaaagtaaatgaaaccgatgaatacaacagagaaactcggccagtttctggaaccaatcgcctcattgatgatgataaatcaagatttgacttcaatcatgctgaaactagaactgattcaatgatctacaagctggagataatgacaattgaactgttttccatgtatggaaagcagtttaagattgatccacaagattttcaagattcagaaccagatattcttgcaaattctgcttcatcgataatagaacggatcaaagaaaacagtgatcagtgtgccgcggctctcaggtcgctctgtcgccggaaaaagggcctcactgtcgaggaggcaagcttgattggtgttgacagccttggtattgatgtaagagccttttctggcttggaagttaagactgttcgattttcattcaatgcacaggcgctctctgaacgttcagctgaaaagaagatcaggcgaatgcttttcccccgttaccagcgtaaaaacgtgaaagcctctactgaagatgagtcttaacctatcagctgtttttcctgagaaagcatgcaaacacctggttcaaagacaaggtgtcaagggaatcaacacaatatcatcttatgcgagtttgctaggagatagcgcacaacctgtcgactatgagaatgaccaaaaacatcagagtaataaggtttgccatgcatggtctctaacatgcttccaagaatatagtttggtttctgacagataataaaaaaaaaacgaataaggtgccagttcatgtataaaagatgaactgcgactttatgctggcggaaactgattagctgaccaagctttgtcagctacaaattcccagtaataataacgagctgcgaggtgaaagggcagagtaataaggtctcgttggcctaaatcagttcttagtttcttacccacaacctgtaactaactttgttgtctcttttcatgtagacataaatgtcatgcaacgcaactgcgattatggcattg

SEQ ID NO: 112175 - DNA, 1855 bp, Zea Mays
cccgtctctcccgaaaatccatcccgctctccctcgacggccacaccctctccggcctctcgtccgctccaatcccgatcctatctatccggcatggccgccgccgcaggcccgccgtcgcacagcgcggacctgatgccgccgccgccccctccgcccgtcctgacgacgactgcgccccgtcctcgccgccgcgcaagggaagtcagctcccggtacctctcaacgcccgtcccctcgaccccgcgcctctccaccgcctcctccacgcggtcgcgctccccgtcgccgacgccgtcgcctcgtggacggcagcgggcggtcacgcccttcgccaacgagaaccacccacccccgccgccgcctcccacgggcaccgttgcgcgccggcgggccgtccagaagcttttcgaggaaatcggcgccggcaacccgcgcgcctcggtgagctccaactcctccgccgtgcccgcagctactccgcggccgctcccgcgctccaccagcgggccggccgcacccaccgcgcggagggggtacccgcgccttccgacgcccgcgcgtgctggctcctgcccggcttccggcgcagtggattccgacaccgcctcttgctgctcttcgtctgatacgtcgtccacggccactgacctgtctgaggcggatcgggcgctcgggatggctccagccgcgccgtgcgagagcccgccactgctgggcccagcgtcctgccgcggtggacgcctttcgtcagagctctgctcgtcggtgccggagtcgggcggatcctcgcgggcgtccaacccactgtgctaccgctcgctcaactcggcactgtcaatctcaacggcgatggctgggaagttgacggcggcagggaggccaccacagccgcaagggccgaaggtagctgatctgaagaaggcggcgatcctggggggcaggaaggttgcggggaagcaggaagacgtgcacctgctgcggctgatggacaattcgtacctccagtacaggttcctcaacgcccgggctgaggcagcaggcaaggccaaggcggcggctgcagagaaatccttgtacggggtcgaggagaggattgccagcctcagggtatctgtcgctgagaagagggcagaggtagagaggatgaaaagggagcatatattgagatcagtagtaaatgcgcaggtgccacatttgattcagtggggtgagattgaggggtgccatggaagctgtcttagaggagcaacaacagcgctgtctaacacctcgctaaggctaccaatcattgggagtgtaaatgtaaactgtggggaagttacagaagtcctaaagtcagcagcacaactgcttgaaccgctttcacctggcatcgagaattttctgccaaaggttgaacaagccggcgatgtggcctctaatctggcccaggttatcgctactgagaaaaccttgatagaggagtgcggtaatctcctataccaagcacaaaacctgcagatgagggagtccagcttgaggagtcaactgatgcaactgaagcaaaatgaagcaaagtaaaacgacctaggactaggagtcaagtgtggaacaaaacgaagcaaagtaacacgccgccagggcgtttgttcaaccaagtgagctaactgtgttccaccgttggatgtccaagaggacggaagttgcctgatcatatatacatgaccaaggcataagtgggttctacgaattgctgattcttttccagtacatatgttgtgcaatttgctgtggaaacattttcgttgtctacctattggaaaagcagatacaggcagacttttacaaatggaaattggttgattcattgtag

SEQ ID NO: 112176 - DNA, 2622 bp, Zea Mays
atgccactctcggagccgtcggcgccggccgtgctcgcggcgctgccgcgggcgctctccctcgcggccgcggccgtcgcggccgcaaccgcgaccctcctcctcatctccgccgtcttctccaccccccaccacgcggcgtcctcctcgtcccctcagctttccccgtccgccagcgcctccaccgcggcgcctgtggccccggcgcccgcacacgcgcccgactccggcccaggccacccccaccccccgcctcccgttcccccgtgccctcccaacgccacccacgacgtcccctgccacgagcctccctcgcgcgagcgccactgccccccgcgcccgccgccgccgccgcctcttcttcctcacccgccaaaggacccgccgccgcaccctccgccgcactgccgcgtcccgccgccgcccaggtaccgcccgcccccgccgtggcccgcgcgccgcgaccgcgcgaggtacgccaacgtggacctcccgccgctgcccccggttaaggcggcggatggacagcagcaggaccccgttcacggtcgcggggagtggctgctgttcaccgacggggtgcagggttatgtcgagcggctggagcgcgtcgtgccgctccgcgacggcgtggtgcacacggcgctcgacatcggatgcggggtcgcgagctttggggactatctgctcaactatggcgtactgaccatgtccattgctccgagggatagatttgaaccgcaggtgcagctcgccttggagcgtggactgcctgcaatgatcggagcgcttgttgcccacaggctaccgtatccatcgaggtccttcgacatggtgcactgtgcggactgccgtgtcccatggactgctcatgatgggctctacatgctggaaatcgaccgtcttctccaacctggtggctattgggttttctctaagccacccgtcaactggaaatctacatacaacatttcgaatcaagggaccatagacaagcaggacaatcaagtagctatggatgacatgtcgaaaaggcttcgttggacgaaggtgtctgaagagggcacaatttctgtttggagaaagccttcttgtaatctccattgcgaccaagaagcaaatgcaaagcttgctggattgccaccactctgcacaggagaagacccagatagtgcctggtatgcaaatatttcaatgtgtatgacatgtattccaagagctgaaacttttaatggctgtgctggtggtgccatgaaaaaatggcctaaaagacttggtgcagtgccaccaaggatagccagtggggaaatcgagtggctgtccattcagagatatagatacgacactctggtttgggagaaaagggttaacttctatctcacgtatctaaattttttgtctaatggaacctacagaaatgtcatggacatgagtgccggttctggtggctttgccgctgctatgtccaagcatcctgtctgggtcatgaatgtggttcctgcaaatacgacagagaacgcccttggtgtcatctatgagcgtggtttgattggaacatacactgactggtgcgaggccttctctacttatccacgaacatacgatctgatacatggtaatggaatcttcagctcccatattcacaagtgtgggattatcgacatcctggttgagatggatcgtattctccggccagggggtgccgtcatagttcgggacagagccgacgtcgttctcagagtcaagaaggacgccgaccgtctacgatggcatagccgagttgtcgacactgaaaatgggcctctggatccagagaagctcctcattgtggacaattccctgccactcccagggagctgaatagaagtgagagcactagcaagaacccgcaggatcagatcaggcttctaggtgacggtctgctcatgtttcgggaaagagccggtggtctggtctgcgaccttactacctgttacagtatgtcttttcggtttaagaagatctcactacatgtgcagcagaggtacagatgaagggtctacaggcgactgggatgtttattacatgtacagacaggtgttggagaaacaaaatgctacgtattacctttacagaggaagggttcaaggctattggctatcgtacagcgagagattcagaattgcatgcaggtgtacctacatatatgaccagtggtccaatatattggagtcagtgacgactccagtggatgccatttcttagctccaatatgatatgcagcctgatttctcatgctcgaacgactagctgtgcagttagaactatccggtctcgattctgtagagtatgtctacgttgagtgtacctttttttttggtaaatccattcatgtacatttgtataggttgttgtattgtagatcttgtgagctgtgttgtttggtcgctaagcaatctacggcgtattatactgcggcatagagtgtacaggggaggccagattacacctgtgtctgtgtgtgtctctgtccttccaactttcccggttcaggctgcggtgccgagagtgggattgtgttatttggggtgttgtacaagccaagtgaatgtgcagatcgagtatggacatgatttctttctt

SEQ ID NO: 112177 - DNA, 1120 bp, Zea Mays
ccgcattcgggacgaagccaccaacgacgagctcagcagcgccgacgccgcaacgacaaccagagcaccccgcactgtggagaattcatgtaaattatattaaaaggtagcaatgtggcgccgctgttgctgcaattgccaagtggatgaatccgaccagcatgaaaatgggcatgtcaaggccacaatcaacaacattgatggggcaataatggggttgaaagattctactactggaaaagtcgagccgcaggatgctgctccccaaattgatatccctgttctatccttggatgaactgatagaaaaaactgatgactttggttcaacggctttgataggtgaaggttcttatgggagagtgtactatgcgattcttgataatggaacaaaaatggcagtaaagaaacttgattctactgaaaatgaacccactgctgaattcttgacccaggtttcattggtttcaagattgaaacatgaaaactttgttgacatgttggggtactgtatggagcgtaatcttcgcatagtagcctatgaattcgccaccatgggttctctgcatgatgtactacatggaagaaaaggagttcaaggtgctcaacctggcctggcgcttgattggatgcagcgagtgcaaattgctgttgatgcggcaaaaggacttgaatatcttcatgagaaagttcagccttccattgtccatagggatattagatcaagtaatatcctcttgtttgaagatttcaaggcaaagatagcagactttaatctctcaaatcaggctccagatatggctgcccggttgcattcaactcgtgtcttgggaacctttggatatcatgctccagagtatgcaatgaccggtcaactaacccagaaaagtgatgtatatagcttcggagtagttcttttggagcttttgacaggtagaaagccagtagaccatacaatgcctagagggcagcagagcctagtaacttgggctaccccaaggttaactgaagacaaggtgaagcagtgtgtagatccacggttgatgggggaatatccggcgaaaggactcgctaagcttgctgctgtagcagctttgtgtgtgcaatatgaagctgaattc

SEQ ID NO: 112178 - DNA, 4243 bp, Zea Mays
cagccaacgcaggcgtccaagtccaagcaaagccccgctcctgtcacagacaaatttccacgggagtatctccccccctgcttttttcttcttcccttcaccccccgcgtgcgcgctcagtccctctcgcctgtggcgacgcttgagcgaccgctgctgccgctcgacgccagatcttcgccgtgccgctccggtgacgagcaccctccaggtatgcccttggagcgtaaggaggggagtcggagatgttttactcgcagttcattttggccaaaaagggtcccctcgggaccatatggattgccgcgcacttggagcggaagctgcgcaagaaccaggtcgcggacacggacatcggcgtctccgtagattctatcatattccctgatgttccaattgcacttcggttatcaagtcatcttatgttaggcgtggtcagaatctattctcggaaggtcaactacctattccatgactgcagcgaagctttgctgaagataaaacaagctttcaggtccactgctgttgatcttcctcctgaagagtcaactgctccgtatcactctataactctgcctgagacattcgatcttgatgattttgaactgccagaagctgcgtttcaaggcgacactgatcatcatgtgagcacaaaagaacagatcactttgcaagacaacccagagaaaacagggtattcaacatcccagtttggcctagatgaaagatttggtgatgccagttcatcacatattggctttgacttggaggaggaattaattctgaacaaggaccactcaattcatctccaatctgatgatggcattattattcaaggtcggtcatcagtcccttctactgatatggacattgatgataacaaaagtcaagacataatagctgaaggataccacaacatggatggtgggcattctagtcatggaaagctaggttcactgaatctgaatgcaattgacctaggaggaaacagtatccctaactggactggttacaatgtacatactcctgatttgaatgatatattattgcataatgagggtattgcagggccatcagcttcgtacattcaacctagcccatatacttgtgatgaacctgcatcaccagagttcattagtgctcaggccccagctacacctggtttaatggaagagacagttccttctagagtccatgaaagtcctgttctaagtccacagagaaaaccatcaccgtcaaccaatgatgaaactgcaaagactgacactcctgctgctccagcctcagattttcttcattcggctacaggaaatgccaatgatgttggtgctgaaaggacagaacttggattggcgaagcatgtgcaagttgagtcttctgctttctgggacgctgatgcatcgggacaacagcacacaagtgagggtttaccatcccagggtcaagctgatcacttagaacccgctgctgataaattggtcaattctgatggtatagccgcatctgttgaaactgtaactgtcaatgcaaccattaaagatgtacctttggctgtaaatgattcagagccatgtgttgatggttctactgaaccatctgtggtggagaacctggtacagattaatgggccattaattgatgcacaaggtacaattacacaaattgcagattttcaacatgaagcccaagcaatgcaacaagtagtggcatctaatgatagactgaatgaactagcaacttcagaatttgctgagcctgagaaaatgctgtcagttccagattctgaattcaatcatccaattgacttggggctcataactgcggaaaagggaacaactgaatctgatggaagtaacataataggcagccttgctagcagaaaaagacatctggaagatagcttaccagctttagagagtgagaccactgaaaggttgtctagccgaccacatggtatacgaaccaacgattttgttccccatgatgatgatatactggcatctattttagtcggtagaaggacccctggattcacacttgattcaacaccactaccaccgagggaatcgtctctgaaacgccggaggttgggctcgaagatgggcacactcaagaggaaagtgcaaatagacgatgccatggtcctgcatgctgatactatacggcaacagttgatcaacactgaggatatacggcgcattcgtaaaaaagctccatgcactcgttccgaaatatggatgattgagaaaggttcactggaagatgatatattccacgagcccatcttttcctgcctatctgaggagctaaacaaattacacaatcggacatatgaggctattgtacatcctgctgtacagaacatggaactgcaaggtcaattagacatgcctgaagcaattacagaagatagcaatattgctgggtttggtgctgctactattgatggcccacttcacataccagatgggattcaatcagatgccatgctgccacgtgccaatgatgcatatggcgctacagctgcttttagtttgcaagttcctcctaacaaccaggttaacggtgcatctaatgattttgttattggcactctgtttcaaggggtgactggaccttttattggtaatgagaaagaagtggcacttgctgacagagagcgtgctcaagtaaatacactgtatagtgaccattttcaagatgtcccatctgatttgcatagtactgatgcaaacatttctagtcaagatgtgactctagataactctggccaagcttgcgctcacgcaacggacggcatgacaagggagcttactcattttgttcatagtaatgctaatattttcgagagtaatgaggtccctgcttctgagattactggggtggaatataatcaaggtgcctctggtttccctcaatcaacggaggatgaaaatgcggtggggtataatcaagatgtctctggttttcctcgaccaacggaggatgaaaatgcggtagattataatcaagatgcctctggtttttctcgaccaacagaagatgttcaagatgcctctggttttcctcgaccaacggaggatgaaaatatggtagattataatcaagatgcctctggttttcctcgaccaacagaagatgtaaatgcggtgggatataatcaagatgcctctggttttgctcgaccaacggaagatgtaaatgcggtgggatgtaatcaagatgcctctggttttcctcgatcaatgaaggatgaaaatgcggtggaatataatcaagatggctctggttttcctcgaccagctgaaaatgaaaatgatgtgtctgctatgggagataattctggcttccatgaaaacaacatgggttctcttacggatctggatatggtgaatgactatgaactgaaggaaagcaatgattttgggagtgcaattaatggtgttgatacagattttctgaactacgacgatgatgacggcggggacttcgacgacgccaacgacgatgagccaaatcccaacgagtttcagtctctcgacaacagtggttggtcttctcgcaccaggggcgttgcaagatacctcaaggctttattcgacgacgagtctggtctggagaggaagagcgttgctatcgaccatctggtgcgcgggaagacgcggaaggaagcgtcgagaatgttcttcgagaccttggtgctgacgacgaaggactacatcagcgtggaccaaccgaaccccttcgacttggtgagaataaagccaggctcaaagctgctgatgtcggaattctagaccgtccaagccagcttttacccctggcgccatacatacgtgttaccaattgtatccatcacaccgacctaccgcaccccctcctttaccccctccaaatccatttttgtttgtttgtttgtttgtttgttgttgttgttgttaagttatcctcctctgtgtagcatctcccgcgcgctagggctcgagtaggatggctgctatgttgtaccgtcggctgtatatatgatttagtgacacatgtgaagcctgccatgtaatctgatagcgctggctccctccctccctcccctccgatccactaaagctattgtataatttgtatttgcttggctaaagcccgtaggaatttgcgtattggtaacaagacgatatgatggtgtacctgttgattatgtcaggatctattgacagctttaactcagctattattggactgacctttc

SEQ ID NO: 112179 - DNA, 4229 bp, Zea Mays
cagccaacgcaggcgtccaagtccaagcaaagccccgctcctgtcacagacaaatttccacgggagtatctccccccctgcttttttcttcttcccttcaccccccgcgtgcgcgctcagtccctctcgcctgtggcgacgcttgagcgaccgctgctgccgctcgacgccagatcttcgccgtgccgctccggtgacgagcaccctccagcgtaaggaggggagtcggagatgttttactcgcagttcattttggccaaaaagggtcccctcgggaccatatggattgccgcgcacttggagcggaagctgcgcaagaaccaggtcgcggacacggacatcggcgtctccgtagattctatcatattccctgatgttccaattgcacttcggttatcaagtcatcttatgttaggcgtggtcagaatctattctcggaaggtcaactacctattccatgactgcagcgaagctttgctgaagataaaacaagctttcaggtccactgctgttgatcttcctcctgaagagtcaactgctccgtatcactctataactctgcctgagacattcgatcttgatgattttgaactgccagaagctgcgtttcaaggcgacactgatcatcatgtgagcacaaaagaacagatcactttgcaagacaacccagagaaaacagggtattcaacatcccagtttggcctagatgaaagatttggtgatgccagttcatcacatattggctttgacttggaggaggaattaattctgaacaaggaccactcaattcatctccaatctgatgatggcattattattcaaggtcggtcatcagtcccttctactgatatggacattgatgataacaaaagtcaagacataatagctgaaggataccacaacatggatggtgggcattctagtcatggaaagctaggttcactgaatctgaatgcaattgacctaggaggaaacagtatccctaactggactggttacaatgtacatactcctgatttgaatgatatattattgcataatgagggtattgcagggccatcagcttcgtacattcaacctagcccatatacttgtgatgaacctgcatcaccagagttcattagtgctcaggccccagctacacctggtttaatggaagagacagttccttctagagtccatgaaagtcctgttctaagtccacagagaaaaccatcaccgtcaaccaatgatgaaactgcaaagactgacactcctgctgctccagcctcagattttcttcattcggctacaggaaatgccaatgatgttggtgctgaaaggacagaacttggattggcgaagcatgtgcaagttgagtcttctgctttctgggacgctgatgcatcgggacaacagcacacaagtgagggtttaccatcccagggtcaagctgatcacttagaacccgctgctgataaattggtcaattctgatggtatagccgcatctgttgaaactgtaactgtcaatgcaaccattaaagatgtacctttggctgtaaatgattcagagccatgtgttgatggttctactgaaccatctgtggtggagaacctggtacagattaatgggccattaattgatgcacaaggtacaattacacaaattgcagattttcaacatgaagcccaagcaatgcaacaagtagtggcatctaatgatagactgaatgaactagcaacttcagaatttgctgagcctgagaaaatgctgtcagttccagattctgaattcaatcatccaattgacttggggctcataactgcggaaaagggaacaactgaatctgatggaagtaacataataggcagccttgctagcagaaaaagacatctggaagatagcttaccagctttagagagtgagaccactgaaaggttgtctagccgaccacatggtatacgaaccaacgattttgttccccatgatgatgatatactggcatctattttagtcggtagaaggacccctggattcacacttgattcaacaccactaccaccgagggaatcgtctctgaaacgccggaggttgggctcgaagatgggcacactcaagaggaaagtgcaaatagacgatgccatggtcctgcatgctgatactatacggcaacagttgatcaacactgaggatatacggcgcattcgtaaaaaagctccatgcactcgttccgaaatatggatgattgagaaaggttcactggaagatgatatattccacgagcccatcttttcctgcctatctgaggagctaaacaaattacacaatcggacatatgaggctattgtacatcctgctgtacagaacatggaactgcaaggtcaattagacatgcctgaagcaattacagaagatagcaatattgctgggtttggtgctgctactattgatggcccacttcacataccagatgggattcaatcagatgccatgctgccacgtgccaatgatgcatatggcgctacagctgcttttagtttgcaagttcctcctaacaaccaggttaacggtgcatctaatgattttgttattggcactctgtttcaaggggtgactggaccttttattggtaatgagaaagaagtggcacttgctgacagagagcgtgctcaagtaaatacactgtatagtgaccattttcaagatgtcccatctgatttgcatagtactgatgcaaacatttctagtcaagatgtgactctagataactctggccaagcttgcgctcacgcaacggacggcatgacaagggagcttactcattttgttcatagtaatgctaatattttcgagagtaatgaggtccctgcttctgagattactggggtggaatataatcaaggtgcctctggtttccctcaatcaacggaggatgaaaatgcggtggggtataatcaagatgtctctggttttcctcgaccaacggaggatgaaaatgcggtagattataatcaagatgcctctggtttttctcgaccaacagaagatgttcaagatgcctctggttttcctcgaccaacggaggatgaaaatatggtagattataatcaagatgcctctggttttcctcgaccaacagaagatgtaaatgcggtgggatataatcaagatgcctctggttttgctcgaccaacggaagatgtaaatgcggtgggatgtaatcaagatgcctctggttttcctcgatcaatgaaggatgaaaatgcggtggaatataatcaagatggctctggttttcctcgaccagctgaaaatgaaaatgatgtgtctgctatgggagataattctggcttccatgaaaacaacatgggttctcttacggatctggatatggtgaatgactatgaactgaaggaaagcaatgattttgggagtgcaattaatggtgttgatacagattttctgaactacgacgatgatgacggcggggacttcgacgacgccaacgacgatgagccaaatcccaacgagtttcagtctctcgacaacagtggttggtcttctcgcaccaggggcgttgcaagatacctcaaggctttattcgacgacgagtctggtctggagaggaagagcgttgctatcgaccatctggtgcgcgggaagacgcggaaggaagcgtcgagaatgttcttcgagaccttggtgctgacgacgaaggactacatcagcgtggaccaaccgaaccccttcgacttggtgagaataaagccaggctcaaagctgctgatgtcggaattctagaccgtccaagccagcttttacccctggcgccatacatacgtgttaccaattgtatccatcacaccgacctaccgcaccccctcctttaccccctccaaatccatttttgtttgtttgtttgtttgtttgttgttgttgttgttaagttatcctcctctgtgtagcatctcccgcgcgctagggctcgagtaggatggctgctatgttgtaccgtcggctgtatatatgatttagtgacacatgtgaagcctgccatgtaatctgatagcgctggctccctccctccctcccctccgatccactaaagctattgtataatttgtatttgcttggctaaagcccgtaggaatttgcgtattggtaacaagacgatatgatggtgtacctgttgattatgtcaggatctattgacagctttaactcagctattattggactgacctttc

SEQ ID NO: 112180 - DNA, 3407 bp, Zea Mays
agagcggagaggagagggagcgagacagatccaaaatactacacctccatgtaagctgtatccacactacaacacatcacctcacctcccttcctctccctccctccctccctccctctctctctctcctccaagatctgtcgatcacacacaccacaccatacacgcgcagctttttgctgctgcttgctcgtctacttgcccggttgcccctgcttcttcttccatcgcaatgccatcccctcgccaattcttgcagctgctgttacccaccttgctcgccacttgctgcgtcgatggagccaacggcccccacgctcccgccaccgcgaggaggcagctccaccagcccttcttcgtcccggatcagcccgggcagccgtcggcgccgccgccgttctttcccgcgattccggtgacgcccccgcctcctgtgccgacggggcaggaccagccgacgtaccccgctctggtgttccccagcaacggctccagcggtgccacgcctccggccggcaactcgcacgggtccaagaagtcctccaagctcgtcccggccatactgctgccgctgctcacggtggccgtgctcgggctgtccatcgctttcttcttctcgcaccgccggcgcaatgcggcccgcgggggaggcggcgggtgcgttggtggcggggacgccaagttcttgcacccggaaaggacgagcctcttcgcgcgtgacgagttcggtggcagcggcggaggcggcgtcagggaggccgcgccggcgccggcgccggcgtcggctacctctgccgagttcctctacgtggggacgctggcgagcagagccgacgagaggagcagcgacacgacgtcgtccggcgacgaggtgtcccggagctcaggcggatcgcccgagctccgcccgcttccgccgctggcgcggcagtgcgcgccggcgccgtcgaggagccccggcgcggcctccccgtcgtccggagaggaagaattctactcgccgcggggctcatcaacaaagacctcgagctcgcgcaggactctggcgacggcagtgcaggcggcccttgaggcgcgagaccgctctaggactccgtcccctgggtcggtcctgagcacgccgtcgtacccatcttcgccgggggcgacgctgtcgcccgcgcccgcctcgccgcctgccttttccagcccaggcgagtccggccgccgctccgtcaagtcaagatcggaaagcgcgcgcgtcgtcgtcctcccgccggttcctccgactccgcccccgcctcctcccttcgcaccgacactgccaccaccgccacctcctcgccggaaaccaccgtccccatcgcccccgtgctctccactaaacgacaaaccagctctcagatccagcaccgacaccatcgaaagaaacccgttcgcccagccaccgtccctaccgacgagcacacacccgccacggccacctccggctgcaggaccgccgccaccacctcctcctccgccgccgccgccggtgggctactgggagagccgtgtccgcaagcccgacacgtccaaagaaacccgttcgccggcactgtcgccgccaagcttcaggagcgtccctgcgcccaccgacgcgttcccaagctggctgcccgagagctccgagcaaggcgacaagtccgaggacacgacgccacggccgaagctgaagccgctgcactgggacaaggtccgggccagctctgaccgcgtcatggtgtgggatcagctcaagtccagctcattccaggtgaacgaggagatgatcgagacgctgttcatttgcaatccagccaatgcgccggccaaggaggcgactaggaggcccgtgctgccgacgcccaaggccgagaacaaggtgctagatccgaagaaggcgcagaacattgccatcttgctgcgcgcgctgaatgttaccaaggaagaggtcagcgacgcgctctgtgaaggtaacacggagaactttggagcggatttactggagaccttgctgaagatggctcccactaaggaagaggagattaaactgagagaattcaaagaggagtcttctccagttaagcttaacccagctgagaagttcctcaaggcagtgctcgatgtgccttttgccttcaagagagtcgatgcgatgctttacatagcgaacttcgatgcagaggtcaattacctcaagaagtcgttcgagacccttgaggctgcttgtgatgagctgagaagcagcaggctatttcttaagctactggaagcggttctgaagaccggcaacaggatgaatgttggcacaaaccgtggggacgcacacgcgttcaagctcgacactctgctgaaactggtggatgtcaaaggcaccgatgggcacacgacccttctgcacttcgtggtacaggagatgatccggacggagggcgcccgtgtgtccgccagcacccagacaactccaagaacccaggcgaaccctctacgagaggagctggagtgcaagaggctaggtctccgggtagtgggcggcctcgccagcgagctgggcaacgtgaagaaggcggcggccatggactcggacgtgctgagcagctacgtcgccaaactcgcgggagggatcgagaaggtgaccgaggtgctgcggctgaacgaggaggtcaagtcgagggacgacgcgtggcagttccacgacaggatgcagaggttcctgaagaaggcggacgacgagatcatccgggtgcagtgccaggagagcgtggcgctgtcgctggtgaaggagatcaccgagtacttccacggcgactccgccaaggaggaggcgcaccctttccggatcttcatggtcgtgagggacttcctggcggtgctggaccaggtctgcaaggaggtgggcaggatcaacgagcgcaccatcgccagctccgcgcgccacttcccggtgcccgtgaacccgatgatgccgcagctgttcccgcggctgcacgcgctgagagccgggttctccgacgacgagagctcagccgcttcggtgtcgtcgccatgaccgatcgatcgctggtagtcgttgttagtctgccaacatgattttttgttcgcgcggaccgtcggtggtagaagaacaccgcgccaggcggtagagggggattcgagtggtagcgggctgtcccttttttttttccttcttcttcttcttcttctcaccttttgtacctgtagattatatagaatgtacaatgttttttttttgttgttgttgcaaatatttatttttatatataagaagggatacaaatctagatcagaagaggaaataagcagttcgtatgtgaatgtatgcagcttttcagtctgtacatccatccatctcatagaatgacagaagagtgaagctaacaattcct

SEQ ID NO: 112181 - DNA, 1035 bp, Zea Mays
agcgccgccgagccgatcgccgcgcctgatccacgctcgtcgctccgccgattcactcgcctggagcgccgccgagccggcctcgatttctccctcgacgcctgcgaccttcgtcagcgcgctcccctccgtcgcgacgcgtccgaagagcacgacgcacgcgcggtctccctgcccgtggaccttgcggcccgcgcggtcttcccggccttccccgccctgcgacaccgccgcgcggcgctcaccgtctgggcgcaggccaccgccgtcgtcaatgtgaaggcgctcatccccatcatcctcgacaaggccacgaacacctacaccaagtggcgcgggatattcctcactgtcctcggcaagtacgcgctgactcgccacgtgctcgacgatgagctgttccccgagcgccccgcgtggctccaggcggactgcgtcgtcttgacgtggatctacggcaccgtctccggcgacctgcagcagtcgctcctgatccgtcaacgccccgcacgtgaggcatggtgctatctcgaggacgagttcctcggacaaaaggagtctcgcgccctgttgctcgagacgcagttccgcaacctccgccaagactccctgacgattaccgagttctgccgtcgtctggaaaccatggccgcgtctctcgccgagttcggcgaccccatcggtgatcgccagatggtgctcacccttcttcgtggcttgagcggaaagttccgccacatggtgtcaattctcaagatgcatcgtccgttgccaacgttcactgaggcccgaacgcatctcttactggaggagatggagattgacgctcgcccgccctcaccgcccacggccctcgtcgtgcatcagcagcaggccccgtctggtccctcctccacaccgcgctaggggaacccgtcagctacgcagcagcgctcccacggtgtgcccactggtggccagcgcaccaatggccgtggccgtggccgcggcgggcgtggtggtggccaacagccccctggaaggggtgagagcacc

SEQ ID NO: 112182 - DNA, 652 bp, Zea Mays
gtttccttaccgcagaaatattaggagcacctaaaggatcaactacgataaatattttcagtgagtgtaccaaggccgaatcatttcttccatttggttctggaagtcgagcatgtattgggcagaagtttgttgttcttgcaatatcgatgttgattgccagtttgctccgcatctacgaggtacagcctcatccaagtttgtctaaagaaatggacacaacagttgacaacagccaccttcatctcccaaaccctaagatcatcctcaccaaaagaaggatctgaagggagagtttggcaaacgaaaatatggcacgtttgctttcactgtattgtttttcactggtgttacaccagtatatgatctttagtttcctaccatcgtttggaccatgttgaagtttggaaaggcgaccttggcgatgcggaagtgccttttttcctccagatttttgacagaccctgtgtgcttcgttggatctaagtttttgtcaggtttttggagcacccgcagggctgttagatcacaagagacgtatgctgatgtgtataaacagactcgttttttcagttggggtttttctcctctctgtggagaatgtaatgtccaacgcatgatgtttatcgtgttgagatgttttttgatagtt

SEQ ID NO: 112183 - DNA, 297 bp, Zea Mays
atggatcagactgcacattcagaagaacgagcaggcgagcacccacaggctagcactccagcaccagcagagatgaatgggtattgggatttggggactggggacaagaggtggatgcatggagcccaggagctatacctgcagctgcagggcgctaccacgcagggatggagggggacgctgccgctgtatcccatcaccgatggcgcgcctcgtgctagagttcctcagtgcaaagagctcgagcgacgactgctggcaggtggcggctgggtgccttcacgtgtgaaagcctag

SEQ ID NO: 112184 - DNA, 1312 bp, Zea Mays
agttgctcgtatagggcatgttctccaagctactccgtccccagtccccaccatttcaaattgcaaataaaactgcaatctcgcagcggctgatggattagcaagcaggacaagagactgagatccatcctccagacacgcgcacgccaaggatcgcattcgccaagcaacgtcgggtcggcggcgcgggggcgatggagacgcggcggccgcggcgcggctggaacaaacgcttcgtcctcccgctcgcgctcctctgcctcgccgtgctgctccccggcgcgctgctcccgccgtccgcctcggcgtcgtcttcgtcgccggccgcgggaggtggcagcaggaaacgccggtgggttgggtttgactactatgtactggcgctgcagtggccgggcaccatctgccgcgagaccagcaactgctgcgacaccaatggctgctgccgatcacagcctctcaagtggttcacgattcatggtctttggccacagtataactatgggggctggccatcatgctgcagaccaaccagattcaacataaataagatcttaatgttgatgccgatactcgagaagtattggccgtccttgtactgtggttcttcttcaacctgctttggtggaagggggccattttgggtgcatgagaaactcatgggacctgtgcttaccctgaaatacaggatgaatatgactacttctccacagcactgtatctctacagcaaatacaatgttacgaaagctctgagaaaagcacgtatccggcctacaagcggcagaaaatacgccgttggccatattgttgccgtcattgaatatgcgtttggggcaatgccgtcactcgtctgtaagaacggctcagttcaagaactcaggctctgcttccacaaggattatcagcctcgtgattgcacgcttgaggccggctctgcaccgaacggcagaagctactgccctcgctacatcacgttcccgtcgtacaaaccgtccgtggtggccaatactacggaggggatcaacaaccaatccaatggcgaggttccgagctacatgcgtacgtctgactctgagtagcgtccaggactccaggttctgtgggcctctgccgagccgagtttgtatcaaatatcaatagagcgagacgccacggcgtgcttgcaaaattaccggcccggtatggtcctgtataattctttcattcacagtatcgaatgactggccaccgcgcaccgggatttggaaatgaaatgtgaatgttaatgtatattatattcacttgactgtaccagattcgtgcacaggata

SEQ ID NO: 112185 - DNA, 1147 bp, Zea Mays
agagttgtggtacagttgtactgagctgagctgccggaggcagaataggagaggcaggcgatgacgatggcgacgaaggcggcgtgcgtgctggcggtgtgggtgctcgtcgcatcgggcctgtccgacctgggctcagcgcgcgcgcccctgggcagcaagccgcagcgggagttcgactacttcgcgctctccctccagtggcccggcaccatctgcgcctccacccgccactgctgcgccaccaacggctgctgccgctcggagcctctccagacgttcacgatccacgggctatggccggactacgacgacgggacctggccgtcgtgctgccgccgcacccaattcgagatggacaagatattgccactgaaggaggtgcttgacaagtactggccgtccctctactgctccaaatctggaacatgcttcagcggcaagggactcttctgggctcacgaggtgcaagaaacatggaacctgctctgcccctgtggttcaggatgaattacagtatttcacccttgcccttgacctctacttcaagtataacgttacggaaatgctgtcaagtggatggatacaggtttcaaatggtaaggaatatgcactgagcgatgtcatcgataccatcaaacatgcttttgggggatcaccacaaattgtttgcaagaggggttcaatcgaagaacttaggttatgcttcgacaaagaattgaagcctcgtgattgccttaccacttctttggcgaatggaagtgtatcaaaaagcaagcactgcccgcggtacatcaccttgccaacgtatgatccccttgtgcttgccaattcaactgtagagatcatgacacagttcgatgaatttgaggtgcctgcagctctttatacagcctaaaatgcaattgttgcaatagcagaaggtgctcgcgtgagcacctagaaccaggcacatttatcctgggatattcaatcatttgtacatgtacacttgaaagagaactgacatcttttcaacctgaaaatttataagctttatgtaaccgtgaaggtcggatattgcacatgtaattcgctaaatcaaaactgtatcttgaggtagaattttcaagtagtaataatagagatataagaaacttatcgccca

SEQ ID NO: 112186 - DNA, 1146 bp, Zea Mays
agagttgtggtacagttgtactgagctgagctgccggaggcagaataggagaggcaggcgatgacgatggcgacgaaggcggcgtgcgtgctggcggtgtgggtgctcgtcgcatcgggcctgtccgacctgggctcagcgcgcgcgcccctgggcagcaagccgcagcgggagttcgactacttcgcgctctccctccagtggcccggcaccatctgcgcctccacccgccactgctgcgccaccaacggctgctgccgctcggagcctctccagacgttcacgatccacgggctatggccggactacgacgacgggacctggccgtcgtgctgccgccgcacccaattcgagatggacaagatattgccactgaaggaggtgcttgacaagtactggccgtccctctactgctccaaatctggaacatgcttcagcggcaagggactcttctgggctcacgagtcagagaaacatggaacctgctctgcccctgtggttcaggatgaattacagtatttcacccttgcccttgacctctacttcaagtataacgttacggaaatgctgtcaagtggatggatacaggtttcaaatggtaaggaatatgcactgagcgatgtcatcgataccatcaaacatgcttttgggggatcaccacaaattgtttgcaagaggggttcaatcgaagaacttaggttatgcttcgacaaagaattgaagcctcgtgattgccttaccacttctttggcgaatggaagtgtatcaaaaagcaagcactgcccgcggtacatcaccttgccaacgtatgatccccttgtgcttgccaattcaactgtagagatcatgacacagttcgatgaatttgaggtgcctgcagctctttatacagcctaaaatgcaattgttgcaatagcagaaggtgctcgcgtgagcacctagaaccaggcacatttatcctgggatattcaatcatttgtacatgtacacttgaaagagaactgacatcttttcaacctgaaaatttataagctttatgtaaccgtgaaggtcggatattgcacatgtaattcgctaaatcaaaactgtatcttgaggtagaattttcaagtagtaataatagagatataagaaacttatcgccca

SEQ ID NO: 112187 - DNA, 534 bp, Zea Mays
tttgaatatttctctgaacacttctgaccctgaaatcggaaacttatatttatttccaaaattcaaatggcacatattgcaagcaatgctcatttcaaattatgcttccagcctcgtgattgccttaccacttctttggcgaatggaagtgtatcaaaaagcaagcactgcccgcggtacatcaccttgccaacgtatgatccccttgtgcttgccaattcaactgtagagatcatgacacagttcgatgaatttgaggtgcctgcagctctttatacagcctaaaatgcaattgttgcaatagcagaaggtgctcgcgtgagcacctagaaccaggcacatttatcctgggatattcaatcatttgtacatgtacacttgaaagagaactgacatcttttcaacctgaaaatttataagctttatgtaaccgtgaaggtcggatattgcacatgtaattcgctaaatcaaaactgtatcttgaggtagaattttcaagtagtaataatagagatataagaaacttatcgccca

SEQ ID NO: 112188 - DNA, 1028 bp, Zea Mays
atgacatctgttgctgaaagtatcactgagagcctccgacggtctcgccagatgatggttcaggaagtggaaagaagtgctagtaccttggcaacatttggtgaaactggaagaacgtatgaagctagacttgttgcaatttatagacatgtaagagagaacggagttgagggacaacctatttctgtttcaacagaacagtttgcatgtcattttttagttgcacagtaccgacaccaagttctatcctcatgtgtaaataccacagtatatggttttcattatcccttgaacatgaagcatatagtcttgaaactaacaactttcaccatcgtgtatgtggtcccaaagcgttcttatgatgctcgaaaggcccttcagaaaaatgttatccaactaagcagcagtctgatagttggagtaaagcctattgatgcagtgcaccggcagcagctggacgagagtttcgctccaagcaactcaggtggatttatggcttccttgccttcgaagtcacttggcttgaagagcacaggcgcatcgaactagttaggaggctttaaccggctgtatgacctcaaagctaacacaaatgttagccgagatgcagggcgtcgggcaactggcagtgttgctgcaccagcaaaatcaattgtaaccaatgtaatggatttggtatttggcatttgatttggcaatgaggattgatgaccaatgcatccggaaccttctctgtttcttccatttacttgttcgagaatgccaccattccaaagattcaacagcaaatcttgctgaagtctaagagcttaccgagtgaactttcatttggcgatgtaacattaatattatgcattttttcacggttaattgtactaatgttgtctcatgatatgttcagatgaggtcagttgtgtgttaatgaccatgctacagcctacagctcttgtagtgggtgatttttcatatttttaactggtttgtgtattgtttactgtcgtttaagtgttaccttgcttctgcctccc

SEQ ID NO: 112189 - DNA, 1686 bp, Zea Mays
atccctgtgttgatagggccatagcggagcggctggcgggtggcggctgctgcataccggtttagggtttggctttggggccttgggggcggcggctgtgtggcggctacgggctgctcgcctagtcgactgctcctctgctcgcgcggaccaggagcctgctcgcctgcttctctactgtgtggtggctgcgggcttctcgcgcggaccaggagctgaggcaccgagcaggggcagccggccgtcacttctgccggcgcaggggccacatgcgggcggccgggcaagcaggcgcagggggccgggcaagcaagcagtgcagcaagcaggcgcagcgcaggcggccgggcaagcaagcagcgcaacaagcaggcgcatggggccaggggccacacgtgaccagcagccagcaagcagcgcagtcgcagcccggcagtctatgattgcagattgcagctgcagaagcgaacagatctgccaacctcggctctaatccacgacatctctgcttcgcgccgccgtccagcttcgtcctgccagccgacctcatccccgccggccgtcgccccagccacgacgcctggccgtacctgtatttctcatcccgcggtacaagccccagccgagacgcttgtagccttgtaccgtccccgagcagtttcaccaaatcccggtcggtcccagactgcaagtgccaaatgctttcccgtctcctcccgcgccaccatcaccgccgcctcctccaaaccctgtccagggccgccgccgccgccccagatgttgacctccaccagaggctgtgctcttcgtctgcagcgtcaagcccgagcctgtcgatatggcggcggaagaaggagatgggcaaggagggcctcatggtggtggcgcagctcaagcggctcgcggctctgcccccggcggggggtcacccgcgcctggagcagttcatgcgttcgcacgtgtcgcggctcctccgcaccgacctcctcgccgtcctcgccgagctcctccgccaggaccatgtcagcctctcaatgaagatatatggtgttgtgcggaaagaaatctggtaccgccctgacatgtacttctaccgtgacatgctatacatgctagcgaggaacaagaaaattaatgaaacaaggcaggtatgggcggatctcaagtctgaagacgtgctatttgatcagcacacttatggcgacattgtgagggccttctgtgatgctgatttgattgaccttgcaatggaaatctatgatgacatgaggagctcccccgaccctcctctatcattgccgttccgtgttatcctgaaagggttggttccataccctgaactgagggagaagataaagcaggattttctggagcttttcccagatatgattgtgtatgatccaccagataccttatctgatatagatgaagaattcaagttttgatgaatgtacgccttcatccggattcagtgcttctgagttacattccctgcactgcaggcaaacctccatttctcgttcttttggtgggctagatcaattgtaaatgtagctgtctcgatctgcccagtagctgtggtaccaccaattttaacctcttgatgaaccatttttgttaatctatgctttggagaattgtctgcttccgtctgtgtctcgtcctactttgaatcaccttgttctg

SEQ ID NO: 112190 - DNA, 1372 bp, Zea Mays
atccctgtgttgatagggccatagcggagcggctggcgggtggcggctgctgcataccggtttagggtttggctttggggccttgggggcggcggctgtgtggcggctacgggctgctcgcctagtcgactgctcctctgctcgcgcggaccaggagcctgctcgcctgcttctctactgtgtggtggctgcgggcttctcgcgcggaccaggagctgaggcaccgagcaggggcagccggccgtcacttctgccggcgcaggggccacatgcgggcggccgggcaagcaggcgcagggggccgggcaagcaagcagtgcagcaagcaggcgcagcgcaggcggccgggcaagcaagcagcgcaacaagcaggcgcatggggccaggggccacacgtgaccagcagccagcaagcagcgcagtcgcagcccggcagtctatgattgcagattgcagctgcagaagcgaacagatctgccaacctcggctctaatccacgacatctctgcttcgcgccgccgtccagcttcgtcctgccagccgacctcatccccgccggccgtcgccccagccacgacgcctggccgtacctgtatttctcatcccgcggtacaagccccagccgagacgcttgtagccttgtaccgtccccgagcagatatatggtgttgtgcggaaagaaatctggtaccgccctgacatgtacttctaccgtgacatgctatacatgctagcgaggaacaagaaaattaatgaaacaaggcaggtatgggcggatctcaagtctgaagacgtgctatttgatcagcacacttatggcgacattgtgagggccttctgtgatgctgatttgattgaccttgcaatggaaatctatgatgacatgaggagctcccccgaccctcctctatcattgccgttccgtgttatcctgaaagggttggttccataccctgaactgagggagaagataaagcaggattttctggagcttttcccagatatgattgtgtatgatccaccagataccttatctgatatagatgaagaattcaagttttgatgaatgtacgccttcatccggattcagtgcttctgagttacattccctgcactgcaggcaaacctccatttctcgttcttttggtgggctagatcaattgtaaatgtagctgtctcgatctgcccagtagctgtggtaccaccaattttaacctcttgatgaaccatttttgttaatctatgctttggagaattgtctgcttccgtctgtgtctcgtcctactttgaatcaccttgttctgaagtttggtactgctgctgtgcactgagatttgtgttccgttgatccctgctatataatcatttgtac

SEQ ID NO: 112191 - DNA, 1280 bp, Zea Mays
tccctgtgttgatagggccatagcggagcggctggcgggtggcggctgctgcataccggtttagggtttggctttggggccttgggggcggcggctgtgtggcggctacgggctgctcgcctagtcgactgctcctctgctcgcgcggaccaggagcctgctcgcctgcttctctactgtgtggtggctgcgggcttctcgcgcggaccaggagctgaggcaccgagcaggggcagccggccgtcacttctgccggcgcaggggccacatgcgggcggccgggcaagcaggcgcagggggccgggcaagcaagcagtgcagcaagcaggcgcagcgcaggcggccgggcaagcaagcagcgcaacaagcaggcgcatggggccaggggccacacgtgaccagcagccagcaagcagcgcagtcgcagcccggcagtctatgtgcttctctctctgtagattgcagattgcagctgcagaagcgaacagatctgccaacctcggctctaatccacgacatctctgcttcgcgccgccgtccagcttcgtcctgccagccgacctcatccccgccggccgtcgccccagccacgacgcctggccgtacctgtatttctcatcccgcggtacaagccccagccgagacgcttgtagccttgtaccgtccccgagcagatatatggtgttgtgcggaaagaaatctggtaccgccctgacatgtacttctaccgtgacatgctatacatgctagcgaggaacaagaaaattaatgaaacaaggcaggtatgggcggatctcaagtctgaagacgtgctatttgatcagcacacttatggcgacattgtgagggccttctgtgatgctgatttgattgaccttgcaatggaaatctatgatgacatgaggagctcccccgaccctcctctatcattgccgttccgtgttatcctgaaagggttggttccataccctgaactgagggagaagataaagcaggattttctggagcttttcccagatatgattgtgtatgatccaccagataccttatctgatatagatgaagaattcaagttttgatgaatgtacgccttcatccggattcagtgcttctgagttacattccctgcactgcaggcaaacctccatttctcgttcttttggtgggctagatcaattgtaaatgtagctgtctcgatctgcccagtagctgtggtaccaccaattttaacctcttgatgaaccatttttgttaatctatgctttggagaattgtctgct

SEQ ID NO: 112192 - DNA, 1571 bp, Zea Mays
gccatagcggagcggctggcgggtggcggctgctgcataccggtttagggtttggctttggggccttgggggcggcggctgtgtggcggctacgggctgctcgcctagtcgactgctcctctgctcgcgcggaccaggagcctgctcgcctgcttctctactgtgtggtggctgcgggcttctcgcgcggaccaggagctgaggcaccgagcaggcgcagggggccgggcaagcaagcagtgcagcaagcaggcgcagcgcaggcggccgggcaagcaagcagcgcaacaagcaggcgcatggggccaggggccacacgtgaccagcagccagcaagcagcgcagtcgcagcccggcagtctatgattgcagattgcagctgcagaagcgaacagatctgccaacctcggctctaatccacgacatctctgcttcgcgccgccgtccagcttcgtcctgccagccgacctcatccccgccggccgtcgccccagccacgacgcctggccgtacctgtatttctcatcccgcggtacaagccccagccgagacgcttgtagccttgtaccgtccccgagcagtttcaccaaatcccggtcggtcccagactgcaagtgccaaatgctttcccgtctcctcccgcgccaccatcaccgccgcctcctccaaaccctgtccagggccgccgccgccgccccagatgttgacctccaccagaggctgtgctcttcgtctgcagcgtcaagcccgagcctgtcgatatggcggcggaagaaggagatgggcaaggagggcctcatggtggtggcgcagctcaagcggctcgcggctctgcccccggcggggggtcacccgcgcctggagcagttcatgcgttcgcacgtgtcgcggctcctccgcaccgacctcctcgccgtcctcgccgagctcctccgccaggaccatgtcagcctctcaatgaagatatatggtgttgtgcggaaagaaatctggtaccgccctgacatgtacttctaccgtgacatgctatacatgctagcgaggaacaagaaaattaatgaaacaaggcaggtatgggcggatctcaagtctgaagacgtgctatttgatcagcacacttatggcgacattgtgagggccttctgtgatgctgatttgattgaccttgcaatggaaatctatgatgacatgaggagctcccccgaccctcctctatcattgccgttccgtgttatcctgaaagggttggttccataccctgaactgagggagaagataaagcaggattttctggagcttttcccagatatgattgtgtatgatccaccagataccttatctgatatagatgaagaattcaagttttgatgaatgtacgccttcatccggattcagtgcttctgagttacattccctgcactgcaggcaaacctccatttctcgttcttttggtgggctagatcaattgtaaatgtagctgtctcgatctgcccagtagctgtggtaccaccaattttaacctcttgatgaaccatttttgttaatctatgctttggagaattgtctgcttc

SEQ ID NO: 112193 - DNA, 695 bp, Zea Mays
cggcggtgctcaccctctgaccaacttggaacacaagtttgtggagcagatatatggtgttgtgcggaaagaaatctggtaccgccctgacatgtacttctaccgtgacatgctatacatgctagcgaggaacaagaaaattaatgaaacaaggcaggtatgggcggatctcaagtctgaagacgtgctatttgatcagcacacttatggcgacattgtgagggccttctgtgatgctgatttgattgaccttgcaatggaaatctatgatgacatgaggagctcccccgaccctcctctatcattgccgttccgtgttatcctgaaagggttggttccataccctgaactgagggagaagataaagcaggattttctggagcttttcccagatatgattgtgtatgatccaccagataccttatctgatatagatgaagaattcaagttttgatgaatgtacgccttcatccggattcagtgcttctgagttacattccctgcactgcaggcaaacctccatttctcgttcttttggtgggctagatcaattgtaaatgtagctgtctcgatctgcccagtagctgtggtaccaccaattttaacctcttgatgaaccatttttgttaatctatgctttggagaattgtctgcttccgtctgtgtctcgtcctactttgaatcaccttgttctg

SEQ ID NO: 112194 - DNA, 2132 bp, Zea Mays
tgctgcgcctgccgcctgcgtttcggccaccgcactacttccccaatccccttgatatcgcccacccgcgctcgccgccgccgctgggcggcgatggaaaccctaatggtagaccgcgtccacagtagcctccgcctcttcatgtaccgcaacgccatattcctctgcgagcgcctctgcgcacagttcccctccgagaccaatgtgcaattgctagcaacctgctacctacacaacaatcagccatatgctgcatatcacgttttgaaagggaagaagctgccggagtcccggtacttgtttgctacatcatgctttcgaatgaacctcttgcgtgaagcagaagaaattctatgtccagtcaatgagccaaacatggaggttccaagtggagcaacaggacactacctccttggagtgatctacaggtgcacaggcagaatttcagctgcagctgaacaatttacacaagcgttgactctagatcctcttttatgggcggcatatgaggaattgtgtatattaggtattgccgaagataccgatgagtgttttagtgaatcgactgctctacgtctccagcaggaacacacatccacgtccactttggtgaagtcgaactttgccaatgaaaatcgagttctatcatccagtgtctctgcaagttttggggatattattcctaagcaaatcaaacagcttcatgctaacaacataacagaagtatctggttatcctcatgtaagaccaaccgcattgcatgtgcagaacagttcaacttctaatgtatcacagtttgacaccccatcaccagctgcagcacagacttctatcatgccaccaccactatttaggaatgtacatgcttaccagaatacaataagtggcgatgctcccactaagcagaaagctaatggagtaagccagccactcagaaggaaatacatggatgaagcaaggctaaagaaggtttctggaaggttgtttaatagcgatgcaatgcctcgaagaagtcaaagacttaaagatacaacaacaaattcaaatacatctcaaattggaggaaatggaacagatcatttgtcaggaagtagatatgaagtcattgatgaaatgtggacagacaatatgtcaggaacttcatcttctgtaagtacagctgatggaagatcctttgagcaagatagagctgaacgaattctgttgcaagactccaaagtggcacttggtattagggagctattgggacttttccgaacactgggggaaggttttaggctttcttgcttgtttaagtgccaggaagcactggaagtctacagaaaactccctgagtcgcagtttaacactggatgggttctatgccaggttggtaaggcatattttgaattagttgattatttggaagctgatcattattttgagctggcacaccgactatcgccttgtacgcttgatggaatggacatctattctactgttctttatcatctgaatgaggaaatgagactaagctaccttgctcaagagcttatttccattgatcgactatctcctcaagcatggtgtgcagtgggcaattgctttgccttgagaaaagatcatgagactgctttgaagaattttcaacgttcggtacagcttgactcaagatttgcatatgctcacactctatgtggtcatgagtattctgcactggaggattatgagaatagtatcaaattctacagatgtgcactgcaggtagatgaaaggcactacaatgcttggtatggccttggggtggtgtatcttcgccaggaaaagtttgagtttgctgagcatcatttcagaagggcatttcagataaatcctcgctcttctgttctcatgtgctatcttgggatggccttgcattctcttaaggttgatatcattgatcgacaacaatagactactccctctgattccaaatataggttgttgtagtctaaaaattacttacacatggaatccgatggagtacttctccatttctgttttccccttcgaaatcttaagttgacaacgattaaatgaaccttctgtctggattcaaacttgtcagaggaatgaagaggcactggaaatgatggagaaagctatagcagctg

SEQ ID NO: 112195 - DNA, 2580 bp, Zea Mays
tgctgcgcctgccgcctgcgtttcggccaccgcactacttccccaatccccttgatatcgcccacccgcgctcgccgccgccgctgggcggcgatggaaaccctaatggtagaccgcgtccacagtagcctccgcctcttcatgtaccgcaacgccatattcctctgcgagcgcctctgcgcacagttcccctccgagaccaatgtgcaattgctagcaacctgctacctacacaacaatcagccatatgctgcatatcacgttttgaaagggaagaagctgccggagtcccggtacttgtttgctacatcatgctttcgaatgaacctcttgcgtgaagcagaagaaattctatgtccagtcaatgagccaaacatggaggttccaagtggagcaacaggacactacctccttggagtgatctacaggtgcacaggcagaatttcagctgcagctgaacaatttacacaagcgttgactctagatcctcttttatgggcggcatatgaggaattgtgtatattaggtattgccgaagataccgatgagtgttttagtgaatcgactgctctacgtctccagcaggaacacacatccacgtccactttggtgaagtcgaactttgccaatgaaaatcgagttctatcatccagtgtctctgcaagttttggggatattattcctaagcaaatcaaacagcttcatgctaacaacataacagaagtatctggttatcctcatgtaagaccaaccgcattgcatgtgcagaacagttcaacttctaatgtatcacagtttgacaccccatcaccagctgcagcacagacttctatcatgccaccaccactatttaggaatgtacatgcttaccagaatacaataagtggcgatgctcccactaagcagaaagctaatggagtaagccagccactcagaaggaaatacatggatgaagcaaggctaaagaaggtttctggaaggttgtttaatagcgatgcaatgcctcgaagaagtcaaagacttaaagatacaacaacaaattcaaatacatctcaaattggaggaaatggaacagatcatttgtcaggaagtagatatgaagtcattgatgaaatgtggacagacaatatgtcaggaacttcatcttctgtaagtacagctgatggaagatcctttgagcaagatagagctgaacgaattctgttgcaagactccaaagtggcacttggtattagggagctattgggacttttccgaacactgggggaaggttttaggctttcttgcttgtttaagtgccaggaagcactggaagtctacagaaaactccctgagtcgcagtttaacactggatgggttctatgccaggttggtaaggcatattttgaattagttgattatttggaagctgatcattattttgagctggcacaccgactatcgccttgtacgcttgatggaatggacatctattctactgttctttatcatctgaatgaggaaatgagactaagctaccttgctcaagagcttatttccattgatcgactatctcctcaagcatggtgtgcagtgggcaattgctttgccttgagaaaagatcatgagactgctttgaagaattttcaacgttcggtacagcttgactcaagatttgcatatgctcacactctatgtggtcatgagtattctgcactggaggattatgagaatagtatcaaattctacagatgtgcactgcaggtagatgaaaggcactacaatgcttggtatggccttggggtggtgtatcttcgccaggaaaagtttgagtttgctgagcatcatttcagaagggcatttcagataaatcctcgctcttctgttctcatgtgctatcttgggatggccttgcattctcttaagaggaatgaagaggcactggaaatgatggagaaagctatagcagctgataagaagaatccactgcccaagtatcagaagtccttaatccttctaggactaatgaagtatgaagaagctctggatgagttggagcggctaaaggagattgcaccccatgagagtagtatgtatgcactgatgggaaagatttacaagcaactcaatattcttgacaaagctgttttctgcttcggcattgccctggatttgaaaccacctgctgctgatcttgctataattaagtccgcaatggagaaagtacatctccctgatgaactgatggaggatgacctataagttcactcaagcatcgtgagaaatgaacatttacttcgggttcatgatgacccgcctgtgcttcgtgttcctggcctagtggcctgcttgggcttctcaagtggaactcggaagtcggagctgtaccattagccatccagtttggaatgaaaagaaaaaaaaattaaccatccagttttgtagatttagttttagcctgtaatcagagaacacatgcgcagaagctgcggtagtttaggactctgtacaagtgttggcgaaatgacgcctgtaccattatcaaataacggaaataattaaaggatgaggatccagctgattcaagcagattgtttgtcg

SEQ ID NO: 112196 - DNA, 2863 bp, Zea Mays
tagaaaaaactgaaccaaacagccaatagacactgagcgatcatgtggcacgtgtagcgctgggacaggcccaccgccgccacctcgacgccgaacggccgaagagccactgccagtgccacaccacacgccgattctctgaacaccaatctgcgcaatcccggcaaaatcccaaaccctgcctcgtcgtcgcaccgcctccactcgtcccggatcaaccacctcctcggtccgcaaccacaaccacacccgccctcccgctcgccgcagccagaaccagctccaacccaaccagaaccagctcgccccggccgccgcgaccgtcccccctcatcgactcgaggcaacgaagcggccggatgggagcagcagcctgaccctgacgcgatgagcccgcccgccatgctgctgcccgtctgctccgccgcgcccagctgctcccccctctgcccggtgacggcctcgcacgtcgtcgcgcgggtggcgcggagggtggacgtcggcgccgcgctcaggtcctacgccgactcgctcgtcgcgcaggtgcccgaccgcccgccgctcgccgactcctccatactctccccctacatcgccgcgccggacgacatcgcgcgagccttcggcgcccccgcctccgagctcccgccgctccccagcgccgaccccagccctgggctatgttgcacgggcaccgaccagccgctggcggcagtcgcggacctggccgcaactgccgtggtcaactcggctcccaccgacgccgcggagcgggccctgtcggacgcgccgttccccagcacgttcccgtctgacgcgtccgaggtcgaggactccgtggccaggctcatcgataaggtcggcaagcaggtcttccaggcggaggacgcgctcaccgaggcctacgacaagctgaggctgtccgcgtacgacgcgctcggtgcgtggaggaagacggtgcgcgacgcgataggtgggctcaaggcgtcggtcgacgccggtaagcaacaggccgccggaggggtcacggatgcttccggcgcgttgcacgagaaggtggccggagctgggactgtggctgttgatgttctcaggaaggcgattgttgcagcagaggattcactgggcagtgctgccacattcgttgtgtattcttatgggtcggcgaaggagtctctaccaccaaatgttagagatctgttgagctcgtctgaggagaaagctagtctagtcttgagaccaatcggaaatgctctgcaacaggtctatgtagttgttgaaggtgttgagaagaatgttggtttggatccaagtgatcctattgttcaattggcagttgtgcttggaggttcagtgacaatagggacaacgtactggctcttcacatacagtggctattctggagacttgtcacctgaatcagcgtttgacttattgaaaaacgatgacaaagccgtactcattgatgttcggcctgaggatttgagggaaaaagatggtgttcctgatctacgcctcggggctaggtctaaatatgcaagtgtagcttcgcctgagatcaaagatccagtaaagagtatgctcaaagatgaaagagagtttgatgatgctttactggcagttgtcatccgaaacttgaaattggtgaagggcgattcaaaagtcatagttatggattctaatggagctcgatcaaaagccattgctaggttactgaagaagctcggtgtgcagcgaccttaccttgttaaaggtggtttccaagcatggtcaaagaaccttcgtgtcaaagaactgaaacctgagactgcattaacgtcaataaatgaggatgttgaggaaatcctagaacaaataaagcccaccccaactcttgtgtttggatctcttctgggcctctcagcactttcctatgctttactggaatgggagatgactttgcaatacatagctgttttaagcgttgggctgactatctacttgcgattctctacatatgaggactccgaggatttggagaaagacctaaagctgttgctgtctccagtaagagtaggcgcagacgccttgtcatgggcagctaagaagatagagccaaacaaggtgggcctgccaacgtctccttccacgacggcggtgaaagaccgggttcttcaggccgcggcgaagcacgagtcgcagccatcggatgccgacgagtcgtcggtccaaacagccgaggcatgacacgcgccgaaagcttgggagccagtcgagcggtcccgccgaatcctcaataagagcactcggtgggcgctccctggtaatttgtgaagtccatgtcgtttatgatgtaaagcactgtaaagcggttgtaaattaattgcgtgagcagcatctgtaagttgacatcaacttggttggttgtgtgtgtgtagattatagagaaagaggtgtcaatgtaacgttaattcctgagcctgtctgcgatcttgcccgtctggtactgctactctgcttgcttgcttgtttggcacgcgatcaaggtgaattaagtaaaaatggtccgtggtccaagtccagccccacaacttggctgtcaggcgtagtgtaacctttgttggtacggaaatgaaatcctggagtacggctgtttttaaccaccatagtgcctgccgaaatgctgctcggtagtaaacgggtacagaatttaatcccgcatcatttggaagctccaccccaatagccacagcccacaggccccagaagacgaaaggaaacgatgcgctcgctgctcgcataggatcaaagggacgggaatcccaatgtcttgttttcaaaattttatcgtattttcttaaaaacagtataaaaaacatagaaa

SEQ ID NO: 112197 - DNA, 896 bp, Zea Mays
actcggtcactcctcagtcctcaccaccgccgcgccaccgccgcgcccccagcctcaacggccaaatcctccgcgccaccccgcataagtacccgccactccgccgctcccaccccactccaaacctccctctctcgacctcgacccctcgcccgcaaagccccgcaagccagcggcatcccgcttcctcggcaggcttccaagacccaacccaacagcttccgagcgagtacggcggcggcgacgatggcggccaagtcgcacacacgcaaggcgttcctcctctgcaactacgtcctcctgggcgcctcctccagctgcatcttcctcacgctgtcgctgcgcctgctgccgtccccgtgcggcctgctcctgctcttcctccacgccctcaccgccgtcttctccgcggccggctgctcgggctccttcacggcgcccgccacgcccgcgcagtggcacaacgcgcacaccgcgggagccgcgctcaccgccatcttccagggcgccatcgcgctgctcgcgttcacccgcacctccgacttcctcgccgagctccagtcctacgtccgcgacgaggacggcgccgtcatcctcaagatggtcggagggctcggcaccgccatcttcgtcctcgagtgggccgcgctcgcgcttgccttctccctccgcctcgacgaggatgacgacgacgacgacctccaggccaagaactggcaatcgtaccatgtctgatcccatccactgctggcctgggctccttcaaaatgagattctttgatgtctattctattattgtactattgctgtcattcttttgtactacggtgtactgttatgactgttcaaccaaaataaataaataccaaagcaaatatatattattgcttttgtta

SEQ ID NO: 112198 - DNA, 546 bp, Zea Mays
agattgatctggggagcttcgcggccaccatttctagatttcaaccgcaactcaggagaagcagccagagcattgacagcctcttccggaggtctgtttctggtatagcagatgcagcctcaggagagccattcttcacattgggttggttaatttcctcaacagttgcagatgagctgtcagttagaggcacatcaacaattgcacctcctggacagatgcgcattgaaagaacttgcaagcatagctgctcaatcttttccgttcccttgaggtcttcagcagtcagtaattcagctttttcgtgatttaggttgcatataataagaggttggctcttccggagagcttgctcagtcaaagtgttcaggactctttgttggcggagcagagacctgaactcttcaacttctgtacactgaccatttggggagctattggcctcctcttctttatcgtccaataggctttcaatttgtatcccctgcaggaagtaaattccaacagtgaaacaaacaatattgcacatttaattgaggaacaata

SEQ ID NO: 112199 - DNA, 534 bp, Zea Mays
ctcttgctagcgtatcaagttcatcttcaagttttgcggtggctgcctactagcatttttttcttctagatagatagatctcgcgtgcaagtgcgccatgagagggcctgtgttaggcgccgttagctccttgaacgccggttatgcatattgcggcttatatgaaagggacgacgagtaccggccagtacatgaggtcgagccgaccgtccggctgggcctcagggtctttgcggtcgtcaacgctatcatgctgactattgttaacatcatcataagcgagagcctcctcgggaagatagtagctccggctgggatgatagtcatggtggggtttgtatttgcaatcacaacagacgatgccgaacctggaatcacccaaacagagtccatggtgtgattttcatccgcgacaagccggacccttttcttctagattgtttttactactagacatcagaatgttcattttttttgttcgaattatagataagagctttgtttgtctcgtgtaaacccacggcttcttgtaga

SEQ ID NO: 112200 - DNA, 441 bp, Zea Mays
atggagtttggtacagcgcgccagtacgacaccaccgaccttgatgaagcacttcaaagagagagttttgaagctttgaaccccagagccgttgctgttgtgatagaccccatccagaagaggacgatcgattttcgattttggctgttgaatccgtatgggctatggtcgccgaggcactcgcagtcggacgtgtcttcatcggagatggagtttggtacagcgcgccagtacgacaccaccgaccttgatgaagcacttcaaagagagatctcaaaagaaagatcttcaaagcttgagaaaaggagtaaaggacctcctgctgttgcagggcatatgtcactcacggccttccacagactcaagcagaaaaaggctttattttctgtagcagcaggagcacagtgccccaaggtcgtagttaaggggtttttgttttaa

SEQ ID NO: 112201 - DNA, 1026 bp, Zea Mays
tttcaatcccagaacagggcccgagcgagagcccacgaacgaagggctccttctctctcctctcgttgctgcatttgcagacttgcagtgttgcagataattttggatgccattcaagcgttctacggctccaatttctctgacttctccctgagcctttgcggccggctggagctggacggtccccgggcagcgcaggcagccggactgcgggagtcacctccatggcctcggctgctactgcaaccctccccaaggttcagttgaggccaagatgcaacagctacttccaggtgaccggtcaagtccatgcccacaccaaaacatgcggtgcctgcaagtgtccgacccatatccacgggtaaacaaactggacgcggctcctttgtcgcctgtcatcttcagattttcagtcttcagtctccacgtttgccttcacaggttgcttgtttcagctggaggaaggaggacattcctgccggtgtctgcagttggatcaggtcagggctcatcggtcactgaggccgacaggaagagcgatttgtcgctggagaacgtcaagacgtccgttgtatcccgcgacggtgaaaagattaatgtgagctccaaccaactcagctgtccagatgtacagattgaatcttttgatttgatctggccatgtcaattatttctctgtatgcaggtacgagtgcagttgcctggaaaggcgacgcaaaaggtgtttgatgaggctctgacgttcttggcccgtgatgcgccaccggttcctggttttagaaagtccaaaggaggtactgatcatcataagcacaccgcaacctctctctctctctctctctctctctctctctctctctctatctcttattaatgtcacgttctttcttgcttcacattggcactaaccgtttcttacaagacatattttagtaattgtttgcctcaagtaattcaaacttctaaccgttttgtgtcctctgcatgcacatatgttggatgttcgaagggaaaacatcaaatgta

SEQ ID NO: 112202 - DNA, 953 bp, Zea Mays
tttcaatcccagaacagggcccgagcgagagcccacgaacgaagggctccttctctctcctctcgttgctgcatttgcagacttgcagtgttgcagataattttggatgccattcaagcgttctacggctccaatttctctgacttctccctgagcctttgcggccggctggagctggacggtccccgggcagcgcaggcagccggactgcgggagtcacctccatggcctcggctgctactgcaaccctccccaaggttcagttgaggccaagatgcaacagctacttccaggtccgccccgtccttgcactccctctcccctcccgaaagttcagctcatcagttgccctgttgattcgttccaacatgccctcaaccctaaggtgaccggtcaagtccatgcccacaccaaaacatgcggtgcctgcaagtgtccgacccatatccacgggttgcttgtttcagctggaggaaggaggacattcctgccggtgtctgcagttggatcaggtcagggctcatcggtcactgaggccgacaggaagagcgatttgtcgctggagaacgtcaagacgtccgttgtatcccgcgacggtgaaaagattaatgtacgagtgcagttgcctggaaaggcgacgcaaaaggtgtttgatgaggctctgacgttcttggcccgtgatgcgccaccggttcctggttttagaaagtccaaaggagggaaaacatcaaatatacccagcagcatcctgctgcagatgcttggcaagagccgggtcaccaaattcgttcttcaggaaatactgagcatcaccattgaagaatttgtcaagaaggtgaatgccagttcagataacacttggcaaaaaaaaaaacccgtcactggtaggtatgacactgacttgctactaataaatcaggaaaacctgaaggtgaaacctgagatccagacaa

SEQ ID NO: 112203 - DNA, 1712 bp, Zea Mays
tttcaatcccagaacagggcccgagcgagagcccacgaacgaagggctccttctctctcctctcgttgctgcatttgcagacttgcagtgttgcagataattttggatgccattcaagcgttctacggctccaatttctctgacttctccctgagcctttgcggccggctggagctggacggtccccgggcagcgcaggcagccggactgcgggagtcacctccatggcctcggctgctactgcaaccctccccaaggttcagttgaggccaagatgcaacagctacttccaggtgaccggtcaagtccatgcccacaccaaaacatgcggtgcctgcaagtgtccgacccatatccacgggttgcttgtttcagctggaggaaggaggacattcctgccggtgtctgcagttggatcaggtcagggctcatcggtcactgaggccgacaggaagagcgatttgtcgctggagaacgtcaagacgtccgttgtatcccgcgacggtgaaaagattaatgtacgagtgcagttgcctggaaaggcgacgcaaaaggtgtttgatgaggctctgacgttcttggcccgtgatgcgccaccggttcctggttttagaaagtccaaaggaggtactgatcatcataagcacaccgcaacctctctctctctctctctctctctctctctctctctctctatctcttattaatgtcacgttctttcttgcttcacattggcactaaccgtttcttacaagacatattttagtaattgtttgcctcaagtaattcaaacttctaaccgttttgtgtcctctgcatgcacatatgttggatgttcgaagggaaaacatcaaatatacccagcagcatcctgctgcagatgcttggcaagagccgggtcaccaaattcgttcttcaggaaatactgagcatcaccattgaagaatttgtcaagaaggaaaacctgaaggtgaaacctgagatccagacaacccagtccgaaggcgagatggagtccgcgttcgcgccgggatcagcatttgggttcaatgttgtccttcagctcgagacacctgactctgatgatccagaggagaaacctggctctgatgacgatttacaggaggaatctggttcctcggagtagaaagaaatgcatatcgcctgcatgcatttatcaaccttcttcatgtgccattccttatgaatgaatgtactgaatggaaagccgttgcaaccgttttgagttgagagttgcaactgaaacatttctgaagatatgagtggccgactcgcctctcttaacatgttgacacacagcgagcatacgcttcagaaatcggaacctgctgcacatatgattggaactgaagaaaatgcgcgtgggaggtccatgcccacaatgataacacactagagcttcagcttccagcgcacactacaacaagatcttatccgctttgtctggagtatcatccgttgacaactcggcttccaactaccagatcaatcattccgggtgctccccacctcccaaggttcacactcccccacatcgccagtgacctaccaactgcacatattattcgttccttttttttccagagaaaaccagccgcatatattcttggagaggagaaagacccggccctaaacatttgcacttctgattctatggcccatgagaattccctgtcatgacagtattttgc

SEQ ID NO: 112204 - DNA, 1483 bp, Zea Mays
tttcaatcccagaacagggcccgagcgagagcccacgaacgaagggctccttctctctcctctcgttgctgcatttgcagacttgcagtgttgcagataattttggatgccattcaagcgttctacggctccaatttctctgacttctccctgagcctttgcggccggctggagctggacggtccccgggcagcgcaggcagccggactgcgggagtcacctccatggcctcggctgctactgcaaccctccccaaggttcagttgaggccaagatgcaacagctacttccaggtgaccggtcaagtccatgcccacaccaaaacatgcggtgcctgcaagtgtccgacccatatccacgggttgcttgtttcagctggaggaaggaggacattcctgccggtgtctgcagttggatcaggtcagggctcatcggtcactgaggccgacaggaagagcgatttgtcgctggagaacgtcaagacgtccgttgtatcccgcgacggtgaaaagattaatgtacgagtgcagttgcctggaaaggcgacgcaaaaggtgtttgatgaggctctgacgttcttggcccgtgatgcgccaccggttcctggttttagaaagtccaaaggagatacccagcagcatcctgctgcagatgcttggcaagagccgggtcaccaaattcgttcttcaggaaatactgagcatcaccattgaagaatttgtcaagaaggaaaacctgaaggtgaaacctgagatccagacaacccagtccgaaggcgagatggagtccgcgttcgcgccgggatcagcatttgggttcaatgttgtccttcagctcgagacacctgactctgatgatccagaggagaaacctggctctgatgacgatttacaggaggaatctggttcctcggagtagaaagaaatgcatatcgcctgcatgcatttatcaaccttcttcatgtgccattccttatgaatgaatgtactgaatggaaagccgttgcaaccgttttgagttgagagttgcaactgaaacatttctgaagatatgagtggccgactcgcctctcttaacatgttgacacacagcgagcatacgcttcagaaatcggaacctgctgcacatatgattggaactgaagaaaatgcgcgtgggaggtccatgcccacaatgataacacactagagcttcagcttccagcgcacactacaacaagatcttatccgctttgtctggagtatcatccgttgacaactcggcttccaactaccagatcaatcattccgggtgctccccacctcccaaggttcacactcccccacatcgccagtgacctaccaactgcacatattattcgttccttttttttccagagaaaaccagccgcatatattcttggagaggagaaagacccggccctaaacatttgcacttctgattctatggcccatgagaattccctgtcatgacagtattttgc

SEQ ID NO: 112205 - DNA, 1796 bp, Zea Mays
tttcaatcccagaacagggcccgagcgagagcccacgaacgaagggctccttctctctcctctcgttgctgcatttgcagacttgcagtgttgcagataattttggatgccattcaagcgttctacggctccaatttctctgacttctccctgagcctttgcggccggctggagctggacggtccccgggcagcgcaggcagccggactgcgggagtcacctccatggcctcggctgctactgcaaccctccccaaggttcagttgaggccaagatgcaacagctacttccaggtccgccccgtccttgcactccctctcccctcccgaaagttcagctcatcagttgccctgttgattcgttccaacatgccctcaaccctaaggtgaccggtcaagtccatgcccacaccaaaacatgcggtgcctgcaagtgtccgacccatatccacgggttgcttgtttcagctggaggaaggaggacattcctgccggtgtctgcagttggatcaggtcagggctcatcggtcactgaggccgacaggaagagcgatttgtcgctggagaacgtcaagacgtccgttgtatcccgcgacggtgaaaagattaatgtacgagtgcagttgcctggaaaggcgacgcaaaaggtgtttgatgaggctctgacgttcttggcccgtgatgcgccaccggttcctggttttagaaagtccaaaggagggaaaacatcaaatatacccagcagcatcctgctgcagatgcttggcaagagccgggtcaccaaattcgttcttcaggaaatactgagcatcaccattgaagaatttgtcaagaaggaaaacctgaaggtgaaacctgagatccagacaacccagtccgaaggcgagatggagtccgcgttcgcgccgggatcagcatttgggttcaatgttgtccttcagctcgagacacctgactctgatgatccagaggagaaacctggctctgatgacgatttacaggaggaatctggttcctcggagtagaaagaaatgcatatcgcctgcatgcatttatcaaccttcttcatgtgccattccttatgaatgaatgtactgaatggaaagccgttgcaaccgttttgagttgagagttgcaactgaaacatttctgaagatatgagtggccgactcgcctctcttaacatgttgacacacagcgagcatacgcttcagaaatcggaacctgctgcacatatgattggaactgaagaaaatgcgcgtgggaggtccatgcccacaatgataacacactagagcttcagcttccagcgcacactacaacaagatcttatccgctttgtctggagtatcatccgttgacaactcggcttccaactaccagatcaatcattccgggtgctccccacctcccaaggttcacactcccccacatcgccagtgacctaccaactgcacatattattcgttccttttttttccagagaaaaccagccgcatatattcttggagaggagaaagacccggccctaaacatttgcacttctgattctatggcccatgagaattccctgtcatgacagtattttgcaacttcctgacattattgtttcagtgctgaaatgttcacgtcatgggtagtagccaagtcattataccagaaagaagacatttcattaggaaacatgatcagactcaggacctgggatgatctggtctaccaccttattctctatattcctatcacgcttccaatatttttttttctgacgatgaatagatacacgttaacaccttc

SEQ ID NO: 112206 - DNA, 1704 bp, Zea Mays
tttcaatcccagaacagggcccgagcgagagcccacgaacgaagggctccttctctctcctctcgttgctgcatttgcagacttgcagtgttgcagataattttggatgccattcaagcgttctacggctccaatttctctgacttctccctgagcctttgcggccggctggagctggacggtccccgggcagcgcaggcagccggactgcgggagtcacctccatggcctcggctgctactgcaaccctccccaaggttcagttgaggccaagatgcaacagctacttccaggtgaccggtcaagtccatgcccacaccaaaacatgcggtgcctgcaagtgtccgacccatatccacgggttgcttgtttcagctggaggaaggaggacattcctgccggtgtctgcagttggatcaggtcagggctcatcggtcactgaggccgacaggaagagcgatttgtcgctggagaacgtcaagacgtccgttgtatcccgcgacggtgaaaagattaatgtacgagtgcagttgcctggaaaggcgacgcaaaaggtgtttgatgaggctctgacgttcttggcccgtgatgcgccaccggttcctggttttagaaagtccaaaggagggaaaacatcaaatatacccagcagcatcctgctgcagatgcttggcaagagccgggtcaccaaattcgttcttcaggaaatactgagcatcaccattgaagaatttgtcaagaaggaaaacctgaaggtgaaacctgagatccagacaacccagtccgaaggcgagatggagtccgcgttcgcgccgggatcagcatttgggttcaatgttgtccttcagctcgagacacctgactctgatgatccagaggagaaacctggctctgatgacgatttacaggaggaatctggttcctcggagtagaaagaaatgcatatcgcctgcatgcatttatcaaccttcttcatgtgccattccttatgaatgaatgtactgaatggaaagccgttgcaaccgttttgagttgagagttgcaactgaaacatttctgaagatatgagtggccgactcgcctctcttaacatgttgacacacagcgagcatacgcttcagaaatcggaacctgctgcacatatgattggaactgaagaaaatgcgcgtgggaggtccatgcccacaatgataacacactagagcttcagcttccagcgcacactacaacaagatcttatccgctttgtctggagtatcatccgttgacaactcggcttccaactaccagatcaatcattccgggtgctccccacctcccaaggttcacactcccccacatcgccagtgacctaccaactgcacatattattcgttccttttttttccagagaaaaccagccgcatatattcttggagaggagaaagacccggccctaaacatttgcacttctgattctatggcccatgagaattccctgtcatgacagtattttgcaacttcctgacattattgtttcagtgctgaaatgttcacgtcatgggtagtagccaagtcattataccagaaagaagacatttcattaggaaacatgatcagactcaggacctgggatgatctggtctaccaccttattctctatattcctatcacgcttccaatatttttttttctgacgatgaatagatacacgttaacaccttc

SEQ ID NO: 112207 - DNA, 1595 bp, Zea Mays
caaacaaaccgcaaggcttggaacgagaaagaaataaagaaattgataaaacagtagaaaaggtaaaggctacctcatttttgtattttcttctcccctattccctcttcttgttcttggagttgttggtgtccccggagctacaaaggccccgccttttggctcattctcagactttagtactttaccatctgctccaagaaagcgtcttggagatggcgcgcaccgagaagctcaccagcgatggctgctccggcggcgaagtccaagtggaggtggagctcggcatgggggtggacgggaaggggatcatagagtgccggatatgccaggaggagggggaggaggccgctatggactcaccttgcgcttgcgctggcacactcaagtttgcccacaggaaatgcatacagagatggtgcaacaagaagggaaatattacatgcgaaatctgcaaccaggtttactccccgaattatgtcatccctccaccgaaatgttgttcagatgaaatggacatgaatcttaggtacttgctgatacaattctttatgatttgctcaatttgcgggaaacaattctttcctagatgaaaaaagatattgtggaaataacttatgtactatggttgtaacttcaacgatgtgatttgtacattttaaccgtgattaagcaagcacaattgttttcccttaatttttcaatagcaaagcagatatcggctctccagtttctgcatatccttcgagcgaccccaatgtagatattctgaatgggtgatctttttttttttggtaaacaggcaaaactgggtcggacgaatcgatccccatgattcccatttcctagccatcgccatcgcagagcagcagcttctgcaagctgaatttgatgactgtgtatctgcaaattctagcggtgccacatgctgccgatccattgctttaattgtgatgttccttttgctcgtacgccatgtaattgtcattgtgagggatgttagcatgctacaagatgcaacggtgctgttcagcgcaactcttcagtttgcgggattctttcttccttgttatgtaatagctcgttcttgctatgctttgcagcatcggagacggagacaggtgtagggaggctcacctgaaccttaagggcttgtttgggagcaagtgaaatgaaggggattgagggtgctagaatccctcactatttaaaattgaatagtggggtattctagccccttcaatcctctccattactcttcctcccaaacaagccctaaagaacacaaagacgcaccaattgaagcgccgtctcggcggtaccaccgaagataggaggactacatggaagcttgcgaagtgagcctccccgttgttgcttggattcaccgcaaagcatttggtttctgtcctgaagacgtcggcggtttaattaggttgattgagtagcgagagcaggcgctgtgaagctcaagtgtacatacgttgagggggacaaggccttttttttttacagctgagaggaagcaaaatgtagcctcacacatttctgctgcaaataaaagaacaatcgcccgtcagcgcctctgaagttta

SEQ ID NO: 112208 - DNA, 1597 bp, Zea Mays
caaacaaaccgcaaggcttggaacgagaaagaaataaagaaattgataaaacagtagaaaaggtaaaggctacctcatttttgtattttcttctcccctattccctcttcttgttcttggagttgttggtgtccccggagctacaaaggccccgccttttggctcattctcagactttagtactttaccatctgctccaagaaagcgtcttggagatggcgcgcaccgagaagctcaccagcgatggctgctccggcggcgaagtccaagtggaggtggagctcggcatgggggtggacgggaaggggatcatagagtgccggatatgccaggaggagggggaggaggccgctatggactcaccttgcgcttgcgctggcacactcaagtttgcccacaggaaatgcatacagagatggtgcaacaagaagggaaatattacatgcgaaatctgcaaccaggtttactccccgaattatgtcatccctccaccgaaatgttgttcagatgaaatggacatgaatcttaggcaaaactgggtcggacgaatcgatccccatgattcccatttcctagccatcgccatcgcagagcagcagcttctgcaagctgaatttgatgactgtgtatctgcaaattctagcggtgccacatgctgccgatccattgctttaattgtgatgttccttttgctcgtacgccatgtaattgtcattgtgagggatgttagcatgctacaagatgcaacggtgctgttcagcgcaactcttcagtttgcgggattctttcttccttgttatgtaatagctcgttcttgctatgctttgcagcatcggagacggagacaggtgtagggaggctcacctgaaccttaagggcttgtttgggagcaagtgaaatgaaggggattgagggtgctagaatccctcactatttaaaattgaatagtggggtattctagccccttcaatcctctccattactcttcctcccaaacaagccctaaagaacacaaagacgcaccaattgaagcgccgtctcggcggtaccaccgaagataggaggactacatggaagcttgcgaagtgagcctccccgttgttgcttggattcaccgcaaagcatttggtttctgtcctgaagacgtcggcggtttaattaggttgattgagtagcgagagcaggcgctgtgaagctcaagtgtacatacgttgagggggacaaggccttttttttttacagctgagaggaagcaaaatgtagcctcacacatttctgctgcaaataaaagaacaatcgcccgtcagcgcctctgaagtttatgcttggtttgggattgctggcttgcacctcgcagttgaagagtaggtagtagtagtacagggcggctgctacctgctgctgctggacaagtgcgtacagagggtggtttctgaatgggacagacgtggagtcacgggctcagtgccgctctaatgctccgttaagtgccggattgtctcttcgtcagtaattatgacattgcaatcgcctgtaattttcagtacacccatcatgaggaacacggtggcaaccctcgtcacttcgtcacttataa

SEQ ID NO: 112209 - DNA, 1916 bp, Zea Mays
ggtacatcagtcgttccggtatatcttcataacgttacaagacgagctcgagctgggagcgagaatcctaaaaaaaaagtaaccgatcaaagcagggcagccgtcaacatagcgcctgtgctgtggtcatcccctcgcgacgctacccaagtacccagcagtccagcacacggctgcggccgcactcgcacaacggcacaagcgcacaccaccgccatctccgccttcaccccctacccacccctctgtccttctatataacgcgcccgcctcgccacctcacaagaaattccccacacgcgcccacctcctctgctctctcctctcccccacctctgcgtccgtgcgttgtgtttgtttaggcggcaaccgcgaggcgcaatggcggccgggcgagagctggtggtgagtttcggcgagatgttgatagacttcgtgcccaccgtggcgggggtctcgctggcggaggcgccggccttcctcaaggcgcccgggggcgcgcccgccaacgtcgccatcgcggtctcgcgcctcggcggcggggccgcctttgtcggcaagctcggcgacgacgagttcggccgcatgctcgccgccatcctccgcgacaacggcgtcgacgacggcggcgtcgtcttcgactccggcgcgcgcaccgcgctcgccttcgtcaccctgcgcgccgacggggagcgcgagttcatgttctaccgcaaccccagcgctgacatgctcctcaccgccgacgagctcaacgtcgagctcatcaagagggctgcggtcttccactacggatcaataagcttgattgctgagccttgccggacagcacatctccgtgccatggagattgccaaagaggcaggtgcactgctctcttatgacccaaacctgagggaggcactatggccatcccgtgaggaggcccgcacccagatcttgagcatctgggaccaggcagacattgtcaaggtcagcgaagtcgagctcgagttcttgacaggcatcgactcggtggaggacgatgttgtcatgaagctgtggcggcctaccatgaagctgctcctagtgactcttggagatcaagggtgcaagtactatgccagggtatgcttcataactttttgattgctgccatcctatgaatgaaaatgggttattgatgaacacttttagcatatataactcgcacactgtgacttggtggaagacttgatgtgcagctgagactcagaagtttaaatatgcttgattggttgcaggatttccatggcgctgtgccttccttcaaagtacaacaagttgatacaactggcgcaggtgacgcgttcgttggtgctctgctccaaaggatcgttaaagatccatcctcgctacaagcaagtgcctgaaatctgaatttgttctttgctatgaaattgttggttctacatgtgaagctggtgccttgagtcttcagtttttctagcatgtgattgagttttgatatcctgtgtctgtacaggatgagaagaagcttgtggagtcgattaaattcgctaacgcgtgcggagcgatcaccaccacgaagaagggggcgatcccgtcgctgcccaccgaagcggaggtcttgcagctaatagagaaggcttagatcatcatcgtcctgtacgccatggttttcaccagcttctacttcttcgaattgtattggattctgatatggaacagaagaagaagcggctgccccatcttaccagccctttttgtttgccctagtttccccttgtgaaaagggtgttttgttttataaactctacttgcaataagcagagcctttttttaattatgtcagggtgcatttgatacgatcgaataatcatcaatccataattgtagcaatttttttttaaaaaaagaaaagtcaattgagtttt

SEQ ID NO: 112210 - DNA, 1797 bp, Zea Mays
ggtacatcagtcgttccggtatatcttcataacgttacaagacgagctcgagctgggagcgagaatcctaaaaaaaaagtaaccgatcaaagcagggcagccgtcaacatagcgcctgtgctgtggtcatcccctcgcgacgctacccaagtacccagcagtccagcacacggctgcggccgcactcgcacaacggcacaagcgcacaccaccgccatctccgccttcaccccctacccacccctctgtccttctatataacgcgcccgcctcgccacctcacaagaaattccccacacgcgcccacctcctctgctctctcctctcccccacctctgcgtccgtgcgttgtgtttgtttaggcggcaaccgcgaggcgcaatggcggccgggcgagagctggtggtgagtttcggcgagatgttgatagacttcgtgcccaccgtggcgggggtctcgctggcggaggcgccggccttcctcaaggcgcccgggggcgcgcccgccaacgtcgccatcgcggtctcgcgcctcggcggcggggccgcctttgtcggcaagctcggcgacgacgagttcggccgcatgctcgccgccatcctccgcgacaacggcgtcgacgacggcggcgtcgtcttcgactccggcgcgcgcaccgcgctcgccttcgtcaccctgcgcgccgacggggagcgcgagttcatgttctaccgcaaccccagcgctgacatgctcctcaccgccgacgagctcaacgtcgagctcatcaagagggctgcggtcttccactacggatcaataagcttgattgctgagccttgccggacagcacatctccgtgccatggagattgccaaagaggcaggtgcactgctctcttatgacccaaacctgagggaggcactatggccatcccgtgaggaggcccgcacccagatcttgagcatctgggaccaggcagacattgtcaaggtcagcgaagtcgagctcgagttcttgacaggcatcgactcggtggaggacgatgttgtcatgaagctgtggcggcctaccatgaagctgctcctagtgactcttggagatcaagggtgcaagtactatgccagggatttccatggcgctgtgccttccttcaaagtacaacaagttgatacaactggcgcaggtgacgcgttcgttggtgctctgctccaaaggatcgttaaagatccatcctcgctacaagatgagaagaagcttgtggagtcgattaaattcgctaacgcgtgcggagcgatcaccaccacgaagaagggggcgatcccgtcgctgcccaccgaagcggaggtcttgcagctaatagagaaggcttagatcatcatcgtcctgtacgccatggttttcaccagcttctacttcttcgaattgtattggattctgatatggaacagaagaagaagcggctgccccatcttaccagccctttttgtttgccctagtttccccttgtgaaaagggtgttttgttttataaactctacttgcaataagcagagcctttttttaattatgtcagggtgcatttgatacgatcgaataatcatcaatccataattgtagcaatttttttttaaaaaaagaaaagtcaattgagtttttgttccagtggtggataaatttctagaatcgggatatctggtcctgataagaggtgatattcagagcctttattttctactatagatagctgagactgagacagagtacactggcggcatctgccgggccagtggggcttcattgagcagctttgattgtt

SEQ ID NO: 112211 - DNA, 1099 bp, Zea Mays
agacgaaggaccaccactgagccctgattagcacaccttcaggagctggtgcatgcttaaaagagttatatgattgtttcggtgattttgcttttcccttgagacctatttgctgcaacaagaaataagaatgaccaaactcttgtattgacaatgaggttttgactgtgttagctgttatcggattgtctatttttctttgccgtccacgccatatatcacctgtaagttggtcttgcctggtgtcaggaaacaacatcacaattatcaaaagctattattgtattctgatggcttaagattgcacccagtgctcgtgataatttctcgtatcaactatcattctatcaaggcagaacgtaatggtttcttttgtttaatttccaataaacatgtaggctggacaaggtaatattttatttttcttgaaatctgtccagctcccaaataatcatcattctactcgaaattcaccaaccactacacattgacccgcctctgtatcctcaagcatctaggcaaagaaaacttcagattgagataggggaaggagggggcagagcagagcgctcactttggtcctgcttgggcttcgtcaaggggtcgagctcgccgagcttcttggcaagcttcatgaaggagttgccctccaagatgtgctccataatggcagcagcctcgatatgtctcgggtggtgcttgagcttgtgggttaggtggtcgatgtactccggcttgccgttcatgacctcgcagaacacagcggacaggacctcggcgaggatggcaaggatgttagcctcgaagagcacagtggaggcgaggccggagtccacggccgtgccgttcaccatcgcaagaccctccttgggcacgagaactcgcggcttggtttgcggggtttgcagggcatcgggcgcagactttgtgcggtgggtttgcgggcgcggcggtttgcggtgcggcagggtttgcggcggccggagtcgggcggggtttgcagcggccggggtcgagcgggcggtttgcggcgcagcggggtttgcggcggccgaggtcgggctgccgtggagcatgcgcgtggttttcgggggcgggg

SEQ ID NO: 112212 - DNA, 2955 bp, Zea Mays
ctcattcactcacacagcaaatacccacagtccacagcaagaaccgaagatgttcggaaacatcggaaagatcccgatcatcggcgacctgacgggcagcaacaagaatgcgcacctcaagggcaacctggtgctcatgcgcaagaccgtgctcggcttcgacgtcaccagcatcgccggctccctcatggacggcctcggcgagttcctcggccgcggcgtcacctgccaactcgtcagctccaccgtcgtcgaccccaacaacgggaaccgcgggaaggtgggtcaggaggcgagcctggagcagtggctgctgcacccgccgccgcttctggccggcgaggaccagttccgcgtcaccttcgactgggaggtggagaagcacggcgtcccgggcgccatcatcgtgaagaacaaccacgcctccgagttcttcctcaagaccatcaccatcgacgacgtccccggccacggccccatcgtcttcgtcgccaactcatgggtgtacccgcagtacaagtaccgctacaaccgcgtcttcttctccaacgacacgtacctccccagccagatgccggcggcgctgaagccttaccgcgacgacgagctccgcaacctgaggggcgacgaccagcagggcccgtaccaggagcacgaccgcgtctaccgctacgacgtctacaacgacctcggcaaccccgacgccaaaaacccgcgccccgtcctcggcggctccaagcaccacccctacccgcgccgcggccgcacgggccggaagccgacgcagacagaccccaacagcgagagcaggctgacgctgaccgacggcgacgtctacgtgccgcgcgacgagcgcttcggccacatcaagaactccgacttctacggctacaccatcaaggcgttcgtcgacggcctggtgcccatcctggaaggctacctcctcggcatcgagttcaactccttcaaggacatcctgcagctgtacgagggcggtatcaagctgcccgacatccccgccctcgaggagttccgcaagcagttcccgctacagatggtcaaggacctcatgcccgccggcggcgactacgtcctcaagctccccatgcccaaaatcatcaaagaggacaagaaagcttggatgagtgacgaggagttcgcaagggagaccctcgccggcgtgaaccccttgatcatcaggcgtctcacggagttccctccgaaaagcacccttgatccgagcaagtacggcgaccagacgagcaccatcacggaggcgcacatcgcggggagcctggagggcctcaccgtgcagcaggcgctggacagcaaccggctctacatcctggaccaccacgaccactacatgccgttcctgatcgaggtcaacagcctgaacgacaacttcatctacgccaccaggacgctcctgttcctgcgcggcgacggcacgctcgcgccggtggccatcgagatgagcctccccgagctccgggacggcatcacggccgcgaagagcacggtgtacacgccggcgccgccgacggccggcgcggaggcgtgggtgtggcgcctggccaaggcctacgtgaacgtgaacgactactgctggcaccagggcatcagccactggctcaacacgcacgcggtgatggagccgttcgtgatcgccaccaaccggcagctcagcgtgacgcaccccgtgcacaggctgctgctgccgcactaccgcgacaccatgaacatcaacgccctcgcgcgccagaagctcatcaacgccggcggcatcttcgagatgaccgtcttcccgcgcaagtacgccatcgagatctcctccaaagtctacggcagctggaacttcaccgagcaggccctccccgacgacctcatcaagcgaggcatggccgttccagatccgtcgagcccctacaaggtgcggctgctgatcgaggactacccgtacgcctcggacgggctggccgtgtggcacgccatcgagcagtgggtgacggagtacctggccatctactaccccaacgacggcgtgctgcaggccgacgtggagctgcaggcgtggtggaaggaggcgcgcgaggtcgggcacgccgacctcaaggacgagcactggtggcccaagatgcagacggtgccggagctcgtgaaggcctgcaccaccatcatctggatcgcgtcggcgctacacgctgccgtcaacttcgggcagtacccgtactgcgggtaccacccgaaccggccgtccgtgagccggcggcccatgccggtgccgggctccgacgcgtacaaggagctggagaagaacccggagaagttcttcgtgcgctccatcaccgcccaattccaggccgtcgtcggcatctcgctgctggagatcctgtccagccactcctccgacgaggtgtacctcggccagcgcgacaccaaggagtggacgtcggacgccaaggcgcaggaggcgttcaagcggttcggcgcgcggctgaccgagatcgagaaacgcgtggaggccatgaacaaggacccgcgcttcaagaaccgctacagcgcggcccagttcccctacaccctgctcttccccaacacctccgacaagggcgataacaccggcgtcaccgccaagggcatccccaacagcatttccatctgattcgatcgagtcctggccagcgtttcacccaaaaaagcagagctagcggtgattcccgtatgtcatccgtttcattttttacatgaatgagaagcgtggtaataaaaaggtttgtagttgcgtgcgcgccgtgtattccttggtgtactggtgctggcggtaaccacttattaccagggatccttgtaatttttcctgttggtttcccaataataatgtgaatatattggtcacatgcatggtgtttccaaggattttttagctaattacttttttatgttttgaaccaa

SEQ ID NO: 112213 - DNA, 2883 bp, Zea Mays
cacactcacacagcaaataccccacaaggccactccaaagacctagtagtggaaccgaagatgttcgggaacatcggaaagatccccatcatcggcgacctgacgggcagcaacaagaatgcgcacctcaagggcaacgtggtgctcgtgcgcaagaccgtgctcggcttggacgtcaccagcatcgccggctccctcctcgacggcatcggcgagttcctcggccgcggcgtcacctgccagcttatcagctccaccgtcgtcgaccctaacaacggcaaccgcgggaagttgggcgcggaggcgagcctggagcagtggctgctgaacccgccgccgcttctgtccagcgagaaccagttccgcgtcaccttcgactgggaggtggagaagcagggcatcccgggcgccatcatcgtcaagaacaaccacgcctccgagttcttcctcaagaccatcaccctcaacgacgtccccggccacggcaccatcgtcttcgtcgccaactcatggatctacccgcagtccaagtaccgctacaaccgcgtcttcttctccaacgacacgtacctccccagccagatgccggcggcgctgaagccctaccgcgacgacgagctccggaacctgaggggcgacgaccagcagggcccgtaccaggagcacgaccgcgtctaccgctacgacgtctacaacgacctgggcctgcctgacagcgggaacccgcgccccgtcctcggcggcaccaaggagctcccctacccgcgccgctgccgcaccgggcggaagcccaccaagagcgaccccaacagcgagagcaggctcacgctggtcgacggcgacgtctacgtgccgcgcgacgagcgcttcggccacatcaagaagtcggacttctacggctacgccatcaaggcgctggtgaacgccgtcatcccggcaatccgcacctacgtcgacctgtcgcccggcgagttcgactccttcaaggacatcatgaagctgtacgagggcgggatccagctgcccaaaataccagccctcgaggacctgcggaagcagttcccactcgagctcgtcaaggatgtcctcccggtcggcggcgactacctcctcaagctccccatgccgcagatcatcaaagaggacaagacaggttggatgacagatgaggagtttggacgggagattctcgccggcgtgaaccccatgctcgtcaagcgtctcacggagttccctccgaggagcagtcttgacccgagcaagtacggcgaccacaccagcaccatcagggaggcggacctcgagaacaagctcgagggcctgacggtgcagcaggcgctgcacggcaaccggctctacatcctggaccaccacgacaacttcatgccgttcctggtcagggtgaacagcctggagggcaacttcatctacgccaccaggaccgtgctgttcctgcgcggcgacggcacgctggtgccggtggccatcgagctgagcctgcccgagctccgggacggcctgaccaccgccaagagcaccgtgtacacgcccaagtcgaccaccggcgcggaggcgtgggtgtggcacctggccaaggcctacgccaacgtgaacgactactgctggcaccagctcatcagccactggctcaacacccacgccgtgatggagccgttcgtgatcgccaccaaccggcagctcagcgtgacgcaccccgtgcacaagctcctcctgccgcactaccgtgacaccatgaacatcaactccaacgcgcgccagatgctcgtcaacgccggcggcatcttcgagaccaccgtcttcccgcgccagtacgcgttcgagatgtcctccgtcatctacaaggactggaacttcacagagcaggctctccctgacgacctaatcaagagaggcatggcggtcgcagacccgtcgagcccgtacaaggtacggctgctggtggaggactacccgtacgcgtcggacgggctggccatctggcacgccatcgagcagtgggtgacggagtacctcgccgtctactaccccaacgacggcgtgctgcgggcggacgtggagctgcaggcgtggtggaaggaggcgcgcgaggtcgggcacgccgacctcaaggacgcgccctggtggcccaagatgcagacggtggccgagctggtcaaggcctgcaccaccatcatctggatcgcgtcggcgctccacgcggccgtcaacttcgggcagtacccgtacgccgggtacctcccgaaccgcccgtccgtcagccggaagccgatgccggcgccgggcagcgacgagtacgcggagctggagcgcaagccggagaaggtgttcgtgcgcaccatcaccagccagttccaggccctcgtcggcatctcgctgctggagatcctgtccagccactcctccgacgaggtgtacctcggccagcgcgacaccaaggagtggacgtcggacgccaaggcgcaggaggcgttcaagcggttcggcgcgcggctgaccgagatcgagaaacgcgtcgtcaccatgaacgcggaccctcgcctcaagaaccgcaacggcccggccgagttcccctacacgctgctctaccccaacacctccgacacgaagggcgacgccgccggcatcaccgccaagggcattccaaacagcatctccatttgagttctgtctgtctgagctgaggacgtacggtcgtcgcactagttgtttgcgtttccccgttccgttccgtgaagtgtggttctcacttgcgcggtattgtgcaaatagccaagtactccttacagaagtcgctacgtgaggactgttgtaataaggctctattcagttcctcaataatgaagttactttgtgttccatcta

SEQ ID NO: 112214 - DNA, 545 bp, Zea Mays
tctgcacatgccacttcagcttgcagtgaaagagctgcagaagattaattcctttaaagaaccacgtgagaagcttctgtgcatcatgagctgttgtcaagtcatcaataacttgcttctgaacatattatctaggctgatgagttccttcctattcttatctatgttactatcaaggcaagcaactcttagtcttggccactgtttattctttctgtttcttcttactggttcgctgcaactgagaagctttctgaaaaatttgatgtaggccaatcctcctcagctgcactcaaatctgaagttcgttcagctctttagaagagaaacaaagttaattttagaagtcgaatattatctgactaacctcatttcagcaaagatgtttataatagatgtcagtgctcactcgctctcaatggaggaaaacgagttttagaaacatatggaatcggcaagactagctactcaagtatctgttgcaagcccaagtagctcacaggggcttccaacatctgcaagggcaaatcaggaggaaactgata

SEQ ID NO: 112215 - DNA, 1374 bp, Zea Mays
accttgcacaccaaaaggttccatttggtctcttccttcctccccagattccgcatcttctccttaaaatgcctgcaagtcgtaaaatttgcgataaataaaaacacgtgttctgttatatcttatatgaatgaaatcaagatatgccagagcatatcctcttcctctccccatttgctaccgctttggcaaagagatcgatgcgccgcgctcacctgcagagaggaaccttgcaggtgtccgggaggaagcacatgcgggaatgcagctcgaggagctgccacatccgcctgcagttggcacagccgccgggcacccggactccgcaggccgagaagtggcgcacgagcagctcaatgcccttgcaggcgcgaaacttgcaggcggctgctaggctgcccttgagcgcttgatctcgaggcccgatcgtcctgcatccgtcccggcagatgtggaccagcgcctccattgcttcactatatttcaaacaaaggtttcctctgagacgagagcgaggcggagaacgaaaagggagctcgttcaccactcactcactcaccacggcgtcctcgtcctcgtcgctccacagaaacttttggaggcctcctccccttcctatggcgactcacgccaaggcgcctgtcctgacaagtgttccctacaaaatggaaatggactaggcgagacgaggagatgagatgagaggcacggaaaagtggcggccttcacacagaaagcagaatccggcaagtagccggacgcggccgccgactgtcgtgtcctcacgtggaaaggacgcgacgccgggcctctaggagcgcgccacgtgtcggggcgccggcgccgcccaggcccagcaacccagttagttaggatggcggccgggaccaggacagaacaagagggcaccgccgccgcctgcacggtggtcccaggctgagggcgttcagagcagtggaaccgtggaagaggctggacagggaggtctcatactctcatcggcgtgggatcacctgttcgtgtggcggtgaccgtccttggttctgcagctgcagctgcagctacgggaggggaggcagccacaagtcagaaacactactgcccgtccaagccacagaatgagaaaaacttctttggtgaccagtgaaactggaacctggccccttcgttcccttttcttcctcacctttccttccgcgctcgggatgttttgtttcttccgtgcagagggtaccgacctctcttgtcctcttccgctccgttccgtgacaacagctgaacagcaccgggcggcactaccgatgtcatccatgagtccatcgacctgtttcagcttttgtgtgacgaacttttctgagaacctgccagtaagaa

SEQ ID NO: 112216 - DNA, 923 bp, Zea Mays
gcccagccgctgtgcgttcgcgctctctcccactctgtctgcgacgactgcgtgggtgggcgggctaccgccgccgcccgtcgccaggtgccgatctcttcacacccttgaccccctcctctcgcgtctgccgtgcgagaacgtaccgccacgacgagcgatggggaggccgagcagggggcggcagcgcatcgagatccgccgcatcgaggaaggcggccggctgcaggtgaccttctcgaagcgcaagtccggcctgcaaaagaaggccgccgagctctccctgctctgcggctcgccggtcgccgtcatcgtcttctcccccggcaggaaggtgttcgcgctgggcagtccctcggtcgaccacgtcctccgccgccacgctcctccgatccccagcgaaggagaggaggacgggctccttccggcgctccaggacggagacgtgatgagcagcagcgctatcgctgaccgcgcggaggtggagaacatcgtgcggcgtacggaggagaccaaggcgcgttcggtggcggagaaggcgcggatggacgccgtcgggaaggccgtgaggcaggccgcggcaaaggccggaaggaggttctggtgggaggcggactccggcgtgctcggggacgctgagctgccaggattcgccaaggcgctccgtcggctcaggcctcagggtcaacctgcagcgccatttggactcgctgtcggcttctgctaataagaaactgcagtaggagcggctgtgcaaaactggctcatttcatttggtgttgcttatgcccacttaggatagtgttattgactacttacaaaaaaaaatatcaaacatctttttgaacgatttaggcattttcaaatttattttctctacctgtactaagtgaagagtattttgaatgatttaagccttctcc

SEQ ID NO: 112217 - DNA, 1387 bp, Zea Mays
ccgcggattgacaaaacttcgcactttccacgtcgccacaacctccccgccagtccccgcccggcccggcgttgtttgcctccaggcagccacgccgtcgcgaaggccatggcgaccgcgcctcggtggtcgcaccccgtgccgccgccaggcttcgcggcggcgccccggatcatcacggtggcgcttctggccgtgtcagcgttattgtcccggtcaccggtgccgacggtcgcggcggagctcgtcaagctgaccctcctcgcaaacgcccgggagaagggcgcggtctgcttggatggcagcccgccggcgtaccagctccggagaggcttcggctccggatcacgcagctggctcgtcaatcttgagggaggagcatggtgcaacaccacagaggattgctccagccgcagactgaccgaccttggcaccttggttcgtccaagttcatgacaccgatagagttcgaagggatgctcagcagcaaccgctctcaaaatccctatttctacaactggaatatagttgacgtgaggtactgtgacggaggatcatttgccggggacggggagggcgaagatcggaacggaaccaagcttttctacagaggattgcgcatctgggaagcagtcgtcgacgagctcatggcaaaagggatggacactgcagaacaggccttgctggtaggttgctctgctggtggtctcgctgcactgctgcactgcgacagttttcgtgcgcgctaccctccggagatcccagtaaaatacctttcggatgccgggttctttcttgatgtaaaagatttttcaggcgaaaggttcatacggtccatcttcagtggagttgttcaccttcagaatgtgcgaaaagttttgcccaaggactgccttgcaaagaaggaaccggcagagtgcttgtttccaccagagcttatcaagagcatcagcacccccacattcattcggaactccggctacgattcgtatcaggtaggaaatatcctggcgccgggaggatctgatccaggacaatcatgggccagatgcaaagctgatgtccgaaattgtacttccacacagattgaggcactgaatgggttccggagggaacttgttgaggatttgaaggttgctcaacacaagaggggctgggggctgttcatcgattcatgcttcaaccactgccaaacgccattcggggccacctggcattcgcccatctcctgagactcggtaacaaggtgagatccagagtcacttgacttgcccgtaatctgcatcaccgcggctcggctcgtcttttaacaggaactgatgcggttaagtttcgattctcttcgcctctgcttttgctgaacaaacgatcgctgaactgtgcgatg

SEQ ID NO: 112218 - DNA, 246 bp, Zea Mays
aatgtgcgaaaagttttgcccaaggactgccttgcaaagaaggaaccggcagagtgcttgtttccaccagagcttatcaagagcatcagcacccccacattcattcggaactccggctacgattcgtatcagacgatcgctgaagctgttgcggattggtacgttggtgagaaccatggagtggaggagattgactgcgcgtttccatgcatcaaccccacatgcagcagccagctcgatctgtaa

SEQ ID NO: 112219 - DNA, 837 bp, Zea Mays
gcactttcggctcgtagctacactacactacaagcgcgcgcgagcaacgtcgtcgtcgtcgtcagccacattgagccatacatgcatggcgattgcagagcacacgccgtcgtcgtcgtcgcctttccggcagcatcgacccaccggatgggtcacgttcacggcggcaacgccactgctcgcgctgcagctggccctgctggccgccttggttatggcgacggacccttcaccttctccggagctcgtcgagctgacgctcctcaccggcgcgcgggagaagggcgcagtgtgcttggatggaagcccgccgggctaccacttgcagagaggcttcggctccggatcccacagctggatcgtctatcttcagggaggagcttggtgcagcagtaacaccacagacacagaaacttgttccgagcgtaagatgaccgcctatggctcgtccaagcttatgggagcagtaacctttgatgggatattcagaaaccagcagcctcagaatcctgatttctacaactggaacaaagtctacgtaaggtattgcgacggggcgtcattttctggggacgcggagggtgaagcacaggtgacttttttctttttctttctagattgtttattcgacctgtctatctaaattcagggctatcacgttcccttcgcgattgaaagggtttgagagagaaattagttcatttttattttaatcttctctaatttccgaggatttgagtcttcaaactagcacttgcatgttgaaacggaccctgggtttgagtgatgtaggacggaactaagctgttcttcagaggatcgcgcatctgggacgca

SEQ ID NO: 112220 - DNA, 1671 bp, Zea Mays
ctcgtagctacactacactacaagcgcgcgcgagcaacgtcgtcgtcgtcgtcagccacattgagccatacatgcatggcgattgcagagcacacgccgtcgtcgtcgtcgcctttccggcagcatcgacccaccggatgggtcacgttcacggcggcaacgccactgctcgcgctgcagctggccctgctggccgccttggttatggcgacggacccttcaccttctccggagctcgtcgagctgacgctcctcaccggcgcgcgggagaagggcgcagtgtgcttggatggaagcccgccgggctaccacttgcagagaggcttcggctccggatcccacagctggatcgtctatcttcagggaggagcttggtgcagcagtaacaccacagacacagaaacttgttccgagcgtaagatgaccgcctatggctcgtccaagcttatgggagcagtaacctttgatgggatattcagaaaccagcagcctcagaatcctgatttctacaactggaacaaagtctacgtaaggtattgcgacggggcgtcattttctggggacgcggagggtgaagcacaggacggaactaagctgttcttcagaggatcgcgcatctgggacgcagtcgtcgatgaactcatgggaaaaggaatggacgccgctgaacaggccttgctcgcaggctgctctgctggcggtctagctacgctactgcactgcgacgatttccgcgcgaggtttccgcaggaggtcccggtcaaatgccttcctgatggcggattcttcctggacataaaggatttatcaggagaaaggcacatgcggtcggtgttcagtggagttgttcagcttcagaatgttagcggagttctgcccaagcgctgcctggcgaagaaggacccagcagaggcacgtagctgttcgctcgatctctacgacattttcgcttctcctttcaacatgctaagctgccaacgttttgtttttcttgacctgcgccagtgtttcttccccgctgaacttatcaagagcatcagcacccccacgttcatcgtgaactcggaatacgattcttggcagatcgcgaacgttgtcgcgcccgacggatcctacactggagacgcgtggacgagctgcagagacaacattcggaactgcagctccgagcagatggacgtgctgcatgggttcagggcggaactcatcagggagctgaaggttgccgaaggtgagcgggaatgggggctgttcgtcgactcgtgcttcacgcactgtcagacccagtcgagcgactggtggcattcgcccacctccccgaggctcggtaatcagactgttgcagaggctgttggggactggtactttggtagaaggcgggtagtgaagcaggtcgactgcgagtacccttgcaaccccacgtgtagcattcagtagctgtgagctggcttcttcttcgtgaccgccattgcaccgagctgagattcatgggagtccttgtttcctccactctcgtatttgatttgtcgttgttagaaaaccagttacattttaatctagagaacgatacataaatgttaccgacaatacgtacaagtgtgtgtaaacttagcatgttgaacaaagcatagggaaacataattgtttgtgttggcgccgatctgtcaccaa

SEQ ID NO: 112221 - DNA, 1252 bp, Zea Mays
ggacgcaacgtcaaactcgaatttacgccggccaggccaccaccagtcgcccacgccccgccgccagtcctggcgcgcgcgcgcgcgtcccccggcccacaccgcaccttccacttccacggaccctgctgcatgcgcgctccagtgcgcagcactagtacgtacgagtagtagtagtgctgtgctgaggacgaggctgctaggtgctagctagctagctctccatgaatcgtatcgatcggaagagaagaagcccattccctgcccctgcctgccttggatacctactccctctccctccctcctcacatcacacagacagcagacaccactggccggccggcctgttcgttcattctctctcgctcgctcgctcgcccgcccgcccgcccgccagcctttcattccatctattaaacgcctataaatacagtacaggctcacacgtccatggaaggaatgtccatcttccttcactaccaccacacggctgctggctgctactaggcaggccttcccacacgcccgccgtagctctctcgcttgtgtggtcatccccggcctcgccttctctcattctgtcgtctgctgcccctgcctgccagtgccaccaccccccggccgtgcggattatattcgggcccaacccaagcaaatggagcagaaggcgaggaggcgccgcgtgccggcgttcggagagtggaactacaactactacggcagcagcgcggagctcgccacgcccgcggcaccggcggagctggaggcccgcagcgacgtctggttcaagtactcgccgcccccgcggaagccaccgccgccgccggcggccagcaggaaagttcggaggccggcggccgacaggtccgcatgcggcggcagcggcaagcggccccgtgccgcgacgcctgcgagggcgtccgacgccgtggtcccatcgtcgtcgtccgtgccacgcacgccggcgaagagcgcggccggcgctgccagggcgcgcgtggtgcgccgcgtcgacgcggacctgtaccaggtgcccccgccggacctgctccacgacgaggatctgccaccgagggtaggtgtgtaggccccgcaaatatggcagccaacacgtactcgtgtcttattattacctgctgtaattgtgatttgtcgatttgatgtcacgtctcccatgcatgcagcggaagaaggcgtccagcaggagcctgtggatgggttgcttcggcttcagttgcgttccggctgatta

SEQ ID NO: 112222 - DNA, 1360 bp, Zea Mays
ggacgcaacgtcaaactcgaatttacgccggccaggccaccaccagtcgcccacgccccgccgccagtcctggcgcgcgcgcgcgcgtcccccggcccacaccgcaccttccacttccacggaccctgctgcatgcgcgctccagtgcgcagcactagtacgtacgagtagtagtagtgctgtgctgaggacgaggctgctaggtgctagctagctagctctccatgaatcgtatcgatcggaagagaagaagcccattccctgcccctgcctgccttggatacctactccctctccctccctcctcacatcacacagacagcagacaccactggccggccggcctgttcgttcattctctctcgctcgctcgctcgcccgcccgcccgcccgccagcctttcattccatctattaaacgcctataaatacagtacaggctcacacgtccatggaaggaatgtccatcttccttcactaccaccacacggctgctggctgctactaggcaggccttcccacacgcccgccgtagctctctcgcttgtgtggtcatccccggcctcgccttctctcattctgtcgtctgctgcccctgcctgccagtgccaccaccccccggccgtgcggattatattcgggcccaacccaagcaaatggagaaggcgaggaggcgccgcgtgccggcgttcggagagtggaactacaactactacggcagcagcgcggagctcgccacgcccgcggcaccggcggagctggaggcccgcagcgacgtctggttcaagtactcgccgcccccgcggaagccaccgccgccgccggcggccagcaggaaagttcggaggccggcggccgacaggtccgcatgcggcggcagcggcaagcggccccgtgccgcgacgcctgcgagggcgtccgacgccgtggtcccatcgtcgtcgtccgtgccacgcacgccggcgaagagcgcggccggcgctgccagggcgcgcgtggtgcgccgcgtcgacgcggacctgtaccaggtgcccccgccggacctgctccacgacgaggatctgccaccgagggtagcggaagaaggcgtccagcaggagcctgtggatgggttgcttcggcttcagttgcgttccggctgattaactattttctgtatttttttatccatgtatctactcctagtttaactgtactccttttcagattgtgcaatgttttggtttttttgtttgtttctagactagatttcagattgtgcaatgttttggtttttttttctttctggactagagcgagtattgtacagtgtgggcaatgaaaaaaatgtactattatgtatggtttcgtattcgagccta

SEQ ID NO: 112223 - DNA, 1537 bp, Zea Mays
ggacgcaacgtcaaactcgaatttacgccggccaggccaccaccagtcgcccacgccccgccgccagtcctggcgcgcgcgcgcgcgtcccccggcccacaccgcaccttccacttccacggaccctgctgcatgcgcgctccagtgcgcagcactagtacgtacgagtagtagtagtgctgtgctgaggacgaggctgctaggtgctagctagctagctctccatgaatcgtatcgatcggaagagaagaagcccattccctgcccctgcctgccttggatacctactccctctccctccctcctcacatcacacagacagcagacaccactggccggccggcctgttcgttcattctctctcgctcgctcgctcgcccgcccgcccgcccgccagcctttcattccatctattaaacgcctataaatacagtacaggctcacacgtccatggaaggaatgtccatcttccttcactaccaccacacggctgctggctgctactaggcaggccttcccacacgcccgccgtagctctctcgcttgtgtggtcatccccggcctcgccttctctcattctgtcgtctgctgcccctgcctgccagtgccaccaccccccggccgtgcggattatattcgggcccaacccaagcaaatggaggtaaagccgctgcgcgatccttgaaaaatgttgactgattgtatcgctgctcttgttacctactaccctctatatatcactctctatcttatgatttgattcattgacgatgctatatcatgcatgcatgcatgcaccgatcccgccggcgtgtgtggtgtgcgtgcagcagaaggcgaggaggcgccgcgtgccggcgttcggagagtggaactacaactactacggcagcagcgcggagctcgccacgcccgcggcaccggcggagctggaggcccgcagcgacgtctggttcaagtactcgccgcccccgcggaagccaccgccgccgccggcggccagcaggaaagttcggaggccggcggccgacaggtccgcatgcggcggcagcggcaagcggccccgtgccgcgacgcctgcgagggcgtccgacgccgtggtcccatcgtcgtcgtccgtgccacgcacgccggcgaagagcgcggccggcgctgccagggcgcgcgtggtgcgccgcgtcgacgcggacctgtaccaggtgcccccgccggacctgctccacgacgaggatctgccaccgaggcggaagaaggcgtccagcaggagcctgtggatgggttgcttcggcttcagttgcgttccggctgattaactattttctgtatttttttatccatgtatctactcctagtttaactgtactccttttcagattgtgcaatgttttggtttttttgtttgtttctagactagatttcagattgtgcaatgttttggtttttttttctttctggactagagcgagtattgtacagtgtgggcaatgaaaaaaatgtactattatgtatggtttcgtattcgagcctacttgacgcc

SEQ ID NO: 112224 - DNA, 570 bp, Zea Mays
aaaaccaaaacaaaccaaacctgacaagattgatgggagtggatggatcgatccgcctactgaccgccgttgggcttctcgtcgccgccggcggtaccagacttcaagaacgggctgatgccgagcgtcccgaggccggagacagcgccagacccgcccatcgcggtcgagtagccgaactcgtagccgccgccgttgatccccagcctcgcgatgggctcgccgccgtcatagctcctggacagcatctgcgcgttgccgaactgctcctgcccgaacacggaggcggagcctccgagggacccgagcgccgccgagtgtccaatgttgatgaagttgtgcgcgccgttcggcatcgcgttgccgatgaactctgccatcgcttgcggccctgtcggcgccgtggacgcagaagctgccgctgccgcctacaaggaagaagagcgaggacgaattaacagccgacgcaacacacgttcgctcatgtgatctctacaacatgtgcgagccagcgaatggtacgttgtgagacgacgatatatatatatatgtcgatcgacgatcgtcaca

SEQ ID NO: 112225 - DNA, 786 bp, Zea Mays
atgacggcctccgtgccggaggcgtcagagaagctgcggctgtcggacctcgattggatctgcgagctcggcgctggcggcatagccagcgtctgcaaggcacaccactgccgcaccagcgcggtcttcgcgatcaagatatcgttcgaccaggacccgctcgtcgtagagaaggaggccgaggtgctcaaaatcgctgctggggcgacgcacgtcatcgacttatacggcctgctgccctgctccgcgagcccggcggcaaggccgcgctcgtgctcgagtacatggacgctggatctctcggcagtctcctgcgccggcgccggcgcggggggctacgaatcccggaggcagccgtcgccgaggtggccttccagtgcgtccggggcctactccagctccactacaacggcgtggcgcacctggaccttgtgctgggccgtcggcgccatgaaggcggatgtctggggcatcggcgtcaccatcctggagctcttcttggggcgactctcccttgtgcccggagtagagaagccgtctgctgaggagctgaagaaggcgatctgcgacggggagcccccgtccgtgccggaggatgaagaggcatcggcagagctgcgcgccttcttggcggcgtgcctgcagaagaagccagcgcggcgcgccatggtggtacagctgcttgcacaaccgttcatagcgcggcgcgacgtggagcggtggaggctgttaaacatagaagtaaattatctgtacatggaatacctgcatgcactccttccttag

SEQ ID NO: 112226 - DNA, 1242 bp, Zea Mays
acgtcctcctccaccatggcgaattcatcttctgctgctcacattccaattcatcaagtcgtcaccattcgtctcactaaaacaaactttcttctctggcgtgctcagcttctccctcatctccgtggtgcccaactgatgggttttctggatggctctaatctggcaccagcacagcagattgcctcatctaccgatgcaaatgccagggtcatccccaacccagcatatgagtggtggttcaatcaggatcaacagatcctgagcggactcctttcttcaatgactgaagatgttctcggtgacataataactgtgtcctcctctaaagaagcctgggatatcctcaatagcatgtattcttctgcctcacgggctcgcattgttcagatccggatggatctcgctactatcaagaagcgggatctctctgctgctgattatttttgcaagataaagagctatgcatctgatttggcggctgctgctgcacctctccgtgaagatgaaaaagtggcctatcttcttgccggtcttggaccagaatacgactcattcgtcacagctatgactactaagagtgaggctctaacttttgatgatatttatgctcattttctgtcgtatgaagctcgtcagctccaacatcaagcggagacgcgtctcaacgttggcactatggccaactatgctgggcgaggaggctctcaacatcgtggtcgcggtcgtggtaattcacgtggccagagttcttttcatggacccggacatactggtcctactacccgcgacccctgtcagatttgtggcaagttgggtcacacggccctcaaatgctggcatcgcatggacaaatcttatcaacacgactctccatcagctgcagttgctgcaacatcttcttatcatgtcgatcctaactggtatagtgacaccggagcaactgatcacataactagtgagttggatcttctcgccgtgagggagccatatcgtggcaatgacaccgtgcaagtcggcaatggcgcaggtttgcaaattaagcatcttggttcttgttccattaacaatgatactcgccctcttgcattaaataatgttcttcatgtccctcaaatatctaaacatcttttatctgttcataagttaacccgtgataatgatgttttctttgaatttcatccctcccattttttcatcaaggatcgtgccactcaaaatcttcttctggaaggaaaatgt

SEQ ID NO: 112227 - DNA, 404 bp, Zea Mays
atagagttgttctacttctattctactggagtgcattaccacctgtctttttccttcctcttcaacgtctcgaacaagcaggaggaggtagaccgaacaactccaggtcgcgggagcggccatttctctggggcgggaccgcgggagagctctagctcttgcagcagtagaactctactgcagccagagttaagagaaatggataaggatggcagctccgagagaagtcgcccagatcatggtgatgtgaagatgctcaagttcagaccaaaggtgcctcgacagaagcaaaagccaaagcaacaagaccctaagccaattgatgaagatgtgatgaagatattgagggtgggtaactgattatccaattgtcatatcgtggtttcagatactactatagtttt

SEQ ID NO: 112228 - DNA, 1566 bp, Zea Mays
atagagttgttctacttctattctactggagtgcattaccacctgtctttttccttcctcttcaacgtctcgaacaagcaggaggaggtagaccgaacaactccaggtcgcgggagcggccatttctctggggcgggaccgcgggagagctctagctcttgcagcagtagaactctactgcagccagacactgcaaagggcgagaggtttgctttcgcgccctgggactttcaagaagcactcgttctagggtggtgcctcgcgtgcttttcgtgcgactcgtggtctgattccttagtagttccagtgctgcgggtcaacttttggacagcaatgattttggggaaggaggttgtagatgaatgaagcgcatagaatatacccttggaaacctacacacgccgtacagcagtgtgactataaaaaagactcgccatgatacacaaacgctgaaagaatttctgatggcagaactgagagagttaagagaaatggataaggatggcagctccgagagaagtcgcccagatcatggtgatgtgaagatgctcaagttcagaccaaaggtgcctcgacagaagcaaaagccaaagcaacaagaccctaagccaattgatgaagatgtgatgaagatattgaggactcgccaagtggctgcaaaaagtgcaccaaacacagaagatgagtgctcaccacagaagaccctctcgacgccaccttctgcagatgttgtttgcttgtcaccagcgcaactcggagtgcaaaaacaaaatcaattgccactccaaattcctagatccttccctgttcctgttaattcaggattggtttatgaagaagagagtagtgatgacgacgacgataatgatagtgacaatgttgggttgctggagactcagccagattcaattgaaagtgaagctttaacatgtccggctgaggagcttgatttgcttcagcaagaaggtagcaaagaaagaatgttcttcttccagttcccaaactctcttcctttacccaaaaggtcgtccagtgccggcaaggaggtgatggaaggatccaacctgcagcagctgcctcagggttatttgggcaaaatgctagtatacaagagcggcaagatcaaaatgaagttaggagacatcatctttgatgtgaacccaggagtagaaagtaggatgctgcagcgtgcagtagctctcaacactcgagacaaacactgttgcttgcttggagagattgagaatcgtcatgttattgtgactcccaatgttgattctttgttgaacgacaagtagggaccaactgtagcagctttgtcacagattgtgtgtagacctgtagatatgcagggttagtgacatctgtagaaattatatcagctctgtcaaatgatgtataggattttagttgtgtagtgttgtgaacgttttattgtgattgcagtgctatgttagttttagaactgcatgcagctccctgtggatgaatgtttgtaaggatcggtatttgaccttgattgtattggaaggcaaatataataaaaatcacgtcgttcttgtgggc

SEQ ID NO: 112229 - DNA, 1363 bp, Zea Mays
atagagttgttctacttctattctactggagtgcattaccacctgtctttttccttcctcttcaacgtctcgaacaagcaggaggaggtagaccgaacaactccaggtcgcgggagcggccatttctctggggcgggaccgcgggagagctctagctcttgcagcagtagaactctactgcagccagttgtgctaggtggcatccaaaataccggctaaactttagtacgggatccaaacacccccccttaactgggctcttagctatttatgacagagttaagagaaatggataaggatggcagctccgagagaagtcgcccagatcatggtgatgtgaagatgctcaagttcagaccaaaggtgcctcgacagaagcaaaagccaaagcaacaagaccctaagccaattgatgaagatgtgatgaagatattgaggactcgccaagtggctgcaaaaagtgcaccaaacacagaagatgagtgctcaccacagaagaccctctcgacgccaccttctgcagatgttgtttgcttgtcaccagcgcaactcggagtgcaaaaacaaaatcaattgccactccaaattcctagatccttccctgttcctgttaattcaggattggtttatgaagaagagagtagtgatgacgacgacgataatgatagtgacaatgttgggttgctggagactcagccagattcaattgaaagtgaagctttaacatgtccggctgaggagcttgatttgcttcagcaagaaggtagcaaagaaagaatgttcttcttccagttcccaaactctcttcctttacccaaaaggtcgtccagtgccggcaaggaggtgatggaaggatccaacctgcagcagctgcctcagggttatttgggcaaaatgctagtatacaagagcggcaagatcaaaatgaagttaggagacatcatctttgatgtgaacccaggagtagaaagtaggatgctgcagcgtgcagtagctctcaacactcgagacaaacactgttgcttgcttggagagattgagaatcgtcatgttattgtgactcccaatgttgattctttgttgaacgacaagtagggaccaactgtagcagctttgtcacagattgtgtgtagacctgtagatatgcagggttagtgacatctgtagaaattatatcagctctgtcaaatgatgtataggattttagttgtgtagtgttgtgaacgttttattgtgattgcagtgctatgttagttttagaactgcatgcagctccctgtggatgaatgtttgtaaggatcggtatttgaccttgattgtattggaaggcaaatataataaaaatcacgtcgttcttgtgggc

SEQ ID NO: 112230 - DNA, 1354 bp, Zea Mays
atagagttgttctacttctattctactggagtgcattaccacctgtctttttccttcctcttcaacgtctcgaacaagcaggaggaggtagaccgaacaactccaggtcgcgggagcggccatttctctggggcgggaccgcgggagagctctagctcttgcagcagtagaactctactgcagccaggtggcatccaaaataccggctaaactttagtacgggatccaaacacccccccttaactgggctcttagctatttatgacagagttaagagaaatggataaggatggcagctccgagagaagtcgcccagatcatggtgatgtgaagatgctcaagttcagaccaaaggtgcctcgacagaagcaaaagccaaagcaacaagaccctaagccaattgatgaagatgtgatgaagatattgaggactcgccaagtggctgcaaaaagtgcaccaaacacagaagatgagtgctcaccacagaagaccctctcgacgccaccttctgcagatgttgtttgcttgtcaccagcgcaactcggagtgcaaaaacaaaatcaattgccactccaaattcctagatccttccctgttcctgttaattcaggattggtttatgaagaagagagtagtgatgacgacgacgataatgatagtgacaatgttgggttgctggagactcagccagattcaattgaaagtgaagctttaacatgtccggctgaggagcttgatttgcttcagcaagaaggtagcaaagaaagaatgttcttcttccagttcccaaactctcttcctttacccaaaaggtcgtccagtgccggcaaggaggtgatggaaggatccaacctgcagcagctgcctcagggttatttgggcaaaatgctagtatacaagagcggcaagatcaaaatgaagttaggagacatcatctttgatgtgaacccaggagtagaaagtaggatgctgcagcgtgcagtagctctcaacactcgagacaaacactgttgcttgcttggagagattgagaatcgtcatgttattgtgactcccaatgttgattctttgttgaacgacaagtagggaccaactgtagcagctttgtcacagattgtgtgtagacctgtagatatgcagggttagtgacatctgtagaaattatatcagctctgtcaaatgatgtataggattttagttgtgtagtgttgtgaacgttttattgtgattgcagtgctatgttagttttagaactgcatgcagctccctgtggatgaatgtttgtaaggatcggtatttgaccttgattgtattggaaggcaaatataataaaaatcacgtcgttcttgtgggc

SEQ ID NO: 112231 - DNA, 1216 bp, Zea Mays
cttcaacgtctcgaacaagcaggaggaggtagaccgaacaactccaggtcgcgggagcggccatttctctggggcgggaccgcgggagagctctagctcttgcagcagtagaactctactgcagccagagttaagagaaatggataaggatggcagctccgagagaagtcgcccagatcatggtgatgtgaagatgctcaagttcagaccaaaggtgcctcgacagaagcaaaagccaaagcaacaagaccctaagccaattgatgaagatgtgatgaagatattgaggactcgccaagtggctgcaaaaagtgcaccaaacacagaagatgagtgctcaccacagaagaccctctcgacgccaccttctgcagatgttgtttgcttgtcaccagcgcaactcggagtgcaaaaacaaaatcaattgccactccaaattcctagatccttccctgttcctgttaattcaggattggtttatgaagaagagagtagtgatgacgacgacgataatgatagtgacaatgttgggttgctggagactcagccagattcaattgaaagtgaagctttaacatgtccggctgaggagcttgatttgcttcagcaagaaggtagcaaagaaagaatgttcttcttccagttcccaaactctcttcctttacccaaaaggtcgtccagtgccggcaaggaggtgatggaaggatccaacctgcagcagctgcctcagggttatttgggcaaaatgctagtatacaagagcggcaagatcaaaatgaagttaggagacatcatctttgatgtgaacccaggagtagaaagtaggatgctgcagcgtgcagtagctctcaacactcgagacaaacactgttgcttgcttggagagattgagaatcgtcatgttattgtgactcccaatgttgattctttgttgaacgacaagtagggaccaactgtagcagctttgtcacagattgtgtgtagacctgtagatatgcagggttagtgacatctgtagaaattatatcagctctgtcaaatgatgtataggattttagttgtgtagtgttgtgaacgttttattgtgattgcagtgctatgttagttttagaactgcatgcagctccctgtggatgaatgtttgtaaggatcggtatttgaccttgattgtattggaaggcaaatataataaaaatcacgtcgttcttgtgggcaa

SEQ ID NO: 112232 - DNA, 1213 bp, Zea Mays
cttcaacgtctcgaacaagcaggaggaggtagaccgaacaactccaggtcgcgggagcggccatttctctggggcgggaccgcgggagagctctagctcttgcagcagtagaactctactgcagccagagttaagagaaatggataaggatggcagctccgagagaagtcgcccagatcatggtgatgtgaagatgctcaagttcagaccaaaggtgcctcgacagaagcaaaagccaaagcaacaagaccctaagccaattgatgaagatgtgatgaagatattgaggactcgccaagtggctgcaaaaagtgcaccaaacacagaagatgagtgctcaccacagaagaccctctcgacgccaccttctgcagatgttgtttgcttgtcaccagcgcaactcggagtgcaaaaacaaaatcaattgccactccaaattcctagatccttccctgttcctgttaattcaggattggtttatgaagaagagagtagtgatgacgacgacgataatgatagtgacaatgttgggttgctggagactcagccagattcaattgaaagtgaagctttaacatgtccggctgaggagcttgatttgcttcaagaaggtagcaaagaaagaatgttcttcttccagttcccaaactctcttcctttacccaaaaggtcgtccagtgccggcaaggaggtgatggaaggatccaacctgcagcagctgcctcagggttatttgggcaaaatgctagtatacaagagcggcaagatcaaaatgaagttaggagacatcatctttgatgtgaacccaggagtagaaagtaggatgctgcagcgtgcagtagctctcaacactcgagacaaacactgttgcttgcttggagagattgagaatcgtcatgttattgtgactcccaatgttgattctttgttgaacgacaagtagggaccaactgtagcagctttgtcacagattgtgtgtagacctgtagatatgcagggttagtgacatctgtagaaattatatcagctctgtcaaatgatgtataggattttagttgtgtagtgttgtgaacgttttattgtgattgcagtgctatgttagttttagaactgcatgcagctccctgtggatgaatgtttgtaaggatcggtatttgaccttgattgtattggaaggcaaatataataaaaatcacgtcgttcttgtgggcaa

SEQ ID NO: 112233 - DNA, 1046 bp, Zea Mays
cgtgaattaaccacggcttatgcaattagtttttaatttgctcatgtttagttgtgctaggtggcatccaaaataccggctaaactttagtacgggatccaaacacccccccttaactgggctcttagctatttatgacagagttaagagaaatggataaggatggcagctccgagagaagtcgcccagatcatggtgatgtgaagatgctcaagttcagaccaaaggtgcctcgacagaagcaaaagccaaagcaacaagaccctaagccaattgatgaagatgtgatgaagatattgaggactcgccaagtggctgcaaaaagtgcaccaaacacagaagatgagtgctcaccacagaagaccctctcgacgccaccttctgcagatgttgtttgcttgtcaccagcgcaactcggagtgcaaaaacaaaatcaattgccactccaaattcctagatccttccctgttcctgttaattcaggtgaatgtgaagattcataagctcctttgttcttctgaacaatactttccactaagaatttttatcgaaatattcaactcttgacaggattggtttatgaagaagagagtagtgatgacgacgacgataatgatagtgacaatgttgggttgctggagactcagccagattcaattgaaagtgaagctttaacatgtccggctgaggagcttgatttgcttcagcaagaaggtagcaaagaaagaatgttcttcttccagttcccaaactctcttcctttacccaaaaggtcgtccagtgccggcaaggaggtgatggaaggatccaacctgcagcagctgcctcagggttatttgggcaaaatgctagtatacaagagcggcaagatcaaaatgaagttaggagacatcatctttgatgtgaacccaggagtagaaagtaggatgctgcagcgtgcagtagctctcaacactcgagacaaacactgttgcttgcttggagagattgagaatcgtcatgttattgtgactcccaatgttgattctttgttgaacgacaagtag

SEQ ID NO: 112234 - DNA, 1169 bp, Zea Mays
agttgtgctaggtggcatccaaaataccggctaaactttagtacgggatccaaacacccccccttaactgggctcttagctatttatgacagagttaagagaaatggataaggatggcagctccgagagaagtcgcccagatcatggtgatgtgaagatgctcaagttcagaccaaaggtgcctcgacagaagcaaaagccaaagcaacaagaccctaagccaattgatgaagatgtgatgaagatattgaggactcgccaagtggctgcaaaaagtgcaccaaacacagaagatgagtgctcaccacagaagaccctctcgacgccaccttctgcagatgttgtttgcttgtcaccagcgcaactcggagtgcaaaaacaaaatcaattgccactccaaattcctagatccttccctgttcctgttaattcaggattggtttatgaagaagagagtagtgatgacgacgacgataatgatagtgacaatgttgggttgctggagactcagccagattcaattgaaagtgaagctttaacatgtccggctgaggagcttgatttgcttcaagaaggtagcaaagaaagaatgttcttcttccagttcccaaactctcttcctttacccaaaaggtcgtccagtgccggcaaggaggtgatggaaggatccaacctgcagcagctgcctcagggttatttgggcaaaatgctagtatacaagagcggcaagatcaaaatgaagttaggagacatcatctttgatgtgaacccaggagtagaaagtaggatgctgcagcgtgcagtagctctcaacactcgagacaaacactgttgcttgcttggagagattgagaatcgtcatgttattgtgactcccaatgttgattctttgttgaacgacaagtagggaccaactgtagcagctttgtcacagattgtgtgtagacctgtagatatgcagggttagtgacatctgtagaaattatatcagctctgtcaaatgatgtataggattttagttgtgtagtgttgtgaacgttttattgtgattgcagtgctatgttagttttagaactgcatgcagctccctgtggatgaatgtttgtaaggatcggtatttgaccttgattgtattggaaggcaaatataataaaaatcacgtcgttctt

SEQ ID NO: 112235 - DNA, 1116 bp, Zea Mays
gattagcgtggagctgcgtctcgacgtcttgtgatgtggcaacccccactgtggaggcggaagtcgagtgagccgcgtcgccgctcgtgtcctcgtccaacacgtcggtggtggtgttggtgacggtgcgcagcgggtcgagcgtggcggagggggtggcgtcgtcttcctcaacgcagccggtgccagtgttgatgaagatgtagtcggcgcccgagtcgtcattgtatgtgacaccggacttcgggtcatcatcgagggagccgtcgtagccaccgagtgcgggttcgtggagcacgcacttgacgatgacgaggatgctggtggcgccgtaggcgttcgggtggccgaatccgtcgcggcgagtgtactgggaccatggcgactctagagaggggagggacgcacggatctgcgccacagaggtttgaagatgctcgatggaggagtccactcggggccgctagacgtcgaacatctggatgacggcttccatctcctcgaacgtgttcaccaccagaccgtcggctctcgcgctctcggccattcggtcgcgtcgaggtgctcggcgaggagaaacctgaatctggaggagtcgaggttggtgccggagtcgatgacgctgctgatggggaagctcggcagcatcctggcgatgtgggtaaacacgtccacggggttgagcatgacgagcagtagcgcgtcggagaactgctccaccagcggcagcacgagcgtgcagaatcgtgccgcgtttcactggaggaggtccatcctggtctcgcccgggatctggcgtgcgccccgccagacagaggcgctccagctgcaggctctgcacggatccgttgccgtggaacgacacatcgtaccaggacgagaagacgtcgacgtaatcgatgatgtggtcgttgggctcctcgtcgaaaagaggctctccatcgaagatgctttcctcgtcgaagataggccacgcatcgaagaccgcttcgtcgttggcaagtgctggaacaggagttgcagttgccgtgaagccgccgaaggtgttcgggcattgtgccgaacacctggcaagcgcaccttcgatgctagcagtgagacgcttctcacacgccg

SEQ ID NO: 112236 - DNA, 638 bp, Zea Mays
acaggctacagcggaaaaaaaaacaaaatggaggggctcatcccgttcatctacaaggccatcaaggagcggcgggcccggagctacagctactactactcgcggtgcaactccaccggctcgtcgcgcggccggctcggggcccgcgtggaggacagctcgtgggacctgcagcagaagcagtgggagtccgccgccggtggcaaggcgccggcgggggcggcggcggagcgggagattgcgcaggcgcaccgccgccaccgctccctcgacgagctggcgggggaggtgggcgcctcgcccgggtggcgccgccgccacccgggcgcgccgctcagggcccgcagcgtcaggatcttctcctgcatcggcggcgtgtgatgtgcggatgcaccggccgcgtggcctgcacggaactggatggcggagggtttgtttggacgcgtcgtgctcgtgctcgtcgagcatgcgcgcagggggtggtttgctcgtgtttttttttttttttttttgcttcgatccgaggtgggcagcgaaggagtagtaattctgcagtggatgtaaatcctgctaatgtaatccaacaaaaagtgtacatattcatgtggatttgtgaacatgcaaattatatttgcaaa

SEQ ID NO: 112237 - DNA, 649 bp, Zea Mays
gcaatgtcgtcaacgctgacgcccccggcgccgccggcgctcctggtgccggtggcgtacgccgccgtaggcgcgcccgtggaagcggcagggagagggtcgtcgtcgtacggcccggtgatcgcgatgctggccgtcgtggccgtgctggcggccgccgcggtggccgtggggcggctctgcttcgggcgccgggcgcacggcggcgcccgcgacctggaggcctgggtggagcgcacctgcgggccctgcgtcggcgccaccgtgctcgcccaggcaacggacgagggcggaggcggcgccgtcgctggcgctggcgctggggccgcggcggcgacggagcccggcggcgcgcccgaggggacggacgacggagacggagcgaggagacagtagtaccagtagagcgtggcgtgctgattgacaactggccttgtaaattgtctcctccccggaccatgaaacgtgcatgccctgcgatcgttggtgtcgggaagttttggaatagcctgtgtacgcctctgtttggaagcgatggatgctggtggtggtggcgctgtttgaatttggcgtgcacaagcacaacggagtggatttgatgttttggttttactactcgctcgctagtcatatacattgcctgcctgcc

SEQ ID NO: 112238 - DNA, 1025 bp, Zea Mays
gaacccaactaaccaagttccatgatcgttacaatccagccgatctgaacagtttacagcaaaatacatcctgaatcaaccaaaacagcaactaaatccgactcattctagacatcatttctatgtacggcggcggcggcggcggcctaaaccctctccgcctcgtcagcgggacgagccggagccgacgacgacgaggtggctgtgcgcgtcgagcggcacgaaggcgagcgcgaggagcacggccagcaggcccacgggcaccagcagcagcaggaacggcggcggcgagagcggcggcagcacgagcgggaggaacgccagcgacacggccacgaacacgaacgccagcagcagctccgcggtgaagtagcccgcgggcggcggcggcaccgttccctgcggccgccgcccgcggtgctgcttctgctgctcgacggcgccgtgcattgctgcgcccctgcggtggggatcgcctggtctcctcctcgccggcggcctccggtccatggatgatgctgccttttttttggacacgggatcgagatgagcctcagaggcagagctaccgcccgcaaagctcgttcgggatttcggacagccagctgatgatccctccgatcgtcggcagctgaagggagaccagcagatagattagctactactagtccatgaataaagaagggaagggctgccgaagaacggggagcgcgggtaatatacaagctgggcggctgctcggttcgttgaaccaacgacgcggagccgaggcagcagggcatgcgcattcagcagcacattttgacctgagttgtactgcctgcatgcggtccgcggaacctcgtattccatgaacccgtcagacggtcgtggccgtacggcggcttgcgtgtgtatgacaggacacagggagatggccatgttgctgggcttggggacggggtcacgattcacgaggatcttcggccggcgcatgcaggtgcgctgtatgtgggcggtgcagacgtgcggcgcgccggcagggg

SEQ ID NO: 112239 - DNA, 1777 bp, Zea Mays
tcggcgacgcccttcgccctccaggactccaggccttcactccacgcaacctgttcgcaccggccacagccgccaccggccttcgccgcgagcccgcgacgacgcccagacttgttgccttactaccacggagacggaggcaccaccgcatcaggcagggaccggacgacgacgcccagacctatttcaacctgccggtctccccaggcccccagcccccagcagcagcaggaggacaccatgaagcttgacgtgaatgcccttcgctacctcgccaaggacgacttccgtgtcctcaccgccgtcgagatgggcatgcgcaaccatgagattgttccagtagaacttattgacaggattgccagattgaagcatggaggcacatacaaagtgctgaggaatcttttgaggaacaagctggtgcatcatggtgccactaaatacgatggatatcggctcacctatctgggatatgacttccttgccatcaagactttggttaatcgaggagtttttgcttcagttggccgccagattggtgttggaaaggagtcagatatatttgaggtagccacagacgatggtacagtacttgccatgaagcttcataggttgggcaggacatcttttagagctgtgaaatctaagcgtgactatctaaggcaccgaaggagctttaattggctgtatctctcacgactcgcagccttgaaggaatttgcctttatgaaggctttaggagatcatggtttccctgttccaactgctgtggattgcaaccggcattgtgtgatcatgtcacttgtgcagggatatcctcttgttcaagtgaaaaagttacaaaatccggatgatgtttttgactcaattcttggtcttatcgttcgtttggctgagcatggactcatacactgtgactttaatgagttcaatatcatgattgacgatgatgaaaaaattacagtgattgactttccgcagatggtgtctgtttctcaccgtaatgcccaaatgttttttgaccgagacattgaatgcatctacaagttctttaacaaaaggttcaatctgaggtcagtgaaaaatgaagaacaagctggatctgaaaatgatgatgaagggaacagcagaccttcctttttgtccgtggaaaagggtgctggttccttggacaaggaactagctgccagtggatttaccaggaaagagaaagtggatatggataagtacatcgaggaagttgttgaagggcatgattccagctcagatgatgataatgatgaggacagttccgatgagcctgattgtgatcttaccccaagtgattcagacgcgcctggaactttttctgaagagcatggaacaagttgtagcggcgagaacagattggaaattcctccctcggatggcaatggagtggttatggcaccgctcgaatctgggatcaagacgttttccatggaagatgatgataacgatgatggctcgtcagaggatgctgatgaagaagaagatgctgagctcacgaaacaattgaacaagcaaaggagaaaagcaatcgcagctgcccatgggcggagaagaccaacgtcatccaggaacgcctacaaggacaagggtaagggcaccatgaactccaagatgcagaggcaggcgtgcaactggtgatggttgagtgcctcttgcggcagtaaatagattaggcgcagggttttgtgtggttgtataaccgtgggaccctttactagaatcaactccggctttatatttttactag

SEQ ID NO: 112240 - DNA, 1878 bp, Zea Mays
tcggcgacgcccttcgccctccaggactccaggccttcactccacgcaacctgttcgcaccggccacagccgccaccggccttcgccgcgagcccgcgacgacgcccagacttgttgccttactaccacggagacggaggcaccaccgcatcaggcagggaccggacgacgacgcccagacctatttcaacctgccggtctccccaggcccccagcccccagcagcaggaggacaccatgaagcttgacgtgaatgcccttcgctacctcgccaaggacgacttccgtgtcctcaccgccgtcgagatgggcatgcgcaaccatgagattgttccagtagaacttattgacaggattgccagattgaagcatggaggcacatacaaagtgctgaggaatcttttgaggaacaagctggtgcatcatggtgccactaaatacgatggatatcggctcacctatctgggatatgacttccttgccatcaagactttggttaatcgaggagtttttgcttcagttggccgccagattggtgttggaaaggagtcagatatatttgaggtagccacagacgatggtacagtacttgccatgaagcttcataggttgggcaggacatcttttagagctgtgaaatctaagcgtgactatctaaggcaccgaaggagctttaattggctgtatctctcacgactcgcagccttgaaggaatttgcctttatgaaggctttaggagatcatggtttccctgttccaactgctgtggattgcaaccggcattgtgtgatcatgtcacttgtgcagggatatcctcttgttcaagtgaaaaagttacaaaatccggatgatgtttttgactcaattcttggtcttatcgttcgtttggctgagcatggactcatacactgtgactttaatgagttcaatatcatgattgacgatgatgaaaaaattacagtgattgactttccgcagatggtgtctgtttctcaccgtaatgcccaaatgttttttgaccgagacattgaatgcatctacaagttctttaacaaaaggttcaatctgaggtcagtgaaaaatgaagaacaagctggatctgaaaatgatgatgaagggaacagcagaccttcctttttgtccgtggaaaagggtgctggttccttggacaaggaactagctgccagtggatttaccaggaaagagaaagtggatatggataagtacatcgaggaagttgttgaagggcatgattccagctcagatgatgataatgatgaggacagttccgatgagcctgattgtgatcttaccccaagtgattcagacgcgcctggaactttttctgaagagcatggaacaagttgtagcggcgagaacagattggaaattcctccctcggatggcaatggagtggttatggcaccgctcgaatctgggatcaagacgttttccatggaagatgatgataacgatgatggctcgtcagaggatgctgatgaagaagaagatgctgagctcacgaaacaattgaacaagcaaaggagaaaagcaatcgcagctgcccatgggcggagaagaccaacgtcatccaggaacgcctacaaggacaagggtaagggcaccatgaactccaagatgcagaggcaggcgtgcaactggtgatggttgagtgcctcttgcggcagtaaatagattaggcgcagggttttgtgtggttgtataaccgtgggaccctttactagaatcaactccggctttatatttttactaggtgagtaatcgtgcgtcgcaacgagaacacataatattacgagaacttatatataaaatgtcgcaacgaaaacatataatattatgagaacttatatacaaaat

SEQ ID NO: 112241 - DNA, 1562 bp, Zea Mays
ctgcagatgggcatcatggaaggctatccaagaaagccaaatacccatcaccagtctctgatggacatggacgcccccgccgccggcgcaaccagcagcagcgccacccatgcaccgccggcgcctcaccatgccaccgcgaagaagaggcaccactccggccgcaccaagaccctcctcctcttcgtcgtcacaaactccatctccatcctcctgtccgtcaccttctcgcgcgtcaccggccttgggaccggtggcagcggcggcgactccgcactcgacttcgcgttcagcgtcctctcctccagccagagcctcgccgtcgacctccacaatcgcgtcgaggccaccgacgcgatcatcaagaggctcatctccaactccggaaagatgaagcgggacgcgctgccgccgaagctgacgccggacgaggagctcacggtcgcgctcggcccgcacacgctcccgttcggctacaccccgaacctcgactccgacaagctgtatccggcgatcggcgcggcgtgccaccgccaccgcgacgagctcaacaagtacatgcggtacaacgtgaccggcgactgcccgcccgacgcggcgctcgcggagcgtctgatgctcaggggatgcgagccgctgccgaggcgccggtgccgcgcgcgcgggccagccgggttcccggacccgacgccgttcccggagagcctgtgggtggtcccgccggacaagtccgtctcgtgggcgccctacgcgtgcaagaactactcgtgcctcgtggacagcgcccgccgccgcccggggagccacagccaccaccacggctgcgaggcgtgcttcgacctcgccgccggcaaggagcagcggcggtgggtcgggcagggcggggacctcgactacgacatcgacaccgtgctggcctccaagccgcgaggcacggtacggatcggcctcgacatcggcggcggcacgggcacgttcgcggcgcgcatggcggagcgcggggtcaccgtggtgaccacgaccctcgacctcggctcgccgttcggctcgttcgtggcgtcccgcgggctcatcccgctccacctcagcgccgtcgccgggcggctcccgttcttcgacggcaccctggacatcgtgcactcaatgcacgtgctcagcaacagggtcccccgcgcggtgcttgaggccgagctgtacgacatctaccgcgtgctccggccgggcgggatattctggctggaccacttcttctgcaccgggaaggagctgaccgaggtctacgtccccatcatcgagggtgtggggttccgcaagctccggtggaacaccggcaagaagctggacaaggggcccaacgccgacgagtggtacatctcggctctgctggagaggcccatgatgtgacagtgcaaagagacccagagccggagcagtgcgatgatgatgttgttaatgggaactgggaagaagtaataatggcagatgcgattttatgtgttataactttgttcttgatgtttcttgatttcttgggtgtcaggcatcctctttcatcgatgcaa

SEQ ID NO: 112242 - DNA, 1401 bp, Zea Mays
ccagcctccagtccacaatggaccgggtgtactggatgtaatggacacagaacgacgaggacggcggcggcggcggttggacactgtaccgagcacccgcacagttctcaaatagaccgggcccaaatcctttccgaaacgcccatgaaattcgccgcgagcaaaatataaacccactcctgcccttcctccaactcctccgttccccgttccctcctctaccactggccccggcaccgcgggagcgccgaccgcctgctcgtctcgccgcagcccgtccctgtcggaaccctagcggccgccattgcccacgcgctgcgcgcccgatggacggcgggggctccgggccggcgcccaacgccgcgcacaccgcggaagaggtcttccgcgactacaaagcccgccgcgccggcatgatcaaggcactcaccaccgatgtggagaggttcttcaagctctgtgaccccgaaaaggagaacttgtgcctctatggctatcccgatgagacatgggaggttaccttgccagctgaggaagtgcccccagagatccctgaaccagcattaggaatcaactttgctagggatggcatgaatgagaaggactggctggcgctagttgcagtccacagtgattcctggttactatctgtcgcattctactttggtgcacggtttggatttgacagagaagctaggaggcggctctttagcctgataaacaacatgcccacgatatttgaggtggtgacgggagcagtcaagaagcagcaggcaaaggagaagacacctaacagtagcagcaagagcaacaagcctagttcaaaagtgcagtcaagagcagagtctcgatcgaaggctaaggtccccaaagacgaagaagagagcggtgacgacgacggggacgaggaggcggaggagcacgacaacaccctgtgtggaacctgcgggaccaacgacggcaaggaccagttctggatctgctgcgataactgtgagaagtggtaccatgggaagtgtgtcaagatcacgcccgcacgggccgagcatatcaagcagtacaagtgcccagactgcaccaacaagagggtcagggcgtgagcaaccgatgcgaccttgctaggaaggaaaggaagaaacgacctccttggcgccaagatatggcgtgtagttccctagtctgtaagcctgcatttttcatttatggttgttttatctgttgattagctgttcgacctagcattgtctaatgcgtggcatgtctcatgtgctgagtgttgacattgccatgggccccgccctctagtctgtaaacgttgtcactgaaggtacctctcggctgaccatttctccattgttggtgttgtgcaatgagtagtgaacgtagtagtcttagcatctg

SEQ ID NO: 112243 - DNA, 1398 bp, Zea Mays
ccagcctccagtccacaatggaccgggtgtactggatgtaatggacacagaacgacgaggacggcggcggcggcggttggacactgtaccgagcacccgcacagttctcaaatagaccgggcccaaatcctttccgaaacgcccatgaaattcgccgcgagcaaaatataaacccactcctgcccttcctccaactcctccgttccccgttccctcctctaccactggccccggcaccgcgggagcgccgaccgcctgctcgtctcgccgcagcccgtccctgtcggaaccctagcggccgccattgcccacgcgctgcgcgcccgatggacggcgggggctccgggccggcgcccaacgccgcgcacaccgcggaagaggtcttccgcgactacaaagcccgccgcgccggcatgatcaaggcactcaccaccgatgtggagaggttcttcaagctctgtgaccccgaaaaggagaacttgtgcctctatggctatcccgatgagacatgggaggttaccttgccagctgaggaagtgcccccagagatccctgaaccagcattaggaatcaactttgctagggatggcatgaatgagaaggactggctggcgctagttgcagtccacagtgattcctggttactatctgtcgcattctactttggtgcacggtttggatttgacagagaagctaggaggcggctctttagcctgataaacaacatgcccacgatatttgaggtggtgacgggagcagtcaagaagcagcaggcaaaggagaagacacctaacagtagcagcaagagcaacaagcctagttcaaaagtgtcaagagcagagtctcgatcgaaggctaaggtccccaaagacgaagaagagagcggtgacgacgacggggacgaggaggcggaggagcacgacaacaccctgtgtggaacctgcgggaccaacgacggcaaggaccagttctggatctgctgcgataactgtgagaagtggtaccatgggaagtgtgtcaagatcacgcccgcacgggccgagcatatcaagcagtacaagtgcccagactgcaccaacaagagggtcagggcgtgagcaaccgatgcgaccttgctaggaaggaaaggaagaaacgacctccttggcgccaagatatggcgtgtagttccctagtctgtaagcctgcatttttcatttatggttgttttatctgttgattagctgttcgacctagcattgtctaatgcgtggcatgtctcatgtgctgagtgttgacattgccatgggccccgccctctagtctgtaaacgttgtcactgaaggtacctctcggctgaccatttctccattgttggtgttgtgcaatgagtagtgaacgtagtagtcttagcatctg

SEQ ID NO: 112244 - DNA, 1395 bp, Zea Mays
ccagcctccagtccacaatggaccgggtgtactggatgtaatggacacagaacgacgaggacggcggcggcggcggttggacactgtaccgagcacccgcacagttctcaaatagaccgggcccaaatcctttccgaaacgcccatgaaattcgccgcgagcaaaatataaacccactcctgcccttcctccaactcctccgttccccgttccctcctctaccactggccccggcaccgcgggagcgccgaccgcctgctcgtctcgccgcagcccgtccctgtcggaaccctagcggccgccattgcccacgcgctgcgcgcccgatggacggcgggggctccgggccggcgcccaacgccgcgcacaccgcggaagaggtcttccgcgactacaaagcccgccgcgccggcatgatcaaggcactcaccaccgatgtggagaggttcttcaagctctgtgaccccgaaaaggagaacttgtgcctctatggctatcccgatgagacatgggaggttaccttgccagctgaggaagtgcccccagagatccctgaaccagcattaggaatcaactttgctagggatggcatgaatgagaaggactggctggcgctagttgcagtccacagtgattcctggttactatctgtcgcattctactttggtgcacggtttggatttgacagagaagctaggaggcggctctttagcctgataaacaacatgcccacgatatttgaggtggtgacgggagcagtcaagaagcagcaggcaaaggagaagacacctaacagtagcagcaagagcaacaagcctagttcaaaatcaagagcagagtctcgatcgaaggctaaggtccccaaagacgaagaagagagcggtgacgacgacggggacgaggaggcggaggagcacgacaacaccctgtgtggaacctgcgggaccaacgacggcaaggaccagttctggatctgctgcgataactgtgagaagtggtaccatgggaagtgtgtcaagatcacgcccgcacgggccgagcatatcaagcagtacaagtgcccagactgcaccaacaagagggtcagggcgtgagcaaccgatgcgaccttgctaggaaggaaaggaagaaacgacctccttggcgccaagatatggcgtgtagttccctagtctgtaagcctgcatttttcatttatggttgttttatctgttgattagctgttcgacctagcattgtctaatgcgtggcatgtctcatgtgctgagtgttgacattgccatgggccccgccctctagtctgtaaacgttgtcactgaaggtacctctcggctgaccatttctccattgttggtgttgtgcaatgagtagtgaacgtagtagtcttagcatctg

SEQ ID NO: 112245 - DNA, 1388 bp, Zea Mays
ctgcgaccctcggtgacgcgctccgcccaccgccgcccgggaatggctcgagcgctgctcctgctgcgagtagctgtagcccgctaccctcctctcccggcctcacccgcgctcctccagccgctgctgcgccgccacgcgccctcccagtacaggtcccagctccgcttcctctcctccctctcctcctcgtccgtgtccaccagctcagatgctcccagcgacggcgggggcggccgcgacggggaagaggatggcgcgaagagcggcggccgcgtcgactacttggggatgagcgacgaggagctcatggagcagtgcgatatgggcacgttcaaggcgtccggccccggcggccagcaccgcaacaagcgcgagtccgccgtccggctgaaacaccttcccaccggcatcatcgcccaggctgtggaggatcggtcacaacataagaaccgagcgtctgctttatctcggcttcgaaccctgattgctcttaaagttaggaggccgataaacctggaagactacactccacctgttgagcttcttcagatattacccctgaagtccagcgttagaggaaaagatgttgggccccaaatcggtccaaataactcaaaattttctccaggaatgcaagctttattagacctgctgtttgctgttgaaggttctgtatcagatgcagcaaagattttagggtaatacgttacatctatattccactgctgcgcacagatgctagatggcagcatgtatatttgctagttttacattcaagccacctcatagttatctcggtgaactatgaccataatgcagcctaagcactggtgctttgtcaagattgattctgtcagatgattctctccgaacggccgcgaatgaactgcgagcttcgaagggactgaagcctttgagatgaaatcctttgtaaaatcctcagcttcaagtgcaccatatcccataggtgccatgttcgacagatgtcaggaggcattatttctagggaaaacctttgaggtttcatgcggtttgtttaagggatgttcgtcgtcattagattgccgtaaatatgttcagtaggcagctagtatatcttcagaatatcctcgtttcgtattacatatacccccaatgttctccagcagggcaacaccattacaccacttaaccaatatttttccttgaggacctgttaacctcaaacttttatttgccagccaaaagttgttgaagcggctgtgctgaattgctgatttaattggctgtaactacctcatgggtacacaattctaatcttgtttcctttcagcgtttgatgatgcttttatatcaaattggtgctcttaaatttaaatgcaccatggatctgtttttagcttcca

SEQ ID NO: 112246 - DNA, 1267 bp, Zea Mays
ctgcgaccctcggtgacgcgctccgcccaccgccgcccgggaatggctcgagcgctgctcctgctgcgagtagctgtagcccgctaccctcctctcccggcctcacccgcgctcctccagccgctgctgcgccgccacgcgccctcccagtacaggtcccagctccgcttcctctcctccctctcctcctcgtccgtgtccaccagctcagatgctcccagcgacggcgggggcggccgcgacggggaagaggatggcgcgaagagcggcggccgcgtcgactacttggggatgagcgacgaggagctcatggagcagtgcgatatgggcacgttcaaggcgtccggccccggcggccagcaccgcaacaagcgcgagtccgccgtccggctgaaacaccttcccaccggcatcatcgcccaggctgtggaggatcggtcacaacataagaaccgagcgtctgctttatctcggcttcgaaccctgattgctcttaaagttaggaggccgataaacctggaagactacactccacctgttgagcttcttcagatattacccctgaagtccagcgttagaggaaaagatgttgggccccaaatcggtccaaataactcaaaattttctccaggaatgcaagctttattagacctgctgtttgctgttgaaggttctgtatcagatgcagcaaagattttaggcctaagcactggtgctttgtcaagattgattctgtcagatgattctctccgaacggccgcgaatgaactgcgagcttcgaagggactgaagcctttgagatgaaatcctttgtaaaatcctcagcttcaagtgcaccatatcccataggtgccatgttcgacagatgtcaggaggcattatttctagggaaaacctttgaggtttcatgcggtttgtttaagggatgttcgtcgtcattagattgccgtaaatatgttcagtaggcagctagtatatcttcagaatatcctcgtttcgtattacatatacccccaatgttctccagcagggcaacaccattacaccacttaaccaatatttttccttgaggacctgttaacctcaaacttttatttgccagccaaaagttgttgaagcggctgtgctgaattgctgatttaattggctgtaactacctcatgggtacacaattctaatcttgtttcctttcagcgtttgatgatgcttttatatcaaattggtgctcttaaatttaaatgcaccatggatctgtttttagcttcca

SEQ ID NO: 112247 - DNA, 1842 bp, Zea Mays
ccaccccatcccatccccatcaacaacgcaaaaacctaaaccgctctggtccatccacatccacagtcgccatcgcccccacctctcgtcgtcgtctccgtgcaccactaggcccccactgccggccgcgcctcctagccacctcgtgccgctcggccaccatgcccgtcctccactgcccctatggctgccatgggcgagcgctgcccgagcagccgaccgccctttccctaccgttttcagctgccgcgcgctgcctctcctccccgccaggcctccactgcccacttctccggcggctacagcggaaggcaaggagaaggacagcgggcagcggtagctagatctagcaagcacagggcgtcttctccatccgccacctctcggcgcatcatcagctgaggctgagctctctcattcaccgctggctcttgctcttgtgttcataagtaacttcgcattgccttgcccccttgtcctgctccctcctcccctccggatctccccgcctgctccatttaattactgactcgtacccttccccgcattcgccttcttgtttcttccatcccacccgtatcagccaccggttcccaatgcccaggtaggcagcccagcactgtgtggtcgtctgatccgcggcggcgcgcccgtcgttacctacgcgaatggctcctccagcaggggcagggacggaggggaggccggcgcagcggcgcggcaccggaaccagccccggccgcaccaaggtgtgggtcgagccaccgggcaagagccgcgaccaccaccagccacctcgtgccgccgcccgtcctccactgcccctatggctgccacgggcgagcgctgcccgagcagccgaccaccctttccccaccgtcttcagctgccgcgcgctgccccgcctccccgccaggcctccactgcccacttctccggcggctacagcggaagtcaaggagaaggacagcgggcagcggtagctggatctggcaagcacagggccgtgcccccggcggcgcccggatccgcgttgcttgcaacccccccaccccagtagacctaatttagaatgttgtgcatcagcgagtgttcatgttgattctagggttacataattcattttactagagatggcactattcaccctgccaaataaatttatctttcacttgtaggtaatttaggcgtttgtcataatctctgatatatgaggaaagagaaggaacatgttggagatggagtagagttgctggatgatgatatgtttgtgttgctattgttcaaaaattcaccaaactctacttcagtgagtgcacatggatgcgaggagtagagtgcctcgatggcgaggcaggttcatccagacaagaagaaaccatgatggaatctggatttcccctctatccgatggaatccagattcagtgccagtccgttttcctgtgattttgggataccagcccaattccccttcatggagggtatgcgttgctgttggttggcacaccggaaggcagaacctttagctgtgaaggcctgtgactgaggtcatttcatgcaactaacaattctggtgaagactatccaatcttaggacacaacatgcaacaattagacgtatctatcatgatccttctataatttaacgatccttatatagtttaacaagtattatgtttttctgtaaagcttagaaatacttattttgttaatgcatagaaaatcaatgaaaaaaatgtagagcttttatgaaagtcaaaatggacatcaacgatttacgctaaaacttgtacccatttacgctgttttagttcacattttatgttgaaatccgttcgag

SEQ ID NO: 112248 - DNA, 723 bp, Zea Mays
gatctagcaagcacagggcgtcttctccatccgccacctctcggcgcatcatcagctgaggctgagctctctcattcaccgctggctcttgctcttgtgttcataagaacatgttggagatggagtagagttgctggatgatgatatgtttgtgttgctattgttcaaaaattcaccaaactctacttcagtgagtgcacatggatgcgaggagtagagtgcctcgatggcgaggcaggttcatccagacaagaagaaaccatgatggaatctggatttcccctctatccgatggaatccagattcagtgccagtccgttttcctgtgattttgggataccagcccaattccccttcatggagggtatgcgttgctgttggttggcacaccggaaggcagaacctttagctgtgaaggcctgtgactgaggtcatttcatgcaactaacaattctggtgaagactatccaatcttaggacacaacatgcaacaattagacgtatctatcatgatccttctataatttaacgatccttatatagtttaacaagtattatgtttttctgtaaagcttagaaatacttattttgttaatgcatagaaaatcaatgaaaaaaatgtagagcttttatgaaagtcaaaatggacatcaacgatttacgctaaaacttgtacccatttacgctgttttagttcacattttatgttgaaatccgttcgag

SEQ ID NO: 112249 - DNA, 812 bp, Zea Mays
tgcttgatttcccatgttttcttctttgccagcacatactaaaaattacaacaacaattgttctccaaactaaactttatgattgaaaatctaagcattcagctagtaatcatgttatggcgcttggtcttttggttgtacttcttagcatgaagttgaaagttgtgcataaattttggtcgcatatatgaacaggaacatgttggagatggagtagagttgctggatgatgatatgtttgtgttgctattgttcaaaaattcaccaaactctacttcagtgagtgcacatggatgcgaggagtagagtgcctcgatggcgaggcaggttcatccagacaagaagaaaccatgatggaatctggatttcccctctatccgatggaatccagattcagtgccagtccgttttcctgtgattttgggataccagcccaattccccttcatggagggtatgcgttgctgttggttggcacaccggaaggcagaacctttagctgtgaaggcctgtgactgaggtcatttcatgcaactaacaattctggtgaagactatccaatcttaggacacaacatgcaacaattagacgtatctatcatgatccttctataatttaacgatccttatatagtttaacaagtattatgtttttctgtaaagcttagaaatacttattttgttaatgcatagaaaatcaatgaaaaaaatgtagagcttttatgaaagtcaaaatggacatcaacgatttacgctaaaacttgtacccatttacgctgttttagttcacattttatgttgaaatccgttcgag

SEQ ID NO: 112250 - DNA, 1840 bp, Zea Mays
tcattctcctacccctctttcccgcccttaagcacctgccaaaccctctttaaaccctcgagtcatactcaaaatttctcgcgttgttggctttctcgccgcaatccgtccggggtagccgagacagaggaccctcgagctcgatttcataggtttcatctcggattttgaggttttgggtggtggggattcttgggttgcctttgcttttgtttgaccggatcttggagtgtgtgctgctgtcgttagctcactgggagcggcagcagatctgtgaatcaaccccctacagaacctccgaatcttgcgagtctcccggaaagttttgcttttgggggtgcgaatttggttctagtttgctcgatttgagccgaggcttttggtgatttcttgtaacgagatttgaggcggaggcttggcagtagctgcggtggatctgcggcctacggcgatgtctgctgccgactccctcacctccggccggggccgccgcgcggagcctcccctgccccgcctgaagcgtgtccgcgtttacttcgtggacgccgacgctacggacaccgactcctctggcaacgaggacgagcgcggcaagcggcgcgtgcgggaggtcatccacatcgacgtggagtccgcctcggctctgacgcggtcggcgcagccgctggtgctcccgaagaagcggccgctgccgtcccaggcggcggcggcggcgctcgtgcggcgacgctcctccggggccgggttccggcggcgcttccccggcgtccggctccgaccgtggggcaagtacgccgcggagatccgcgacccgcaccagcggaagcgcctgtggctcggcaccttcgacacagcggaggaggccgccgcggcctacgacgacgccgcgctccgcctcaagggctcgcgccacgtcgtcaccggcttccccgctgaggcgcctcccccctggccgcgcctggggctccgtcctcgccgggaggtccccaaggaagcggcggagggcgccgcggaagaggacggagaggccctcgcatcggccccggtcccggcggcagcgcccgcgtcactggattcgcaggcggtggacggcaccgccctggtctgcccgttctcgtctccaatctctgttctccgtcacgccgctgacgaggcgccggccgcacccgccctgccggcgttcgagttcctctattcggggcttggggagctcggcgacctcggctcagcgacggcgccatcgaaggcggtggcggcggagttcgactgcctgccgtggtgggagggcgaggacttcgtgacagtgacaggcctcacggcgtcagccggtgccgccgtcagcgtcatataacggcgttaccttttacacccctcggtgctcgggcctcgtcgtcgtgccgtggcgccatttcggatgctcagggcgggaaacgcgtgggctgccgtgtggcggcatcgaatcggagtaaagctagtactagtattgtttttttattaattattaactgactactctgctagaggctagagcagagtggttgcttgtggcggcgagtcgtatgtctaggcgtggcgggccccactgggccaggcaggttctgctttctgtgtgcgggtgccttgaaccgcacggctctcgcgtggaaacgcagcagtgaactgtaatgtggtgctaagctagcgattagtggcatgtgttaattggccgtcattagaactaagtaaattaggagtactaggagtcagtgtacgtttaccgtgtggcaatgatcatgcgaatctcacatcgaatcagtttccaagcacagaatatatcatcgaaagtccgtcacttgcgcaa

SEQ ID NO: 112251 - DNA, 1045 bp, Zea Mays
gtctcgtcccgaaaggtgtcgggtgtggaacttatcctctaattcccttcattctcttgctttgaagggtggggggctagggcgggccgcactgcgcaccgagcgggcgccgggcggacgacgaagcggcgaggcagtgactggggagagatgtcgggcggcaggaggagggggcttgtgtggagcctccccgtggcgaggtcggatgcgctcggcaaactgggccctgccttcggcatcggcgctggctgcggcgtgggtcttggcttcggcctcatcggaggtgcaggcatcggagctggattccctggtttacaattggggtttggagctggagctggatgtggaataggaataggttttggttacggctttggaaaaggcgttgcatatgatgaaagtggaaggtattcgaacatcaggagaccgttccagagctccagaagcattgctttcgatgagaagttcgatatcatgtttgacgaactgatggagagcaccaggaagctggtcaaagcaacatcaaaggagatcgacaaatggaggcgaatgtagaagcgagcaggggcagcacttataggatgaactgcgtagcgagagaaagcgatgccatcagaatctaaggtattaatgtgtgattggataaagtggcctagaagcttctacttgtgtgtaagaaagaaagaaagactgataaaagcgagttctccagagtacgaagccaaaagttgtcgaggcactctacacgtgcttcttctgtgtccgtgggaaccaaactgactaaaaagcaagttgctcgcttgctgttacatggaatatttttcagcgattcatgaggatgagatactctggcctgccgatgctgatgctcaaaagcattagtttttccagccacgtgctcggtgctgtccatgtgatcgcgacggcgcctggaattgaaatatcacccacgacgtcgccgtcgaaacccttgtttttcgtatccaaatatttggcacttggcaggacatattttctagagtattgtcgtgcccatatgttgacc

SEQ ID NO: 112252 - DNA, 85 bp, Zea Mays
tttttgattcgtggcctgccttgcctagcgttgccggtatgcgcgtgcaagccctcctgttatcttctcgcgtactaatctatcc

SEQ ID NO: 112253 - DNA, 2767 bp, Zea Mays
cgcgagcacgctacgaatcgccgtggtaaatgctcggccgcggcggccattagaaggcgctaatcacgcccaggattaaagagcccccctctccgccttggcctcggctcgcgcacctgcctgcctcactgcctgcctacctacctgcgttgttgccttcttcgcctcctccccctgtggccgcaccgcagcagctgcggcggcggcagaggtgaacagcttcccgcggccttgtcctgtccggactccggggccgggaccggcagcgcagcgggctcgcaggatctcccgagtcccgacccccatgcgtcggcctcggtgacagatggcgcggagttctgcaatgcggaggagcggttttgccgggttctcgtgcttcgctgggcaggctcgtcgtctccttccgtttcgattccagcgccgcagcttttcaaaagtgctcctctttgggcccttgggggtctgtaactgctgggtggcctctcttttcttgcctccccgctttcttttccgtgggtttgctagcggagtccatccaactataatgaattaggcacccagtacgtaatggcaacggaagtcaaacaaacttatttttcatggtcacaaggagagtcaactgaacgggatggtcctcaaggagtatctgtatcccagacacttgatcatggttccatttccttcggaagatttgaattagagtcactatcatgggagaagtggtccgtatttactaatgacaggcgcaatgaagaatttggaaaattcaatggtttagtcgctcagaaaaaggcttattttgaagagtattacaagaagatcagggaactaaaggcttcacagcagcaaaaccagcaaactgaacttattctggaatacagcggtgatggtagtgactccagccaaacagcagaagaggagcagggtgctgatcttgaaacccccactggatctggagcagctgttgatgtttatgtggaagaagttccatgtgaaaccacatcggagcatggactgcagtgctataatgaccaaggaaacgaaaattttgatacagaattttcctcatctaatctttcttcgtcaggtggatttctgcagcaaactgaccatgatgttagagttcctgttcgtggtgacaattctaccagtaaactgtatgcggcgccgcagaatgctagttctgttcacgatggtactagaaaaacatatgaagctgcaaggactcctagaaggattattgagaaagattccaggcttagacacagccccaagataataccaaaatccgtcaaagccctttcacaaagtgctatggattacacatttactagtgagaggcctggttcagtgaagcccaatacaactacgagccagaaggctaagccagtgcaaagaccaaatgcagcaagccagaagatgtctgcatctacagaaaggagcaagcttacaggtctcagaagaccttcctcagcaggtgcgcaacggccttctactggagagcgacatgctattgccagggagaattcacaattacctgtggtcgtttccaccccacggcgaccttccactgctgagagacgcccagtcacccgagatcgtgcagagaagcaagccaatgtcaccacaccacgccgaccttctacttctgaaagactccccatcaaaagagagactgcagcaaagcataatgatatttccgctgtacgtcgaccctctacaggagagagacgtgcttttactagagatggtgttctgagaactgatgtgaagacacctagtaaggcaagagcaactgtggctcatccgatgagtgaaatgactacagtgggcaatacgagaaaggctatcactccaaatgcagctagaagtagcaagctggaaacaaaaagcaataactacagactgaagggaccttcagcattggatagccactctactaggtcaaacagaatggacttgcaagtgtctggcaagcagaaatcgagttctgttaaccttcctccaaggaaaattttcagttctactgctggagaaccatcagttggaaccatttctaggtcaaaaaagaaagagggcgttcaggcgacagtgcaatctcgagcatccacttcaaagagaacaactcctttgcagactggaaacttaaaggcgaggggtccaaatccaccagcaccgccacctccaccacgtcggccatcacgaacgactaccaaaccaagtgccggtgcctcatcgattggcggaagaaagccaaagtatgctcatcatgaacaccaaaagagccatcctactaggcctcactgcgaccttctcaaatacgcgctttccacatccgtgcattcttaccgaggccgtctattctcatccatccaatgcagggcttcagcaccacaatggcactgatgcagtggaggagagcggaaagcgcttcagtacagtggcccgcagagcatggtggatctgagggacgtcagtaccggccttcctttgtatggtgtgtactcccgttggcccgtgcagagcagctcccaagtgtagtctcagtacaacccccgttggcccgtcccttcctttgcagagcagcagtctagtgtatgtagtcgcgcgtatcatatcccaccggtgcctagtttcgtcgtccacaaggaacttagaacattgtaaatacctggaaataaatttgcagcttagctctaaagtaaatccagcccaagatttgtgaacatccatgtatgtcattagcaatggaagcccttgtttatca

SEQ ID NO: 112254 - DNA, 2506 bp, Zea Mays
cgcgagcacgctacgaatcgccgtggtaaatgctcggccgcggcggccattagaaggcgctaatcacgcccaggattaaagagcccccctctccgccttggcctcggctcgcgcacctgcctgcctcactgcctgcctacctacctgcgttgttgccttcttcgcctcctccccctgtggccgcaccgcagcagctgcggcggcggcagaggtgaacagcttcccgcggccttgtcctgtccggactccggggccgggaccggcagcgcagcgggctcgcaggatctcccgagtcccgacccccatgcgtcggcctcggtgacagggtttgctagcggagtccatccaactataatgaattaggcacccagtacgtaatggcaacggaagtcaaacaaacttatttttcatggtcacaaggagagtcaactgaacgggatggtcctcaaggagtatctgtatcccagacacttgatcatggttccatttccttcggaagatttgaattagagtcactatcatgggagaagtggtccgtatttactaatgacaggcgcaatgaagaatttggaaaattcaatggtttagtcgctcagaaaaaggcttattttgaagagtattacaagaagatcagggaactaaaggcttcacagcagcaaaaccagcaaactgaacttattctggaatacagcggtgatggtagtgactccagccaaacagcagaagaggagcagggtgctgatcttgaaacccccactggatctggagcagctgttgatgtttatgtggaagaagttccatgtgaaaccacatcggagcatggactgcagtgctataatgaccaaggaaacgaaaattttgatacagaattttcctcatctaatctttcttcgtcaggtggatttctgcagcaaactgaccatgatgttagagttcctgttcgtggtgacaattctaccagtaaactgtatgcggcgccgcagaatgctagttctgttcacgatggtactagaaaaacatatgaagctgcaaggactcctagaaggattattgagaaagattccaggcttagacacagccccaagataataccaaaatccgtcaaagccctttcacaaagtgctatggattacacatttactagtgagaggcctggttcagtgaagcccaatacaactacgagccagaaggctaagccagtgcaaagaccaaatgcagcaagccagaagatgtctgcatctacagaaaggagcaagcttacaggtctcagaagaccttcctcagcaggtgcgcaacggccttctactggagagcgacatgctattgccagggagaattcacaattacctgtggtcgtttccaccccacggcgaccttccactgctgagagacgcccagtcacccgagatcgtgcagagaagcaagccaatgtcaccacaccacgccgaccttctacttctgaaagactccccatcaaaagagagactgcagcaaagcataatgatatttccgctgtacgtcgaccctctacaggagagagacgtgcttttactagagatggtgttctgagaactgatgtgaagacacctagtaaggcaagagcaactgtggctcatccgatgagtgaaatgactacagtgggcaatacgagaaaggctatcactccaaatgcagctagaagtagcaagctggaaacaaaaagcaataactacagactgaagggaccttcagcattggatagccactctactaggtcaaacagaatggacttgcaagtgtctggcaagcagaaatcgagttctgttaaccttcctccaaggaaaattttcagttctactgctggagaaccatcagttggaaccatttctaggtcaaaaaagaaagagggcgttcaggcgacagtgcaatctcgagcatccacttcaaagagaacaactcctttgcagactggaaacttaaaggcgaggggtccaaatccaccagcaccgccacctccaccacgtcggccatcacgaacgactaccaaaccaagtgccggtgcctcatcgattggcggaagaaagccaaaggcttcagcaccacaatggcactgatgcagtggaggagagcggaaagcgcttcagtacagtggcccgcagagcatggtggatctgagggacgtcagtaccggccttcctttgtatggtgtgtactcccgttggcccgtgcagagcagctcccaagtgtagtctcagtacaacccccgttggcccgtcccttcctttgcagagcagcagtctagtgtatgtagtcgcgcgtatcatatcccaccggtgcctagtttcgtcgtccacaaggaacttagaacattgtaaatacctggaaataaatttgcagcttagctctaaagtaaatccagcccaagatttgtgaacatccatgtatgtcattagcaatggaagcccttgtttatcagcttgttattggtgtgttctttttaagggttattgtcagatttgattcttcg

SEQ ID NO: 112255 - DNA, 2599 bp, Zea Mays
cgcgagcacgctacgaatcgccgtggtaaatgctcggccgcggcggccattagaaggcgctaatcacgcccaggattaaagagcccccctctccgccttggcctcggctcgcgcacctgcctgcctcactgcctgcctacctacctgcgttgttgccttcttcgcctcctccccctgtggccgcaccgcagcagctgcggcggcggcagaggtgaacagcttcccgcggccttgtcctgtccggactccggggccgggaccggcagcgcagcgggctcgcaggatctcccgagtcccgacccccatgcgtcggcctcggtgacagatggcgcggagttctgcaatgcggaggagcggttttgccgggttctcgtgcttcgctgggcaggctcgtcgtctccttccgtttcgattccagggtttgctagcggagtccatccaactataatgaattaggcacccagtacgtaatggcaacggaagtcaaacaaacttatttttcatggtcacaaggagagtcaactgaacgggatggtcctcaaggagtatctgtatcccagacacttgatcatggttccatttccttcggaagatttgaattagagtcactatcatgggagaagtggtccgtatttactaatgacaggcgcaatgaagaatttggaaaattcaatggtttagtcgctcagaaaaaggcttattttgaagagtattacaagaagatcagggaactaaaggcttcacagcagcaaaaccagcaaactgaacttattctggaatacagcggtgatggtagtgactccagccaaacagcagaagaggagcagggtgctgatcttgaaacccccactggatctggagcagctgttgatgtttatgtggaagaagttccatgtgaaaccacatcggagcatggactgcagtgctataatgaccaaggaaacgaaaattttgatacagaattttcctcatctaatctttcttcgtcaggtggatttctgcagcaaactgaccatgatgttagagttcctgttcgtggtgacaattctaccagtaaactgtatgcggcgccgcagaatgctagttctgttcacgatggtactagaaaaacatatgaagctgcaaggactcctagaaggattattgagaaagattccaggcttagacacagccccaagataataccaaaatccgtcaaagccctttcacaaagtgctatggattacacatttactagtgagaggcctggttcagtgaagcccaatacaactacgagccagaaggctaagccagtgcaaagaccaaatgcagcaagccagaagatgtctgcatctacagaaaggagcaagcttacaggtctcagaagaccttcctcagcaggtgcgcaacggccttctactggagagcgacatgctattgccagggagaattcacaattacctgtggtcgtttccaccccacggcgaccttccactgctgagagacgcccagtcacccgagatcgtgcagagaagcaagccaatgtcaccacaccacgccgaccttctacttctgaaagactccccatcaaaagagagactgcagcaaagcataatgatatttccgctgtacgtcgaccctctacaggagagagacgtgcttttactagagatggtgttctgagaactgatgtgaagacacctagtaaggcaagagcaactgtggctcatccgatgagtgaaatgactacagtgggcaatacgagaaaggctatcactccaaatgcagctagaagtagcaagctggaaacaaaaagcaataactacagactgaagggaccttcagcattggatagccactctactaggtcaaacagaatggacttgcaagtgtctggcaagcagaaatcgagttctgttaaccttcctccaaggaaaattttcagttctactgctggagaaccatcagttggaaccatttctaggtcaaaaaagaaagagggcgttcaggcgacagtgcaatctcgagcatccacttcaaagagaacaactcctttgcagactggaaacttaaaggcgaggggtccaaatccaccagcaccgccacctccaccacgtcggccatcacgaacgactaccaaaccaagtgccggtgcctcatcgattggcggaagaaagccaaaggcttcagcaccacaatggcactgatgcagtggaggagagcggaaagcgcttcagtacagtggcccgcagagcatggtggatctgagggacgtcagtaccggccttcctttgtatggtgtgtactcccgttggcccgtgcagagcagctcccaagtgtagtctcagtacaacccccgttggcccgtcccttcctttgcagagcagcagtctagtgtatgtagtcgcgcgtatcatatcccaccggtgcctagtttcgtcgtccacaaggaacttagaacattgtaaatacctggaaataaatttgcagcttagctctaaagtaaatccagcccaagatttgtgaacatccatgtatgtcattagcaatggaagcccttgtttatcagcttgttattggtgtgttctttttaagggttattgtcagatttgattcttcg

SEQ ID NO: 112256 - DNA, 2603 bp, Zea Mays
cgcgagcacgctacgaatcgccgtggtaaatgctcggccgcggcggccattagaaggcgctaatcacgcccaggattaaagagcccccctctccgccttggcctcggctcgcgcacctgcctgcctcactgcctgcctacctacctgcgttgttgccttcttcgcctcctccccctgtggccgcaccgcagcagctgcggcggcggcagaggtgaacagcttcccgcggccttgtcctgtccggactccggggccgggaccggcagcgcagcgggctcgcaggatctcccgagtcccgacccccatgcgtcggcctcggtgacagcgccgcagcttttcaaaagtgctcctctttgggcccttgggggtctgtaactgctgggtggcctctcttttcttgcctccccgctttcttttccgtgggtttgctagcggagtccatccaactataatgaattaggcacccagtacgtaatggcaacggaagtcaaacaaacttatttttcatggtcacaaggagagtcaactgaacgggatggtcctcaaggagtatctgtatcccagacacttgatcatggttccatttccttcggaagatttgaattagagtcactatcatgggagaagtggtccgtatttactaatgacaggcgcaatgaagaatttggaaaattcaatggtttagtcgctcagaaaaaggcttattttgaagagtattacaagaagatcagggaactaaaggcttcacagcagcaaaaccagcaaactgaacttattctggaatacagcggtgatggtagtgactccagccaaacagcagaagaggagcagggtgctgatcttgaaacccccactggatctggagcagctgttgatgtttatgtggaagaagttccatgtgaaaccacatcggagcatggactgcagtgctataatgaccaaggaaacgaaaattttgatacagaattttcctcatctaatctttcttcgtcaggtggatttctgcagcaaactgaccatgatgttagagttcctgttcgtggtgacaattctaccagtaaactgtatgcggcgccgcagaatgctagttctgttcacgatggtactagaaaaacatatgaagctgcaaggactcctagaaggattattgagaaagattccaggcttagacacagccccaagataataccaaaatccgtcaaagccctttcacaaagtgctatggattacacatttactagtgagaggcctggttcagtgaagcccaatacaactacgagccagaaggctaagccagtgcaaagaccaaatgcagcaagccagaagatgtctgcatctacagaaaggagcaagcttacaggtctcagaagaccttcctcagcaggtgcgcaacggccttctactggagagcgacatgctattgccagggagaattcacaattacctgtggtcgtttccaccccacggcgaccttccactgctgagagacgcccagtcacccgagatcgtgcagagaagcaagccaatgtcaccacaccacgccgaccttctacttctgaaagactccccatcaaaagagagactgcagcaaagcataatgatatttccgctgtacgtcgaccctctacaggagagagacgtgcttttactagagatggtgttctgagaactgatgtgaagacacctagtaaggcaagagcaactgtggctcatccgatgagtgaaatgactacagtgggcaatacgagaaaggctatcactccaaatgcagctagaagtagcaagctggaaacaaaaagcaataactacagactgaagggaccttcagcattggatagccactctactaggtcaaacagaatggacttgcaagtgtctggcaagcagaaatcgagttctgttaaccttcctccaaggaaaattttcagttctactgctggagaaccatcagttggaaccatttctaggtcaaaaaagaaagagggcgttcaggcgacagtgcaatctcgagcatccacttcaaagagaacaactcctttgcagactggaaacttaaaggcgaggggtccaaatccaccagcaccgccacctccaccacgtcggccatcacgaacgactaccaaaccaagtgccggtgcctcatcgattggcggaagaaagccaaaggcttcagcaccacaatggcactgatgcagtggaggagagcggaaagcgcttcagtacagtggcccgcagagcatggtggatctgagggacgtcagtaccggccttcctttgtatggtgtgtactcccgttggcccgtgcagagcagctcccaagtgtagtctcagtacaacccccgttggcccgtcccttcctttgcagagcagcagtctagtgtatgtagtcgcgcgtatcatatcccaccggtgcctagtttcgtcgtccacaaggaacttagaacattgtaaatacctggaaataaatttgcagcttagctctaaagtaaatccagcccaagatttgtgaacatccatgtatgtcattagcaatggaagcccttgtttatcagcttgttattggtgtgttctttttaagggttattgtcagatttgattcttcg

SEQ ID NO: 112257 - DNA, 2733 bp, Zea Mays
cgcgagcacgctacgaatcgccgtggtaaatgctcggccgcggcggccattagaaggcgctaatcacgcccaggattaaagagcccccctctccgccttggcctcggctcgcgcacctgcctgcctcactgcctgcctacctacctgcgttgttgccttcttcgcctcctccccctgtggccgcaccgcagcagctgcggcggcggcagaggtgaacagcttcccgcggccttgtcctgtccggactccggggccgggaccggcagcgcagcgggctcgcaggatctcccgagtcccgacccccatgcgtcggcctcggtgacaggtaacggaggatttcacccccccctgctcttgtatccggttcctggtgctgcttgctacctactagggcgcgctgctcggggttggaggaatttggcggctgcttgtgtgacgaggagcgggcgtgtttggtagatggcgcggagttctgcaatgcggaggagcggttttgccgggttctcgtgcttcgctgggcaggctcgtcgtctccttccgtttcgattccagggtttgctagcggagtccatccaactataatgaattaggcacccagtacgtaatggcaacggaagtcaaacaaacttatttttcatggtcacaaggagagtcaactgaacgggatggtcctcaaggagtatctgtatcccagacacttgatcatggttccatttccttcggaagatttgaattagagtcactatcatgggagaagtggtccgtatttactaatgacaggcgcaatgaagaatttggaaaattcaatggtttagtcgctcagaaaaaggcttattttgaagagtattacaagaagatcagggaactaaaggcttcacagcagcaaaaccagcaaactgaacttattctggaatacagcggtgatggtagtgactccagccaaacagcagaagaggagcagggtgctgatcttgaaacccccactggatctggagcagctgttgatgtttatgtggaagaagttccatgtgaaaccacatcggagcatggactgcagtgctataatgaccaaggaaacgaaaattttgatacagaattttcctcatctaatctttcttcgtcaggtggatttctgcagcaaactgaccatgatgttagagttcctgttcgtggtgacaattctaccagtaaactgtatgcggcgccgcagaatgctagttctgttcacgatggtactagaaaaacatatgaagctgcaaggactcctagaaggattattgagaaagattccaggcttagacacagccccaagataataccaaaatccgtcaaagccctttcacaaagtgctatggattacacatttactagtgagaggcctggttcagtgaagcccaatacaactacgagccagaaggctaagccagtgcaaagaccaaatgcagcaagccagaagatgtctgcatctacagaaaggagcaagcttacaggtctcagaagaccttcctcagcaggtgcgcaacggccttctactggagagcgacatgctattgccagggagaattcacaattacctgtggtcgtttccaccccacggcgaccttccactgctgagagacgcccagtcacccgagatcgtgcagagaagcaagccaatgtcaccacaccacgccgaccttctacttctgaaagactccccatcaaaagagagactgcagcaaagcataatgatatttccgctgtacgtcgaccctctacaggagagagacgtgcttttactagagatggtgttctgagaactgatgtgaagacacctagtaaggcaagagcaactgtggctcatccgatgagtgaaatgactacagtgggcaatacgagaaaggctatcactccaaatgcagctagaagtagcaagctggaaacaaaaagcaataactacagactgaagggaccttcagcattggatagccactctactaggtcaaacagaatggacttgcaagtgtctggcaagcagaaatcgagttctgttaaccttcctccaaggaaaattttcagttctactgctggagaaccatcagttggaaccatttctaggtcaaaaaagaaagagggcgttcaggcgacagtgcaatctcgagcatccacttcaaagagaacaactcctttgcagactggaaacttaaaggcgaggggtccaaatccaccagcaccgccacctccaccacgtcggccatcacgaacgactaccaaaccaagtgccggtgcctcatcgattggcggaagaaagccaaaggcttcagcaccacaatggcactgatgcagtggaggagagcggaaagcgcttcagtacagtggcccgcagagcatggtggatctgagggacgtcagtaccggccttcctttgtatggtgtgtactcccgttggcccgtgcagagcagctcccaagtgtagtctcagtacaacccccgttggcccgtcccttcctttgcagagcagcagtctagtgtatgtagtcgcgcgtatcatatcccaccggtgcctagtttcgtcgtccacaaggaacttagaacattgtaaatacctggaaataaatttgcagcttagctctaaagtaaatccagcccaagatttgtgaacatccatgtatgtcattagcaatggaagcccttgtttatcagcttgttattggtgtgttctttttaagggttattgtcagatttgattcttcg

SEQ ID NO: 112258 - DNA, 1499 bp, Zea Mays
  misc_feature (1320)..(1419): n is a, c, g, or t
gtcgctagggctccattcccctgcgcatccgccgccgccggatcccgcctcgcctccgccgcagcttcggcatcagaatcaccggattcggtggtgtttctcggctgcctcagcttccgccggcggaaggccccaggcggcgctccctgcagccctccggccttcactgagtcctctagaagccaaacatcgttgatacttagaaggcagctgagtatatggtatttgtgggccattgtgctgtccatgcgagcggagagcatgcgtggcacctgtgcttcgggtgatgcccctgaccagagtagctgccgatgcattcggtgtgctgacaatcgcactgtttgctctgtttgctgctctgggcctcttctgcatcttccagtcggtctacttcaggtgtcggattcggagaggaccctccttccttccgcttggttattttaacggcccatgggtgactcgcattgctctgattctgatcacaatttggtggggagtaggtgagatagtgagattgagcttcttgaagaaaaagttgttctccagcttaacatggcagaggaacatatgtgatgtgtacatactttccaacctagggtttgcagagccagggatcttctttgcgtttgcttttctgctccatggctcgttacaaaagagggagctgggcacattaaaccaaagatggaattggaagaccatggcctacttgttggttttctgtattccagtgttctcggtgcaggcaatcctagtgtttgttgggcccaggtttgttagagaggagaaccatgatctcgggagaagaaagattgctaaatacttcatacggacctacacgccggttggagataccagtgtttgcacttacccattgtttggcaccctttttcttggacttgtagatgctttcctgatgagctatgtatcatatgttggattacgggtgctgtccttggttattaacaagtcactgcgaaggagagtttatctactgatgctgtctgtgctgtgcttccttcctatcagggtgcttctcctcgggttttcggtgctgctcaagccaggacatgttgcctttgagggtattatcttcctgtcattcttgatgatgctgtcctgcacgactgttgggatactcttgctggtttactaccctgtagctgattcattggccctccgagatataggccagagggacatagcagaaatggtgccttatgatgattactactatgaaggcacatcgcttgtggccaaccagagtttccgagaaatcgagcggaattctgacacttcaacgaagccgggatccatatnnnnnnnnnnnnnnnnnnnnnnnnnnnnnnnnnnnnnnnnnnnnnnnnnnnnnnnnnnnnnnnnnnnnnnnnnnnnnnnnnnnnnnnnnnnnnnnnnnnntttttcccccaaactagcttaactcatcattagcccagcactctaattccattctatcaaagtagcaagtagctagatct

SEQ ID NO: 112259 - DNA, 743 bp, Zea Mays
ctcgtttaaacgggcgaactcaagattgcaacagggtcgtccgccgccaccaattgctagcgcaatcctagccctagcccagcgccccctccggccctccctgcttcgtgcttggtagcgatggcgtcgttttctgaagcgcccccggggaacccaactgctggcgagaagatcttcaagaccaagtgcgcgcagtgccacaccgtcgacaagggcgccggccacaagcaaggtcctaatttgaatggtctgtttgggaggcagtctggtacaacacctggctactcttactcttcggctaacaagaacatggctgtgatttgggaggagaacactttgtatgactacttgcttaatcccaagaagtacattcctggaaccaagatggtattccctggactgaaaaagccacaggaacgtgctgatctcattgcatacctgaagaatgccactgtctgacgaggatgctgctgtggctctaaagatgaagagcagcgattctcttttttgcagttaaaataatgacacgaatttactttaatttgacagactggataatcaagaaagctaagaactccaggtagttctgtaacggttttgtctattgctgggggtaaacaccacccttgaagagcttttgattagtggttgaaatgtgacatcaccataatacgtttgacctgacgagcatttaaacacacgtttgggaagcttttgattagtgttttaatgttcgtttttca

SEQ ID NO: 112260 - DNA, 1319 bp, Zea Mays
gctcctctccttcctcctctctcttctccagcgccttcccctgctccctcttatcgccttcgcgctctaaaatggcctcacactccgccacacagtaaacaaaacgacgggcccactccccgacggctgacgccctcccacggccccttccatgaggcagctgcacctctcgccgcagctctccccctccccggtcctctcctctcacttctcgccgccgccggcggaggccttgtcctggcggcggcggctgcaccggggacgggccttccaaccgccgctctcctcgctgcgggatcccaacaaggccacgctccgcaaggcctcgtccaacgtccccttccgcctcggcggtggcgggagcggcagccccaaggaccgccgccccgccgacgacgacaaggaggaggaggaggccgagggcgagggcggcgcaggagcactcacggggacgctggtcgcaggagcgctactggttggtttcgtaggggggtttggggcggccggatacgtgtacaaggaccagatcaacactttcctcacgcagttctcagggttcattgacggctatggtccagccggatatgctctgttcgtacttgtatatgcaggattggaggttctcgctattcccgcaatacctttaaccatgtcagctggtctattatttggtagtgtgaccggtacaattattgtttcaatcagtggaacactagctgcagcggtggccttccttattgctagatacttcgccagagagagaattcttaaattggttgaaggaaataagaagtttctggcaattgataaagcaataggtgaaaatggattcaaggttgtcactttgcttcgtttgagtcccctgttacctttctcccttgggaactatctatatggcctgacttcagtgaagttcttgccatatgtcttgggcagttggttgggaatgcttccaggttcatgggcttacgtcagcgctggtgcattcgggcgagctataattcaagaggagtcggaaattggttggggaggaaatggacagctatggacattgagtgttgggttattgtttacggccatggctgccgcttatgtaacaaggctcgcaaaggatgctgtaaaggagatcgatgactagaatagtaggattctctagtagaaagggccctctggagtctgatagtatactagcacatcgtacatcactggcacctttggtgcaatcaaatctaatagaaattcagagcaattttctgagtgaatttgatctcttgatgtggtgccgattctcattgatcacaaaattcctataccattaa

SEQ ID NO: 112261 - DNA, 665 bp, Zea Mays
aataatacttgagatgttcacatatcccaatccagacatcttactccacttcaagacattgctttgcaatttgcttcctgctcctattactgtttccatctttggcatatcagttcatactcatttcatgacaatatcataatctggtgttgataatgaagtatccacatagctctgttgaatatagtcactctgtccgtgtgaggagtgatgagaaaatgcaactggaactggaaagtaatatctatagattttcctatttgcgtagcagcacagcttttgtatgaattttgtagggggggaaacaatgtatgactggctcgaatggagtaatgatttttttttacagcaagaggagtcggaaattggttggggaggaaatggacagctatggacattgagtgttgggttattgtttacggccatggctgccgcttatgtaacaaggctcgcaaaggatgctgtaaaggagatcgatgactagaatagtaggattctctagtagaaagggccctctggagtctgatagtatactagcacatcgtacatcactggcacctttggtgcaatcaaatctaatagaaattcagagcaattttctgagtgaatttgatctcttgatgtggtgccgattctcattgatcacaaaattcctataccattaa

SEQ ID NO: 112262 - DNA, 1426 bp, Zea Mays
aattccctccgaacgctgaactccaagcaaccgcaaaataaccaccgtttccttgcagcccgcgaatcttcgtctcccttccccacccgacacggcacaccactctccctccctccttcccttcccctcccctcccttttttccctccgaatcccgctcgcgaaccctagccagccttccgcgagatggacgacgactgggagctcctcctcgcgtcccccaaggcggcctcggcggccgagccgtacgccggaggcggggaggacgacgccggcgccatcaagcacgactacttcgacctcggctccgacgccaagtacccccggagggcgtcgctgtctacgggggacgaggaggagggcgcggaggaggggcttctcagggcgtcggacaacgcgagctgggtggagccggaccctgacgaccttctcttccccggccgcgaccgcgcggcgctatggtcggactcgtcctccgacggggagaggcccgaggtcgaggccaccgatcccgtggggcgggccagggaggagggcggggtgatggcggccgcggctgatggggtggagggggccgtggcgaagggaggagaacacgtccggtggtggaagctgccgctcgacgcgctgcgtgtttgggcgatgcgcgcggcgaggagcgcctgttcggtgccgttcgccgtcgcgctgctcggattcgctgtgctcgggcgccggctgtacaggatgcgccgccagagcaaagccgccgcgcgcgtccgcctcgtattcgacgaaaagaaggcctcccaattcaacggccaatcgtcacgtctgaatgaatccacgacgatgatgcgccgaactcctttcataaaacctatgcttcctgccaatggagtgactccatggcctgtgctggggcacctgtgagatgtgtgatcagtgacgtgatagagctaataatacagctgccccaagccctgcagagacgctcacacttgctacaggccggcatattatgcaatgcccagcagcagatgtactggctgcttgtaattcgaaaccacgcacttgtggaagaccttgcaagcttccgttcatgcagaatgatatttaggcctgatctagcttatgcttcttttgtgtatagccacccatgtttatatttctattttctgaatccttgtatcatcgacttatgtgctggagatgtaaacgattgagtactgagtacccaactatctatatgtagtgtgatgtatcatgtatatgacgattacccttaggccctgttcggttgttccggattggagccccggattaattcttagccggattacttctctaatttatatagattttgatgagctgaaataaatcctggctcattccggtacaaccgaacgggcccttacccataaatcaatacacgtggaagttagatt

SEQ ID NO: 112263 - DNA, 1424 bp, Zea Mays
aattccctccgaacgctgaactccaagcaaccgcaaaataaccaccgtttccttgcagcccgcgaatcttcgtctcccttccccacccgacacggcacaccactctccctccctccttcccttcccctcccctcccttttttccctccgaatcccgctcgcgaaccctagccagccttccgcgagatggacgacgactgggagctcctcctcgcgtcccccaaggcggcctcggcggccgagccgtacgccggaggcggggaggacgacgccggcgccatcaagcacgactacttcgacctcggctccgacgccaagtacccccggagggcgtcgctgtctacgggggacgaggaggagggcgcggaggaggggcttctcagggcgtcggacaacgcgagctgggtggagccggaccctgacgaccttctcttccccggccgcgaccgcgcggcgctatggtcggactcgtcctccgacggggagaggcccgaggtcgaggccaccgatcccgtggggcgggccagggaggagggcggggtgatggcggccgcggctgatggggtggagggggccgtggcgaagggaggagaacacgtccggtggtggaagctgccgctcgacgcgctgcgtgtttgggcgatgcgcgcggcgaggagcgcctgttcggtgccgttcgccgtcgcgctgctcggattcgctgtgctcgggcgccggctgtacaggatgcgccgccagagcaaagccgccgcgcgcgtccgcctcgtattcgacgaaaaggcctcccaattcaacggccaatcgtcacgtctgaatgaatccacgacgatgatgcgccgaactcctttcataaaacctatgcttcctgccaatggagtgactccatggcctgtgctggggcacctgtgagatgtgtgatcagtgacgtgatagagctaataatacagctgccccaagccctgcagagacgctcacacttgctacaggccggcatattatgcaatgcccagcagcagatgtactggctgcttgtaattcgaaaccacgcacttgtggaagaccttgcaagcttccgttcatgcagaatgatatttaggcctgatctagcttatgcttcttttgtgtatagccacccatgtttatatttctattttctgaatccttgtatcatcgacttatgtgctggagatgtaaacgattgagtactgagtacccaactatctatatgtagtgtgatgtatcatgtatatgacgattacccttaggccctgttcggttgttccggattggagccccggattaattcttagccggattacttctctaatttatatagattttgatgagctgaaataaatcctggctcattccggtacaaccgaacgggcccttacccataaatcaatacacgtggaagttagatta

SEQ ID NO: 112264 - DNA, 2366 bp, Zea Mays
gtggctgttagaccatacaggtatccacaactgcagaaagatgaattggaacgacagtgcacaactatgctcacacaagggattattcgacccagcacatctgcattttctgctcctgtccttttggtaagaaaagcagacaattcttggcgcttttgtatagattatagagctttgaatgactgcacaacaaaagataaatacccaatacccgtggttgatgaactccatggggcacactacttcaccaaattggacctccgctcggggtatcatcaagtacgggtacatcccgaggatgtggagaaaacagcttttctactcatcatggtcacttcgaatttctggttatgccatttggactgtccaatgctccctcaacatttcaaagcttgatgaatgaagtcctagggccattcctgtggcggtttgtgctcgtattttttgatgatatactgatttttagtactacttggaccgagcatttacgccatgttgcagcagtcttggacaccctccggagcaatatcctatttgtcaaacgatccaaatgcatatttggggctagctccattgcatatggacatgtaatatcagcacaaggagtggccagggatccagataaggtagaagcaatcattacctggccgcagccactctccgtttgagggttgcgtggatttctgggtctcgcagggtactacaggaaatttatacataacttcggagtcatagcagcaccccttacacagcttttgcgcaaagaaggcttcaaatggactgaagcagccgagtccacctttgcagccctcaaaacaacattaacagaagcacctgtactccagctaccatcattcaccaaagacttcatggttgattgtgatgcatccagcacaggctttggggcagtccttcatcaaggaacaggagccattgcattcttcagtcgtccttttgcagcaagacaccacaaatgagcagcatatgaaagagagcttatgcaggacggtctcattctccatgtccgacgcatttacgtgccaacatcatcagattgtttgacggcgctgctgcaaacagtccataatgcaggccatgaagggattcagaaaacacttactagactaagggctgatttctatagcccacgggacaaagctcgagttcgagactttgttaagtcctgtacaacatgtcaacgcaacaaaacagagcatctgcacccagcaggcctcttacaaccattggacattccctcacaggtgtgggcagatatctcaatggactttgttgaaggattgccacgagttcatggaaaatctatgatcctgacagtagtggatcgattctccaaatacgcccatttcattgcactcagtcacccctacatcgcagcttctgttgccaggatcttctttgcggaaattgttcgtcttcatggcattccctcatctattgtgagtgatcgggacttggtcttcactagccatctatggaaggacttattcaagctgactggcagcaaactccggttaagcactgcgttccaccctcaaatagatggtcaatcggaagtcgtcaatcgcacaattgctatgtacttgcgatgcatcacaggagatcgacctcgttcctggctggactggcttccatggtcggaatattgctatagtacatccttccactcagcgctgcagactacaccattcaaattggtatacggacgtgagcctccggcactggtaccataccaacagggcacgacgcaatcccaaaccgtggaagacctgctacaagaccgagacaatttcctggcagaggtgcgggaccgtcttcttcaagcacagcagcatgccaagcgttggtatgacaaccatcaccgagaagtgacttttgaggtaggagactgggtctggcttcgactcctacataggccaatgcgctccctggttgacaaagcacacagcaagctggcaccaaagtatgcaggtcctttccaagttctggaacgagtcgggttagtagcctacagacttcagctcccagccggagctcgtttacatgatgtttttcatgtgggactcttaaaggcatttcacggcactccgccaacagagattccacaattgcccccaacagcacaggggcacttattgccagtaccagacaaggtcctacaggccagtcttcggcgaggcatttggcatgttatcgtccagtggggaggcatgactaccgagcaggctacatgggaaccactgcagaagttcaaggaccagtacccagatcatcagctcgaggacgagttgttcttgaaggcggggagagatgttatggtcgggtagacatacaagagaagggataag

SEQ ID NO: 112265 - DNA, 459 bp, Zea Mays
atgaacattgaccaagatgaatgtgaccactcccggcaagttgccatgacaaggattaatgaagcagaagtcatcgatctaaccagtgatgacgaggaggatcctcgcacagtgcagcataagccagaaggcaaggtcatgcatgatccaactccatgggccatggatgggattcttcagccggagcagcgacagccagctcatgcagccatgaatggaattgtgcccccagagcagcacaagccagcacgtgcagcaacgaacggcgtgtcaccttggacgctccaatggcactacatagaccctcaaggagacacccgagggccattctcgctggtgcacctgttgcattggaaacgggggggcttcttcgacgagggcttccgagtgtggaggacggggcagacttctgagcaggctatcttgcttagagatgccttgttgcatctgcatctgtag

SEQ ID NO: 112266 - DNA, 954 bp, Zea Mays
atgcttcgccacccccacctcccctcaggacatgatgggcggtgtcgtctagaacggcttgccccagtacatgaggatgtcctgcagcagcgggtcgccgccggcgtggccgacgacggggtcgagcatggagcccgcggggttcacggggtcggaggcgaaggtccgctcccactcgctgatcttgggctggctctgcacctcccggtcgcacgccagctgctccggggacagcacctgctccgagcagctggagtagtccgcgtgcagccgcggcatcgagtccgacggccggtcgtagtacgccgccagctccgggaacgccgggggcagcccgcccgccgccgccacgaacggcttctgctccggcggggagctcaccgccgccgtggcgaacacaggcttgtggtcgccgccggccgccggcgccgccgccttctccagcccgccgcccttcttgttgtagatgcggcacaggacccagtcatccaacctgaggctgttcttcttgcgcgccgagcggtcgacgtcggcgaggcggtactcgtgcatgatccagttggtcttctcgcccttgggcgccttgccggcgtagaagacgagcgccttcttgatggccagcggcttgggcgtgcccacgggcttgtcagcgccggtggccttccagtacccagccccggcggcgcggttgggcctggacccgttcgggtacttgcggtcccgcggggagaagaagtaccactccttctcgccgtacagcgccatccttgggagctgccatgggtcgaacttgtagaggtcgatctcggcgatgatggggacggcgatgggcaggccggcgcagcggcggcagaggtagtgcatcaccagctcctcgtccgtcgggtggaaccggaaccccggtggcagctgcagatccggaccggcgccgctcatcgtgttcctccctgctga

SEQ ID NO: 112267 - DNA, 546 bp, Zea Mays
tttttttttggattagatggtgttggaaggtagttgagattaacgatttggtctctcgaacgaatccaccattttctatgcacatgttatgtattagtaatatataatgatagagagccgacagtctgtctttttcacacactacattttagggttttctgtgaggctgtgaaaaaatcctttatgtgaggaaaaaatatttcatgagtaagcatgccatgtcaactaaatcgagtggatattgtgaattgtgaactttgagtctgtgaacttgtgatctttatgaacttgttatactgtgaacttgttatatcgtgaacttgtgatctttgtaaactttttatattataaatttgtgatccttgtgaacttgttatattgtgaacttgttatatcatgaattgtgaacttgtggtatttgtgatattttgtcaattttgttttattgtgaagtttgatatgtttaccgatcgtattttagatttcgaccgttaccggtgtattttcctcaccgaactttcatttccaatgtttccaaaataccga

SEQ ID NO: 112268 - DNA, 1350 bp, Zea Mays
atgtacactagtagtagtagcagtagggtcgtccaaaaatggggaaggcggcgcggggcccgtgggccacatgtctgccacctgatcaccacgtgggcgaaccccgcgcgggccccggcgaaagagacggccggctcgttaggtgcagggagccgccgccgccgggccgtgggagagccagcgggtgaaggcgtccagcgtgcgggtgtcggcgcggtagtggcgctgcgtgaagcgcatgaggtcggcccaggtgaagtccgggtactgccgcggcgcggcgctggccggcgggcgcaccacccggtcctcgcgcgggcacaggaagaaggccagcgattgccgctcctgccgccggttcaccaccgcgcggtgcaggcagctcttgtaccgcccgttggacagcgccatgaaggtgtcgccgatgttgatgaccatggcgcctgggacgggccggacggggcgccactcgccgtccaccaggacctccagcccgccgacgtcgtcctgcaggaggatggtcagcgccgtggggtcgcagtgcgggcccgtgcccagcgtgcgctccggcaccgggcacggcgggtagtagttgcaccgcatgatggagcggctgtcctcgaagaactcccggtagtagccgcgctccacgcccaggctcagctccagcagctccatgatcgtcagcgacagctccttcatctcctcgcagtacctctggtacacccgccccactggctcgaaatcttggccgagggtgccggtgaagtagtccacgacgacgggcgccgcggcgccgtcgtggaagccgaaggacagggtctccttccaggggagcttggacgcgaaccggtcggcgtgcgcgctcgtgtacccggacacggtgccggggacgcgccgggcccgctgcttctcagccagcggcagccggaagaagtcgctggcgccgtccagcgcggcgcgccccagcgccgcgtccacgccgtgcccgcacacctggaagaacccgtgcgtcgcgcacgccgccgccacttgcgccgcggcgcggcggagccccgcgccgtcgccattgcgcagcacgcccacgtccaccaccggcacctccagctccgcggccgaggtcggccgcgcctcttcgtgcggccacaggaatggctccgggatcttgggctcccggcgcaggtcgaacacagccgcggccttgttagccgccgcgtcggccctgtccttgccagcggggaggtcaatgctgggagttggggcgcggagggggagcggtggggtcgggctggcgtccatggatgtggctgtgcgctgctgctaggcagagctggctcttgccgttcttag

SEQ ID NO: 112269 - DNA, 579 bp, Zea Mays
atggcagagaacacaaaatccgctcgctcacaatctccatgcctcttactttctggtgctcttagtcttagccaccttcacctcctcatcgcgcttcacctttttcgcggccttaagcagcaagttcggtccatggaactcgccactcttcaggatgtcttcatcgtaatccttcctgtggagcatcagtatcctcttctccttctccctccgctccttgcagggttcgcagtcccaatgccccttgggcacctttcttcttggaggactgaggcagtagagatgatagccctgatcgcagcagtcacacaggatgatctggtcatcgtccgtgtcgcacaggcagacacggcagaggcaagatggacagtaccagcgctggctgcccatctgcacatcacttgcaatctgctcggtagtcaggcaactaatgtggtagtacttgtacaggcaaagatagtggtcacagatcaggaacctcttgtccacctcttcaggtcctccacacaccttgcagcagatcaacatagcagtacgggacagctccggaagttcagaggggtccatacttcagatgcc

SEQ ID NO: 112270 - DNA, 1210 bp, Zea Mays
atacaggccattttgccgtttccggcgcgcgcctctgaacaaacccgaaagcccccctcatcgccattcctcttcctgccatggcgatcctctttactcctcccctcccaccaccaccgcccctcccaactacaccacaccgcaccggcaccaccaccaaccgagcggctccaggctcctgctcaggaaggggagaagaggcgagccttccttgggaagtcgcaggaggagagaaggggaacaaagatggggcgcggcaagatcgagatcaagcggatcgagaactccaccaaccgccaggtgaccttctccaagcgccgcaacgggatcctcaagaaggcgcgggagatcagcgtgctctgcgacgccgaggtcggcgtcgtcgtcttctccagcgccggcaagctttacgactactgctccccgaagacatcgctatcaaaaatcctggagaagtaccagaccaactctggaaagatactgtggggtgagaagcacaagagccttagtgcagagattgaccgtataaagaaagagaacgacaccatgcagatcgagctcaggcacctgaaaggtgaagatctaaactcgctgcaacccaaagacctgatcatgatcgaggaggcacttgataatggactgacgaacctgaatgagaaactgatggagcactgggaaaggcgtgtgacaaacactaagatgatggaagacgagaacaaattgctggccttcaaactccaccagcaagatatcgcgctgagcggcagcatgagagagcttgagctgggttaccatcctgaccgggacctggcggcccagatgccaatcaccttccgcgtgcagcccagccatcccaacttgcaggagaacaattagactgctggatgccctcgttccactcgccgaggatttcacccagccaccaccgctggcttgtatgccctcgtgcgctggcaactgtatctttatctttccggtatgtttggatgaacgtataatgtgtgtcagtgtcggtcgcatgacgtgccgatgtcgtgcatctctctctctctctgccagagcagcggaactctgcaccgtgagtaacttaattggtaccgtatgatctgccggacagtgaatagtttatgtgagtgggtcaaaccataatgtgtagtatttgtgtcgaactgtcaatggcacgtatttggattttcactacacgttacat

SEQ ID NO: 112271 - DNA, 1926 bp, Zea Mays
cacaccactgaactgaactcccagctgtaatctatctccttgcagtaagcaagggcagcgagagtacgacgacgacggcccagcaacttcctcgaacagagaaaaaaaaaagaacagcacctaacctagggaagattgacatggcggagaacaacgtcgtggccacgtactactacccgacggcagcgccggcggccatggaggtctgcggcgcggagctcggccagggcaagcccgacaagtgcttcgacgacgatggccgccccaagcgcaatgggacgatgtggacggcgagcgcgcacatcatcacggcggtgatcggctccggggtgctctcgctggggtgggccatcgcgcagctcggctgggtggccggacccgtcgtcatgctgctcttctcgctcgtcacctactacacctcgtcgctgctcgcagactgctaccgctccggcgaccccagcaccggcaagcggaactacacctacatggacgccgtcaacgcgaacctcagtggcatcaaggtccagatctgcgggttcctgcagtacgccaacatcgtgggcgtggccatcggctacaccatcgctgcctccattagcatgctcgcgatcaggagggccaactgcttccaccagaagggacacggcaacccctgcaagatctccagcacgccctacatgatcatcttcggcgtggcggagatcttcttctcgcagatcccggacttcgaccagatctcctggctctccatcctcgccgccgtcatgtccttcacctactcctccattgggctcggcctgggcgtcgtccaagtcatcgcgaacagaggcgtgcagggcagcctgaccggcatcaccatcggcgtggtgaccccgatggacaaggtgtggcgcagcctccaggcgttcggcgacgtcgccttcgcctactcctactccctcatcctgatcgagatccaggacaccatccgggcgccgccgccgtcggagtcgacggtgatgaagcgcgccacggtggtgagcgtggcggtcaccacgctcttctacatgctgtgcggctgcatggggtacgcggcgttcggcgacggcgcgcccgggaacctcctcacgggcttcggcttctacgagcccttctggctcctggacgtggccaacgccgccatcgtggtccacctggtcggcgcctaccaggtctactgccagccgctgttcgccttcgtggagaagtgggccgcgcagcggtggccggactcggcgtacatcaccggggaggtcgaggtcccgctcccgctcccggcgagccggcggcggtgctgcaaggtgaacctgttccgggcgacgtggcggacggcgttcgtcgtggccacgacggtcgtgtccatgctgctgcccttcttcaacgacgtggtgggcttcctgggcgcgctcggcttctggccgctcaccgtctacttccccgtcgagatgtacgtggtgcagaagaaggtgccgcggtggagctcccggtgggtgtgcctgcagatgctcagcctcggctgcctcgtcatctccatcgccgccgcagccgggtccatcgccggcatcgcgtccgacctcaaagtctaccgcccgttcaagtcctactgatcagattcacggcctacgggagacgcagcagcatgtggtatataggcatatactagcaaccatgttcgtgagttgcaactcataagtacttaaatcagactctgcatcattgctaaacgcgagtttttttaacttgtatacgcatgattcatgagtcccaattacatatgaaaaggatgcaacacaatatatattgaaatataaaagatctcgtaccgatagtcgctaaacatgggcttttttaattcgtataaatataagttatataaaatacgagagcataattttgaacgtaaaaaaa

SEQ ID NO: 112272 - DNA, 702 bp, Zea Mays
ccgtggttgccatcgccgtctccactagaggtggatctacagtgtgggcaacgtgggtcataaccccacctcagattttataatattcataataccatagaagattagagggagcaggagatctcagccgccgagcgcagcgtctgagcagcggccacccattcgttgttcacccagggagtctcaggtcttccgtcggctggcatcggccaccgttccatcgcatcgccgaccgccgccccacatcccaccgcggcaccgccccacagacaaagagatattcaaatcccttgatgatgagactattactagaagattccagcgtcttaaaactagaagaatgcacttgcctcgagtcataactacaagattaacaacttagtgattggatttttgtcggtgattttggtgccgcactgcagattaagagagaaatttcggaccggagggagtacacaattggtgaatggaaaaaatatcgtttgaattttttctcattaatatggctggaaaaaaatagatgatgagatatagatgataaaatttagaggttgctgctgctgaaggcatgaaaaatatacatgatagaatcttttaaatggtgatgtgaaagactagaaatattatcttagtggataaaattttggaaccctgctgggacagactaagcacgaccatcccaacaaatgatgcacaacatcc

SEQ ID NO: 112273 - DNA, 1848 bp, Zea Mays
ccgtggttgccatcgccgtctccactagaggtggatctacagtgtgggcaacgtgggtcataaccccacctcagattttataatattcataataccatagaagattagagggagcaggagatctcagccgccgagcgcagcgtctgagcagcggccacccattcgttgttcacccagggagtctcaggtcttccgtcggctggcatcggccaccgttccatcgcatcgccgaccgccgccccacatcccaccgcggcaccgccccacagattggatttttgtcggtgattttggtgccgcactgcagattaagagagaaatttcggaccggagggagtacacaattggtgaatggaaaaaatatcgtttgaattttttctcattaatatggctggaaaaaaatagatgatgagatatagatgataaaatttagaggttgctgctgctgaaggcatgaaaaatatacatgatagaatcttttaaatgtcttgggcagttcggctgacagaccaacctacggcctggattggagacttatccgcgacccctcctccccacttcagcttcagcgcaagccatcttcccgccacaggctcaaaagcaatcaagcgactcctcccacagtcccacttccactcccacccacccacacgcacggccgcaggcagcagcaccatgtggtcggcagcaacggcggcggcggcgcgcgcggtgtccgtgtccccagtcccggcgccttcgctcctcagcggccggcgcggcgggtcgcggggcggccgggggtcggtgtcggtgcgcagcacggtgtgggacttcgtgggcggcgacctggtgcggccggacctgggcaagtggctggacgacgtggagaagcacaaggcgctggccatctacccgccgcacgagggcggctacgagggccgctacctgaaccgcctccgttaccagggctactacttcctcgacctctccgcgcgggggctcggcgacccggagaccacgctcaccaaggtccaccccgtctgcccgcctagcctcggcaggcagccggtggcgcggtggtacttcccgccggaggtggactacaggctcagcctgctgcacccggacgccaaaggcctcgtcgtctggatcatcgaagccaaggttctgtccaaggctgagctgcagttcctggccatgctcccggacatccgccccaaagtcagggtgatcgcagaatgcggcaactggagaagctttgtttggaagccactgaagcagatcgcaggcctcgagccggacccggacgcggaggaatgatcaagcaagcaggtctagctagttgtctaccagactggctactgctactgctacactctccaattgcttctgggacatctctccctgccattcctgcagctttgcactgaatgagagaggcaattaataaagatatacatacatttttttggcacgagtgtcagaagagaaagaatgcgaaccatgtacagatttccatacatgtgaatagttcacggccgcgacgcgtttaggattctcagaacccaggcgcacagccgaacacgagagcgcaggcacacgagatcactgtcctcgtctccatcgcgttgtggatcggcgacatcattgccaccttggtcaatgagcttgcattcttccttcaccattgatgctcaggtaagctgaattaaagagcgcgctgaaaagggtccacatttcgatattcttgacgtgtgagttggacacgaaagaatggatcgcttccgcacgagtagagcgaggaagtgctttcccctcacacagaagcaacgaacataagatgaatgaattaacccaaaaaaaaaa

SEQ ID NO: 112274 - DNA, 1687 bp, Zea Mays
ccgtggttgccatcgccgtctccactagaggtggatctacagtgtgggcaacgtgggtcataaccccacctcagattttataatattcataataccatagaagattagagggagcaggagatctcagccgccgagcgcagcgtctgagcagcggccacccattcgttgttcacccagggagtctcaggtcttccgtcggctggcatcggccaccgttccatcgcatcgccgaccgccgccccacatcccaccgcggcaccgccccacagattggatttttgtcggtgattttggtgccgcactgcagattaagagagaaatttcgtcttgggcagttcggctgacagaccaacctacggcctggattggagacttatccgcgacccctcctccccacttcagcttcagcgcaagccatcttcccgccacaggctcaaaagcaatcaagcgactcctcccacagtcccacttccactcccacccacccacacgcacggccgcaggcagcagcaccatgtggtcggcagcaacggcggcggcggcgcgcgcggtgtccgtgtccccagtcccggcgccttcgctcctcagcggccggcgcggcgggtcgcggggcggccgggggtcggtgtcggtgcgcagcacggtgtgggacttcgtgggcggcgacctggtgcggccggacctgggcaagtggctggacgacgtggagaagcacaaggcgctggccatctacccgccgcacgagggcggctacgagggccgctacctgaaccgcctccgttaccagggctactacttcctcgacctctccgcgcgggggctcggcgacccggagaccacgctcaccaaggtccaccccgtctgcccgcctagcctcggcaggcagccggtggcgcggtggtacttcccgccggaggtggactacaggctcagcctgctgcacccggacgccaaaggcctcgtcgtctggatcatcgaagccaaggttctgtccaaggctgagctgcagttcctggccatgctcccggacatccgccccaaagtcagggtgatcgcagaatgcggcaactggagaagctttgtttggaagccactgaagcagatcgcaggcctcgagccggacccggacgcggaggaatgatcaagcaagcaggtctagctagttgtctaccagactggctactgctactgctacactctccaattgcttctgggacatctctccctgccattcctgcagctttgcactgaatgagagaggcaattaataaagatatacatacatttttttggcacgagtgtcagaagagaaagaatgcgaaccatgtacagatttccatacatgtgaatagttcacggccgcgacgcgtttaggattctcagaacccaggcgcacagccgaacacgagagcgcaggcacacgagatcactgtcctcgtctccatcgcgttgtggatcggcgacatcattgccaccttggtcaatgagcttgcattcttccttcaccattgatgctcaggtaagctgaattaaagagcgcgctgaaaagggtccacatttcgatattcttgacgtgtgagttggacacgaaagaatggatcgcttccgcacgagtagagcgaggaagtgctttcccctcacacagaagcaacgaacataagatgaatgaattaacccaaaaaaaaaa

SEQ ID NO: 112275 - DNA, 1750 bp, Zea Mays
ccacctcagattttataatattcataataccatagaagattagagggagcaggagatctcagccgccgagcgcagcgtctgagcagcggccacccattcgttgttcacccagggagtctcaggtcttccgtcggctggcatcggccaccgttccatcgcatcgccgaccgccgccccacatcccaccgcggcaccgccccacagacaaagagatattcaaatcccttgatgatgagactattactagaagattccagcgtcttaaaactagaagaatgcacttgcctcgagtcataactacaagattaacaacttagtgattggatttttgtcggtgattttggtgccgcactgcagattaagagagaaatttcgtcttgggcagttcggctgacagaccaacctacggcctggattggagacttatccgcgacccctcctccccacttcagcttcagcgcaagccatcttcccgccacaggctcaaaagcaatcaagcgactcctcccacagtcccacttccactcccacccacccacacgcacggccgcaggcagcagcaccatgtggtcggcagcaacggcggcggcggcgcgcgcggtgtccgtgtccccagtcccggcgccttcgctcctcagcggccggcgcggcgggtcgcggggcggccgggggtcggtgtcggtgcgcagcacggtgtgggacttcgtgggcggcgacctggtgcggccggacctgggcaagtggctggacgacgtggagaagcacaaggcgctggccatctacccgccgcacgagggcggctacgagggccgctacctgaaccgcctccgttaccagggctactacttcctcgacctctccgcgcgggggctcggcgacccggagaccacgctcaccaaggtccaccccgtctgcccgcctagcctcggcaggcagccggtggcgcggtggtacttcccgccggaggtggactacaggctcagcctgctgcacccggacgccaaaggcctcgtcgtctggatcatcgaagccaaggttctgtccaaggctgagctgcagttcctggccatgctcccggacatccgccccaaagtcagggtgatcgcagaatgcggcaactggagaagctttgtttggaagccactgaagcagatcgcaggcctcgagccggacccggacgcggaggaatgatcaagcaagcaggtctagctagttgtctaccagactggctactgctactgctacactctccaattgcttctgggacatctctccctgccattcctgcagctttgcactgaatgagagaggcaattaataaagatatacatacatttttttggcacgagtgtcagaagagaaagaatgcgaaccatgtacagatttccatacatgtgaatagttcacggccgcgacgcgtttaggattctcagaacccaggcgcacagccgaacacgagagcgcaggcacacgagatcactgtcctcgtctccatcgcgttgtggatcggcgacatcattgccaccttggtcaatgagcttgcattcttccttcaccattgatgctcaggtaagctgaattaaagagcgcgctgaaaagggtccacatttcgatattcttgacgtgtgagttggacacgaaagaatggatcgcttccgcacgagtagagcgaggaagtgctttcccctcacacagaagcaacgaacataagatgaatgaattaacccaaaaaaaaaacgcatatcagaaa

SEQ ID NO: 112276 - DNA, 2611 bp, Zea Mays
ccgccggcgacctcgaggtgccccccgcgcctgcagcaggatcgaatgtacgctgcaatctcccgaatatactccgcggcgcgtaggcgcctcgaggccttcataaccgcgctcccgggcagtcacgatggttgcggcggcagcaggaggggctcgcatcggcatcgccagcggcggcggtggagcagccctttcaggaccccgctgggctcgcctatgtcgatgtcctccatcatcggcgccgcggacgagcaggccacccccgcgtcgtcgggggcggcctacgccactccccagggcgagacagcgacaccgtccgtgattctggcgtcgccgctgccaccgccacagatggtcgtggtggcgctggacgccacgcgggaccaccgggatgacgagatcaaaacggcgttcaggaatttggtcgagcgaggagacatactccgcgcaagggattcgctgctcgtgctgggcgtgcttcactccatcacccatccaagtgaggaccatctctggaatatcacaacattgggctaccaaaccaaaccgtttactgaatcttttgtcgggacaagcgacagatacctacttgatcaggtggcgaacatagctgaatcctacaaaaataagctccaacaagttatagagatgctccacaatgttaagattactgtgaccctcaagataaccccgggagcacctgcaaaggttttcattatccatgaagtaaattccagcaaagcttcttgggttgtcctagataggcacttccggagagatttcaagcacttagaaaagcacatagcttgcaaagttgcgacatttcaggatcacttacaagtgcaatccttgaggtcaatacgaacaaatccatcaaacaaaagcacatatgaattggaggacctgcaacgttttgcggtcacgatggatctgagttctgaaacagtaaatggtgacactcgcaaggtatcaatcaggtcgtcgcctgtaagctaccttgcctctctgaacaagcacgagatccatgagacctccagcgtggctgcatgcagcatgccatacttcagtggcatgtctctcacaattgacgatatggaatccctacctaatgaaaaatacgaagataaaatgagctcccaatatgattcatcagaaaggccagttttgtgcattggctgcggtctaaaatcagttctgtacataaaggaatccatgaaattcccattctcggagattcaaactgcaacatcggatttttcaagtgaaaatttgctgggtgagggtggatttgggcatgtgtacaagggccagctcaaggatggtcaggtcattgcagccaaggtgcacaaagaagctagctcacagggttatactgaattcttctcggaagtgcaagttctcagttttgctcgacaccgaaatattgtcatgctgcttgggtactgctgcaaagaaagctataacatcttggtgtatgagtatatatgcaacaattctctcgagtggcatttatttgacaagtcggcaagcttattagagtggcacaagaggtatgctattgctattggtatagcaaaagggctgcgatttctacacgaggaatgtcgtgctggtccaatcattcatcgcgatttgcgtccaagcaatgtactcttgacgcatgactttgttcctatgcttggtgactttggtcttgcaaaatggaaggctggcggtgacaacatccagacaaggattctgggtcaaacaggatacttggcgcctgagtatgctcagtatggcatggtttctgtcagaacggatgtctacgcctttgggattgttcttttccagctgatatctggtcgaaaggtgcttgatgaccatggagggcagtgcacacatatattgcaatgggcagagccattggtcgaaagccttgcacttcacgaactaattgatgatcgcattaaagatacaaacgatacatatgggttgtatcatctagccaaaattgcatatctttgtgccaggccaaacccagagcagcggccttctatgggagaggttgttcgccttattgagatagaaactgaacatatcagggatttgtcacgacaattcatccctcatttcatgaagtgatgaaataaccgaaggggattttgtggtgtgagctgactactaaagtatctacgctgcatttccaccgggacaaagtaaactgaaatccatactctccattcttgttggtgatattgtaacacttggcagttcgctctcttttgcctttcttcattttcttcttccaaccatgtaaggctttgttcggttattcctatgctttatggattagaatggattggaaaaaaatatgaaggattttgacttgctatggatttaatcccacctaatcccttccaatccatatggattgataggaaacccaacaggccctaacagtgtgcacatggggttactgcaccttttttttcttgctcctttcttctctttgtaaatgaaacaccttcttctcagagtgttgccataggtgtctcctggccttgccacttttctagaatgtaatgccactgtgtaattgactggctgttgaagaatttgggaggacgcg

SEQ ID NO: 112277 - DNA, 2486 bp, Zea Mays
gatcgaatgtacgctgcaatctcccgaatatactccgcggcgcgtaggcgcctcgaggccttcataaccgcgctcccgggcagtcacgatggttgcggcggcagcaggaggggctcgcatcggcatcgccagcggcggcggtggagcagccctttcaggaccccgctgggctcgcctatgtcgatgtcctccatcatcggcgccgcggacgagcaggccacccccgcgtcgtcgggggcggcctacgccactccccagggcgagacagcgacaccgtccgtgattctggcgtcgccgctgccaccgccacagatggtcgtggtggcgctggacgccacgcgggaccaccgggatgacgagatcaaaacggcgttcaggaatttggtcgagcgaggagacatactccgcgcaagggattcgctgctcgtgctgggcgtgcttcactccatcacccatccaatgggctaccaaaccaaaccgtttactgaatcttttgtcgggacaagcgacagatacctacttgatcaggtggcgaacatagctgaatcctacaaaaataagctccaacaagttatagagatgctccacaatgttaagattactgtgaccctcaagataaccccgggagcacctgcaaaggttttcattatccatgaagtaaattccagcaaagcttcttgggttgtcctagataggcacttccggagagatttcaagcacttagaaaagcacatagcttgcaaagttgcgacatttcaggatcacttacaagtgcaatccttgaggtcaatacgaacaaatccatcaaacaaaagcacatatgaattggaggacctgcaacgttttgcggtcacgatggatctgagttctgaaacagtaaatggtgacactcgcaaggtatcaatcaggtcgtcgcctgtaagctaccttgcctctctgaacaagcacgagatccatgagacctccagcgtggctgcatgcagcatgccatacttcagtggcatgtctctcacaattgacgatatggaatccctacctaatgaaaaatacgaagataaaatgagctcccaatatgattcatcagaaaggccagttttgtgcattggctgcggtctaaaatcagttctgtacataaaggaatccatgaaattcccattctcggagattcaaactgcaacatcggatttttcaagtgaaaatttgctgggtgagggtggatttgggcatgtgtacaagggccagctcaaggatggtcaggtcattgcagccaaggtgcacaaagaagctagctcacagggttatactgaattcttctcggaagtgcaagttctcagttttgctcgacaccgaaatattgtcatgctgcttgggtactgctgcaaagaaagctataacatcttggtgtatgagtatatatgcaacaattctctcgagtggcatttatttgacaagtcggcaagcttattagagtggcacaagaggtatgctattgctattggtatagcaaaagggctgcgatttctacacgaggaatgtcgtgctggtccaatcattcatcgcgatttgcgtccaagcaatgtactcttgacgcatgactttgttcctatgcttggtgactttggtcttgcaaaatggaaggctggcggtgacaacatccagacaaggattctgggtcaaacaggatacttggcgcctgagtatgctcagtatggcatggtttctgtcagaacggatgtctacgcctttgggattgttcttttccagctgatatctggtcgaaaggtgcttgatgaccatggagggcagtgcacacatatattgcaatgggcagagccattggtcgaaagccttgcacttcacgaactaattgatgatcgcattaaagatacaaacgatacatatgggttgtatcatctagccaaaattgcatatctttgtgccaggccaaacccagagcagcggccttctatgggagaggttgttcgccttattgagatagaaactgaacatatcagggatttgtcacgacaattcatccctcatttcatgaagtgatgaaataaccgaaggggattttgtggtgtgagctgactactaaagtatctacgctgcatttccaccgggacaaagtaaactgaaatccatactctccattcttgttggtgatattgtaacacttggcagttcgctctcttttgcctttcttcattttcttcttccaaccatgtaaggctttgttcggttattcctatgctttatggattagaatggattggaaaaaaatatgaaggattttgacttgctatggatttaatcccacctaatcccttccaatccatatggattgataggaaacccaacaggccctaacagtgtgcacatggggttactgcaccttttttttcttgctcctttcttctctttgtaaatgaaacaccttcttctcagagtgttgccataggtgtctcctggccttgccacttttc

SEQ ID NO: 112278 - DNA, 1655 bp, Zea Mays
ccgtccccctcctcgagcctcccgtcgcgtgtcctgcgttgcgcttgctatttatcacccccgtcctcctccgtcccaaggcagtcgcagttcacaactgcgactaaaaaccatctttggggcccttcgccgcgatttgcttcgcttctcggactaggttaagttgccttttcgattctcagaaaaagactggctctgcactcggataattttaaaatggatagtgcacagcagcccactggggaattgaacaattcgttcgatactcttatggtttctggaggtgaccagagtcgacagcctcaggatgctggcaatgaaacgagcttcacgaattggaaagacctccccatggagctgctcctgcgtatcatttcactagttggagatgacaggatagtcattgtggcctccggtgtatgcacaggatggcgtgacaccttggggtggggggttgcaaatctttcactatcatggtgccaggaccgcatgaatgacttggtgatatcactggctcacaaattcacgaagctgcaagttctatctctacgccagatcaggcctcagctagaagacagcggcgtggaggccgtggcaaaccactgccacgacctgcgcgagctggatctcagcagaagcttcaggctgagcgaccggtccttgtacgccctggcgcacgggtgccctcagcttaccaggctcaacatcagcgggtgctccagtttcagcgacgtggcgctcgtgttcctctccagccagtgcgggaacctgagatgcctgaacctgtgcgggtgtgtgagggcggcctctgacagagcgctacaggccatcgcctgttactgtggccagctgcagtcgttgaacctgggctggtgtgatggcatcactgacaagggggtgaccagcctggcttcgggatgccctgaactcagggccgtcgacctgtgcggctgtgttcttataacagatgagagcgtggttgcgctggcgaacggctgccttcacctgcgctccctgggtctctactactgccagaacatcacggaccgcgccatgtactccctggccgccaacagccgcgtgaggagtcggggccggggctgggacgcgacagcgaagagcggcggcggtggcaaggaccgggagcgggacggactggcgagcctgaacatcagccagtgcacggcgctgaccccgcccgcggtgcaggcggtgtgcgactcgttcccggcgctgcacacgtgcccggagcggcactcgctcaacatcagcgggtgcctcagcctaacctccgtgcactgcgcctgtgcgctgcaccctcaccgggccgggcgagtcatcctctccaaccacgcctactgaacgcaatgcgtgaataggcggcgatgctcagatgtgtggataggccgttcaaccgtgagcgacggtgtccgctgtttatgtgaggtgcttgttttgtgtttaggcgtcaaggcgtgtacttggggtctctactctctagggaaccgtgtagaagcaaccgagttgagttcatcgtctgtaaaaacatggactgtatctgactatctgttgtcatgtcttttgagatctttagcctggactctggagcagcgcggcgacggcgatagccactcctttggtgggggctctcagac

SEQ ID NO: 112279 - DNA, 888 bp, Zea Mays
cagtcgcagttcacaactgcgactaaaaaccatctttggggcccttcgccgcgatttgcttcgcttctcggactaggttaagttgccttttcgattctcagaaaaagactggctctgcactcggataattttaaaatggatagtgcacagcagcccactggggaattgaacaattcgttcgatactcttatggtttctggaggtgaccagagtcgacagcctcaggatgctggcaatgaaacgagcttcacgaattggaaagacctccccatggagctgctcctgcgtatcatttcactagttggagatgacaggatagtcattgtggcctccggtgtatgcacaggatggcgtgacaccttggggtggggggttgcaaatctttcactatcatggtgccaggaccgcatgaatgacttggtgatatcactggctcacaaattcacgaagctgcaagttctatctctacgccagatcaggcctcagctagaagacagcggcgtggaggccgtggcaaaccactgccacgacctgcgcgagctggatctcagcagaagcttcaggctgagcgaccggtccttgtacgccctggcgcacgggtgccctcagcttaccaggctcaacatcagcgggtgctccagtttcagcgacgtggcgctcgtgttcctctccagccagtgcgggaacctgagatgcctgaacctgtgcgggtgtgtgagggcggcctctgacagagcgctacaggtactttcgtttgctgcagccttggtcgcttgagctcgcgttgatccctgctgttttggtggtgtgtcctgtcctgtgtaggccatcgcctgttactgtggccagctgcagtcgttgaacctgggctggtgtgatggcatcact

SEQ ID NO: 112280 - DNA, 1412 bp, Zea Mays
gatacacagtagttgtgtatccacttgatcttccgaaagaactggtgtgaatttttttgatataacaaagtcatccggccccagagtgatatgtcttcctataacattcccagtttgttattacattctcagcttgcttcatgtttctgctatagttccttgctgtgctatgcaaataaaacagtatattttgtttacttcagttcctatactagatgaccacatggtctttttgaatgaccttttggaaagggaagtattttttgaccaagaaagtgtcaaattcaggtgccaggaccgcatgaatgacttggtgatatcactggctcacaaattcacgaagctgcaagttctatctctacgccagatcaggcctcagctagaagacagcggcgtggaggccgtggcaaaccactgccacgacctgcgcgagctggatctcagcagaagcttcaggctgagcgaccggtccttgtacgccctggcgcacgggtgccctcagcttaccaggctcaacatcagcgggtgctccagtttcagcgacgtggcgctcgtgttcctctccagccagtgcgggaacctgagatgcctgaacctgtgcgggtgtgtgagggcggcctctgacagagcgctacaggccatcgcctgttactgtggccagctgcagtcgttgaacctgggctggtgtgatggcatcactgacaagggggtgaccagcctggcttcgggatgccctgaactcagggccgtcgacctgtgcggctgtgttcttataacagatgagagcgtggttgcgctggcgaacggctgccttcacctgcgctccctgggtctctactactgccagaacatcacggaccgcgccatgtactccctggccgccaacagccgcgtgaggagtcggggccggggctgggacgcgacagcgaagagcggcggcggtggcaaggaccgggagcgggacggactggcgagcctgaacatcagccagtgcacggcgctgaccccgcccgcggtgcaggcggtgtgcgactcgttcccggcgctgcacacgtgcccggagcggcactcgctcaacatcagcgggtgcctcagcctaacctccgtgcactgcgcctgtgcgctgcaccctcaccgggccgggcgagtcatcctctccaaccacgcctactgaacgcaatgcgtgaataggcggcgatgctcagatgtgtggataggccgttcaaccgtgagcgacggtgtccgctgtttatgtgaggtgcttgttttgtgtttaggcgtcaaggcgtgtacttggggtctctactctctagggaaccgtgtagaagcaaccgagttgagttcatcgtctgtaaaaacatggactgtatctgactatctgttgtcatgtcttttgagatctttagcctgga

SEQ ID NO: 112281 - DNA, 92 bp, Zea Mays
cgctgtttatgtgaggtgcttgttttgtgtttatcgtctgtaaaaacatggactgtatctgactatctgttgtcatgtcttttgagatcttt

SEQ ID NO: 112282 - DNA, 1988 bp, Zea Mays
ctccatatggacgccgcgcgctcccagctgcgctcaagccatctctagactctagtgtaccccagtcccggggtctagtctgagggccgttcccatggccaaccgggcgaggccactccacgccatctacatgaccagcagctcccatgaccctgacaagtgggcgcacctcgtcaaggagtacgcctcgcaatccttggtccgggaagccgccctcgtctacgccaggaacctgccccgccggacgcaccaccagcccctcctccccgtcctcctcaaggccgccgctgcctcctccccggccgagctaggtctcggcaagtccctccatgcggaggccctcaagtccgcctttgcccgcgatctgctcgtcggcaccacgatcgtgtcgatgtactgcaagtgtggcgcactcgccgacgcgcgcagggcgttcgacgaaatgccggaccggaacgtcatcagttacaacgcgcttctcgccgggtacgccgtggcgggggacatggacggtgccctggctctgttcggtggcatgcgctcctggacgcacgtcacgtgggcgacgctgatccgcgggttcgcggagaagggcgacatggcggaggctcggaggtggttcgaggccacgccgccggggatgcggaccgttgtcacgtggaccgtgctggtgcagggctacgtgtgcgcgggggacatggagacagcgagggaggtgttcgacaggatgcccgcgaggaacgcctttgtgtggtcgtcgatggtcacgggatacttcaaggccggcgacgccgaggaggcgcgggcggtgttcgataggatcccgacgcggaacctggtgaactggaacgcgctgatcgccgggtacgcgcaaatcgggtgcagtgagcaggcgcttgaggcttttcatttgatgctgcaggagagggtaaaaccggacgagttcaccatggcgagcttgctttcagcgtgcgcgcagctcgggtcgctagagcaggggaagaaagttcatgacttcattaaccaggagcatatccggaagaaccactttgtgatgaacggtttgatagacatgtatgccaagtgtggtgacctcgcgcacgcccgatacatctttgatagcatgagatggaagaacaacgaatgctggaacaccatgatctccgcacttgcaagccatggtcagagcgatgaagcactccacctgttcttccagatggagcgctctgggcggaagcccaacacgatcactgttcttgccgtgcttggagcttgcacgcacggaggcttcgttgatgaaggattacaaatcttcaacaagctcgatgcatatggagttgaagcgggagtggaacattacggttgcctggtcgatctattaggcagggctggaaaactgaaggaagcctacgagattgtcaataacatgtctgaggaacccaacgaggtgatctgggggtcattgcttggagcttgcagagtgcatcgtgatgcggaaatgtcaagattggtaacggaggagatccttcgattgcattcttttcacgcgtcgtctaacgatgcagagtacatcatgctcgcaaatatcatggctgcatcagagaggtgggagcaggcagaacaaatgaggaggaaaatggcgcgacgtggggttgagaagactcccggctgcagttcgcttgagcttggcattccaggatgccaagtgtatgcaggcagtaggcagtagtgctttgtttcgagtaggttactctaaatctgtttaataattttgtttcatatttttcagcggtccgatttcagtacataaccctgagaagaaatgatcttgatgtgatgcattcgatagggaacaaaaatatcagacatcgatcattgcagtcatgttctagaactttgagagctgcagacgccgaacttccaggttttgaagtttgatttcagaaaatatatccatggaagtaaaatgcagaagaaattattgtacc

SEQ ID NO: 112283 - DNA, 1952 bp, Zea Mays
cgaacccttcccgtctccaaccgtcgccatctccatccgcaatttaaccactcggccgccgctgagtcagagtcagtagcgagaagcagagcggctctgctcctctcggtcatgcggcgcccacacaacgccgtccaaccatcagcaatgcctcctgcagttggactccttcccctcctcctcctcctcctcctcttccatctccccgtctccctctgctcccaccaccaccatcacagcaccccacccgcttctccgtccccgtccccgtccccagcaccctcctccgcgccgctagcggtgctcctggcctgcaacgccacccggttccagccggcctgcgtctccacgctctccggcgccgcgcccgatgcctccaccgccgacctcctcgccgcgacgctctcggcgctccgcgcccgcctcccgcccgccgtctccacggccaagtccgtgctggcgtcctcctccaacgtgaacctctccaacgccgccaccaactgcctcacgttcctcgcgctctcctcccgccgcctctcgccgtccccctcggcgccgccgctgctctccgcctccacggcgctgctccacctctacgactgctggtccgcgtacaagtacgtcaacttctcccgcaccatctccgacgccatggcctacctcgacgacaccatcaccgtgaacagcaactacatctccatgctcgccgcgcggcagcggtacggcgacgagacgtccctctggcggcccccgcagacggagcgcgacgggtactggcccccgcccgccgcgagctcgggtgccgacgtggacgcgctcggcgtgcccaagggcctgccggcgaacgcgacggtgtgcggcgccgggtgcgactacaggacggtgcgggaggcggtggcggccgcgccggactacggcgacggcgcgttcgtggtgcacgtgaaggagggggcgtacagggagacggtgagcgtgccgtgggagaagaccaacgtggtcctcgttggcgacggcatggggaagacggtcatcactggcgatctcaacgctgacacgtccggcgtgtccaccttcaacaccgccaccgtaggcgtgctggcggacgggttcatggcgcgtgacctgacgatcgcgaacacggcgggccccgacgcgcaccaggccgtggcgttccggtccacgggcgaccgcacggtgctggacggcgtggagctgctggggcaccaggacacgctgtacgcgcacgccatgcgccagttctacacccggtgccgcgtggcgggcaccgtcgacttcgtcttcggcaactccgccgcggtgctccacgacaccgccctcgtcgtgctgccgcggcagctgcggccggagaagggcgagaacgacgccgtcacggcgcagggccgcaccgacccggcccagcccacggggatcgtgctcagccgctgctccgtcaacggcagcgaggagtacatggcgctgtaccgcgagaggcccggcgtgcaccacgtctacctgggccgcccgtggaaggagtactcccgcaccgtgtacgtcgggtgcacgctcgcggagatcgtgcagccgcaggggtggatgccgtggaacggggacttcgcgctccagacgctctactacggcgagtacgacagcgccggccccggcagcgccgcgggccggagggtggcgtggagcagccaggttcccaaggtccacgtcgacgcgtacagcgtcgccagcttcatacaggggcacgagtggatacccagagtgtagtgcagtaccgcgtaacaactgtagagaatgtatttaccagcaatcgtgtcccacaattgacacggtgtccctggtgttgagcttgagcattgcagttactcctaataatacggagagagcaagtcaaagacatggaaataataaacctaccgcgataacgatcgcaacggacaagaaca

SEQ ID NO: 112284 - DNA, 987 bp, Zea Mays
ggatgcggagactgctggactgatgaatagtgtgcttcgctgtccaaaatagggatacggagccgcatgcggagtgctgccggagttggtctaacaagtagtgtgtcatggacttctggttgcaggcgtgctggcggacgggttcatggcgcgtgacctgacgatcgcgaacacggcgggccccgacgcgcaccaggccgtggcgttccggtccacgggcgaccgcacggtgctggacggcgtggagctgctggggcaccaggacacgctgtacgcgcacgccatgcgccagttctacacccggtgccgcgtggcgggcaccgtcgacttcgtcttcggcaactccgccgcggtgctccacgacaccgccctcgtcgtgctgccgcggcagctgcggccggagaagggcgagaacgacgccgtcacggcgcagggccgcaccgacccggcccagcccacggggatcgtgctcagccgctgctccgtcaacggcagcgaggagtacatggcgctgtaccgcgagaggcccggcgtgcaccacgtctacctgggccgcccgtggaaggagtactcccgcaccgtgtacgtcgggtgcacgctcgcggagatcgtgcagccgcaggggtggatgccgtggaacggggacttcgcgctccagacgctctactacggcgagtacgacagcgccggccccggcagcgccgcgggccggagggtggcgtggagcagccaggttcccaaggtccacgtcgacgcgtacagcgtcgccagcttcatacaggggcacgagtggatacccagagtgtagtgcagtaccgcgtaacaactgtagagaatgtatttaccagcaatcgtgtcccacaattgacacggtgtccctggtgttgagcttgagcattgcagttactcctaataatacggagagagcaagtcaaagacatggaaataataaacctaccgcgataacgatcgcaacggacaagaaca

SEQ ID NO: 112285 - DNA, 1078 bp, Zea Mays
tttaattttcagctttgcactgggatatatgagaaatctgtgggttcctccttccagcttgtgtttgcaccgattgatgagcattttccggatgatgctccattgatttcctctagctttcgtgtcataccacttgatatgaaaacagatggtgtatcctctggtaggacactagatttggcatctagtcttgatgtgggttctgctgcaccccaagcctcaggggatgcatctccagatgactgtaatttgagatatgtgctgacaatcgcctttcaattcccttatgagacgcaccttcaggacagtgttgctactatggcccatcaatatgtgtgtagtgttgtttctgctgtgcaaagggtgtcaatggctatatctccctccaaatctggtctaaatgatgggcaaaggatgctttccggcttccctgaagctgccacacttgctagatgggtttgccagagttatcactaccatctaggtgtggaaaccctcttcgctagtggaggtatcgaccatcactcgtcactgtaacacgatagtgatcgacgatcgtgagcttccatgttatgtgttctgatacttgagacttttattatgactatgtatgagatattgtctcttattagtactggatgagatgtgtcttattatgactatggatgagacttttgtgatgtaattgatgagactatggatttaaatattgttatgtgattgtgtgtgagatgttttatgtgaaaatatgttgtgctatatagctgttgatatatttgttatgttgtggaatgtggtgtaaaataaaaataaacaacatttgtaatgctggtcaaattaacttcctagaggcttattaagtcgtaggaagttagccagctaacttcctaggggctacagtaagctgtaggaagttatccagctaacttcctaggggctacaataagtcgtaggaagttagccagctaacttcctagggtctacagtcagccgtaggaagttagtcgtaggaagttagtcagctgacggcgctgacggcgtgaagctactaacttccgagaatctactaaattccgag

SEQ ID NO: 112286 - DNA, 86 bp, Zea Mays
cataaaatttatgcagaaagatgaacatcacagggagctcaaattagtgttattggtattgaactttaatcaatataaaaattgtc

SEQ ID NO: 112287 - DNA, 691 bp, Zea Mays
acaaactcaatttcatggctactgatgacattgctgaaatgcggatgttttgtttcgacaatgttgctaaaagaatcattggaaaaacatgcacttctctcctaacatcagttacagatacctcaaatatccctcctgatttagcagccattgtgtctctcaaattcacattcgtagttgtttataatctaatgtcttttcaaaatcaagaaaaagaactcctaatcaagtcagtcatagcttcacatggaagagacctatccttgccatcaaccaaattgagcattccaatgcatccgtcaactccaacaaaacttctatcgagaacaagacagacaatttcaccctctacggcattgtccaacctatctacatccagttctctagagcaacatagcagttttgaagctgaagacagtcttgaagaccaaaatccagagtcttttgaatcgccaccgaaaaggactaagcacaaatctttaagattcgattgcggtgaggatgcgactaacaaggataaatgatctattgtccatggaaacaaaatgatggggctggtgttcctaatattagtcactaagcgcaccaacttttgtctaacatagatgtttatgtcttatttggaaaacagtatccaaatattttttgtctatgcatcatagacttaatgttgtcgaagacatactgtttg

SEQ ID NO: 112288 - DNA, 354 bp, Zea Mays
aataaagagcatgatacgatatgtaacatggtcatgtttgtcaaagaaaacaagttccaaccaaaaaaaattgaagtcaatggcctcgagaaactgcctgatgtgaagaagttattgcatagtgagctgaaccaaacagaccctatatcacttgctgacatgagggtgagcctctatggttcaaaaactttggaagatgacaaggaagaacttcaagcatgctgcattgtccacgaaaggaagctctaaaattctccgtttctgcgggtgaacgagagaaggctacttcatagatttgaccaaatttcctctagtgggtgtgggtcaaaggccaagaaaaggaagaagcatccc

SEQ ID NO: 112289 - DNA, 1420 bp, Zea Mays
ctctgaatcatccctctcgcactctcgcgctgcacgtgctctcctccacgggccaccaccacaaaccaaacgcgagcgcgacgcacgcgcgcaaaaagaagatccagcgcagcgagcgcgacgacataatggggcagagccaggggagagcgggcagagccaaaccagagacgcggcacgcgacgcgggagggcgagcagcagcggcggcgcggcgacatcgcgaggccagggccagaagcaacagccgaggaggggcagcagaggcgaccgccgagagtcccggccaccatggacaccttcttcctatcgcacggctcgcccacgctctccatcgacgacagtatcccggcgcggcacttcttcaagtcatgggtgccggcgaaggtcgcgggcgaccagcccccgcgcgccatcctcgtcgtctcgggacactgggagacggccacgccggcggtcaacgtcatccgcggcagcaacgacaccatctacgacttctatggctttcccaagcccatgtaccagctcaagtaccccgctccgggcgctccggacttggccctgcggaccgtagagctcctggagcaagccgggttcggccccgtgaagcaggaccacagccgcgggctcgaccacggcgcctgggtgccgctgatgctcatgtacccggacgccagcatccccgtgtgccagctctcggtgcagaccgaccgcgacggcacgtaccactacaacctcggcaaggcgctggcgcccctgcgggaggaaggcaccctcatcatcggctccggcagcgccacgcacaacctgcgcaagattagcccgtccgacgcgcccgtgccgcagtgggccgccgagttcgacacctggctcaaggactcgcttctcaacggaaggtacgaggacgtgaagcggtacgaggagaaggcgccgcacgcgagggtggcgcacccgtggccggaccacttctacccgctgcacgtcgcgctcggcgccgccggggacggcgcgaaagcggagcagatccaccagtgctggtccaacggcacgctctcctacgcgtcctacaggttcaccaccaacacctgacgcgctgctcgtggtgtcggtggaataccaccgtcccgcccggccagctgctgaattcgggggaagcatccatcgacgggtgtggcactggcagcattgcacatactgtatttctaataaacccccgtgtgcctgccgttccgttcgcggtagatatgcgtttgttattgttttgcattgtttggtgcagcagcttaggctgattgattgcctgcatggtggtgccgggttctcgctggcctagctgaagcgtgcattctatcgagaaacgttttgtttgttaatgtattctatcatcgtttttaagagttgaaggccttcatcaatccccc

SEQ ID NO: 112290 - DNA, 1721 bp, Zea Mays
ggccgctacttgtcacgggacacccgggcgcgtgcacgggagacgggagtatggacaagagcgcggtggcggcatacgacgtcgagcggggcgactacgaggaggagcacgaacggagagggacggtatggacggcgacggcgcacattgtgacggcggtgatcggctccggcgtgctggcgctggcctggagcgtggcgcagctgggctgggtcgcggggaccctcgcgctcgccggcttcgcctgcgtcacctactacacctccacgctgctcgccaacgcctaccgcgcgccgcaccccgtcaccggcgacaggaaccgcacctacatggacgccgtcagatcgtacctcagtcccagggaggtgttcatgtgcgggatcgcgcagtacgtgaacctgtggggcaccatggttgggtacaccatcacggcgaccataagcatggcgtaagtaaccaaaaaccctactttcctccgaatctccctgcaagcatgcaatacgatacgaccggtgcccaggacgttctaatttttgtttcccttttttttctgccgacctgttctgttcatgtgcgcgccgcgcagcgcgatcaggcagtccaactgcttccgccggagcggcgccggcgcgcactgcgacgcgccggggaccgtgctcatgctggcgttcggtgtggtccaggtggtcctgtcccagttccccggcctggagcacatcacctggctctccgtcgtcgcggcggtcatgtcgttcgcctactccttcatcggcctcggcctctcggtggggcagtgggtgtctcacggcggcggcctcggcggcaggatcgctggtgctgccgcggcgtcccccaccagaaagctctggaacgtgcttcttgccctggggaacattgccttcgcctacactttcgctgaagtgctaattgagatccaggacacgctcaagtcaccgccaccggagaacaggacgatgaagaaggcagcgatgtacgggattggagccactaccatcttctacatctctgttggctgcgctgggtacgctgcgtttggttcagatgctccgggcaacatcctgacggcaggcgggttgggtcccttctggctcgtcgacattgccaacatgtgcctcatcctccacctgatcggtgcataccaggtatatgcgcagcctatctttgcttcggttgagaggtgggctgcctcccggtggccggaggccaagttcatcagcagcgcgtacaccgtcagcatcccgctcatgcagagaggatcggtgaccgtggcgccttacaagctcgtcctaaggactgttctagtcgccgcgacgactgtggtggcgctgatgatacccttcttcaacgctgtgctggggctcctcggcgcattcagcttctggccgctcacggtttacttccccataagcatgcacattgcccaggacaagatcaccagggggaccaagtggtaccttctgcaggctttgagcatggtctgtttgatgatttcagtggccgtgggtataggctctgtgactgacattgtcgatagcctcaaggtctcttccaaccctttaaaaactgtaagctaaaggttattgtagtcacgtacaatacatataaaatctgctctaagtcgaagaagaatgtagtcaggttctgagctgatcgtgtacgtgctctgttttctctcaacatcaacatagctttttagtccc

SEQ ID NO: 112291 - DNA, 1583 bp, Zea Mays
ggccgctacttgtcacgggacacccgggcgcgtgcacgggagacgggagtatggacaagagcgcggtggcggcatacgacgtcgagcggggcgactacgaggaggagcacgaacggagagggacggtatggacggcgacggcgcacattgtgacggcggtgatcggctccggcgtgctggcgctggcctggagcgtggcgcagctgggctgggtcgcggggaccctcgcgctcgccggcttcgcctgcgtcacctactacacctccacgctgctcgccaacgcctaccgcgcgccgcaccccgtcaccggcgacaggaaccgcacctacatggacgccgtcagatcgtacctcagtcccagggaggtgttcatgtgcgggatcgcgcagtacgtgaacctgtggggcaccatggttgggtacaccatcacggcgaccataagcatggccgcgatcaggcagtccaactgcttccgccggagcggcgccggcgcgcactgcgacgcgccggggaccgtgctcatgctggcgttcggtgtggtccaggtggtcctgtcccagttccccggcctggagcacatcacctggctctccgtcgtcgcggcggtcatgtcgttcgcctactccttcatcggcctcggcctctcggtggggcagtgggtgtctcacggcggcggcctcggcggcaggatcgctggtgctgccgcggcgtcccccaccagaaagctctggaacgtgcttcttgccctggggaacattgccttcgcctacactttcgctgaagtgctaattgagatccaggacacgctcaagtcaccgccaccggagaacaggacgatgaagaaggcagcgatgtacgggattggagccactaccatcttctacatctctgttggctgcgctgggtacgctgcgtttggttcagatgctccgggcaacatcctgacggcaggcgggttgggtcccttctggctcgtcgacattgccaacatgtgcctcatcctccacctgatcggtgcataccaggtatatgcgcagcctatctttgcttcggttgagaggtgggctgcctcccggtggccggaggccaagttcatcagcagcgcgtacaccgtcagcatcccgctcatgcagagaggatcggtgaccgtggcgccttacaagctcgtcctaaggactgttctagtcgccgcgacgactgtggtggcgctgatgatacccttcttcaacgctgtgctggggctcctcggcgcattcagcttctggccgctcacggtttacttccccataagcatgcacattgcccaggacaagatcaccagggggaccaagtggtaccttctgcaggctttgagcatggtctgtttgatgatttcagtggccgtgggtataggctctgtgactgacattgtcgatagcctcaaggtctcttccaaccctttaaaaactgtaagctaaaggttattgtagtcacgtacaatacatataaaatctgctctaagtcgaagaagaatgtagtcaggttctgagctgatcgtgtacgtgctctgttttctctcaacatcaacatagctttttagtccc

SEQ ID NO: 112292 - DNA, 1404 bp, Zea Mays
agtgtggcagcctttctcgcggcactctttttgttcctcccactttctttcttctctctctcccactcgctagctccctccatccacattgccaccaccagatcagctgagatctcactttcggatcagctcagtcactggctttaaatagagaggcagccgagctggacgtcttcttgtaggttcttcttggcacttggcaacgacgacattcaccactgtcgtcgacctttcgtcaccatcccagtcccattctcgccttgttcgatcggttcaggacttgagacacatgagcggggtactcgggcagaggccgtcgcggccgtggccgccgggggaccccgcgtccacgccgccgtcggagcccgccacagccgccgcggacgcgggcgcgaggggcgaggcgtccgcgctcagggacctgggcacgtccatggacgccatctccttcgggttcgcggccacggccatcctcatctcgctcttcctcctcatggccatcttcgagcacctcatcaagccccgggccttcccgcccgactcccccgacgacggcggcaggcggccgcacgctgaccgcctgcacggccgcctctcgcctgggaagctccggaacccgcccatggtggaggcggtgctgcaggcggcggacctgtcggtgctgatgccggggcagcggtacccgacgtacctggcgcaaccggcgccgctgccgccgccgtgctccagggaaggcgtgcactactggccaccgcatgaccaccacaacgcgtacatgccgccctgatctggtcctccacggccaccacgagagcatgcatgtttccaccgtacgtacgacgacgcgctcgttcatcgcgcttactatagttttgaggggttgtatattcagttgttcaggtgatcgcgaatccgatatggacgtcctgtccttgctgcctgcgctctctctctctctctctctgtccttgtcagtgtgcactgtgccgcttcgctttcagatgccgaattcgccaaagtccaggcgcaaacgtccaggtttaccggcaataatcagggccgagaacatgcatgcagctagctgttcttcgatcgctaacaagcttaacagtggtagagcgataccggccatccaaatgatggcgccgagaatatgcagccgttccgtcgctgacagcttaacagtgtgttagaggtcatccgaattccaaacttagagcatcttttagagtctttttaaaactagttctctagatcatcatcatttattagagaaccatttatataaaaaccgctttctatatatatcttttcctggatactttagagagttatcctcgttatctatctttggctagctgacgaaaaaatatgtatgaaaaaaaaatatgatggctatatatt

SEQ ID NO: 112293 - DNA, 1065 bp, Zea Mays
atggcaaccataaatgcacagagcctgattcaagtatcagagattcagaacttgaacatgccatatatcggagctccagcacaaagagatggtttggaggcggatcacacacctcaggaggctgcgaggatctcgtcgattggctcggatgatgatacccagctgagacatcgcagcaagagaaagaggagacgttccaagcttggacgtgggcaggaaaagccagggtctagctcaagacaggcgtccctggtatccgcccagggtgcggaggtcagaaggcctgtgattccttcttgtgtcttggagttcaattctgatatggggcgagaagaagttgcacttcgacgtgccttattcgtaacagtggtgggaactaggctgaagctgaaggtgtcaggtgttgaggtgctcgaagaagtggcacgcaactttggcattgatgctggatcaatgacaattcatcaagccatgccagaagattttctcttgctcctaccggatgaagaaacagcagatcgagttctcaatggcagaagagcgtttagagggccactgttcagtctcgctttcaagcgctggacaagattcgcccaagcatcgacgacgtccatgtccggtctggtggatattgaaattcgaggtatcccgccgcatgcgtggtccctctctacagcggaggtgatcctgagcggggcttgcctgatatctgagttgcacccggacacggtgaggaaggcggatctttcttcctttgtggtgagggtgtggtgttttcatttagagggacttaactggaatatggatcttcacatcaccgagccaggtgtatccagtcaggggaagaggttattgacatacaagatcagcgtgatagtagttccggcggaaggtcagtcaacatcaatggagcccccacccaccaatgcagcggatgacatgcagcctgaggaagatgatgaccgtgggaaccctgacttccattctcagctttcgggcaataatctggttcagaagcgatcggtccatcttcgcctgggaccacagcagcctgtgatggaataa

SEQ ID NO: 112294 - DNA, 1761 bp, Zea Mays
gtctccaccgcttctccccggtgcccttcctccatttatcctcccagcgcagctccctcacgctccattttctctggccgctgctcaggccggcgttctctgctcgtcgtggagcttctctcccctgctggcagccgaaactctctctccctcgatatggagctttcacggcgctccatttttcccccagcgcgtgctcttctccctctgccctctcactgccgcgcgcgtcctcccatggccgcggcacccctgctcggagttccctggtgccgcgccctgaactccccgcgcccggctcccaacacgtcttctttcccccaagcgccctgctctgctcgcccatccttccctccctgctcggatttcttccatggccggcacgcagcttcgagttcgccgagttctctctctcccatggtgtgctctgttctctcctgctcccctggtcgccgtgcccctgcccagcctccatctttccccagccgcccttccctctgccagctcggccgaccgtcccgaactcgcatccatggcgcctggccggagctcctcctctccctcgatcccatggtgctcggcgtccatctccccgttcctgtgccgcgcccctgcttcccagcttgagctcgcccacctcgtccatggccgtcgtgccgagttcaccctgcgcgtagccggtgtttctccgatggcgcgccctccctgctcgttcttcagctcggtgctcctcacgctcggatccatgccgcacggagctccgtggtgctcgcccctgtgccgtcgctcagctccctggcatcttcctccctgcgtgcgtctccatcttccagtcgagctctgtgctcacgcgcagctcgctctttctttgtttgccgcccgcacgaattttctctgctcgccacggagtgtcgagctcccgcgccgtcgaatcgcctgcttgctgtctgcgccgcctaagtcccctcgccgtgcgctctggggtcggctgccgccgattccgccattgaactttcaagctcgccaatgcttcagctcgttgttgtcgccaagtccgaatatcacagctcgttcttgtggccgtgagttctttcctgtgcgcacgcgagctcctctgtttggcccgtcatcgttctccagctccttaccgcactcgactgtttgtcgtcgtcgctcggtcgcgcaacaggctgactgcatgtcgtgtgtcgcacgtcctaggtcctcgtcgtcgcgtcgttcgctttcacactgtgtgcgacagcatcgtcgttttccctatccagagctcgcgctaacctgctcgaccacacctcgccagctcgctctagacacgatctcgtcgtcgttccgtgcgtcatcaaaaaattccaagcgtcgggtgaagacgaagctagcagcacgatattccccaagcgctcgataaattgccaggatcggaaaatcattaccaatcccgcggattcgagtcagctgttgaaacagtaagctgatgaattattcagaatagttcgatcattgaataaattaatgtgctagtgcaatgctcattatgatgctcgataaattgcgtgagtcacggaactctcgtcgacttcgcggttcttgtgattatcgagccaaattcagttttggtgagttatttcaccattccagatttccagttaattagtttaaccggtggaccgagtagaatattagtaggcctgtgtgatgatgaaatattttaatcacttataaagatgtgtatatatttacgat

SEQ ID NO: 112295 - DNA, 1181 bp, Zea Mays
acattgtgattgtgcttgagacgaacgcgacgactctccaattgcaaaacccaaccaaacccctctgtttttttcgaatcgactctccgaaggcctcgagagtcgagactccgcccgctccctgccatggctcccggtgctctaacccgcctcctccgcgtcgcgtccactcctcgcatggcgcgccccttcgcagcaaagtcccgcgcatctcgtcggccgcaggatccggagcttccgacgggggacgagaacgacttcgccggcagcgaggttgccgcccccaccgagagcatcgacaagccgctggccgaggtgctaaaggagctcgggaagagggttccggactccctcgtgaagacccgcgtcgaggataatggcttcactatgaagtacatcccatggcacatcgtgaacaaaattctcaacatacatgctccagcgtggtcgggtgaggtccgcaacattgtgtactcatctgatgggaaatcagtatctgttgtttatcgagtgactcttcatgggattgatgcagagatctatagagaggccactggaactgcttctgttgatgatacaatctatggtgatcccgtacagaaggcagaatctatggcttttcgtcgcgcttgtgcgcgtcttggtcttggacttcatctctaccatgaagatatgtcatagatgactaatgttagtttttgtggcatgcttccagtttgttgcggaccattgtcccttaatggctactcattttcaccgggcatgcttctttttctttaatgtgatatggatgtgcaagtgtttgaaatttaggctgtcgtgctatatgtaagttaccaaagtaccaatgcaactactgttctgagctgtttgcttgttaagcagcagcttgttccaatgtctaaattcttgagtacatgttcatgaaagcttggtagttttgttttctttttttctatatcctttaactggatatcttcatataactgttagtcggtagcacattggacgaaatgttttcatgttagtcattgctcccatactaatgttttttttttcaacagcaaggtcactaggtaagtctttccaggatctctttgattatggcaaattacaatgcctttgcaggattattatgttatgactggcctaccagaaggcgactagacccaccagagtag

SEQ ID NO: 112296 - DNA, 1388 bp, Zea Mays
cgacgactctccaattgcaaaacccaaccaaacccctctgtttttttcgaatcgactctccgaaggcctcgagagtcgagactccgcccgctccctgccatggctcccggtgctctaacccgcctcctccgcgtcgcgtccactcctcgcatggcgcgccccttcgcagcaaagtcccgcgcatctcgtcggccgcaggatccggagcttccgacgggggacgagaacgacttcgccggcagcgaggttgccgcccccaccgagagcatcgacaagccgctggccgaggtgctaaaggagctcgggaagagggttccggactccctcgtgaagacccgcgtcgaggataatggcttcactatgaagtacatcccatggcacatcgtgaacaaaattctcaacatacatgctccagcgtggtcgggtgaggtccgcaacattgtgtactcatctgatgggaaatcagtatctgttgtttatcgagtgactcttcatgggattgatgcagagactctcgcctcctgcctccaccgccaggcaccctgcatgcctgcacccagcagtccagcacctcaaccaatcctatccgctgctagcaccttgctgctctcgaagacatttactgcttgtgtccggaattctgaaatctgaatcctgattctgtggctgccgcctgccagtaccttgcgtccggaattctaaatcccgatccctacttgctatccggaattactaagcatcaagatctatagagaggccactggaactgcttctgttgatgatacaatctatggtgatcccgtacagaaggcagaatctatggcttttcgtcgcgcttgtgcgcgtcttggtcttggacttcatctctaccatgaagatatgtcatagatgactaatgttagtttttgtggcatgcttccagtttgttgcggaccattgtcccttaatggctactcattttcaccgggcatgcttctttttctttaatgtgatatggatgtgcaagtgtttgaaatttaggctgtcgtgctatatgtaagttaccaaagtaccaatgcaactactgttctgagctgtttgcttgttaagcagcagcttgttccaatgtctaaattcttgagtacatgttcatgaaagcttggtagttttgttttctttttttctatatcctttaactggatatcttcatataactgttagtcggtagcacattggacgaaatgttttcatgttagtcattgctcccatactaatgttttttttttcaacagcaaggtcactaggtaagtctttccaggatctctttgattatggcaaattacaatgcctttgcaggattattatgttatgactggcctaccagaaggcgactagacccaccagagtag

SEQ ID NO: 112297 - DNA, 349 bp, Zea Mays
acaggaggaaatatgatatcttctattacgataagcagttagatggaatccaccactggatcagtagaactggaacaggctccttcacaaatcacttcttcttggtactctttgaagaccacggaacgaagaccacacgggcatgcaactcactggaacgctttggccacagcgaggtgggaggtttcggtgggtgtggtcaccagacaatagggttggcaggcgcagcacaaaggcagaacaacctagtgactgagaagaggagctaacactggtttgaacacaggaactacctcgatctcgtgaggaacactggctagaactcgagggcaaggaaaagctccactag

SEQ ID NO: 112298 - DNA, 985 bp, Zea Mays
gtccccgcagcctcagcccccggcccgcgtcgcctcgcgccggacgccgcgctgcttctgatttccgaccgttcctactcggtgtcggccggattccctagtccttgtcgtacgggagggtgcggtttcctggcgcggatgtaagtgaaggccgtggcaggggcagggaaggaatgcagaggtcgcggcgagcccttctgcggaggacggcggcagcccaggagcagagcgctgtggcggaggctgccgctaacggaaggaggaggcgtttgtacggcttctccgcctccctcgtcgtcgcctcgtgggtcgccgtgctcctcctccactccctcgtcggacacggcgacggtcaacgagatggaggaggctctactgtagatcttactgttgtagagcctactgtaaatgttggtcctattaatccggttgtacaggaagagcatggaggtgatttggagatgccaggtgatagctgtgttaattctgacgaaaacgctgtgctttcagaggatacactggtgcaagcagatcaattgtgttccagtgatgaggtgcagaatgagaacacagaagctgtaaccatagacagtcaggttgagctttcaggagatcagggtgggtatcttcctcagtcgggtgttgattctggagttcaaccaggggagaaggtagagagtaaagatttgcctagaccaccgagactatcacgggttgctcctcctgatctcgatgaattcaagacaagagcaattgctgaaaggggacctggtatttctagtcaacctggtaatatcatccaccgaagggagcctagtgggaagttgtataattatgctgcagcttctaaaggggccaaggttctggatttcaataaggaggctaagggtgcttccaacatcttagataaagacaaagacaagtacctccgcaatccttgctcagcagaggggaagtttgtcatcatagagctttctgaagaaac

SEQ ID NO: 112299 - DNA, 753 bp, Zea Mays
gaattctcacaggaaacccttgatgaagatgaatttgaactagaagatgataaaccaaacggtgattcattgaagaatggtgctaatgatccagtttcagaggcaaggacacttcaggctggcaggattcctggagatacagttcttaaggtgctaatgcagaaagttcaatctcttgatgtgagcttctctgttttggagaggtacctagtggagttgaacagcagatatgggcaaatctttaaggatttcgatgccgatattgatagcaaagatgtcttgttagagaagatccaatcagagctgaagaatcttgagagcagcaaagataacattatgaatgaagttgatggattcctctcatggaagttagttgcttcctcgcaactaaaccagctggtcctggataatgctctactcagattggaatttgaaatatttcggcaaaaacagactgacatggagaacaggagtcttgctgttatatttctcagttttgttttcgcttgcttagctcttgctaagctgtctataggcatcatgtccagattttgtagattctataactttgaaaagttccataattccatgttcagctggctccctggcttgtgcacatggcctcaacactggactgctcttaaaggcaccattgcgctggttttcagctggaaaggtgtcgctgataacttcagtcagcagcactcagcggcaaagtcaatcccgaaaatactgcacaattgtgtgaagtga

SEQ ID NO: 112300 - DNA, 333 bp, Zea Mays
ggtggcttctccaatataggattagtccatttttctgcagatggggtgatagcatgcacattctagcatacacatgcccttggcctggtaatgcttggatttttttctcacgcaaaagaatatactggttcgttgaactatgtgatgtcattttctacttttctgtttttagccgatcatccgaaggctaatgaatattactctaacccaagattagcagcatatgttgcaccctatgcacctatcctatcgtggtatcactaatccttctaaatttgatatcatcttatctgattcagcttgttactttatttaatttggctccttgttaac

SEQ ID NO: 112301 - DNA, 357 bp, Zea Mays
atgtcgtttttggatgtagtaagtgaaacagaagaatacagcagagaaactcggccagtttctggaactaatagctcattggtaatttagttggttgaaatcttgcacatcagctatccactttgctccaaaagttatttgccttcaatgataaatcaatatttgacttcagtggtgctaaaactagcactgattcgatgttctacaagctggagataatgacaattaaactgttttccatgtatggcaagcagtttatgattgatccacaagattttcgagattcagaaccagacattcttgcaagttctgctttcagcaattatagagtggatcaaagaaaatagtgaccaatga

SEQ ID NO: 112302 - DNA, 707 bp, Zea Mays
cacgttcgggtacagcccgcggatgtactgcggcatgaagtcgtgccgcgtcaggatccccaccaccggcggccgctgcacaacgaaaaaataaatcgtatttcgtgtcacgtcgcatgcgaaaccacagaaagtttcagacgtgcgtgatgcaacgaaaagcacgcacgtaactagaaacgaaggtgtcgactggcatacttaccccctgcgtcctcggcaggacgcacatgtggcggaggccgaggccgcggaacagcacggcggccttggccagcgacatgttctccacgacggtgtacggtgaccggttggtgatggggtggaggtccatgtacatgtccatctcctcctcggtcaggtccaggtcgtccactttgatgcccttcccggacccggccttggcgaagtcgaacggcgcgagccggcggaagacctcggcggcgcctgtcttgacgcggtcgctcgtgaagatccgcccctgcagcagtaccagcaggtgggagcgcaggacgaggccgcaaagctccggcgccggcgcgaacggcgggtcctcgatcacggggaacccgttgtggcccgtgctcctgagggtgtggacgacggtgcccacgcgctcgacgctggagaaggtgacgagcgggccggacaccacgtcgccggccaccaggctccgcgtgcacggctcggcgtgcacctccaggtag

SEQ ID NO: 112303 - DNA, 849 bp, Zea Mays
atgccgctgctccgcctccgcctggcctctcctaggtcaggcctccccgccgcgctcgatgggtccgcggtctccgtccacttccgccggatgtccgtgttcgcctccacccgccccgtcacggccgccctcggtgccgccgcgttcgaggaggtgctcacgctgcggtccccggtctacttctcccgcggcgccaaggccgtcgtcaagtacgagccccacgcctttgctgtctccgtcgccgcctccactctcgacctcggtaagcacgaggtcgacctcacccgcctgctcccgctctcattcgaggatctcgaggacggcggcgactccggcttcgggaagtggagcaccagcttccggctgtccggccccgtccgcggcgcgcggcttaacgtaaccttctcttgctcgctcctcgcgggcggcggcaccagcgagcagcacaggggcggggaagtggcggggctgcggcgcggctcgatggcacgggcagtgtcagtgcaagcgccgacgcctttgcccgcgcggagcaggggcgtgagggttctccacgaggtgctgcccagcttgaggtctgccaggccggtgccttcttctgttgctgacgggggtcctgatgcgaggaaggaggaggtggcagcaccggactgcacggaagaggggtctccggaggcaaagcactgcacatcggtagaggcaaagtgtggcacagttagccgcgaaccaaacatgcccttcgtgcgtccagatggtgattggggcacggtggagttcaatgttgttgagcatggagttgacttaccgcttgcaccttaccagtcacttaccagccaagctgcgtactga

SEQ ID NO: 112304 - DNA, 1510 bp, Zea Mays
ccacttgaaccacatattcttaaacattactagaacatcgaagagacacactacgcttacacaccttcgtggaagaataattgaatagccccaataccacagtaatcgtgatctataaaggacaacaacatgccgttcaaggtgccatgtagtattaaaggtattttcagttttactactaattgtttttctttagtttatttcgacgaacactgtctttgactgtttttttttggtattttatcgaccttttagtaacccgagcattgtggttgtggacttgttggtactgggtaggcaacgaaacacttgggccccaatgctatttccggctcgtcggcaaagccgaatcaggccagcgcgctggccaaatggcgcgagaacggaaacaaccagacctgtatgagatgcgtgccttctttctccgaaccgaacgcccactcctcctcgacgcgcctctggaccatgtcgaacgccagcagcttccacggcgaccacaggtacaccacctcccgctcggggtggaacgccatgaacaggaacgtgatgggctgggacgcggcgccggggacgacgtcggcgaccccgatctcgtgcttgagcgcccactcgcctccggtggcgtccctgagctcccagatcctgaggcgcgctccgtcgctggacgcgaagcgcaggcggccgcggcagtgcccggcgcgcgcccggcagctgacgggggccgggagctcggtggccgcggacgccatggtgtccaggtcgacgcggacgacgtggcccgagtaggccagcacgtggagcgcgccgccggagtagtgcatggtggcggacatggcgtcggtgtcgaggccgaagtcgacctcgtggtcggtccacgcgccgcgctccgagtcgaacacctcgagggtcgcgccccgggggagccacccggtgaagcacaccacccggtagcgcggggacgcgcaggggtcgaacgccagcacggagagcagcgtcctcgcgcgcggcgccggcagctccgcccaccgccgcgtggtcgggttcacgacgtggaacgccgccgtcgggcgggacgcgtagtagagcagcagcccgttgcagccgtcgatgatggtggacgtgtcgtggcgcgggaagaagcccatgtcgggggcctccgccgtggcggtggcggtggcggtggcgccgccgcctgacgcgcacgcgtacgtgtacacctgctgcctcctgccgccgtccgcgccgccgcggcacgtgtcgtcgtggtagagcacccccgacgtgatgagcggcagccggcggcggaggtagtcgctcgagatgatgcggcgccacgacgtggagacgcactggaaccgcgccagcgacctgcacggcagcctcgcaaggatctccgtcagcgcgtcctcgtccatctcgccgtccatcttctaatcttaatttggaccttccagagacttatgacgccatgagagctcctcctgaagctgcacctttctgctgattctgc

SEQ ID NO: 112305 - DNA, 1739 bp, Zea Mays
catcgccgttgcatccatgttttggtacttttacgacagcgtgtttctgggctcaggcatgcgctggattcgtctccttttcctcgatctctccttcgatctctttcttcccggcttgttttattcctatattcctacgttccctggacctgatcataactgaatgcctcgactttgccgtttgtccatgccttcctcgtgaagttggagaatcagaaactgtaggctggactggagtgctcgttcatcctggtatcgtacgcgttggccgatctctgcaagccatgcatcgcggccatgtcaccgcccaggcccagctgcatgcagttgcagccgtgtttgccgtttagcaactgcaactcgtcgtcgtacaactacggacagacgtacgcgcttgttgcgttcgtccacgacaagggcatgaagggcgcgctcgacgatttcaaagtgatgctcacgaggaacgagcccatcaccggcctcgccaaggtggtggcggtcctcgtgatcttcgcgctcggcgtcgtcgccggcctgtgggtgtctgccggggtccgccggtcccagcaggaaagcgtcgacccgaggagcaccgggttccatggcggcggcggcggcggcatctgctgccggcccgagcccaaccccgacttcgaagagttcgtggccccgacgcgcctcatgcacgacatgacggacagggagctgttctggcgcgccacgctggtgcctacggccgccgccaggtacccgttcgagcgcgtgcccaaggtggccttcatgttcctggccggccgcggcgtcctgccgctggcgccgctctgggagcgcttcttccgcggcgctgggcacgaggagcgcttctccgtctacgtccacgcgccgcccggggtggcgatcaacgtgtccgcggactcgccgttctacggcaggcagatccccagccagaaaacgtcgtggggctccgtgacgctggtggacgccgagaggcggcttctagcgaacgcgctgctggacttctcgaacgagcggttcgtcctcctctccgagagctgcataccggtgcacaacttcacgacggtgtacgactacctcgtggggtcgcgccacagcttcgtggaggcctactaccgggacgacagggggtgccggagccggtacagccggcgcatggcgccggacatcacgctgcgggagtggcggaaggggtcccagtggctggagctcagccgcgacctcgccgcgagcgtgctggcggacaccaggtactacccgctgttccggcggcactgcacgccgtcgtgctaccccgacgagcactacgtgcagacgtacgtgagcctgcggcacggcgcgcgcaactcgaaccgcaccgtcacgcgcgtggagtggcccgcggggacctcccacccggtgacgtacggcgcgggggacgccacgccggagctggtccggagcatccggaccagcgcggagccctgcgcgtacaactcgcgactgacgtccacctgctacctgttcgcgcggaagttctcgcccgacgcgctggcgccgctgctcaacatgtcggcggcggtcatgcactactgacttgtatttttattttattttttgtttttggacctcgaggcgtggacggacacacacaggacatgagtctgtaacttgttcggactaattaattagttaatcacacgttatccatcagtgcaatgcagttacaaacgtacttcctgctg

SEQ ID NO: 112306 - DNA, 596 bp, Zea Mays
attattttgacattgaaatcgatgtgatggtattgtgtgcagataccaatatttgagaagggttatgagaaagatccagcagttgtagcgagggaggctattcaggaagcaacctggaacaagtcagatgttgttctggttgacattgctggacgtatgcaggacaacgagccactcatgagggcactttccaagctaatcaatctcaatagcccagacctggttttatttgttggagaagcattggttggaaatgatgctgtggaccagctcactaaatttaaccagaaattagcagacctatctgctgttcctactgctagattgattgatggtatccttctcaccaagtttgacaccatcgacgacaaggttggagcagcgctttccatggtttacatatctggagctccagtcatgttcgttggctgtggtcagtcctacacggacctgaagaagctgaacgtgaaatccatcgtgaagaccctcctgaagtgaagtgagtgaattgtgttgagctttactgcccgaagtctgttatctttgtatccccagtgaccttgtcatccttttgttgttggatgtcaagcgcctcg

SEQ ID NO: 112307 - DNA, 1417 bp, Zea Mays
gtctgtcgcctcgccttgcccctctcgtgctccctccccccctgctgctgcaggttaatgctcctccgtccgcgccggtgcaccaccgcgctcttgcttagctagctagctatatatatagccagccgagcaggcttccttttcccagttcaaacagtgcagcgtcggcggtggcggggacgacgacgcgatgaacgccttcttcacgtccctggcgcgcgggctggacgacctgggccgtgcgggcgggctgtcgtcgctgtcggctctgctgcgggcggccgcgctgctcagggggctgcactcgcagctcacgctcatggtcggccagctccacctgccgccgggcggccgctggctcgacgagtacatggacgagacggcccgcctctgggacgcctgcctcgccctcaagctcggcctcgcctccgtcgagcggtattgcgcggcggcctcctgcgccgccgccgcgctggatgactggctccaggatccttctcctctgtccactcgccaggtgatgcgggcgatctccgtgtcgaggagggaggccatggccgcggaggaggagaaccgcgcgctggcggacgcgaggatcgcgccgctgtcgctgcatctcgacgagcgtctgctgctgcgcgccacggacgcgaggctcgccggcttcaacggcttccgggggctcctgtacgcgctgcacaacgcgagctcgctcctcctgctcatcctcgccagcggcgcggtctcctgcgccgcggcggccggcggcccgtgcgccggcgccgacgacgccggctcggacggtttcactgcgtccatcgcaatgctgcagcagaggctggcggaggaggccgagtccgacgggcccggcgccgcgccgggcatcaggatgtgtgagttccggtgcgcgcgcgccgccgtggaggcggcgcgggaggaggtggagcgcgccgcggcggcgggacgcaagtgcgagggcggcggcggcggaagcgctgtcaaggacaaggtggaggagctgaaggcgtggctggacgtgctccggaccggcaccgatagcctggtgtgccagctggacgacttcctggacgacattgtcgagggcaggaaggagctctccgacctgtgcagccattgatgtgatggatcggtcacaccacacctcgtgcccgccttgaaggagagcatcatcatcatcacaaattcgcatgaacaaacgaacgttgcttgcttgatttgcatggtagtacaagcaaagtcagatacgtacgtactagcactagctgcagtgtccctatgctattgcaatagcatgttgttgccttgcccctctttctaaccccatctctccgtctctgtcgaggggatggagagagcgatggagcattctggttggccatgatgctgttcctgtctc

SEQ ID NO: 112308 - DNA, 4450 bp, Zea Mays
gcaaactgacgaaactagttgcaagccccagtacaatttaccaaatatcatcgtctaataattagccagaaaccatatggttaaagcttattcagcctcggcaacaaacaggtgtcaaaaggcaacaaagggttctgttgtagtgacaagaaaatatctcctataggaacccgtcataccaaggttcactgcatacataattcatcacaacttgctgtacataattgtttgaatcaaccatctagaccgtctaccatcaaataaaaaaaaactccctaatcattgtgcagttgaaagcaatagttgctagtattggagtaacggaaaggatggcaatgttgctgtgaatctgataattgctgactacgtatatatgcacattcatacatcaaaacctggcatcgcaaactgtgacgcaaatgcctcaacctgatttcggagttctataacatcattattgttctgtaggcctcttagaaactccttttgcactttgccatgttctttcagaacattgttagcaatttgagtagcccttatgaggaagtctgcaatcacctcgaagtcctcttctaagcaacctctagtagtcattgcagaactaaccaatccgcacaccacctggcgatatcgagccattatctccatatattggtgtcttgttgacagatatgtggcatgcctcgcaaaccttctcgaagatcttgcctgtccaaaattaaagaataacatcatgagcaatacacaccagcacttcacatataatatacaaactacagtgcacaagaaagataaaacgtagaaacatttgtacggaagtggacatttgaatggacagacacaaaggaagcagaattataccagtcaagccaagagttctgaggtcccaaagtactaagtgattatctgtgccacctgtaaccaatctgcattttcttctgatcaaagctgatgccaaagcctgagcatttttcttgacttgttgaatgtatgctttatattcagaagttgctacctgcttcagagttatagccaagccagcaatatgattattatggggccctccttgcattgaagggaaaacaccaaaatttatcctatcctcgaagtcgtattcattctcatctccttgagaaaaagatccagctcgtttccttaaatttttccctttcctgaagaatattataccacctctagggcccctaagattcttgtgagtagttgacgtaacaacatcacagtagtcgaaagggctacggcattcctacaaaggcacaacaatccagtgtcaacaggcagttatccacaatgatcaatctatgggtctctaatacaaccgtacaaaaacagcaaggacaaacaatctatatgccatatgaataacattaaaacattaaactagtactccattccaaattaaaagatgctttggcttttctagatacattgtttttaccatgttcctagatatagtatgtacataattgcatagcaaacctgtgtatgtaagaagcctaaacatcttacaatttaaaatagagggagtaggatatatcacccaaccaaacatggtgcgcaagagaaggaccataatacacaagttgaattgtttctccaatatgaacacgatttacataacatggaacaagtgaacaaccacagatgccatgctacatcaacaagggaacacttttcacttatgtactttcaggcatatgtaggtagtgtgtgggggaataatacagatgttaaatgttttcttcaatacaaacatgatttgcataacatggaacaaccataagtagcatgctacagtgaacaagggaacacttcaacacttccacttatgcttttttcaaagaggttaagtactcaagtgtgtgttaagatgaaggaatttgattcaattagtttcattggacaatggttcttgccacctaatgagatcatcaagctccagatatttgaataaccacatggtatttttcaaacttgtttagagctacaacaagcgataagaataatagaaatatatatatttatttatatttattttataatcataaaccccactagccttctatcttaaaatgcaagccatccacagcaggagcccaccagtgcatgtaattatgacatttcatgcaatctaaccatgtcagcaagccacatcatccacaaacctgcatttatttgccacatcagcataccacaccatccactaaaatcattttacaatagtttatccctttaagtcaaatgattgtattcgaaaccatccacgatccctgcagcaacacatgggtatccttctagtacatatgctaaagcaaaacaaaatgcttatttcacctgccctgctacattcttagttataaaagggattgggttaggtttctcattgcactgagaagtaacaaacatgtgaatcatgattcatcactatggtaagcaaattcaaaaacaccttaaattatcatttacaataacaagaaagtttccatcattgacaaaacacaacaatggatactattcatataaagcatattcatcgtacaggtaaattgagaattggccaagcaggcaagcaaagtcctaattcacattcagctgacagcagatactaaaaccaaactcagcaccgccaaattcaaatggaaatgatactttatgcactcaaacatcaaatccatgcattgagtagtttaaaattcctgatgaacaaggtagcaagaaccttggacaagggaaaaaatggatgtcctagaatcagtactaacttccatggaccagaaaatgaatgatgtgctgtgcaatctttgtcaagcttcaaggtttaaacagtaggatttacttctaatcaagtaatcaacacaacaaactctagctttttgacaaatcttctagagggtaataaagtactagaatgtgaggtgtctctaagacactaccattcgaccaaattgtttagcaagatacagtcaaattaactgcaagaaatagtaacctaaatggcaacaaaaaccttctaatttttggaaacaagagcacaagggtagctggcaactgcaatcctgactcatacaagtgtacagcactaagggcctgtttgattgcttgcatatggcttagccaggctcacggatgcaaccttcacgtgtttggttgtctggccagcctctacagtctggctctgcagatgcaaagattccctctgggcctggctctcgagatacgcaaaaaatgggtgtttcaacaaagccaggttgtgcgggtgcaatcattagtctttcctaatgatggattaccatgtaattaatgtctaataaacaattttacttcatttaaaagtgtattaaggtttggtatggtaaattatagactattacaacatcatcccacgaaaatataataaacttcatagctttagagctcatgcaccaactcaccaagtattcatgcaagcaactaaataacacctctaatgggtcaggctgaacacatgcaagcaaccaacatagggacgttgcatgctcttagccaggccagcaagagctgggttccctagatacgagccaggcttgaccatgcaggcaactaatcaaaccctaagaggtacaattccgttcgttgctcagtagtatacagtcatagtaactgtaccatcaaaaaatgaggacctaagagtaactccaatagttatgtaaaacactccctaaacattgatttaaggagttgttaagaaaaatgcttctccaacagttatgtaaaagtcatcctaaattataaacaccctaaatttctctaaaacctccctacatttagcaaccttgtaaggagctcctaaatccgctaccaagtaccaccaattccatctggaaaaataattgtgagccatccttgcctagccgatacacacaattaaacaattgtgccacctaacaattaaacaattgtcaatgcaaatgaacggccgcacatgcacaactaacgactaaacaattgcggcagcaaatcaagagaccatcacagctcaccaggttgaaagtcatcgctcacgaggtcacaatttttagatcgaattgtggattggagataaaacagaaggagaaaaatagaatggtcccactcaaaccggtaacatagcaagttttatttaggaagtaatatatagggaattgttgaaggagaggagttttttgcttcctatattgtttgaggacttgctaaatctagaatttagggagtataattatacataactattggagctgctcgaggttctcctattactagtgcgcacattgttaagcaggatacaataaactaactgtaagataaaaataaatgtttcaacataactatgtacctttgctgcgacaagcccactgatatgtgccatgtcgcaaagaagcaccgcaccacacttatcagcaatcaatctcatccg

SEQ ID NO: 112309 - DNA, 1205 bp, Zea Mays
aagcttattcagcctcggcaacaaacaggtgtcaaaaggcaacaaagggttctgttgtagtgacaagaaaatatctcctataggaacccgtcataccaaggttcactgcatacataattcatcacaacttgctgtacataattgtttgaatcaaccatctagaccgtctaccatcaaataaaaaaaaactccctaatcattgtgcagttgaaagcaatagttgctagtattggagtaacggaaaggatggcaatgttgctgtgaatctgataattgctgactacgtatatatgcacattcatacatcaaaacctggcatcgcaaactgtgacgcaaatgcctcaacctgatttcggagttctataacatcattattgttctgtaggcctcttagaaactccttttgcactttgccatgttctttcagaacattgttagcaatttgagtagcccttatgaggaagtctgcaatcacctcgaagtcctcttctaagcaacctctagtagtcattgcagaactaaccaatccgcacaccacctggcgatatcgagccattatctccatatattggtgtcttgttgacagatatgtggcatgcctcgcaaaccttctcgaagatcttgcctgtccaaaattaaagaataacatcatgagcaatacacaccagcacttcacatataatatacaaactacagtgcacaagaaagataaaacgtagaaacatttgtacggaagtggacatttgaatggacagacacaaaggaagcagaattataccagtcaagccaagagttctgaggtcccaaagtactaagtgattatctgtgccacctgtaaccaatctgcattttcttctgatcaaagctgatgccaaagcctgagcatttttcttgacttgttgaatgtatgctttatattcagaagttgctacctgcttcagagttatagccaagccagcaatatgattattatggggccctccttgcattgaagggaaaacaccaaaatttatcctatcctcgaagtcgtattcattctcatctccttgagaaaaagatccagctcgtttccttaaatttttccctttcctgaagaatattataccacctctagggcccctaagattcttgtgagtagttgacgtaacaacatcacagtagtcgaaagggctacggcattcctacaaaggcacaacaatccagtg

SEQ ID NO: 112310 - DNA, 1643 bp, Zea Mays
tttcggtcggcgcttctatccacaaaccccagccgcagcgtccgtgtaccagtgatgttgccactgcccaccgtgggcgtgggggcggtcgccgcgtcgccggccaccgccgcaggggtagcggcgcccataaggtttcgtccgctccgcctcgtcgcgagtcgagccagcactaccccttcttctccctctacgtccagctcggctatatccagcgcgtcaccagcggggcattcccgcgagcacctgtcgggcagggacggctccccatcgaagaccagcaagccccgggtgttcttcctcgacgtcaaccctctatgcttccgcggctcccaacgtagcctcggcgccttcgcgcgctggctggccctcttcttcgcacacgtcagcatccgtgaccccgtcgtcgctgttttggacggggatggagggaacgagtaccggaggcggctgctgccttcgtacaaggcgcatagggctcgcggcgtcggcactggcgctgacacgcgcgtcgtcgacgttctccgccaatgcaatgtcgcggttgtaagagtcgatggatatgaggctgatgatgtggtggctaccttaacagaacaggttttacagaaaggttacagagttgccattgcctcaccggataaagacttcaagcagctgatatctgatgatgttcagctagtcgtgcccattcctgagatcggccgatggtctttctatacattaaggcattatgttgctcaatacaagtgtgatccaactgcagacttaagccttataatgaactggaagttgtgctgcacagggtgcttcatgggcgatgaagcagatggtgttccaggaatccagcacttagttcctggattcggcagaaagaccgcggtgaaactactgcaaaaacatggttcgttagaaaacttgctaaacacggctgcaatcagaactgtcggcagaggttatgcccaggatgctctcactaagcatgcagattacttacggaaaaattaccaagttcttagcctgaagagggatgtaaatgttcagtttgacgacagttggttatccccgaggaacacatgcagtgacgccaatgttctagctgactttcttcttaaactgagtggccaaggcagaagctaaatagctggtacaacgacgcatttgcacaagctggacttgttcctcaccaaccacaggatttaacaagaaaagggagatgcataaaggttgaaggagccggttgctgtaaaaaaaattgcgtatatccttgctccaaagtagtagccatcacacattctcgcttgtgattcgtggaactggagcagccctacctgggttgaagctgggtggaaaaatggaagtttggaaggtctgtctgggtgggtacatggtgacgggacaagcttaagaatatacagggataagctatagtggtagtactactgtgctgtaggccgtaaagtccacaagtaccttgccaggagattacagatggcgtacttcgtactggtagcgactcgttgatgtacaactaaatgcacgcgggttttttttttgtaaagtttgtactgagacacagtgtcccgacgctgtcaggaatcatctttaaatcatttttagtgacacatatatgatgtactatc

SEQ ID NO: 112311 - DNA, 1684 bp, Zea Mays
tttcggtcggcgcttctatccacaaaccccagccgcagcgtccgtgtaccagtgatgttgccactgcccaccgtgggcgtgggggcggtcgccgcgtcgccggccaccgccgcaggggtagcggcgcccataaggtttcgtccgctccgcctcgtcgcgagtcgagccagcactaccccttcttctccctctacgtccagctcggctatatccagcgcgtcaccagcggggcattcccgcgagcacctgtcgggcagggacggctccccatcgaagaccagcaagccccgggtgttcttcctcgacgtcaaccctctatgcttccgcggctcccaacgtagcctcggcgccttcgcgcgctggctggccctcttcttcgcacacgtcagcatccgtgaccccgtcgtcgctgttttggacggggatggagggaacgagtaccggaggcggctgctgccttcgtacaaggcgcatagggctcgcggcgtcggcactggcgctgacacgcgcgtcgtcgacgttctccgccaatgcaatgtcgcggttgtaagagtcgatggatatgaggctgatgatgtggtggctaccttaacagaacaggttttacagaaaggttacagagttgccattgcctcaccggataaagacttcaagcagctgatatctgatgatgttcagctagtcgtgcccattcctgagatcggccgatggtctttctatacattaaggcattatgttgctcaatacaagtgtgatccaactgcagacttaagccttaggtgcttcatgggcgatgaagcagatggtgttccaggaatccagcacttagttcctggattcggcagaaagaccgcggtgaaactactgcaaaaacatggttcgttagaaaacttgctaaacacggctgcaatcagaactgtcggcagaggttatgcccaggatgctctcactaagcatgcagattacttacggaaaaattaccaagttcttagcctgaagagggatgtaaatgttcagtttgacgacagttggttatccccgaggaacacatgcagtgacgccaatgttctagctgactttcttcttaaactgagtggccaaggcagaagctaaatagctggtacaacgacgcatttgcacaagctggacttgttcctcaccaaccacaggatttaacaagaaaagggagatgcataaaggttgaaggagccggttgctgtaaaaaaaattgcgtatatccttgctccaaagtagtagccatcacacattctcgcttgtgattcgtggaactggagcagccctacctgggttgaagctgggtggaaaaatggaagtttggaaggtctgtctgggtgggtacatggtgacgggacaagcttaagaatatacagggataagctatagtggtagtactactgtgctgtaggccgtaaagtccacaagtaccttgccaggagattacagatggcgtacttcgtactggtagcgactcgttgatgtacaactaaatgcacgcgggttttttttttgtaaagtttgtactgagacacagtgtcccgacgctgtcaggaatcatctttaaatcatttttagtgacacatatatgatgtactatcattggttactgtttgtactgctaaaatttttatttactctgcaatacatataacatgacgtcgtagtt

SEQ ID NO: 112312 - DNA, 216 bp, Zea Mays
caagctccgactctgtgaaggagaggaggtggagcaggtcgtcgatggcatgatcatggccatcgtcgggctggtcggtgtccgaggtctcgaactcctgtcgtggcggtgcatgctgcgacgtcgtcgaggtaccggatggagaaggtcgcgacgccgcaaaggaggagagaaggcggcgaggaggttgtggagagcgcgttgtgcgggaggagg

SEQ ID NO: 112313 - DNA, 1665 bp, Zea Mays
aacgactggttcgccgattccccctccccctccccttctgcccccggcaagacggcaaggcattaacaacctaacctgactcgtggcgggacggatgacatccccaaaaccctaaccacgcgacgctcgccgactcgccgtcacagccgcacctcaaccggagtcgaagcgccattgatgaactccgagcctgccgtcgccgcagctagcgatgcacaagctcctcccacgcgccgcctccttcctcgacgcagccgccgccgccgccgcggcccccctgctgctctccttcccacgcatgcccacgctgcgcctgtctggtagcccgttcgtagccatgcgtcctggcggaaaccctagccgcatccgtgcgccgccgtggctgcactgtgacgctgggtggaggcgaggactctgttccgccgaggctgcgaggcgcgggggcgatacagaggagatggagaaggatggcgggggtcgctcggcgccggagaggaagcagaaatgtcggaatgatgcgctggtgggaaggggggagctgcttaccattcccggagtcgggccacggaacctgaggaagctcgtggacaagggattcgatgacgtggcgcagctcaagcagctctacagggataagagccacagaggtatgcatacaccttccagaattatgtatttgtgacaagggtcatgcaagagaaggaatctgcgtgtggaataaaacctcttaggctgatggaaagaagcgttttcagtgatcgaatggtttttgttcgtgctgtgcatgaagcaaactggatgaacgagatggaaatcagcatttatgactcttggtttgacccagttgtgtcatcactcccaggtcttgtacctgatggttttatttatctaagagctagccctgatacttgtcacaaaagaatgatggtgcgaaaaagatcagaggaggctggtgttactcttgattaccttcgaggtttgcatgagaaacatgagagctggttacttccatccaagggaggaggttctggcgtgttgtccatcagtcagcttccagttcatatggagggctccctgcatgcggatatacgagatagggtattctacttggaaggagatcacatgcattcaagtatccagaaggttcctgctcttatcctggactgtgaacatgacattgattttaacaaggacatcgaagccaaacgacaatatgctcggcaagttgcggagttctttgactttgtgaagaaaaagaaggaatctcttacagcagagtcagagacggctgatggtgataagagtataaacaaacagattgtgctgccgcacggaggtggtttgtgggtgcccggaagcagcccgttaccagaatcagctctaaaatcatttgatttcaggagaacgatgtcttcctcgacttaaggtgggcaaacatcccaatggcgctatcaatttctgccgacaacctgcattggtgtggtccagcagcgtatcttgattgatatatatataccctgtaaatatttaaagattatataaagatttaggcttttagctagtgttggcgtacaatgtattatactagtggtatccaactctgttgcctgtagatgatcgagctgctttctgtttgcctggaaatgttgatcgaaccgctttcga

SEQ ID NO: 112314 - DNA, 2115 bp, Zea Mays
aacgactggttcgccgattccccctccccctccccttctgcccccggcaagacggcaaggcattaacaacctaacctgactcgtggcgggacggatgacatccccaaaaccctaaccacgcgacgctcgccgactcgccgtcacagccgcacctcaaccggagtcgaagcgccattgatgaactccgagcctgccgtcgccgcagctagcgatgcacaagctcctcccacgcgccgcctccttcctcgacgcagccgccgccgccgccgcggcccccctgctgctctccttcccacgcatgcccacgctgcgcctgtctggtagcccgttcgtagccatgcgtcctggcggaaaccctagccgcatccgtgcgccgccgtggctgcactgtgacgctgggtggaggcgaggactctgttccgccgaggctgcgaggcgcgggggcgatacagaggagatggagaaggatggcgggggtcgctcggcgccggagaggaagcagaaatgtcggaatgatgcgctggtgggaaggggggagctgcttaccattcccggagtcgggccacggaacctgaggaagctcgtggacaagggattcgatgacgtggcgcagctcaagcagctctacagggataagttctttggcaagtctaatgagaagatgattgaattcttgcaaaattcagttggcatcattcacaagaatcatgctgagagtataactttgttcattaaagagagtgttgatgaagagctgaaaggcaccgatacatctaagcttcctaaaaataggaggttgaccttttgtatagaagggaatatcagtgttgggaaaactaccttccttcaaagaatagctaatgaaactatcgaactacgtgaccttgtagaaattgtacctgaacctattgctaagtggcaggatgttggccccgaacacttcaatgtacttgatgctttctatgcagagccacagaggtatgcatacaccttccagaattatgtatttgtgacaagggtcatgcaagagaaggaatctgcgtgtggaataaaacctcttaggctgatggaaagaagcgttttcagtgatcgaatggtttttgttcgtgctgtgcatgaagcaaactggatgaacgagatggaaatcagcatttatgactcttggtttgacccagttgtgtcatcactcccaggtcttgtacctgatggttttatttatctaagagctagccctgatacttgtcacaaaagaatgatggtgcgaaaaagatcagaggaggctggtgttactcttgattaccttcgaggtttgcatgagaaacatgagagctggttacttccatccaagggaggaggttctggcgtgttgtccatcagtcagcttccagttcatatggagggctccctgcatgcggatatacgagatagggtattctacttggaaggagatcacatgcattcaagtatccagaaggttcctgctcttatcctggactgtgaacatgacattgattttaacaaggacatcgaagccaaacgacaatatgctcggcaagttgcggagttctttgactttgtgaagaaaaagaaggaatctcttacagcagagtcagagacggctgatggtgataagagtataaacaaacagattgtgctgccgcacggaggtggtttgtgggtgcccggaagcagcccgttaccagaatcagctctaaaatcatttgatttcaggagaacgatgtcttcctcgacttaaggtgggcaaacatcccaatggcgctatcaatttctgccgacaacctgcattggtgtggtccagcagcgtatcttgattgatatatatataccctgtaaatatttaaagattatataaagatttaggcttttagctagtgttggcgtacaatgtattatactagtggtatccaactctgttgcctgtagatgatcgagctgctttctgtttgcctggaaatgttgatcgaaccgctttcgagacagtgcttttgtaaatttggggtgcatcataggcgcagaatcttttgttttatcgttgtctcgccgcacaatctcacttctctggtttgttattagttactatgtgtctgattggtt

SEQ ID NO: 112315 - DNA, 1791 bp, Zea Mays
aacgactggttcgccgattccccctccccctccccttctgcccccggcaagacggcaaggcattaacaacctaacctgactcgtggcgggacggatgacatccccaaaaccctaaccacgcgacgctcgccgactcgccgtcacagccgcacctcaaccggagtcgaagcgccattgatgaactccgagcctgccgtcgccgcagctagcgatgcacaagctcctcccacgcgccgcctccttcctcgacgcagccgccgccgccgccgcggcccccctgctgctctccttcccacgcatgcccacgctgcgcctgtctggtagcccgttcgtagccatgcgtcctggcggaaaccctagccgcatccgtgcgccgccgtggctgcactgtgacgctgggtggaggcgaggactctgttccgccgaggctgcgaggcgcgggggcgatacagaggagatggagaaggatggcgggggtcgctcggcgccggagaggaagcagaaatgtcggaatgatgcgctggtgggaaggggggagctgcttaccattcccggagtcgggccacggaacctgaggaagctcgtggacaagggattcgatgacgtggcgcagctcaagcagctctacagggataagttctttgagccacagaggtatgcatacaccttccagaattatgtatttgtgacaagggtcatgcaagagaaggaatctgcgtgtggaataaaacctcttaggctgatggaaagaagcgttttcagtgatcgaatggtttttgttcgtgctgtgcatgaagcaaactggatgaacgagatggaaatcagcatttatgactcttggtttgacccagttgtgtcatcactcccaggtcttgtacctgatggttttatttatctaagagctagccctgatacttgtcacaaaagaatgatggtgcgaaaaagatcagaggaggctggtgttactcttgattaccttcgaggtttgcatgagaaacatgagagctggttacttccatccaagggaggaggttctggcgtgttgtccatcagtcagcttccagttcatatggagggctccctgcatgcggatatacgagatagggtattctacttggaaggagatcacatgcattcaagtatccagaaggttcctgctcttatcctggactgtgaacatgacattgattttaacaaggacatcgaagccaaacgacaatatgctcggcaagttgcggagttctttgactttgtgaagaaaaagaaggaatctcttacagcagagtcagagacggctgatggtgataagagtataaacaaacagattgtgctgccgcacggaggtggtttgtgggtgcccggaagcagcccgttaccagaatcagctctaaaatcatttgatttcaggagaacgatgtcttcctcgacttaaggtgggcaaacatcccaatggcgctatcaatttctgccgacaacctgcattggtgtggtccagcagcgtatcttgattgatatatatataccctgtaaatatttaaagattatataaagatttaggcttttagctagtgttggcgtacaatgtattatactagtggtatccaactctgttgcctgtagatgatcgagctgctttctgtttgcctggaaatgttgatcgaaccgctttcgagacagtgcttttgtaaatttggggtgcatcataggcgcagaatcttttgttttatcgttgtctcgccgcacaatctcacttctctggtttgttattagttactatgtgtctgattggtt

SEQ ID NO: 112316 - DNA, 2814 bp, Zea Mays
atgtgcctgttcctgtgcctgtgcgtgcgcctcctgcgtgtggcaatagcagcgggcagcggcagttggtcaccgtggtcgtggagtctgcagtgggctggaccctccctgccgcagttccgctgttggaccctccttgcccggctactgctgtaccctccaacaaggcaaaaagaagaacgaagctcacccaccctgcccatcggcctcatcacttccctcaaatccaccgatccccttccagaggttagggcctctgcgcccgatttcgtcccgcctcgccgatccacccgccgcaggtgagcggcttcgccggttggagtgtagtactgcggtcgcgaccttcgttccgagctggttcattttcgcttggataggtttggtacggatgggagccggcggcgcggggatcaggaatgtttcggtgcgtgggaggtgagagccgccggtgggcactgagggcctagggtttggttgaagagggagcaacgaaatggggggcttttgctccaaggggtcggcggtggacaagtcacccagcgacactacgctcggccccggccgggaggttgaccgccatgaccgtctagtggtgaaggaggagaagaaagctgtggtgggggaggctgctgccaagaggatgcaagaagagcaacatcaacagcagcagcagcagcagcagccagcagcgccaccactgcctgtatcggtgtcgcaaacggcagtgcctggagctaccgcggataacactgcagcaccatgggatggggtgccaccactggcacggttgccatctcagaagtcggggatgggtgtggcgaataaggtttcggaagtaagctcaattctgggtagagctagtactgctggccttggaaaagcagtggaagtgcttgacacacttggcagtagcatgacaaatttgaatataagtagttttggatcaggcactgcaacaaaggggaacaaaatatctattttagcatttgaggttgccaataccatagtcaaaggttgcagtctaatgcgcgccctttcaaaagatagcataaaacatttaaaagaaacagtgcttcactctgaaggtgttcagaatcttatatccaaagatatggatgagttactcaagattgctgctgctgacaaaagggaagagttgaaagtgttctctacagaagttgttcgctttggaaatcgttgcaaggatcctcagtggcacaacttggaccgctactttgataagttgacatcagaacagactcctcaacatcaactgaaagaagaggcagaatcagtaatgcaggaattagtgacttctgttcagtttacagctgaactataccatgaaatgcatgccctggatagatttcaacaagattatcagcgtaaacagcatgaagaggatggttctagtgttgtgcaaagaggtgataacatgcacatactaaagcaggaagtgaaaagccaaagcaagcatgttaaaagtttgaggaaaaagtctctgtggtctaagaatttggaagaggtcatgggaaagcttgtggacattgtgcacttcttacatttggagatccataatgtatttgggcgttcagacagtgaagaatcacaggaacctaccaaacgacgtaatagattgggtccagcaggtcttgcactgcattatgcaaatatcatcagtcagattgatactcttgtttctcgttcaagctctgttcctccaaatacaagggatgcattataccaaagtttgccaccaaccataaagtcatctctccgttctaagctacactcctttggagttaaggaagagcttactgtttctcaaatcaaggctgaaatggagaagaccctgcggtggcttgtccctattgcaagtaacaccaccaaggctcaccatggtttcggttgggttggagagtgggcaaatactgggtcagatgtgaactgcaagccaaatgggcagatagacctgatccgaattgagacactgtaccacgctgacaaggagaagactgaagcatatatcctcgagcttgttatttggcttcatcatcttatcagcctatccaaaactgcaaatggtgaaaggtctccaatcaagtctcctgttcggtctcctacacaaagaggggcctcaatcacattatctccaaacaaaaacagcagcaattcatcacctcttctgacgcaagaagatcaagatatgctaagggatgtcaagtacaggaaattcatccctggtataagcaaaagccaggagtttgacactaaggaaaggcataataagcaaagcaggttaagcaaaagtaatagccattcaccaagcagtggcaaccggaaagagacgctatcaatcaggaggctgcttcctgtgatcgactttgagatcgacaggataaaagcccttgatatgatcgacagagttgacgatctgagagtacaatgatgaacctagattaagcaatggcaaagtctgaaaaatgcaccctcaatctatgatcctgaaaatcaagattgcttgaaagatacaagtaatcagctgagctgaattggcatgctgtcagcacttctgcagcaatgtccctgcttgaggtgaacaggcatcatggtgccagtttgaaggcaccacgagggttagagatggtggcagcatgttctggccaactttgtatgatatatggcagggttaataggaaagtgaaattttattgtaaaaagggatttgttgtgttacttagctcatgtacaaggaatacaagttttgagagggcggagggggatcaaagatctgactgtgtttcttgctgtttt

SEQ ID NO: 112317 - DNA, 4569 bp, Zea Mays
cgtccatagaagtgctagaacgccagaacccgccgccggcgaacccgaagactgcgcccagctatggacgcgccgggagagctgcagtgcgtgggcaggctcgaggtcgccgcgccgccgccggcgcgctaccttcgcgttggctccctccccgtccccaccgactcctctgcctctctcccagtcctcctgccttctccgtccccgattggtgctccaaggtatcaaatgctgccattagagactgatctgaacacactccctatgattccaaacatcccagagaaggttttttcaagtgatgctaagagtactgaaggattacggtatgacagtggtcatatcaaccagaacttatcaaggaagtgtgaagcattagctgtgtcaggtttggcagaatatggtgatgaaatagatgtgattgccccagctgatatcatgaagcagattttcaaaattccatactccaaggcacaagtatctattgctgtaaaccgtataggagatacactcattctaaacacagggcctgatgttgatgaaggtgaaaagatattcagaagacaaggtaaccagcctaaaggatctgatccatcaatatttctgaacttcgcaatgcactctgtgcgagcagaagcttgtgattgtcccccaagtcatcaaccttcacagaagaagcaaacagcatctgcagtattgcgtggatcttttggctgtgacgagggttcttttgattcatccccatcatctagttttagcacatcaccttatctggatcagaatgacagtaaaagtagaaaagcttctcatagtactcatgaaagcctgtacctgggagcaatggaaaacaatcgaaaagtcaaagggtctgatcctattaaaaaaacgactcgtgttggtgaaaaaaacagctgtgaggtgcaagaatctgagaagagcaagagagtgggaaataatggatttcggaaggtttgcttttggcaattccacaatttccatgtgcttttgggtagtgacttgcttatatttagcaacgagaaatatattgcagtcagtttgcacctatgggatgtttctagacaggttactccattgaactggctcgaagcttggcttgacaatgtaatggcaagtgttccagaattggccatatgttaccatcagaatggtgttgttcaaggttatgagcttttaaagaatgatgatatatttctccttaagggtgtctcggatgatggcacacctgcatttcatccacaggttgtccagcaaaatggccttgctgtcctgaggttcattcaggataactgtaagcaagaccctggtgcatattggctgtacaaaggcgctgaagaagatgtcatacagttatatgatctgtctatcttacctgaaaaacatacagctggtgatcatagatctccatgcggtcctatgtcatcttttatagacaagggaagaaaggagtcattgttctctttgggtacactcctttatcgtgttgctcacaggatgtccttgtcaaaggtgcctagtaatagagcaaaatgtgcaaaattcttcagaaaatgttttgattttcttagtgagcaggatcacctggttgtccgggcatgtgctcatgaacaatttgcaagactcatccttaaatgttatgaggatctggaactgacttctgaatcatttatgattgaatctgaagtcacccttactgatttggatgacgattctccagaattgagacttgagaatttaccagcaaaacaaaatgtactgccagaacttggcaagaatgagccagcagtgttagatgaagtgttggaatgcacaacatcagtgtcttctggtatgacaagcagcttagtggaaccaagccaagttgatggtggttcttcatcttcagttacaaaagaagatgtttctctggacagcttggtgatgtgtcaggctggtatatcaaaaacaattgctgatgcaatctcctctaagttggctgccatacaccacgtatctcaagctatcaaatcccttagatggaatcgacagctgcagaataatactcagcatggttgcggggacagtgcagataccatttgggagaggtcagtcgacttctctttatgccgatgtggtgatgttgattgtattgaggtctgtgatatcagggagtggctgccaaaatcaaaaatggaccataagctgtggaagcttgttcttttgctaggagaatcttatttggcacttggagaggcatacaagaatgatgggcagcttcagcgcacccttaaagttgttgaattagcttgtttggtatatgggtctatgcctggacatattgatggcgacgagttcatctcatccatgtccaacagttcattgagtcgagaagatcttgccctaaaaactaaacttgtactggacgaggcagactattgcaataacaaaagatgcttcagttatgaagtttcttcccaccaattgccaccaaattatttgttctgggcaaaggcatggatgcttgttggtgatgtctatgcagaatatcacagattgaatagtcatcaagcaaagttggcaccagaacagaagtctcatggcgaagttagaatgtcaaatgaagttgcattggaggtcaaacgccttaagagaaaactgggaaaggataagcagaattgtgacacatgctctttgataaactgtagctgccaaagtgacagggcaagtagtggcagcagtgctagcagcagtagttctgaggcctctaaactttacagccgaaagaaaaacaaaaaatcacttggtaagaaccttcaacttcaatcacaatatagagaagccagcaagaaccccaatgcacaagaagctacacaaggttctgaaagtaaacagcatgatgtgaatgatacttgtattgagaacaactcagtattaaatgatgatattggtcactacagtcaggccagggaaaatcagtcaagaaatgttgatggtgttcctgataaatctcaagcaagtgttcctactgtgagggatggtggtatcttcaagttccttggtggtccaaaaccaggagatgttgagtacaacttgtcttctgctattcactgctatggtgcagccaagggagcattgttcgcatttcctgtgcattcagtagaaacttccatggttcttaagaaaagaggctggggatttaatgaactgggccgttgtagacttgagaatagaaatctggttagcgccgagattgcttttgcggatgctattaaagcatttgaagaggtgtttgaccacacaaatgttatactgatcaactgtaacttaggtcatggtaggagagctttagcagaggaatgtgtatccaggattgatgaatttcagaaacataatcttcctgaaggcacatatatgcaatcctttaagtcggccaagtcagaatattttcaagcaataaactactattccgcagctaagaggcaactgaagtatgtcaatactgaggccgataaagtactataccatgaggtttacacacagtatgcccatacctacctgaggcttggaatgcttttggcaagggaaagcttcttaactgacagttatgaaggtggacttgtcaatgagtcatctaacagaacagctgtagagattttagcgagtgatgcttttcgggaggctttgtctacgtatgaatcccttggtgaacatcgcaaacaggaagctgcttttggtcattttcagcttgcttgttatcagagggatctgtgcttaaggtttctggatttagttgacaaggaggttaaacagaaaaacgaggataaatatcgtcagaaaagtaagtggtatggttcactagctgagaagaactggcagaaggctttagaattttatgggccgaagacacatcctactatgtttcttaacatccttatggcgcagtctgccctttctattaatatttctaattccttccactcaaccgcgatgcttgacaccgctctgactcacttgttggaaggccggcatgtggttgaagcaaatgaagacaactccaacgatatggatctggacataaaaccgaagttctggtgccagctgcagagcctgctgaagaggatgctggcgggatccctgcctagcagcacgggcagagcagcctctgtcagccaagccagcactagcagcagaacagaaacttctaagctgaaagagatgtatcgtttgtcgctcaaatcttctaccctgggccagctgcatgcgttgtacaagctttgggtatcttaacacctttattttacaaatggttgctgctcatgttttatatcgtcggcatctatctcttgaattacagagtttttatttggtgttcacggcacgttttttttgttttgatttccagccaacttttaaaactaaatattaagtgtaaccatggaatgtcatggacgggacacactagctactacagtctacaactgttttgtagacttatataaacagcaaataatggcatcctatgtgaagacagtgtattatatgtattgtatcatagagagccaatgccaaaat

SEQ ID NO: 112318 - DNA, 92 bp, Zea Mays
ccacctcccaatttgctgatatcttcaccaagggtcttctgtcctcgaccttcgctgagttttgctccagcctcaacatcagtagtggctag

SEQ ID NO: 112319 - DNA, 2089 bp, Zea Mays
cacacgcccgcccgcatgcttaaatcctgccccttcacgtgcgttcgggagggcatccttggaagttggaagcaggcctcacctgcccccaaaggcccaaactcccgaaccgccccgcaccacgcatggccgccacagccgccgccgccgcgacggcctccacgccttcctctcccctccgccgccgagcctctgcggcgcctaccacaagacacaactcccagctcaaatgctccatcaagccctcgcagttcgagctgcggcaccgcgccgcgggtctcgctccggcgcgagctctgctccctgaccgcgtcacgccgttttccttcgacgcggacggcgacgaccatccccgagaggagtgcggcgtgttcggagtcattggcgacccagacgcgtcgtcgctctgctacctcggcctgcagaagctgcagcaccgcggggaggagggcgcgggcatcgttgcgtcggacgccgacggcaagctcaattcagtgacggacctgggtcttgtcggggacgttttccgcgatccggcgcgcctcgccaagctccccggaaacgccgccatcggccacgtgcgctactcaaccgccggcgcctcttcgaggcgcaacgtacaaccgttcctcgccgcgtaccgattcgggcagttggctgtggcacacaacggcaacctcgtgaactaccaggcgctgcgcaacaaactcgaggcgcagggttccatcttcaacacctcgtcggacacggaggtcatcctgcacctcatctcaacctcgctctcgcgcccgctgctctcgcgcatctgcgacgcctgcgagcgcctcgccggtgcgtactcgctgttgttcatgactgccgacaagctttttgccgtgcgcgatccgttcggcttccggcccctggtgatgggccgacgccccaacggcgccgtggtgttctcgtcagagacctgcgcgctcgacctcatcgacgccacctatgagcgcgaggtggagcccggggaggtggtggtcgtggaccgccgcgacatgtcggtgtcctacgcctgcctcgtcccacatcgcccgcgcaagtcatgcgtgttcgagcacatctacttcgcccttcccaactccgtcgtgtttgggcacgccgtccacgagcgccgcaccgcgtacggccgcgcgctcgccgaggagtcgcccgccccgaccgcggacgtcgtcatccccgtgcctgactcggggttctatgcggcgctcggcttcgcgcaggcgtcgggactcgagttccagcaaggtcttatccggtggcactacagcggccgcagcttcatacagccatcgcaggcaatccgtgaccttgccgtcaagctcaaactcgcgcccgtgcgcggcgtcattaccggcaagagcgtggtcgtcgtcgacgactcgctcgtgcgcggcaccacctctagcaagattgtgcgcctgctccgcgatgccggcgcgcgcgaggtgcacatgcgcatctccagccccccagtcgtcgggtcctgcctctacggcatcgacacgccgagcgaaggcgagctgatatccaacaggatggacctcgagggtgtgaggaggaccattggctgcgactcgctcgccttcctctctctcgacaagctccacagcatctacggcaatgaagcacatgagttctgtgacgcctgcttctcacggaactacccggtgctgcccacagtgccggagccagtcccggagctggtgtctgccttcgaagactaacaagaaggggagtggatctatactctgcatgcttactattaccatagaatctagactcaattttgggcatagcatttttgcctttgcaaatgcattcatccatctgaattttgaggttacaaagtttagacactgatcgaactgctattgtgggttcgatctaatctattgtattgctatatgatgatgacgacgacaatgaatgatagaaaaattatttcaatggtacatgtttaccttttcactatatcaggtttagggtctgtttagtttgtggctaattgtattgaataactaaccttagacagaaaagttaggcaaaatataaa

SEQ ID NO: 112320 - DNA, 631 bp, Zea Mays
gaattgtcttttccttacaagtgaagagattgtgtggttcaatgaagtaataacctatgatctatgggccaggtctttgatgagtaccttaacttgcaggatagcatactcatacaataatattgttgcctgtcgctcttaacaaatttcattcaggaaccgggccatgttgatgttcaaaagagttgtcagaagttcatgacatctgttatttattatatcttcttttgtagtgggctggtgtggtctgtttagcagcaggtagcactacaaccagcaatgtatggatgaattgaaggtagtaaagaacgcaggcaatcttatagaaactctgcatcttgaaactagcatgattgacaaagaagctggatgcatcctttggattggtgtcttcttatcaccaagcattaatgtgaagcaagttcatttgttgactaagaacagatgagcacaaatcagtgaagatttcgttgcactagagatggaggatggataggtggtagatttcaatatggctttgatactattgtttctctttacaatctttgtacagaacaagaaaaatgacgttgtatgtggatactattgtaattcaagaatttatttctgaataataaatatatttgtttat

SEQ ID NO: 112321 - DNA, 2379 bp, Zea Mays
atccttccatcattcgattacacacacccgaccaaaggtccaaagcacacgagacaatcgcaagacaacaacagcagcagaggaaccaagaggaaagcaaacctcgccggccgcacccctccatctctgatcgcccgctcattctcattcattcattcattcccctcgcgtcgcgtgattcgattggattccgttcccccgccccgttccgttccttcagcgccgctgccgctgccgctgcggctgcgccgaggccccagcgagtccccgaggcccgaccccaaaggctgcggcctgcggccgtcgcagtcccatcgattcctcccgcttggctttcccacccctcgaagccgaatccgatggttccacccgttgaccgcctccgccatcggaggccgcgccgcctcctccccgccttcttcctcggtccccgcgcccgcctcctcctatagatataccgcccgcgcatcgctccatggcggtcggcggcgacgacgacagcatggagcgggacttcgccgccaggctgcgcctcgcgcattcgccctccccggccacgcctgccgccgccgcctcatcctcccccaccgccgctggggggatcgccttccgcgcgccgcaggagcagttcaccgccgacgacttcgtactcggcaagatctacggcgtcggctcgtactccaaggtggtgcgggccaagaagaaggacactggtcgcgtctacgcgcttaagatcatggacaagaagttcatcaccaaggagaacaagatctcctacgtcaagatggagcgtattgtactcgaccagctcgaccaccctggcgtcatcaggctcttcttcactttccaggacacatactccctctacatggcgctcgagtcgtgcgaaggcggggagttattcgaccaaattgttcggaaaggtcggctctctgaggacgatgcacggttctatgctgctgaaattgttgatatattggagtacttgcatggccttggcctaattcatcgggatgtcaagccagaaaatctactgcttacttctgatgggcacatcaagattgctgactttggtagtgtgaagcctacaagggatactcctatcaaagttctcccaaattcaactactgaaagggcctgtacatttgttggaaccgctgcatatgtaccacctgaggtcctgaactctgccccagcaacctttggaaatgatttatgggcattgggatgcacactgtaccaaatgctttctggctcttcgccatttaaagatgctagtgagtggttaattttccagagaatcattgcaagggacctcaaatttccagagtatttttcagctgaagctagagatcttgttgacaaattgctggatgttgatccaggcaaaaggccaggtgcaggacctgatggttattcttccttgaaggagcatcctttcttcagaggcatagactggaagaacctgaggaagacacggccacctaagctcgcaatcgatgcaaatgcaaatgaagatgaggatagccaagattcaaattggttggcacacatgggaagtgtggcagtcaaccaacagtcaaatactgttggtaataatggtgccccgtcatcatctgaagtgcgctcccatatatctaaattagcttccatcgactcctttgactcaaaatggcaagaattcctggaccccggcgagtctgtagtcttaatatcaaagctgaagaagattaataagctagcaaacaagaagatccagttgatcctcactgacaaacctcaattgatctgtgttgacccttcaaaaatggtggccaagggaaacattatttggtctgatgacccaagtgaactcagtgtgcaagtatcagattcttcacattttagaatatgcacgccaaagaaggtgtcaacatttgaggatgcgaaacagcgtgcttggcaatggaagaaggcaattgaagacctccaacgctgccaaaggaattaattttcaattcaaatcaaaactctaaaatgtcgaattaggcactgttaatacatcatatccttttcacttgggaggaacatgagggggtttatttctcctgcatcctgctccaatgcctggttgcaaggaacttgctactcgctaattcacacactgaatgatggcccccaattttttcccttcccatccatgttttcaaatagtacacaattttgtttgtcacttttgtgaaccgttggagcagatatcttcaaaacaggctgcagtctggaaatattgacacaggaaactattttaacagtctgccatacttgattctctttgttgtcttttgttcaagagcatctatatcagagtaattctttggttttgccagatatcgaatgata

SEQ ID NO: 112322 - DNA, 468 bp, Zea Mays
gcaccgccatggaccttccatcttctcctccacggtactttctccacccagtacgacagtaccccaggtcgacctccatggcgcgtggcaactcaagcgctggctctctccctcccttcaacactccagggccaccggcccctgcgcctccctctactccacacggccagcatggcagccggacgctgagatccatggcgagctcctcgcgccgtctactttcctcatcggccgtgacttctcgacgctcgtcctcaagctcggccgtgtcggtcgtccctgaccccaccttggtgcagcgctaccagccgccatgacgtcgtcatcttcgtcgccgagccagacgccgccactgtccatacctgtcgccatggtggatcgaagggtcccgtcttgcccctctgctcggcttcctgctcccacgtccgtttcacccgtcggcagagggcttcggcactccaatccttg

SEQ ID NO: 112323 - DNA, 95 bp, Zea Mays
ctcattgtaattggtatgatctctcaggtatggttttcagttttgcaggctctgatcttgcattcatcgatttataatatgctctgagtggtgac

SEQ ID NO: 112324 - DNA, 303 bp, Zea Mays
atgtcgtgggtatatgcttcgcagatgatgcctcaaatgcatacgcagatgccgtctcagatgcctacactgatgtcagcgcaaatgacactgttgatgctgccaccacagatgtcatggggatatcctgctattggtccgtcacaaaaaatgccttggggatctgctccatggccgacacagccacattcatcacctggagtgggtttgggttcacgtcctactccggacaatgctacaaacttcgttgaccagatcttcaacacgaccaacttgtgtcccgacgacccacctcaagcttga

SEQ ID NO: 112325 - DNA, 106 bp, Zea Mays
ccacacatatcacggttgtaatcatttatccactccttaagtccaaatattttttacattatatgtgtacatatgtcgagtttttgtaaaaattcatgaattttag

SEQ ID NO: 112326 - DNA, 750 bp, Zea Mays
atggtctgccaccggctttgtccgcctcgtcgagccgcccgatgcgacaccgtgtgcagggacggcgtgctcacggtgaccgtcgagaagctgcccccgccggagcccaagaagcccaagaccatcgaggtccctccctgtcctctgttccggacctacttcaacttgttcctccgccggcgcgcccggtgcctgctcaacgtcgtggacccctacgtgaccatcgacatctcggagcccggcggcgaggtgcgctactcacgctatggccccgtctccgacaacgacaacacctacgaggaggtgaaggcgtacctcagcggcgccgcgcgctcgcaggacgcgtgcgagctccgcgccgagggcgcccgggagggcaacagcctcgtcgtcagcatgcgcgacggccaggacgtggccgacgagttccgcggcgtcccgctctggtggtcctcggtggtcgcagcggagcgagaggaggtggcgtgggaacggagcaggctgttgaggagcgtattgggacgccgccgaggggggagtcagcggagaatgcgacggaggtggtacgaggcgtccgcaacgccatcgcggcggcccacgacggcaatcggcgaaggtgaattttggaggcaagagcgagatgccgggagcctgcgggttacggcatgggcagatccagaatcggagacacggagagggagggggcaaggggcggacgcaactcgattgttctgctgctggattgaatga

SEQ ID NO: 112327 - DNA, 3055 bp, Zea Mays
ggggagctcgagctcgctgctagtgctaatggcggagagcgatggtggcagcgaggcgcagagtccgagccctgatccaaggtccggggacggggcgaaccctgacccgcgcccgccgcggccgcagctcaccaagtcgcgcaccatctctggttctgttgcagcctccatattggccgctgatagggtagcaggaggaggaggcggaagcggcggaggcggtctaagggacagcatcctcgttcgccgctcctccacggcgcccctcccgccgtatacggcgtcagcggcgggggcgtcctcggcgccgcggcggctcaccgtcgccgtggacgacccctcctacgcggcacccaacggcggcgtgcttgaccgggactggtgctacccgtcgttcctaggtccgcacgcctcgcgcccccgcccgccgcggcagcagcagaccgcgacgactaccgaacgccgaagcgctaaccccaccgtgccggtgccgccgagggtggcggtgtcgcagcgggaggaggagaagagcctggcctccgtggtgaagcgcccggcgctgcttgaggagcggaggacgcctcctcctacgctcccgcccccacgcgctccgcgatttgatctctctccgtatctctcactcctgctggtcataactatcgcaagctctaccctcgctgtttggcaatggataaaagttatgggcctccaggaaaagatcagatcatgcagcgaggccaatgctggggaccgtgatggtaccgagaaggtgtcttggattgacagggaccatggctctgctttttttggttcgcggagatggaatttagctcaatctagtaccatctttgctcttgcaattcctttgtttctgtttaagtacattgatctgctccgacgcagacaaacaaattccatgagaggaagaagtggtgaggaagaagtacctctcaagaagaggatcgcctacaaagttgatgtgttcttctcaggacacccatatgccaagcttcttgccctcctattagccaccataattctcattgctttgggtggaattgcgctgtatgttgttagtggaagtggattcctggaggctctctggctttcctggacttttgtggcagattctggaaaccatgccgaccagattggcttggggccgaggattgtatccgtgtcaattagctctggaggcatgctggtgtttgccacaatgcttgggcttgtgtcagatgcaatatcagagaaggtggattcttggcgcaagggaaaaagtgaggtgatagagatcaaccacatactaatcctcggatggagtgataagctgggctctcttctgaagcagctagctatagcaaacaagagtattggtggtggtgtagttgttgttctagctgaaagggacaaggaagagatggagatggacatagcaaagttagaatttgacttcatgggaacatctgtaatatgcaggagtggcagtcctctaattctagcagacttgaagaaggtttctgtttctaaagcacgggccattattgttttagcatctgatgaaaacgcagaccaaagtgatgcacgggcattgcgtgttgtgctgagtctgactggagtcaaggagggtctaagaggccatgttgttgtagagatgagtgatcttgataatgaacctttagtgaaactggttggtggtgaactaattgaaacagttgttgcccatgacgtgattggacgtctgatgatacaatgtgcactccaacctggccttgcacagatatgggaagacatattgggatttgaaaatgcagagttttatattaagcaatggccagaattggatggcatgcggtttggggatgtgttgatctcatttcctgatgccgtaccttgtggagtcaaggttgcttcaaaatctggaaagatcttgatgaatcctgatgatggttatgttttaagagaaggagatgaggtccttgttattgcagaagatgatgatacttatgctcctgcccctctaccagaggtgaataagggttttctgcctaacataccaacccctcccaaatatccagagaaaattttgttctgtggttggcgccgtgacatccatgatatgataatggttctggaagcatttcttgctccaggttctgaattatggatgttcaatgaagtgccggagaaggagagggagataaaactgactgacggtggtttggatataggcgggttaataaacattaaacttgtacataaagaaggcaatgctgttatcaggcgacacttggaaagcttgcctctggagacatttgactctattttaattcttgcagatgagtcagtagaggactccattgtacattctgattcgcgttctttggccacacttcttcttattcgtgacattcagtctaagcgtctcccatcgaaggagctgaagtcacctcatcgttacaatggcttctctcacagtgcctggattagagaaatgcaacatgcatcagacaaatctataatcatcagcgaaatacttgattctagaacaagaaaccttgtatctgtctccaaaatcagcgattatgttctatcaaatgagcttgtaagtatggcactagcaatggtagcggaagacaaacaaataaacagagttcttgaagaactttttgctgaggagggaaatgagatgtgcattcggtctgctgaattttacctttatgagcaagaggaattgagtttctttgatattatggttagggcgcgtgagagagatgagattgtgattggctaccgtcttgctaacaccgaccaggctatcattaacccagaatataagtctcagattaggaagtggtcactagatgatgtctttgttgtcatctcaaaaggtgactaattttcaggagcgtcacttttttgtgtaagtgtatattctaatgctaatccgtgctaattgaaatgataaccggtcaaacatactgtaaagtacagtcctgatccaaacagtcagctatgtacatgttaaattgtagcattcaaccaatcttggcacaaa

SEQ ID NO: 112328 - DNA, 1061 bp, Zea Mays
atgggtggagccaagtggaaggaggaggagatggtgaatacattgcgatcgtcggtgtggctcaaggaggacttccccctgagcgtcgacaaattcctgccgttgctagacatcctggccagtcgtgtgtgcgccgtgcgctggctccgcgtgctgctcaccaccaagttcccacaggggactttcccagtaaaggaaattctgctcaaactgggccaggggtccaggcaaaggctgcagtgtctagattggagtcaattagggacatttatttccatgcctctcaataattccgacttccctcgtattaccaccatctcccggtaccgtgccgatggaggaaaggagaaacaagatactcaagcagaacattttctgaaattgactgtcaagttctacaagcttttaactcgcatgtcaaagtcccagattgcacctaaaggctatagacaatccattccaagcctcaagtttcagaaactggcagaaaatcagcaaatacccataaagggaaacctcgccaaaattagaagagaaaccaaatgtatccctgatcttatttttcagattgaggattatgagaagtatttaatacagctaagcaaactaactaaggtaaaccttttgaggcatgccgaacgcagtgtagcaagagacttccagatgcaagtagcgtggtacggatggtgactggtgataacatcaatacagctaaagctatagccaaagagtgtggcatactgactgacggcagcatagcgatagaagggccaaagttcagaaacaaaagcccagaggagatgagggacctgatacctaagatccaggttatggctcgttctctgccgcttgacaagcatacccttgtgaaaaacctgcgaggtatgttcagggaggtggttgctatgacaggcgatggtaccaatgacgctccagctttgcatgaagcagatgttgggcttgcaatgggcatagcaggaacagaggtactaactatacctcgcaactctactgttcttactgtagatgtaaaaacctcttgcaaggccatcagaagctaa

SEQ ID NO: 112329 - DNA, 126 bp, Zea Mays
gaactaaaaggcctaaaaccgaatagcctaaacggtatgaaaaacaggattttcccgaaccaaaacggtaaccacaaaaacgaacgaaaaaacagtctgcccgttttcgataccgttaccgaagac

SEQ ID NO: 112330 - DNA, 116 bp, Zea Mays
aattcctccgttcaagttagaactaggctggtttctgagggatggttttgtggatatggtaaaagatatttgggtaaatgagataagaggttctactcctttggagaaatggcaag

SEQ ID NO: 112331 - DNA, 1056 bp, Zea Mays
catctgatgaatcagcttgattcgtttagtgataagcttgtaaagagaattcttaaagctcatgaaccttataaccataatgacaatactaaatgttctgttgtttctgagagggtatcatatgaatttgttcctgaaaggaaagcttgctcctcattaaacaaatcagtggtacagaatgcaagtggttgtgatagcaataggaacaaatgtttggcatctgggaaagctgtgtccaagaaaaaagatcagagtaccaataatagcttggataaagaaaatatgtcatcttgtggttctggtggcacaaaggtgtcatctccaggctccttgggtttagctagggaggttgattctggaaattgtctctccctcttggataaccggaattgtcctatgactaggacctcaaaggcaaatcacaacaattgtaggcaaactgcggacatcttggattttaatctcagagaatgtagttccttcaagaaaggtcatagcaagggtttatctgaagcccagaagcatgaaaagtcgcttcctggctcttcaattgcatgtgatattgaagatgccggtgattgcaatgataaccttgtgaaagcacctttcatcaaacaacgtaacagccaactttaagaaaaagggtaagagaacactggagttggtgaatttgcagaatagctcagatttaactgatgttgtcacaaaagataacgttcgacagattagagcaaggaaggtgccagtgtaaacagctactcacatatgatcttggtatttatgtaatttccgtccgatgtaaataaatacttagttctgaaatcatttatacatgcatatccacttgagagtactgttataatggtaggaatcttggtcccggttcaccatgtaacattataatttaaatagggatgggcatgagcctcttaggctatttctagtagatcctctaccttgtatcctatttcaaatttttctgcaaacactgtcagtgtcatctacaattttgtgctccctattttccatggtctacttgagacagttttatgagtt

SEQ ID NO: 112332 - DNA, 1394 bp, Zea Mays
cccacacgtaagccttatggcgaggattcgtttccctaccgtctcggctcttggtctcccccggcttgccccttcctcccctgttgcacacctctttcttcctcgaacacgaattctgtgccccaccccgacgctacctataaatctcatcagcacaccccgaatcccggcaaaacccaccggcagaagctaagctcgctccgcagcatcggcagccgcgatgatcctccgcatccgcagccgcgacggcacggaccgcatctcggtcccagactcggcgtccgccaccgtcgccgacctgcagcgcctcattgagtcacatctcaccgtgcccgtcccgctccagcgtatctccctcgacccggcactcctgctccctaacccatccgccgctgtcccactcctcgccgacccggcggcgccgcttgcctcgctccgcctcgccaacggcgccttcatctacctcgcatacccgcccgacgcgcgctccgcccgcccgacgccgcccaaggtgctttccgccgctggctctttcggcaagaagatgaccatggatgatctcatcgcgcggcagatccgcgtcacacgccaggagaacgcgctctgcgccgccgcctccttcgaccgcgatgccgccaacgcgttccagctttacgtcgccgagtatctcgcgttcgccgtcaagcgggcgggcttcctatacggccgcatcgacgcagagaccaaggaggtcttggtcgacttcatctatgagccgccccagcagggcttcgaggacgtggtccatctcatgagggatcccgacgaggaggcccgcgtcgataccattgccgaggggcttgggatgcgccgggtcggcctcgtgttcacgcaggccgtcgggaggagggccagcaagactggtgagtacactatgtccaaccgggaggttgtgcaggcggcccagctgcaggctgagggcgggaccccggagtgggttactgccatagtcaaattggaggtgggggatgacggcactggggatgtgcacttcgaggccttccagatgagtgaaatttgtgtcaagctcttcaaggatggggtactggaaactgaggttcaggatgctgatgatccccgtctgtcaaagatgcggaaggaggtggtggctggggggaaggatactatgaaggtggataatgacttcttcctcgtgcctgtcaagatctctgatcaccaggtatactcctttactcactcctgctcatgtactgtggaatttatagttcatatgaatagaggattgaatataacttgatgaagtaagggctgaatatataaaggacgtggtgctcagaaaccttaaaacactaggctgtaatatctgaatataattgtagattgcttctcgctgc

SEQ ID NO: 112333 - DNA, 1730 bp, Zea Mays
cccacacgtaagccttatggcgaggattcgtttccctaccgtctcggctcttggtctcccccggcttgccccttcctcccctgttgcacacctctttcttcctcgaacacgaattctgtgccccaccccgacgctacctataaatctcatcagcacaccccgaatcccggcaaaacccaccggcagaagctaagctcgctccgcagcatcggcagccgcgatgatcctccgcatccgcagccgcgacggcacggaccgcatctcggtcccagactcggcgtccgccaccgtcgccgacctgcagcgcctcattgagtcacatctcaccgtgcccgtcccgctccagcgtatctccctcgacccggcactcctgctccctaacccatccgccgctgtcccactcctcgccgacccggcggcgccgcttgcctcgctccgcctcgccaacggcgccttcatctacctcgcatacccgcccgacgcgcgctccgcccgcccgacgccgcccaaggtgctttccgccgctggctctttcggcaagaagatgaccatggatgatctcatcgcgcggcagatccgcgtcacacgccaggagaacgcgctctgcgccgccgcctccttcgaccgcgatgccgccaacgcgttccagctttacgtcgccgagtatctcgcgttcgccgtcaagcgggcgggcttcctatacggccgcatcgacgcagagaccaaggaggtcttggtcgacttcatctatgagccgccccagcagggcttcgaggacgtggtccatctcatgagggatcccgacgaggaggcccgcgtcgataccattgccgaggggcttgggatgcgccgggtcggcctcgtgttcacgcaggccgtcgggaggagggccagcaagactggtgagtacactatgtccaaccgggaggttgtgcaggcggcccagctgcaggctgagggcgggaccccggagtgggttactgccatagtcaaattggaggtgggggatgacggcactggggatgtgcacttcgaggccttccagatgagtgaaatttgtgtcaagctcttcaaggatggggtactggaaactgaggttcaggatgctgatgatccccgtctgtcaaagatgcggaaggaggtggtggctggggggaaggatactatgaaggtggataatgacttcttcctcgtgcctgtcaagatctctgatcaccagggtccactctcagtaggctttcctatagagaaccgtggaagtcctgtaggcatgagtgcgttaagaagtcacctggagcggatgaagcatttgacatttgtgaggcggatttcggacttccatttgctccttaagcttgctactttcctagatgcaaagtcagacatgcctactatagctgcatgtgtaaaaactcagagcaggatgcccgaggggtaccagtttctgatcgagtcctttgctagtcagggataatattgcctctgaaagcatgacacacgatgcataatttatttacctatcacatcaggcgtggttcggttattcttaattcatgtggattggaaggtatcaggatgaattgatatagattttgatttgctatagatttaaaccaatttaatcctatccaatttatatggattaacctcaaaacgaataagcccttatgtgtaacttatggatgtctcaggtgtataagtattgttcaatgcaatcacttttcgatagc

SEQ ID NO: 112334 - DNA, 229 bp, Zea Mays
cattcactgatggaagtctgaaccaaaatctacatgcattggtggaatggaaatgtgacctccactttcgtaagtccgagcgggcttacaatagaccgctaatcagctcatgtcatgacaatttgttagaggttacttaaccacactttggtccagcctaatatatatacaagcaaaacacaagaagtgggcttttgcaagataagagtagggggtggatgaatgcaag

SEQ ID NO: 112335 - DNA, 2505 bp, Zea Mays
atgaaatcgagggaaggttcacgacacgctgctccccaccactaaccgcactcgattgagcgccatgctgcagctccagccccctgggttcctgcccatcccgcgccggcgcgtcaccgcccgcgggcgtcgcgcccgccctgtcatcgccttcaactcccagtggaagatccccgacgtcgacacagatgcggtgcgggagcgagtgcggtcttggatgtctctggcgcggggcgcgatcgccgacgcggggcgcgcggcgcgggagggagggaggcacaaagaggagcccgagggtgggaagaagaagcagcggaaggaggtgaccgtggaggagcaggcgttcgttgcggtgccagaggtcaccgtggagccgcgggtgccccagggttggctctcgctggacgccgtcgtctccatcgagcagttcgccaggttgaatgggttgacggggagacaggtgcagaggatatttgaatcacttgctccagagcatctgcacaatgacgctcgaagcctggttgagtatagctgcttccgctacttggcaaaagataattctgacttccatccaaacttgaagggttcatcatggcaggcaaacacatcaaacgggagataattttttgtatgatgagaaagtcttatgcattggctctagtaaaaaaagacctgttctaaaatgggaggaaaataccgcatggccaggaaaccttaccttgacggacaaggcgctgtattttgaggtaccaagaaaccaatgaggcttgaccttacaaatcagaattcaagggctgaaaagacgaaagttggaccatttggatccaaactatttgactctgctgtctcagtttcttctggttcaatgtcagatgaatggacattggagtttgttgatttcagtggggagatgagacgagatgtgtggctcgccttcatcagtgaaattatttcagtttatagattcattcgtgaatatggtccaggtggtgatgatccagcaatacataatgtgtatggtgcgtacaaagggaagaaaagagctgttagtagtgcagcgaacagtattgcaaggctccagtctctgcagttcatacggagattatatgaagatccagctaagctagtgcagttctcttacctgtccaacgcaccatttggtgatgttgttcttcagaccctagcagtgaacttttggggtgggcctctgactacaaaagccagatctgcaaatcatagatcaactcagtggcatagatcttcagaggacccatctagcggtcgcacacatgtttacgacatagatggcagcgtgtacttgcgcaagtggatgacgtcccccagctggacatctagccactcagccaatttttggagaaattcttctgtcaagtatggtataatattgagtaaatctttagttgtagctgataaaaaccttgtagaaaaggcaatggttgactgtaaagagaagagcaaagtagttgaaaggacacaagcgacaatagttgctgctacaatcgaaggtattccaagtaacattgacctcttcaaggagcttatgcttccttttgcaatagtggctgaaaatttcaagaaactgcaacgctgggaaaatccacgttcaacattttgttttctactattggttcatactgttattttcaggactgaaagaacaaggccggttaggtagatcttttggtaaagtgacgattagggatcaatcaccttcaaacacaattcagaagatcctagcccttaaagaggcaatggcctcagtggaaaattatctccagaatctgaatgtctccctgctgaagatccgcacgatccttctagctggccaacctgaggtgacaacacaggtcgcgtttgttctcctagcatcctcagccgtccttcttgtgtttcctttcaaatatgttcttgcattctttacatgtgatcttttcacaagggagctagaattccggagggaaacggtgagagccttcatgaacttcgtgaaggaacggtgggaatcaatacatgctgcccctgtggtcgtgttgccatatgaaggcgctgaaagcagccccaagacactcccggcagaagtttcggggcaagcagaaccccagaatgtccaacgtgggagcggttatgtctcctcaaagaatggcatcagcagttgatccgtgcagctttgagggcatcttgctgtaaacttgtgtacagttaaacttgtatagattactcgagagggcagattaggtatagatcgtaccaattggtggattttgcagagtaatgttccatttacgtcgtagtgaagataactagcgtagacgagaacttaggagagaattttgggtccaattcgctgtcttggatcgttggtctggcagttagggatgtcaagtaagaattttgggtccaattcacggtcttggatcgttggtctgacagttaggaatgtcaagttgacagatgcatgtattcataatccgtttggaacgctgc

SEQ ID NO: 112336 - DNA, 2573 bp, Zea Mays
atgaaatcgagggaaggttcacgacacgctgctccccaccactaaccgcactcgattgagcgccatgctgcagctccagccccctgggttcctgcccatcccgcgccggcgcgtcaccgcccgcgggcgtcgcgcccgccctgtcatcgccttcaactcccagtggaagatccccgacgtcgacacagatgcggtgcgggagcgagtgcggtcttggatgtctctggcgcggggcgcgatcgccgacgcggggcgcgcggcgcgggagggagggaggcacaaagaggagcccgagggtgggaagaagaagcagcggaaggaggtgaccgtggaggagcaggcgttcgttgcggtgccagaggtcaccgtggagccgcgggtgccccagggttggctctcgctggacgccgtcgtctccatcgagcagttcgccaggttgaatgggttgacggggagacaggtgcagaggatatttgaatcacttgctccagagcatctgcacaatgacgctcgaagcctggttgagtatagctgcttccgctacttggcaaaagataattctgacttccatccaaacttgaagggttcatcatggcaggcaaacacatcaaacgggagataattttttgtatgatgagaaagtcttatgcattggctctagtaaaaaaagacctgttctaaaatgggaggaaaataccgcatggccaggaaaccttaccttgacggacaaggcgctgtattttgaggtaccaagaaaccaatgaggcttgaccttacaaatcagaattcaagggctgaaaagacgaaagttggaccatttggatccaaactatttgactctgctgtctcagtttcttctggttcaatgtcagatgaatggacattggagtttgttgatttcagtggggagatgagacgagatgtgtggctcgccttcatcagtgaaattatttcagtttatagattcattcgtgaatatggtccaggtggtgatgatccagcaatacataatgtgtatggtgcgtacaaagggaagaaaagagctgttagtagtgcagcgaacagtattgcaaggctccagtctctgcagttcatacggagattatatgaagatccagctaagctagtgcagttctcttacctgtccaacgcaccatttggtgatgttgttcttcagaccctagcagtgaacttttggggtgggcctctgactacaaaagccagatctgcaaatcatagatcaactcagtggcatagatcttcagaggacccatctagcggtcgcacacatgtttacgacatagatggcagcgtgtacttgcgcaagtggatgacgtcccccagctggacatctagccactcagccaatttttggagaaattcttctgtcaagtatggtataatattgagtaaatctttagttgtagctgataaaaaccttgtagaaaaggcaatggttgactgtaaagagaagagcaaagtagttgaaaggacacaagcgacaatagttgctgctacaatcgaaggtattccaagtaacattgacctcttcaaggagcttatgcttccttttgcaatagtggctgaaaatttcaagaaactgcaacgctgggaaaatccacgttcaacattttgttttctactattggttcatactgttattttcaggaacatgctttcttatgtatttcctttcaccttgatgacgatggccctttccatgcttgctgtcaaaggactgaaagaacaaggccggttaggtagatcttttggtaaagtgacgattagggatcaatcaccttcaaacacaattcagaagatcctagcccttaaagaggcaatggcctcagtggaaaattatctccagaatctgaatgtctccctgctgaagatccgcacgatccttctagctggccaacctgaggtgacaacacaggtcgcgtttgttctcctagcatcctcagccgtccttcttgtgtttcctttcaaatatgttcttgcattctttacatgtgatcttttcacaagggagctagaattccggagggaaacggtgagagccttcatgaacttcgtgaaggaacggtgggaatcaatacatgctgcccctgtggtcgtgttgccatatgaaggcgctgaaagcagccccaagacactcccggcagaagtttcggggcaagcagaaccccagaatgtccaacgtgggagcggttatgtctcctcaaagaatggcatcagcagttgatccgtgcagctttgagggcatcttgctgtaaacttgtgtacagttaaacttgtatagattactcgagagggcagattaggtatagatcgtaccaattggtggattttgcagagtaatgttccatttacgtcgtagtgaagataactagcgtagacgagaacttaggagagaattttgggtccaattcgctgtcttggatcgttggtctggcagttagggatgtcaagtaagaattttgggtccaattcacggtcttggatcgttggtctgacagttaggaatgtcaagttgacagatgcatgtattcataatccgtttggaacgctgc

SEQ ID NO: 112337 - DNA, 4617 bp, Zea Mays
cgcgcgcccgtgtcacaaagagagtgaagagagagcatggaaggctcacccgccgatgccgccggctccggccgccgcacgcgcacccggggcgcggaggcgtcggggcgtgccgccgtgctccaacaactccgcgccgttcgcagtggtcaaattcgtgcctccgacgccatccaggtgaaggttgacgccccgatttacgacaccgtcccggaggaggagtacaacgtgctcgtcgctcgccgccgcaaggaagcaggcgagttcatcatcgacgacgacgggctcggttacgtcgaggacggccgcgaggaggactggagccaccgcgctctcccttcctcctccgacgagggatctgaaggcgaggacggcgccccccgcaagcggaagcagacgcgccctccccaggcgaagcgccagccgcagcagtccgccaaggtggcctctctctccgccgctgccgcaaagacgggccagcagatctcctctatgttcacatcctcggtatttaagggacgcggcagcgaccgcgccaagaacttggcactggccgccgacagcatcgtggacgacgtcatcgccgagtttgcacctgacgagaacgaccgtgaggagaggcggcgacgggttgctagggtttgtgcgccgcagcctgtcccaacagtttcctacatcaagcctcaaaaggtaattctcgatgctgaaatggtcagatcggagaatgaaaatgatatggtggtggtggaattgaagaacgatactgagatggaaaccaatttggaagaaattcctggttctagtgctgaattggtggttaataagagtttggaggagccgaagcaggaggataatggggaagtaaagatagaaaaggcacaccgcctcaatgcaaagattaaggcggaggagtgcagaaataatgatgtgacgagtgcaacagaaggatggatgaagatatgtgggaatggggagaatgcagtaggtgaagaaggggtggctgttgatggtaacaccaatgtggatgaaagttcagagtttgagctgaaagatggagcactgcccttctacatactggatgcatacgaggaaccatttggtgctaattcaggcacagtgtatttgtttgggaaggttgaagttggcaagcaattccatagttgttgcgtcattgtaaaaaatattcaaagatgcatatatgctattccaaaccggtcagtgtttccaatggactccatatcagggatagaaagaaaccccactgctgaccttttgccatcacttcgagcaactctacatgagttggcatcaggattaaagagtgaaatagctgacaaattgtcagacctcaatgtgtcaaatttcataatgactccagtcaagaggaattatgcatttgagaggactgatctaccaaatggagagcagtatgtcctaaaaatcaattatccttacaaggatcctgctctaccagcagacctcaggggtgaacattttcatgcattgcttgggacaaacaatagtgctcttgaattgtttcttatcaaaaggaaggtcaagggaccttcatggctgtcggtttccaagtttgtgacacggccatccactcagcgggtcagctggtgtaaatttgaagttacagttgattgcccaaaggatatatctgttttgacaacaagtacaaatctagaagttcctactgttgtagttggagcagttaatctcaaaactatcataaatgagaaacacaatgtgcatgagattgtgtcggcatctctcatatgttgtcatcgggtgaagattgatagtccaatgcgtccagaagattggcagaaacggggaatgctcagccattttactgttgtgcgcaaacttgaaggtagcatatttcctataggtcttgctaaggaagcttctgataggaaccagaaggctggtagcaacgtgctagcactagaaagcagtgaacgtgcattattaaatcgcttgatgattgagctgagcaaacttgattgtgatgtacttgtgggacacaatatttcagggttcgacttggatgtgcttctacaccgtgctcagacatgcaaagtgccaagcagcatgtggtccaagattggtcgtctcaggcgatcattaatgcccaggcttaccaaaggaagcacactctatggttctggagcaagtccaggaattatgtcctgtgttgctggccgtcttctctgtgacacctatttatgctctcgtgaccttctgaaggaggtgagttattccttgacacaacttgcagaaacacagttaaaaaaggtcaggaaggaggtttctccacacgatatacctatgatgttccagtcttcaggcgaactgctcaaactggttgaatatggtgagacagatgcatggctttctttggagctcatgtttcatttgagtgttctcccactgacacgacaattaaccaacattagtggtaacctgtgggggaaaacactccagggtgctagggctcagagggtagaatatctactactgcattcattccatgcaagaaaatttattgcaccagataaatttgcacgcaacaaagagctgaactccacaaaaagaaaaatgaatcctgatactgggggtgcaaatgctgatgatggtgctgctgatccttccgttgatgatgaagtgcataatggtgatcaaagtaaagctagaaaaggaccttcatatgctggtggattagttttggagcctaagaagggtctatatgacaagtatgttctacttctcgacttcaacagcctttacccttcaataattcaggaattcaacatatgctttaccactgtcgagcgttcttctgatggcagtgtacctaatttgccagcatcaaaagttactggtgttttacctgagttgctgaggagtttggtggagaggagaaggatggttaaatcatggttgaagactgcttctggtcttaaaaagcagcagttcgatattcagcaacaagcattgaaacttactgcaaataggttttatgcaaagccacttgctgagctgattacactccaaggtagagagatattgcaaaacactgtagatctggttcagaacaatttaaatttggaggttatctatggtgatacagattctatcatgatacatactggacttgatgacatctccagggcaaaagcaattgcaggaaaggttattcaggagatgtgcaaactgaagaaagatggtcttaccaagaatgcttcaattcaggtgaacaaaaagtaccgttgtctggagattgatcttgatggcatatacaagagaatgttacttcttaaaaagaagaaatatgctgctattaaagtagcactggatggcagcttacgagagaacattgaacgcaaggggctcgatatggtcagacgtgattggagtttgctgtcaaaagacattggagatttttgtcttaaacaaattctgtctggagggacatgtgatgatgttgttgagtcaatacatagttcacttgtccaggtgcaagagcaaatgagaagtggtcaaatagaactcgaaaaatatgttatcacaaagagcttaacaaaagcaccagaagattatccagatgctaaaaatcagcctcatgttgctttgagactcaagcaaaatggttactctggttgctcagctggtgacacagtaccttatataatttgctctcagcaggactcagataatgcacattctgtgggaatagctcagagagctagacatcccgaggagttaaaaagagaccctgacaagtggatgattgacattgactattatttatcacaacagattcatcctgtcgtttctcgtctgtgtgcttccattcagggcactagtccagctcgtctggctgaatgtctgggccttgattcggctaagttccaaccaagattgactgagtcgagcaaccaagatacatctatgatgctgttatctgtaatcgatgacgaagatgagagatatcgtggttgtgaaccactgcgtttgtcatgcccaagctgttctggtaccttcgactgcccccctgtatctagtctgattactagtgctagtgctacaagtgtatcagatccaattgaaggaaaggatgctactgctaatttctggcgccatatgcggtgcccaagatgcctagataatactgttgagtccaaattttccccttctatgctcgccaaccagatgaaaagacaggctgataatttcattagtctatattataaaggtttgcagatgtgtgacgatgagggttgcaaatactcgactcacagcgtaaaccttagagttatgggggattctgagagaggaactgtctgtcctaactacccacgctgcaacggtcgcctagtaagacagtacaaggagtcagatctgtacaggcaactatcatacttttgttatgtacttgatgcaacccggtgtcttgaaaagctggaccagaaggcaaggctccccttcgagagagagtttgtagcagtaggccaaacaattaaattggcactgctagagatccagaaaatccgagacagatgtgcatttggatgggttcagctaaaggaccttgccgtatcaatatga

SEQ ID NO: 112338 - DNA, 4933 bp, Zea Mays
cgcgcgcccgtgtcacaaagagagtgaagagagagcatggaaggctcacccgccgatgccgccggctccggccgccgcacgcgcacccggggcgcggaggcgtcggggcgtgccgccgtgctccaacaactccgcgccgttcgcagtggtcaaattcgtgcctccgacgccatccaggtgaaggttgacgccccgatttacgacaccgtcccggaggaggagtacaacgtgctcgtcgctcgccgccgcaaggaagcaggcgagttcatcatcgacgacgacgggctcggttacgtcgaggacggccgcgaggaggactggagccaccgcgctctcccttcctcctccgacgagggatctgaaggcgaggacggcgccccccgcaagcggaagcagacgcgccctccccaggcgaagcgccagccgcagcagtccgccaaggtggcctctctctccgccgctgccgcaaagacgggccagcagatctcctctatgttcacatcctcggtatttaagggacgcggcagcgaccgcgccaagaacttggcactggccgccgacagcatcgtggacgacgtcatcgccgagtttgcacctgacgagaacgaccgtgaggagaggcggcgacgggttgctagggtttgtgcgccgcagcctgtcccaacagtttcctacatcaagcctcaaaaggtaattctcgatgctgaaatggtcagatcggagaatgaaaatgatatggtggtggtggaattgaagaacgatactgagatggaaaccaatttggaagaaattcctggttctagtgctgaattggtggttaataagagtttggaggagccgaagcaggaggataatggggaagtaaagatagaaaaggcacaccgcctcaatgcaaagattaaggcggaggagtgcagaaataatgatgtgacgagtgcaacagaaggatggatgaagatatgtgggaatggggagaatgcagtaggtgaagaaggggtggctgttgatggtaacaccaatgtggatgaaagttcagagtttgagctgaaagatggagcactgcccttctacatactggatgcatacgaggaaccatttggtgctaattcaggcacagtgtatttgtttgggaaggttgaagttggcaagcaattccatagttgttgcgtcattgtaaaaaatattcaaagatgcatatatgctattccaaaccggtcagtgtttccaatggactccatatcagggatagaaagaaaccccactgctgaccttttgccatcacttcgagcaactctacatgagttggcatcaggattaaagagtgaaatagctgacaaattgtcagacctcaatgtgtcaaatttcataatgactccagtcaagaggaattatgcatttgagaggactgatctaccaaatggagagcagtatgtcctaaaaatcaattatccttacaaggatcctgctctaccagcagacctcaggggtgaacattttcatgcattgcttgggacaaacaatagtgctcttgaattgtttcttatcaaaaggaaggtcaagggaccttcatggctgtcggtttccaagtttgtgacacggccatccactcagcgggtcagctggtgtaaatttgaagttacagttgattgcccaaaggatatatctgttttgacaacaagtacaaatctagaagttcctactgttgtagttggagcagttaatctcaaaactatcataaatgagaaacacaatgtgcatgagattgtgtcggcatctctcatatgttgtcatcgggtgaagattgatagtccaatgcgtccagaagattggcagaaacggggaatgctcagccattttactgttgtgcgcaaacttgaaggtagcatatttcctataggtcttgctaaggaagcttctgataggaaccagaaggctggtagcaacgtgctagcactagaaagcagtgaacgtgcattattaaatcgcttgatgattgagctgagcaaacttgattgtgatgtacttgtgggacacaatatttcagggttcgacttggatgtgcttctacaccgtgctcagacatgcaaagtgccaagcagcatgtggtccaagattggtcgtctcaggcgatcattaatgcccaggcttaccaaaggaagcacactctatggttctggagcaagtccaggaattatgtcctgtgttgctggccgtcttctctgtgacacctatttatgctctcgtgaccttctgaaggaggtgagttattccttgacacaacttgcagaaacacagttaaaaaaggtcaggaaggaggtttctccacacgatatacctatgatgttccagtcttcaggcgaactgctcaaactggttgaatatggtgagacagatgcatggctttctttggagctcatgtttcatttgagtgttctcccactgacacgacaattaaccaacattagtggtaacctgtgggggaaaacactccagggtgctagggctcagagggtagaatatctactactgcattcattccatgcaagaaaatttattgcaccagataaatttgcacgcaacaaagagctgaactccacaaaaagaaaaatgaatcctgatactgggggtgcaaatgctgatgatggtgctgctgatccttccgttgatgatgaagtgcataatggtgatcaaagtaaagctagaaaaggaccttcatatgctggtggattagttttggagcctaagaagggtctatatgacaagtatgttctacttctcgacttcaacagcctttacccttcaataattcaggaattcaacatatgctttaccactgtcgagcgttcttctgatggcagtgtacctaatttgccagcatcaaaagttactggtgttttacctgagttgctgaggagtttggtggagaggagaaggatggttaaatcatggttgaagactgcttctggtcttaaaaagcagcagttcgatattcagcaacaagcattgaaacttactgcaaataggttttatgcaaagccacttgctgagctgattacactccaaggtagagagatattgcaaaacactgtagatctggttcagaacaatttaaatttggaggttatctatggtgatacagattctatcatgatacatactggacttgatgacatctccagggcaaaagcaattgcaggaaaggttattcaggagatgtgcaaactgaagaaagatggtcttaccaagaatgcttcaattcaggtgaacaaaaagtaccgttgtctggagattgatcttgatggcatatacaagagaatgttacttcttaaaaagaagaaatatgctgctattaaagtagcactggatggcagcttacgagagaacattgaacgcaaggggctcgatatggtcagacgtgattggagtttgctgtcaaaagacattggagatttttgtcttaaacaaattctgtctggagggacatgtgatgatgttgttgagtcaatacatagttcacttgtccaggtgcaagagcaaatgagaagtggtcaaatagaactcgaaaaatatgttatcacaaagagcttaacaaaagcaccagaagattatccagatgctaaaaatcagcctcatgttcaggttgctttgagactcaagcaaaatggttactctggttgctcagctggtgacacagtaccttatataatttgctctcagcaggactcagataatgcacattctgtgggaatagctcagagagctagacatcccgaggagttaaaaagagaccctgacaagtggatgattgacattgactattatttatcacaacagattcatcctgtcgtttctcgtctgtgtgcttccattcagggcactagtccagctcgtctggctgaatgtctgggccttgattcggctaagttccaaccaagattgactgagtcgagcaaccaagatacatctatgatgctgttatctgtaatcgatgacgaagatgagagatatcgtggttgtgaaccactgcgtttgtcatgcccaagctgttctggtaccttcgactgcccccctgtatctagtctgattactagtgctagtgctacaagtgtatcagatccaattgaaggaaaggatgctactgctaatttctggcgccatatgcggtgcccaagatgcctagataatactgttgagtccaaattttccccttctatgctcgccaaccagatgaaaagacaggctgataatttcattagtctatattataaaggtttgcagatgtgtgacgatgagggttgcaaatactcgactcacagcgtaaaccttagagttatgggggattctgagagaggaactgtctgtcctaactacccacgctgcaacggtcgcctagtaagacagtacaaggagtcagatctgtacaggcaactatcatacttttgttatgtacttgatgcaacccggtgtcttgaaaagctggaccagaaggcaaggctccccttcgagagagagtttgtagcagtaggccaaacaattaaattggcactgctagagatccagaaaatccgagacagatgtgcatttggatgggttcagctaaaggaccttgccgtatcaatatgatgtttttcttgtgtgaaagggctcaattagataagtttgaattaaccgtgcaagaaattcatctctctgtaggttattctagatctcgttggtaaaaggaacaggacacggcaaacggtgtatcgaaacaccagccgtctttggtatttccctgcgtgacagaccttgtatcatctatacatgtgttttagccagtggctgtattgtacaactttatgttgtgtccgtctccataggcctcggtgcatgtgccaatgtagtcttgttaatataattatacgcagcgtgtgatgagaaaaaaaaaacaaga

SEQ ID NO: 112339 - DNA, 811 bp, Zea Mays
cacgctgtcatgctcccaaattacggcgcctactctgttttctgattcactgaaccgagcgagttctcgtcgcatcgtatgcgcctccttctctgattccccaaaaatattccctgttttgctgttcttttcttcctcgtaatccgctcggcttccattgttgccgccgctaccgacggcgacggcagacatcaagtgtcagtcctccttccgccgaagtcttcttttggttggactccgactctccgacaggagttgcgctcctcctccccctctactctactggattacactagcgtggagatccatctctatttgtttttggtctcttctttgcttggggcaaggtcaatcacagttgataagataccacttgtactctaatctgtcagtctccacgtgcggctgcatatatactgtttcaaaatttcggagtaaggtctgaagtctgaaccctcatgctgcttcagagggattgaggctggttgttggtcgcacttgcacatggcgcagccacagcagcgggtgtaccaagcttggaagggggataacgtgagaaatattctaaacttctgtatttacttcgtttagagtccggcacatccttttgttttcttctgttgttaatttttaatttaccaattcttttatatctgtagtatattaatcttattaggtgcagccacatcttttcaaatgtatcacaggtctaaacagaatgctagccaacaagtttgtaactttgccaatagtggaattgagctaaacctccataggccagcttcttggccatgtcagtttccttttcttc

SEQ ID NO: 112340 - DNA, 1465 bp, Zea Mays
gttgcacttgcacggtctgatgcgatagatagacagacagacagacagacagacagaccctcgcgacgactctgctctgtttaatttgcgtggccgacgttgatgtgcttcgagctggcggaccagcgcggaccgcagggcggcggcggagcggggtggccggcgaagcggcgcgcgggaggcgtgcaggacgagggcgcggccgcggccgcggggatggcaatggcggccgccggccccggggaggtgatgtccgagtactaccaggcgcaggagctgtcgacgatggtgtcggcgctgacccacgtcgtggccggcgcgccgatggggagcgcccctgcgcagcggccaatgcacggcgcctccggctactacgcgcacgagatggggagctaccgcggcgcgccatcgccggagctcgcagggtcggagctgagttcggacacccagagcgcgggcgcggcggccatggaggagcaccagtcggcagctgcgctgtccagccaggagggtcccgagacgccgcggaggcgctaccgcggggtgcgccagcggccgtggggcaagtgggccgccgagatccgggacccgcacaaggcggcgcgcgtctggctcggcacgttcgagaccgccgaggccgcggcgcgcgcctacgacgaggccgcgctccgcttccgcggcagccgcgccaagctcaacttccccgaggacgcgcgcctctacccggcgtccacggcgggcgcggcggcgcctctcgccgcggcggcctcgacctccccacctgtctactccggtggcgtccagggctcgtcggactacctgaggtaccaccagatgcttctgcaagcgtccacgggcagccagggcaccctgctcccgttctatggcggcggcatgagcaatccctacggcggcggtgccgccatgaccggttcctacggtggagccggcggcggcaacacgagtggttccttgggctcctactactcgttcccggcctcctctgtttctgtcgccaccgtgccgtcctctacttcctctgcttcggggtactactactcgtcgccgcacgactcgcaacacagcgaggcgtccgcggcggcggactggaactgggagagcgcgctggcctggcccgactcgagccagtacccgccgccacctcacactcagtagcagcagccagtagcggtcttcttcttttctctgtaacaataagtaaggtgagtacggttgcgcggagggagacgcgcggcaacgcaaagcaaaacaaagcagatcaacaagaggaggatgctttcatttctttcgtgttatgatgatgacacccgagtggtctttgtttgttgatttttagttttggtcgacgatgtggctggcggctatccccattgtttccatttaatcttggctgcgaatttaagagatgaaagctccaccccgttctccaagactccatcggtgt

SEQ ID NO: 112341 - DNA, 1506 bp, Zea Mays
ttctcggcggccgtccgtctggccccgtctgtcccttgcggccttgcgtactcggccaccaaccgcttttgcttgctgctactcgccgccagccaaaagcagccgccccccagcccgaagcgacgccacacccgcatctgcttcattccacccgccccgcgaggagcttctagaagagggagaccccggaggagccatggcggaggaaaaggagtcgacgtcgatcccgctcagccaggcggcagaggctgtcgaccccgaggacccggccaagtcgccgccgcggcccagctcgcccaccacctccacacgcaaggcatgctgtgctgttcttcaaagttgggtctcaagaaagtttatgactggatgtgtagtcctttttcctgttgcagtcacgttcttcatcacatggtggtttattcaatttgttgatgggtttttcagtcccctatatgcaaaaattggaatcgacatatttggtcttggttttttgacttctatggtattcatatttctggttggaatatttgtttcttcatgggttggttcaaccatcttctgggtgggcgagtggtttataaagaaaatgccatttgtaagacatatatattcagcatcaaagcaagtcagcactgcaatttcaccagatcaaaatacgactgctttcaaagaagttgcaataattcgtcatccacgaattggtgaatatgcatttggattcataacatcaactgtggtccttcagactgacaaaggcgatgaagaactgtgtagtgtgtatgtgccaacaaatcatctatacatcggtgacatatttctggtgaactctgaggagatcataagacctaatttatccattcgagaaggaattgaaataattgtgtcaggaggaatgaccatgcctcaggtgattgcatcactggagcccatgccacggaaaagccagaacattcgtctaaatagaatgacgtgatgtaaaacatgtcacatatgcaacaaggtcgtgcatcaagcagatagcatgacctgtggggcacgattagggtgccttggctatatgcgtagccatgtgatttggatagaggagcaactttgtgctgagccattgtggcatttccatactgcagggaagcatcgtgttgatgccctgggataatttattgtcttaggctagtttggcaaccccatttttacaggggattcctattttttcaagaaaatatagtttattttcccttaaaaaatagaaatctctttaaaaaatggagttgccaaactaatcagtaaattgaaggggatcatgggcttcaattcactggtcaccaaaccagccctcaaacttgtgctactctttgtgcacttactagtactggttcaaaatgttagcgtctacgcgtgaggtgtataattgattaaattcgtttgtaactacgtgctgtataacatcttacgttacaaagagatcacacaacgctctgaccagatttcttctttcagatttacaga

SEQ ID NO: 112342 - DNA, 1307 bp, Zea Mays
cagcgctttccgtcccgtactcccgtgtaccctgtcccgtcctcctagctcgcattccgatttccgagttccagccagcgagcgagccaaccaactgaaccaaccaaccaccgctccttcttccttccttccttccccagttcccctcgtctcaccagtcaccaaggttccgagagcagagcgagataaaaaaaaaggtaatccgacggaaacgacaagggcgcggcgagggcggggacagggtcgggaaggccctgggcgcgggggcgccaagcgcatggcatcgtcgagggtgatgccgtcctcctcgccgtcgcacacggcctctgatctcgcgcgcctagcgcaggccgccagcaggcccggcggcgggggcagcgggctgggctccatgaacgtggaggagctcctccgcggcatctacagcgacatgcccaccccggcgccgcccgcgtcggagcccgaacgcccgaggtcgccggccccggcgccggaggtcgccacgcggaggacggcggaggaggtgtggaaggagatcaccggcggaggtggcagtggggaacccgtgccccccgtggcggctcaggctgccgtccccgctggtggtggtggcgccggcggcccggagatgacgctggaggacttcctggccagggaggagggcgcggtgaaggaggatggggttagggtttcgggcccctctgcgccggccatggggttcctgggcggagcggagggcgtgggtgtgcctggcggcggaggcgggaggggaaggaagcggcagctcatggatccagtggatcgcgccgcgatgcagcgacagaaacgaatgatcaaaaaccgcgagtctgctgcccggtcacgggagaggaagcaggcttatatcgccgagctagaatcgctggtaacgcacctcgaggaggagaatgccgagttgttgagagaacaggaagagcggcaccagaagcggcttaaagagctcttggaacgggtgacgccagtcattctgaggaaaaaaccatcaggagatcttagaagaacgaactcaatgcagtggtagattggagccaagctcagtcgccgtctctttacagttataacatagaatttgcccctgtatgtcatttttctatttatatatgcgccaactaagttgtagtatcttagctgaaatagcatgggcaattagccgacacaaaggttaaacgaaatcatattatgtaggagtgctcatgaccaagaaaggttgctgttcctgcctgctcgtgtgttcattctgcctggtttatttttaagattttgttgtc

SEQ ID NO: 112343 - DNA, 1352 bp, Zea Mays
cagcgctttccgtcccgtactcccgtgtaccctgtcccgtcctcctagctcgcattccgatttccgagttccagccagcgagcgagccaaccaactgaaccaaccaaccaccgctccttcttccttccttccttccccagttcccctcgtctcaccagtcaccaaggttccgagagcagagcgagataaaaaaaaaggtaatccgacggaaacgacaagggcgcggcgagggcggggacagggtcgggaaggccctgggcgcgggggcgccaagcgcatggcatcgtcgagggtgatgccgtcctcctcgccgtcgcacacggcctctgatctcgcgcgcctagcgcaggccgccagcaggcccggcggcgggggcagcgggctgggctccatgaacgtggaggagctcctccgcggcatctacagcgacatgcccaccccggcgccgcccgcgtcggagcccgaacgcccgaggtcgccggccccggcgccggaggtcgccacgcggaggacggcggaggaggtgtggaaggagatcaccggcggaggtggcagtggggaacccgtgccccccgtggcggctcaggctgccgtccccgctggtggtggtggcgccggcggcccggagatgacgctggaggacttcctggccagggaggagggcgcggtgaaggaggatggggttagggtttcgggcccctctgcgccggccatggggttcctgggcggagcggagggcgtgggtgtgcctggcggcggaggcgggaggggaaggaagcggcagctcatggatccagtggatcgcgccgcgatgcagcgacagaaacgaatgatcaaaaaccgcgagtctgctgcccggtcacgggagaggaagcaggcttatatcgccgagctagaatcgctggtaacgcacctcgaggaggagaatgccgagttgttgagagaacaggaagagcggcaccagaagcggcttaaagaggtaacttcctttggttaacgggtgtgaagtgcatgcatgtattatctcttggaacgggtgacgccagtcattctgaggaaaaaaccatcaggagatcttagaagaacgaactcaatgcagtggtagattggagccaagctcagtcgccgtctctttacagttataacatagaatttgcccctgtatgtcatttttctatttatatatgcgccaactaagttgtagtatcttagctgaaatagcatgggcaattagccgacacaaaggttaaacgaaatcatattatgtaggagtgctcatgaccaagaaaggttgctgttcctgcctgctcgtgtgttcattctgcctggtttatttttaagattttgttgtc

SEQ ID NO: 112344 - DNA, 1419 bp, Zea Mays
actcaaatcacaaaccccgctacctcttaactcttcacacgcacaccgtctctcagtctcagacccacgtcgtcaaccatggttgctgacatgaaggagaacggcggcgcggtgttggcggcgggcgagaaggcgccgcaggtggtcgtcaagcgcggcgagccgacgctggtgccgccggcggaggcgacgccgacgggcgggcagtactacctgtccaacctggaccagaacatcgcggtgatcgtgcagacggtgtactgctacaagcccagcggcggcggcggcgacgtggcggccgcgctccgcggcgcgctggcgcgcgtgctggtgcactactacccgctggcggggcggctgggcgtaagcccggagatgaagctgaccgtggagctgaccggcgagggcgccgtgttcgtggaggccgacgccgcctgcgaactcgccaccgtcggcgacctcaccaagcccgaccccgccgcgctcggccagctcgtctactccgtccccggcgccaagcacatcctcgagatgcctcccatgaccgcgcaggtgacaaggttcaagtgtgggggcttcgcgcttggcctggccatgaaccactgcatgttcgacggcatcggcgccatggagttcgtcaactcgtgggccgagacggcgcgcggcgtcgctgagctcaccgtgccgccgttcctggaccgcggcgtcctgaaggcgcgcgacccgccggtgcacaccttcccgcaccacgagttcgccgagatccccgacgtctccgacacggcggcgctctacggcgcgcaggagctgcagtaccgctccttctgcttcgacccggaccggctggagcgcgtccgcgggctggcgcttgccgacggcgccctcggccgctgcaccaccttcgaggcgctgtcggggctcgtgtggcgcgcgcgcaccaaggcgctcgggctggcgcccgggcagcgcacgaagctgctgttcgccgtggacggacggcgccggttcgtgccgccgctcccgcggggctacttcggcaacggcatcgtgctgaccaacgccctggccacggccggcgagctgctgtccgcgcccgtgtcgcgcgcagccgggctggtgcaggaggccgtgcggatggtgactgacgactacatgcggtcggcggtggactacttcgaggcgacgcgggcccggccgtcgctggcgtccacgctgctcatcaccacgtggtcgcgcctcgagttccacggcgccgacttcgggtggggcgagcccgtcatgtcgggcccagtcacgctgccggagaaggaggtcatcctcttcctcgcacacggcaaagagaggaagagcatcaacgtgctgctcggcctgccagccaccgcgatggacgccttccaagagctcgtggacgagatatga

SEQ ID NO: 112345 - DNA, 204 bp, Zea Mays
agcctgtgtgtgcgttcgattcgcttctgctgcagctagggtttagaggttttctgggcgcggagcgggaggcggcggcggctatggctgcggcggaggaggagatcgcggtgaaggagccgctggatctgatacgcctcagcctcgacgagcgcatctacgtcaagctccgatccgaccgcgagctgcgcggcaagctccatg

SEQ ID NO: 112346 - DNA, 915 bp, Zea Mays
cccaaccatagaaatcctccaattattcgattcccaagccactaaggcccttggaggaacaacagaatccagaaaccgaaaagaggcctcactgctgccgcctgggccaagtcgtcgtcttgcttgccaatccgtcgctccacctgaacacaccggcgaagaggaggcgaagaagcgatgggcgtgaccaaggaggacgtcgaggcggccatcacctccgctctcagcccttccaatctcgtggtgacggacacgtccggagggtgtggcgcgagctacgagatcgaggtggtgtcggagaagttcgaggggaagcggctgctggagaggcaccggatggtgaacaccgcgctggcgtctcacatggcggagatccacgccgtctccatcaagaaggcgctcaccccggctcaggcccagccccaggcccagccggagccggccgccgataagccccaggcttaagtgcttaacaccccccaaaacggtttgatcccatatgccgatgcacgattacattggctatctgcttgaataatgcggcggatgcacttgctaaattgcaggatgttatccttgactgattagaaacttctgcaccgtgcatttaacttctgtgtcactgtgtgtgtgttctggatgcttctgccctggtcgtttgctcgagactgtgtgttgcagttcatgctgttaatgttctgccagggtggggttttcagtcctggaatttttatatttgactgttgctatgtctttccttgcttgtaggggtaaggggtttattctttaaccttgtggattagattactgtatccatcatggtctgcagtggggagtggggtgtgatgatgatggctgcatcttgtttacacaacattttaatttcctgattgatgatgccgcaatcaagatgaa

SEQ ID NO: 112347 - DNA, 132 bp, Zea Mays
atgaaactggtgaagtatagaggacaaaggagaagaagaaaaatgaacccctactgcattggagaaagaggtggaggatatagaagcaagaagagactatcagcttgtgctgtcttcgccactgccatttga

SEQ ID NO: 112348 - DNA, 209 bp, Zea Mays
ctgattttttgacaacaggtgactcacttctcttgttatgtgttagaacactcagcataccactaggtgcggtaacagtgcaaacttatgagatgcttgttatgatcattgttaacatggatctgttctcatagccagctgctattatttctttagatctgtaggggtcagatcttcgaacaatgtaatgtgtagttcattttctttgc

SEQ ID NO: 112349 - DNA, 384 bp, Zea Mays
atggagacctcaatcccacgccgccagtggatttggagcgctggccctcaccatcgcggagcggtggcacaaggcgatggacacgcgggagcgcgtgctgtcgtggatttgcaaccgctcccccaatcctcgcccgcatttagcgcccctccctcgctcatccacgcgcacgtagccactgcatcgtcgaccccgaccgccgtcgcacgtccggtcgcgtcggtgctcatggaccttgagcctggcaccatggacgccttccgcattggcccctacggtcagatcttccgcacagacaactttgtctttggccagtccggcaccggcaacaacttggccaaggtgctctacaccgaatgtcgtagtccaaggtccacgacctag

SEQ ID NO: 112350 - DNA, 1431 bp, Zea Mays
tcgatcgccggatctctcatcgaatctctcgcatctccaaggtctcctccgaccccctctcacatcacgacattctttggcgaatccttccagctgctcgctccaagctcccagctctctgagactctgactgaccaccgcggacgtggtggtctctagctagcatgctgtcttcacaccacgaggccgccatgctgccgtacgcgccggggccgccgccatcgctgctgctagaccggcggtcgtacaagcagggcggcgaggcggcgcccagctgcccgcgctgcgactcgcccaacaccaagttctgctactacaacaactacagcctcagccagccgcgctacttctgcaagggctgccgccgctactggaccaagggcggctccctgcgtaacgtgcccgtcggcggcgggtgccgcaagaaccgccggggcaagtcgtccttgcggtcggcggcggactccatcgcgagcggcggcggcggccgcgacgcggcgttcggccaccggttcccgggccctgtccgccccgacctggtcctggaaggcatggtgggcaatcacccgtccaacccagctggccaggcggcgatgcccggcggcgtgcccgctgcggctgatggctccaccattgatctcgcaatgctgtacgccaagttcctcaaccacccgccggcggaggaaggcgtcggggccgtgacgccgccggagtcggcagggcaggtcgacgaggcgttcggcgcgtccagtgacctgatgagccctggtgctctggcgccggtgcagttcgatccgtgccaggacgggttcggtgagtggtctggcgtgccagtcagcagcgctggcccctcgagtacggctagtactaccgccgcaaccaccatgctgtgcactgacgtgagcgtgcaagctgcattcggcgagctcaacttcgccatggaccagaactgcttcgactcgctagggttacccacggacgacgtcggcaacctctcgtcgtcgtggtgttcgatcgtgccaggcttgtcgacgttagaggacgccaagtatgacttggattcgttcccagatgacgccctcagccttcacgacgagggcatgattagcgggactgatcatgattggagcgtggattgccaaggattggagactctctacatgccgtaactatacacacgaccaaaattcttcttcttctcttcttgctaatttgttcttgttcttgtgatgattggtttcctacatatttttctctttcttttctttcgttaaattcggtttggaagaaatatatatagagatatatatatatctatgtatctatgttttgaagagaggtacgtgagggacaagtcgcgcgctcatgtaattgaattaatgattcggtatacttgtgagatagatcgatgcaatacaataatgttgaagc

SEQ ID NO: 112351 - DNA, 1368 bp, Zea Mays
cgtcctcctcttctccccgctaaagtttcaagtgtcaacgctccggcagtccaccaccgccacccacaggccacagcaccttataaagcttccttcagtctcaaaccttctcttcaaacccgatcggggacaatggcgagcgcgcccggcgaggtgccgtcccacttcctctgccccatctcgctgcagctcatgcgggaacccgtcacgttgcccaccggcatctcctacgaccgcgccgccatctcccgctggctggccacgcctgcgccggccggcggccgcacctgcccggtcacgcgcgtgccgctcccgccgcagccccagctcactcccaaccacaccctccgccgtctcatccacgcctggctcgcgtccctctcccccgaggcggaggtcaacgaggacgtggccgcgctgcgggggcccgtgcccggcgcggaggtggtcgtcgcgctgctgtccgacgccgccggggctcaggttgaggcgctcaagaggctgcgggagctggtggccgagtgcgaggacagcagggcggttctcgagtcccaggacggggtgttcgacgccttgtcccgcgtcgtgagcagtgccgacgcgtgctcgacggcgcgcgaggaggcggtcgggctgctcgcgtcgctccggatcccggagccggagctggccggcgtcgtggccaggcacagcaacctgggggatgcactcacggccgtcctccgctcgtcgaatctgaagtcgcgcgcgaacgccgctctgctcgttaggtccctctcggaagcggcgtggccggcctgggtcatcgggctgagccaggagcttctagcggaggttgtccgcgtggtccgcgaccgtgtctccacgcaggcgaccaaggcagcactgcacgccctcgcggcgctctgcccctacggcctgacccgcgtcaagatcgtgggcgtgggcgcggtgccggcgatcgtggacctcctgctcgacgaccccgagaggcgtgtcaacgagctcgcgcttgtggcgctggaccggttgtgtacgtgcgccgagggccgcgctgagctggtcgcgcacgcggcggggctggccgtggtgggcaagaaggcgctgcgggtgtcggagaccgcgagcgagcgggcggtgcgcgtgctgcgctccgtggcgcgtcacgcggccacgcctgccgtgctgcaggagatggtggagtccggcgtcgtggccaagctctgcgcggcgctgtggtcccagcagtgcgggttgaggaccaagcagaaggcgcatgaggtgctcaagctgcactccaggacctggaggagctcgccctgcctatctccaaaatttttggggctctacccatcatgaggtgctctg

SEQ ID NO: 112352 - DNA, 1823 bp, Zea Mays
tgtatatagaaagtcgcgaagagacgagctctaaagatttctcaagagacccctcaattaatgggttgtacatgccacgacccacgataagtcttcatgtctagaagcttgcgtaccaacaaaactgcaattatctcctcagtctccttcaaacaactcttttttctattgttagactcgaagcctatccccttcacggagctctcgccaagcgctatgggggacgccaacggcggcagtatgcacgttgtgatgctgccatggctggcgttcggccacatcctccccttcacggagctcgccaagcgcatagctaggcagggccaccgggtcaccctcttctccacgccaagaaacaccaggcggttaatccgcatccctccagaactcgcggggcatatccgcgtcgtggacatcgcgctgccgcgcgtggagcgcctgccggaggactgcgaggcgagcatagacctgccatccgacgacctccgcccgtacctccgcgtagcctacgacaccgccttcgccgacaaactctcggccatcctgaaggagccggggccggagaggccggactgggtgctcatcgactacgccgcgtactgggcgccagcggccgcggcgaagcacggcgtgccgtgcgccttcctgagcctgttcggcgccgcgacgctcagtttctatggtcccccggaggggctcatgggacgcggcaagtacgccaggacgaagccggaggacctcaccgtagtacccgactacgtgccgttcccaaccaccgtcgcgcaccgcagcttcgaggcgcgcgagctattcaagccaggccttgtcccggacgactccggcgtgtcggagggccacagattcggcgtgtccatcggagagagccagattgtaggcatcaggagcagaacagagctcgagtcggagtggctgcaggtgcttggcaagctctacaagaagccggtgatcccgatcggcctgttccctccgccgcccacgcaagacatcgccggccacgaggcgactttgcggtggctggacaggcaggctcagggctccgtcgtgtacgcggccttcggcagcgaggcgaagctgacgagcgcgcagctccaaacaattgcgctaggtttggaggcttccggcctgccgttcctctgggcattcaggccgccagccgacgccgcacccggacaaggcacgggcgggttgcccgaaggcttcgaggagcgtgtcaatgaccggggattggtctgccgcggctgggtgcctcaacccaggcttttggctcatgaatcggttggtgggtttctgacccatgccggctggaactccatcgccgaaggcctctcgcggggcgtcacgatggtgctgttgccgctgatgttcgatcagggcctcaacgccaggcttcttgtggataagaagatcgggattgaggtggagagggacgaagacgacggcacgttcgcgcccaaagacatcgcagatgctctgaggacggccatggcggagaaccaagacggaactagggtcaaggaactggccgaggtgtttggaaatgacgaggccaatgatcagtgcctgcgagatttcctccggtatctgtcagaatacatcaggcagcatcaaggttagttccagtccatttcgaggctaatgttaatgcagaaaagggcaaagaaatggcagtgagtcacgtcacgccatcaaaaaaaatccttccaggcaaatactactccgtagacaatagaatatggaatggaagcatgcatctttgagattattgccaagaaattcttgctctctcttctttagaaaaaaaa

SEQ ID NO: 112353 - DNA, 1966 bp, Zea Mays
tgtatatagaaagtcgcgaagagacgagctctaaagatttctcaagagacccctcaattaatgggttgtacatgccacgacccacgataagtcttcatgtctagaagcttgcgtaccaacaaaactgcaattatctcctcagtctccttcaaacaactcttttttctattgttagactcgaagcctatccccttcacggagctctcgccaagcgctatgggggacgccaacggcggcagtatgcacgttgtgatgctgccatggctggcgttcggccacatcctccccttcacggagctcgccaagcgcatagctaggcagggccaccgggtcaccctcttctccacgccaagaaacaccaggcggttaatccgcatccctccagaactcgcggggcatatccgcgtcgtggacatcgcgctgccgcgcgtggagcgcctgccggaggactgcgaggcgagcatagacctgccatccgacgacctccgcccgtacctccgcgtagcctacgacaccgccttcgccgacaaactctcggccatcctgaaggagccggggccggagaggccggactgggtgctcatcgactacgccgcgtactgggcgccagcggccgcggcgaagcacggcgtgccgtgcgccttcctgagcctgttcggcgccgcgacgctcagtttctatggtcccccggaggggctcatgggacgcggcaagtacgccaggacgaagccggaggacctcaccgtagtacccgactacgtgccgttcccaaccaccgtcgcgcaccgcagcttcgaggcgcgcgagctattcaagccaggccttgtcccggacgactccggcgtgtcggagggccacagattcggcgtgtccatcggagagagccagattgtaggcatcaggagcagaacagagctcgagtcggagtggctgcaggtgcttggcaagctctacaagaagccggtgatcccgatcggcctgttccctccgccgcccacgcaagacatcgccggccacgaggcgactttgcggtggctggacaggcaggctcagggctccgtcgtgtacgcggccttcggcagcgaggcgaagctgacgagcgcgcagctccaaacaattgcgctaggtttggaggcttccggcctgccgttcctctgggcattcaggccgccagccgacgccgcacccggacaaggcacgggcgggttgcccgaaggcttcgaggagcgtgtcaatgaccggggattggtctgccgcggctgggtgcctcaacccaggcttttggctcatgaatcggttggtgggtttctgacccatgccggctggaactccatcgccgaaggcctctcgcggggcgtcacgatggtgctgttgccgctgatgttcgatcagggcctcaacgccaggcttcttgtggataagaagatcgggattgaggtggagagggacgaagacgacggcacgttcgcgcccaaagacatcgcagatgctctgaggacggccatggcggagaaccaagacggaactagggtcaaggaactggccgaggtgtttggaaatgacgaggccaatgatcagtgcctgcgagatttcctccggtatctgtcagaatacatcaggcagcatcaaggttagttccagtccatttcgaggctaatgttaatgcagaaaagggcaaagaaatggcagtgagtcacgtcacgccatcaaaaaaaatccttccaggcaaatactactccgtagacaatagaatatggaatggaagcatgcatctttgagattattgccaagaaattcttgctctctcttctttagaaaaaaaaggaagttttctttgttaagaaatctctttttttaaggatgtgatgacagcggccgacggccagaccgattttacgcggtgttgtttggttattcatacgaggattctatgagattaataaagtaagagagattttgactttaa

SEQ ID NO: 112354 - DNA, 444 bp, Zea Mays
atgctctacaagtcctccagctacagcttccccatgaagctggacgcccaccaggtggaaccgtcgcagaaggaggacaacgacgactacctgacccacttgctgttcaccgaggacaacgacaaggacgagctggtgaacgtgccggggtctgtcaccgacgtcatgcgcggcgcccctgggatatatatatttgaatgtcgtggccctagtcccatggattcgataagacggaagcatcgcgtcgccgccggtgttgagcaggagagcagcctagtgatcgaggggcggagcgatgatcaccgggaccatagggggttgtgcgtagctttctggagcacagggtcgatcgtgaagccagagatttctcgccgaaggcgagcacagccacatagccatgacttctcgcgggcagaaggggttccacactgcaaaactttgtga

SEQ ID NO: 112355 - DNA, 1447 bp, Zea Mays
aaatccccctccggctccaggctccagcgcagcgcaacgcaacgcaaacccagacggcccgccagacccagcggtcgcttactcgcatcgcagcgcactcgcgccacagtcggcatcacagaccagatccctgcgggtgcggcggccatggccgagaacttccaactccagggccggcacggcaagtcccgcgtccgcgtctcccgcgtctggcgccgcccggccgcggcggggggcgacgtcatcgttgagtggaacgtcgccgtcagtatcgtctccgactgcctcccctcctacacctccagcgacaactccgccatcgtcgccacagattccatcaagaacaccgtgtatgtcaaggcgaaagagtgcacggaagtggtgtccatggaggaattcgccgtgattcttggaaggcatttcacctcgctgtaccctcaggtttcagaggccacggtgactatcgtggagcgcccatgggagcgtgtgactgtcgacggaaagcctcattcgcatgggttcaaagttggtgttgagaagcacagcacagaggtcattgtaaaaaaatctggaagcctgcgtataaattctggaattcaaggatactcgctgctaaagacaactcagtctgggtttgaagggtttgtgacggatcgctataggcttcttcctgatacaagggaaaggatagtagcaacagaagttactgcttggtggaggtatccctttgaacatgtttcgcagctcccatcgaagccattctgcttcacgcagagatatcaggatgtaaagaaagtccttgcagagacgttctttggtcctccggatgttggtgtgtatagtccatccgtacaaaatacgctatacctcatggccaaggaagtccttacaaggttcccagatatatcgtcagtccagcttagaatgccgaaccttcactttctgcctgtcaacttggggagcaaagaagctccgctggtgaagtttgctgatgatgtgtacctgccgacggatgaaccacacgggacgattgaagcaaccttaataagccgtcccatgtcaaagctgtaaaaaaaatgtagtcgtcaggctggtattagactcctgcttcgtctccccagcatccccaggcttaaaatggacagtaagctgtaagggaaagataaactgtcataaatcgtagcccctatgctttatgtgtggtggtggtaataagtgcacagacttgtattggatgttgtcagctgtagcctgtaggcgtccagcttgtgacgtttcgccactgtaatcgtgtacattggtcgtcttgtgtggaaaccagttaatatctttggaagctttggtcagttttacttcgtcgtctgtagtcttttagctcgttattaggccaccagcttcagtagatctgattgtttctccatatatttgaacatattacgtctccata

SEQ ID NO: 112356 - DNA, 1532 bp, Zea Mays
agcgcagcgcaacgcaacgcaaacccagacggcccgccagacccagcggtcgcttactcgcatcgcagcgcactcgcgccacagtcggcatcacagaccagatccctgcgggtgcggcggccatggccgagaacttccaactccagggccggcacggcaagtcccgcgtccgcgtctcccgcgtctggcgccgcccggccgcggcggggggcgacgtcatcgttgagtggaacgtcgccgtcagtatcgtctccgactgcctcccctcctacacctccagcgacaactccgccatcgtcgccacagattccatcaagaacaccgtacgttccagtgttccaacagtctctctttgcttcctccttccgccgccgccccaaagcggctctggcggcttcttggctactgatttggttcggcttcgcttgtgcaggtgtatgtcaaggcgaaagagtgcacggaagtggtgtccatggaggaattcgccgtgattcttggaaggcatttcacctcgctgtaccctcaggtttcagaggccacggtgactatcgtggagcgcccatgggagcgtgtgactgtcgacggaaagcctcattcgcatgggttcaaagttggtgttgagaagcacagcacagaggtcattgtaaaaaaatctggaagcctgcgtataaattctggaattcaaggatactcgctgctaaagacaactcagtctgggtttgaagggtttgtgacggatcgctataggcttcttcctgatacaagggaaaggatagtagcaacagaagttactgcttggtggaggtatccctttgaacatgtttcgcagctcccatcgaagccattctgcttcacgcagagatatcaggatgtaaagaaagtccttgcagagacgttctttggtcctccggatgttggtgtgtatagtccatccgtacaaaatacgctatacctcatggccaaggaagtccttacaaggttcccagatatatcgtcagtccagcttagaatgccgaaccttcactttctgcctgtcaacttggggagcaaagaagctccgctggtgaagtttgctgatgatgtgtacctgccgacggatgaaccacacgggacgattgaagcaaccttaataagccgtcccatgtcaaagctgtaaaaaaaatgtagtcgtcaggctggtattagactcctgcttcgtctccccagcatccccaggcttaaaatggacagtaagctgtaagggaaagataaactgtcataaatcgtagcccctatgctttatgtgtggtggtggtaataagtgcacagacttgtattggatgttgtcagctgtagcctgtaggcgtccagcttgtgacgtttcgccactgtaatcgtgtacattggtcgtcttgtgtggaaaccagttaatatctttggaagctttggtcagttttacttcgtcgtctgtagtcttttagctcgttattaggccaccagcttcagtagatctgattgtttctccatatatttgaacatattacgtctccata

SEQ ID NO: 112357 - DNA, 1553 bp, Zea Mays
cgcaaacccagacggcccgccagacccagcggtcgcttactcgcatcgcagcgcactcgcgccacagtcggcatcacagaccagatccctgcgggtgcggcggccatggccgagaacttccaactccagggccggcacggcaagtcccgcgtccgcgtctcccgcgtctggcgccgcccggccgcggcggggggcgacgtcatcgttgagtggaacgtcgccgtcagtatcgtctccgactgcctcccctcctacacctccagcgacaactccgccatcgtcgccacagattccatcaagaacaccgtgtatgtcaaggcgaaagagtgcacggaagtggtgtccatggaggaattcgccgtgattcttggaaggcatttcacctcgctgtaccctcaggtttcagaggccacggtgactatcgtggagcgcccatgggagcgtgtgactgtcgacggaaagcctcattcgcatgggttcaaagttggtgttgagaagcacagcacagaggtcattgtaaaaaaatctggaagcctgcgtataaattctggaattcaaggatactcgctgctaaagacaactcagtctgggtttgaagggtttgtgacggatcgctataggcttcttcctgatacaagggaaaggatagtagcaacagaagttactgcttggtggaggtatccctttgaacatgtttcgcagctcccatcgaagccattctgcttcacgcagagatatcaggatgtaaagaaagtccttgcagagacgttctttggtcctccggatgttggtgtgtatagtccatccgtacaaaatacgctatacctcatggccaaggaagtccttacaaggtctgtaactctgattcggtcgtcccttgttttcagccccttaaaatatgcacacagttttctttgatgagttgcattgcactgaatgcacatgtacactttgaaggttcccagatatatcgtcagtccagcttagaatgccgaaccttcactttctgcctgtcaacttggggagcaaagaagctccgctggtgaaggtaaaacttcctctactgtaaaaaatgtacgaattctattgtttcttctctacctattgaatgactctccaggatagaattgcggtgtcaaatgtagtttatatgtacacatcttatccgcggaacctgagatatattttgtgtttgtttatcagtttgctgatgatgtgtacctgccgacggatgaaccacacgggacgattgaagcaaccttaataagccgtcccatgtcaaagctgtaaaaaaaatgtagtcgtcaggctggtattagactcctgcttcgtctccccagcatccccaggcttaaaatggacagtaagctgtaagggaaagataaactgtcataaatcgtagcccctatgctttatgtgtggtggtggtaataagtgcacagacttgtattggatgttgtcagctgtagcctgtaggcgtccagcttgtgacgtttcgccactgtaatcgtgtacattggtcgtcttgtgtggaaaccagttaatatctttgg

SEQ ID NO: 112358 - DNA, 3440 bp, Zea Mays
aacaaaaacgagacgccagatcaaaggccacaccaaatcccctccagcacagcaggggaagccgcggggcaccacagaccacgagcgcagccgcggaggccggagacgtcggcgacgcgcgcgcggtcccaccccgtcgaggggactcggccggagcgggagagtcaccgccgtgtggaccggcggctggagcgctctgcctgtggccaatgtcggtggagagaggcccgccagcgaaatcgcccagcctacgggactgattgggcttgaagttgtggcgcgtacgagagatgcctcatgccagagcttctgttattagagactgaagttctgcaagcgcgtgctgctgctctggagttttagcagctgtgttgagtggttgggagccatggagtcacggatggatcagtacgaggttttggagcagattggtcgcggcgcctttggtgctgccatcctcgtcaaccacaagacagagaaaaagaagtatgtgttgaagaaaatacgtcttgcaaggcagacagagcgatgccgcaagtctgctcaccaggagatggctcttattgctcgcttgcaacatccttacatcgttgagttcaaggaggcatgggttgagaagggctgctatgtttgcattgtgacgggatactgtgaaggtggcgatatggctgaattgatgaaaaaagcgaatgggacatacttcccagaggagaaactactgagatggtttgcgcaattggcattagctgttgactacttgcattcaaactttgttttgcatcgagatctcaagtgctcaaacatatttcttaccaaagaacaggatattcgtcttggagattttggcctggccaagactttaaaggcagatgatctagcctcttcggttgtgggaacaccaaattatatgtgcccagagttgcttacagacattccctatggattcaagtcagatatatggtctcttggatgttgtatgtatgagatggctgctcatcgacctgctttcaaggcttttgatatggctggactgataagtaagataaatcgctcctccattggccctttgcctactttctattcttcatctatgaaaacacttatcaaaagcatgttgaggaagagtcctgaacatcgacctactgcatccgagattataaaaaatccatacctccaaccttatgtgaatcaataccgtccatttgctaatatattacatcctggtcgatcaccagagaaacctggcaccgattcacggagcagtcagaaaagtatgtctgggagtcagtgtagtagcatttctggaactggcagtgatatggatagcatacaatcaaatgaaagaaacacgtcaggactagcttcaagttccagcaacaccattgataccgagggtgctgaaactactgaacttcagagacataaagatactgcttgtcctggactcaagagacaagattcatcaaaatccgtacaagataatcaacatcctggacatgagaataagcaaccaaagataattaagaagatactaacaactctaagagaggagagcaaatttagggaaagcaattctcctgttagagctagccgtgtaaagctaaattcacctagcaatagagaacgctcatctgacgactcaaagcaaagtgatatttcctccagttcaaggtctagtgaagttatgtcacatgaatcagcaaatgcaagctgtgaacctgtcaaacgaggacatgcatctcctcccttgaagcatttgtcaccaattgttgagcattctccgaaggttaaaattaaagtagatgagctattacatccacaccttgccaagcaggttggagaagttgttgatgcagctgcagggaaggttaagaacagaacaccgcccatttttattaaatgcaccagtattcctactcggaggcaaggagtagcaagtccaagccgtcaacacactggggtaaagcgagctcacaataaggtcatggcagagcatgcaaggaatccttgtcagcatctccatagtccaagcaacgctcttgtgaaacttccaagtgttccaatggttcctccaagtcatctagaagatcttaagagaaaaccagacaatacacgagcaaaatctgctcctcctagggctttagcaaccaaggaagacaacagtgcttgctccagttctacgattggtaatgctgaaaacaccaaccagtctgaaccgtctgaacctgactcaccaacttatttggtctcatcctgcaaatgtttgatacctgacactatcatacaaaagcacggcataacaagtaaaaaaagttcagaaatcatcacaaccaattgtgagaagaaaatgactagtaatggtgatcttagtctaagcgcagccatggtgcaatcttctgatattcctgaacaagagtttatttgcaaggatggaatgctctccagtcaggtgggtcagtgcagtgaaacagttactgtaccaagcgatgaagacaagttcacagtgcgggaactgctttcatcagtaccagatctttgttccttggtcccaacaacaatgatgaacactgagccaggaagaggacccactctcacccagtcatcagagaaaccatcgggtcctcatttaaatcctcctccagttgaggacattatacatgtcataagccacagcagtttccatgtgaatggtgagcaggcagtaaaagaaactggatcagagagcattgatgttgacaaacgtcttaacatggtaagagaagagataggtgtaagaagcaccgagccaaacctcataccttctggacctatagattctgatacggtgaagccaaatgtagtagaagctaatattacctttcagaaaccatccagtacagatgccataaaactgccaaccataccggaaggaaattttagtactctggagaccaacaatgggtttaagcaggaagcagctccggctaaggaaatactagatgtgacatctttcaggcagcgagctgaggctctggaaggtctcttagaactttctgcagaattactggaacacagtaggctggaggagcttgcgattgttctaaagccatttgggaaggccaaggtgtcccctcgagaaacagcaatatggttggctaaaagtttcaaaggcttgatgaatgacgaagcaagccgcagttcaacgtgagtacgcgtagcttttgtgccaccctttttactttggttgatttctgcttgtgctctgaagatgctatggttgtcttgttcatatctggcttcttggtatcgtgtgtcggtgtttccatttcgatagttattcattctttacagcacatgttgtaaatagcccagatttgtgaacagaaaataatacatgccagaaatggtgttaatttacatggttgaagtaacagagactaatttgatcaattattgttttg

SEQ ID NO: 112359 - DNA, 988 bp, Zea Mays
ctgcgaagaagcaaaatggcagcctacgagaagcagcagcggccggagacgccgctgaacgccgcgtactacggccagccgatccctccgccgcagccgcccgcgtactacccgccaccgccgccgccgccacccgtcccacgccgcggcggccgctcacgctgcctgctcggctccgtcgtggccctcgtcgtcgcgctcggcgtcgccaccctggtgctctggctcatcttccgcccggacaacctcagggcctacgccgactccgccgcgctctcccgcttcgacctcggcagcggcggggacctcctccagtacaacctcaccgtggacatccgcgtgcgcaaccccaaccgcttcgggatccgctacgactacgccgaggcgcaggcgttctacgacggcgaccgcttcgggttcgacccgctgcagcccttctacctgggccgcaggagcgacgcccgggtcacgggccacgttcagcggctcggcggcgatggacgacggcggcgacgcgctgcgcacgtaccggagggagagcggggagggcttctactacgtcacggtgaaggtgtactcggaccttagcttcagggttagggtcgtccgccgccatgacttcaagagcaagatcacctgcgtgctgcggctgcccgtgcccgctgccggcggcaacgccaactccaccacggcgatgacgacgctcgggacgaggtgcgacgtggacttctgatcatccttgccgccgactgtgcaaagggcgctctgtgcatgcatcctttcgcagtttgtattatttggccggccgggccgggccggggataacgttatggacaatgtctataattgtttgaacggtacactgtgaatgctcattatttccttctttcatatgcatgcatataattgaataaagtgtttggtttttagagattaatttttaatccctgcatttagttatattttaggtattaaattgctaaatacc

SEQ ID NO: 112360 - DNA, 1113 bp, Zea Mays
ttcgtaatttcgtagccttaacggtttcctttctacacagtgcttgttcaagatttggtactcccgaaaagtgcacagttacgtccacccataaaatcccaattcttttcggactttacttttcaacgggcagacgccgtacacaattcacctccgcgttccgttggccgcctgcctgcgcgggtcaaggacgcaacggcaacggcaacggcccgtaatgtcccgggaacgtgagaccctcagaaaccaccacaacctaggctacggcctgtgtgtcagtgtgtgctgtgtacatagacgttccctccatcgatacatgcgtgcactactagctgataatcggaagttgcagaaggccatggccagtcacgagcacaagatcgaccagccctactacgggcgcccgcccatccctcccgaagcaccggccgccggcgtccgcccgctggcgcgccgggacgcgtcgtacgcgctcctctgccacgccttccgcgcgctgacgctggcgctcatcgccgtcggcgtcgtggcgctggtgctctggctcgtctaccagcccagcagcctcaaggcgtacgtcgactcggcgcagctcacccgcttcgacctcgacaacagcggcacccagacccaccagctgcgctacaacctcaccgtgggcgtcagcatccgcaacccgaaccggaagcaggccgtgctgtataggcgcctggacgccgtggcgctctacggcggcgagcggctcgggtacgtggacttcccgcgggcgcggcaggagcgcaggagcacgatggaggtgcggcccagcttccgtggacaggccgccctcgccggcgccggcgcggcggcggcgctgttcggcagggagaagggcgaggggttcttcagcatcaacgtcaagctccacacgagggtgcggctgaaggtggccgtcgtggacagcgccgagtacaggccggacgtggactgctacgtgagggttcccgacccgggcaacgccacggcagtggcgctggggttcacgccgacgcagtgccatgtcgacgacttctcgtgacacagagagcggaaactgcgaggaataagtttgatgttacgtggacgaattgatct

SEQ ID NO: 112361 - DNA, 1695 bp, Zea Mays
tcggcgtgcacgctagccgctctaattatcccccttcacatgtttgttcccgctctcatcctcttcgcaccttcaatctcagccggcccgccagtgttcacgttgctctctttaactctgccattcaatcgtttccccccccccccacgccgtcacatgtggcgctccattaatatatagcaccgcgccaccaagctcatcgtcccgctcgctccaagctccgagaacgcaaacagctcactgtaccagtgtacccgagctcgtggcctcgcctagcctggcctggctagcgtttcttcgtgcgtgcgcaagcaagcacctaggctgcatcctgcggccaccatgtcgtcgggcacgggcacgggcaggtcgtccaccaggaggggaaggggcggcagcttcacgctgaggcatcagccgccggtggtggacatcggctgtaactgccgccgccccaagctgttctccgtcttctcgtcgtcgctgttccgcggcgggggcaagcccaagtcccccaacgcgtcgtccacctccaccaccacggcgttcacggccaccaccgcgggcgggcgcagccgcagcggcacgacgacggccacctccaccgactcctcctcctggggccccgcgtcgttcgtcgccaccaactcgctgtacgaggagccggtggcggcggcggtggcgccgccgcaggagcgggagcagcaggaggcgaggcggcggcgtaggcagcagcagcagcgccggcgccgcagcaggcgggcgccggcgcccgcgcgccacggcgcggtggcggaggaggaggtggatggggaggagcaggagcaggagtacgggcggcgggtggcccgggagagcgtggcggtggcggtggattcggcggagccgtacgaggacttccgcgagtccatggtgcagatggtggtggagaaggagatctacgcgtgggacgacctcaacgacctcctccaccagttcctctccctcaactcgccgcgccaccacccgctcatcctccacgccttcgccgacctctggacccgcaacggcctcttctgcccgccatctccctgccagttctaggcagggcaggtgcagccgggcaggatgctcgccgtccaataacacggccggcggcgccacgccatgcacgtacccttgcatactgtatgaaccactagatttagctttagctactactaccaccaccacccagaaaaaaaggtcatttctaccattaacgagaaggcaaaagcagctcacgcgagaccgagatcgacgctattatcggaggtccccggccggcgagctgcatcttgcatagttgcatgaatttagtgccaaaggtcttgagcttaattaaggtgagcgcaaagaaggctatgcaagatcatttgctgctgctgctgtaaccgccatgccgttgtaatgtaacgtactaacgtgccaatgatgtgtgcgtgtgtggcgccccaacacccgggagtgcaatgatacgctggtgtgccctcccgcgagcgtgatcctactgttgtactggcgtgtatcgtgtgtactgaacactggagcttttgttagtgggcgtgttcggctggctgcaagccgacactgttgcagctgtttggactgctgcagctgcaatccatagagagaaaaatactgtagaagccgcagccgcagccggattgcagccgc

SEQ ID NO: 112362 - DNA, 1300 bp, Zea Mays
aagaggaaaaggaggagaggtggccaggtggtggagggcggtgacgggacaaagtagtggcctgggcgtgccggcgcggaggagggggcggccatggagaagggcgcgggcacgcggcggtggcggctggtggaaagagggtcggatcgtctcgccttcatcaacagccagacacgcagcctttcctgcgacccgattccagattcaccatgtcgtccagagtttgaaggtagcgctgaaaatgagttcattgagagaaatcagttgcagaagtcagaacctaacaacgacctggtacctggatttcaacatcctaatactcgccaaggagtcaaagctagaaccttaagctatgatgatctggtacctggaattcaacgagctgatggtcgccaagaaatgaaggctagtaccttgagctatgaagatgagcttttccgcaaatttaagatgggcagttcagtccctgaaatttagccagtaaatcaaacaccattgtgtacccatgatctggaaactgtgagtaacaatgcaatccatgctggagttagtaagaatacaagtgatgacagagttagtaagatgacaagtcttgatggagcggcaagtgtccaacctagcagagaagtggaaatgagacccagatctgcacgtccaagccagtcaaccgaagtggacaattcaggttggtctgtggaaactctgaaggaactcttagacttcacgccacaggagataaccaaggccatatccgcgactgagagtaaccgtttgttagcatctgtcgccattgctttgctggtggttctttcgaactagggcttggacatcggtggtgccatcaccagagtattggttggtacaaggccacttctatttctcattataaccaacatcaccattgtcttcacattgttgatggagaacaaagaccccaatgtgaaaagcaggcccgtcggcgccaacctgggttctgccgatagcttagggcagatgctagagatcggtttgctgctacagaaagccctaggtgctctgctgattgactgcagcgtttgcgctgttattatgatctgctttcttggattctgagggagcctaggtagaagttccgcagaaatctttgtaactattttgtcccgtgctctgtactgcatcgttctgctactgctattcaattctgtatcatctcactttggcagagttttaatttatgtactccccgttttctgttttctgagcgtatgcagttaattaaaccaggtcaactgttttagccagtattttttggtaaccttgt

SEQ ID NO: 112363 - DNA, 636 bp, Zea Mays
atggatcgcatgcgacacaggaactccgtcagctccgagcgcttccttggctccttcgcccgctccgcagctgccggagaacagtcggcctctacggccttcgagcttgacgaggacgacctcttctccgcaggatccggctcgcccgagccgccgcagccgttgcgccgcccactcatcctgtcctccgtccgccatgcaaaccctagccctgttccacgcctacgccgcccgccggagggcatcctggacgccctccccgagcgccgccgctcgccgcctcagtcctcttcatccacgtcctcgtcccccgcttccccggctgcggcccctccccgcatgatccctgccgttccccgcccggcgccggcaccggcgccgtatgtgccgcaatcattgccggtcaacgttcctgcggcgcggctgcggaagccgcccgtggtgatggtgatgggggaagcggaggatgaatacgaggagatgctaccgccacacgagatgttagcgcgcgcgcgggctcgggagtcgccgatgacgacgttctcaatgctggagggagccgggcgcacactgaaggggcgggatctccgccaggtacgcaatgctgtctggcggaagactggattcctcgactga

SEQ ID NO: 112364 - DNA, 112 bp, Zea Mays
tttttatttctatttttgacaaatactcttgagactttgctaacatccagttatcttgttactgcctctgctttcaaatatattgttaaaaaatcatttacgctgttactgc

SEQ ID NO: 112365 - DNA, 879 bp, Zea Mays
atggcggttggcctgcccccggggtaccgcttctacccgacggaagaggagctgatatgcttctacctccgcaacaagctggacaacctccgcgacgacatcgaacgcgttatccccgtcgtggacgtctactccgtcgacccctgccagctcccagggattcacgagctgctgtgcgacggcggcgccggcgccggtgagggggagccgtggttctacttctgcccgcggcaggagcgggaggcgcggggcgggcggcccagccggacgacgccgtcggggtactggaaggccgcgggcacgcccggggccgtctactccgccgaccgccgcgccatcggggtgaagaagaccatggtgttctattacggccgcgcgccgtcggggaccaagaccaagtggaagatgaacgagtacagggcgttccagttcgaaacccccggccctggcctcggcctcgccgccgctggagtcgcagctgacgggtcgtcgtcttcgagcgcccaccacgccgccgatggacccgcaccaccaccaaacgttggcccgcagctgaggggcgagtttagcctgtgtcgactctacaccaaatctgggagcctgagacagtttgaccggcggccgctcgcagctacgggaggtgtcgtcgtccctggcgaggacccggcgggtccattcacggcagtggccgcgtcgccgccggacgatgatgatggctccggcagctccatgcaacagcagcagcagcagctgacggggggaggtgccaacaacgatccatacggtgacggcgtggtgacggagagggaagacgcccacgatcctttcggtgacgacgtggccatgttggatgcccttttatactggcctggagactag

SEQ ID NO: 112366 - DNA, 483 bp, Zea Mays
atggcgattgtggcacagcgccagcgacgttgtcgaagaacttccttcgatcaaggccgatggaaatgccaccgtcaaagggaagaagagcttctgggcagcggtgagcctcatcatcgacatggtggtcaagccgggcatgctgggtctgtcgtccgccaccatccgcttcggtcaggtgccctccgcggtatccatccagctctcctagacctccatcgtctcatcacagagctcagcttcgttgccatggtgcgtgacggcgtcgacgaggtcagcttcacgggacttgcgtcgcaccctgggagtgggccttggcatggtcgtcgctgtcgtgtacgccacactcagcttatccctactcatcgtctacgtaaaaagggtcccagaggcaaccacacccttcatcgcgctagagtagagatgctcccagacgtgccacaagtccacaacttccatcacgtcgaacagcacatctcctag

SEQ ID NO: 112367 - DNA, 1407 bp, Zea Mays
cttttctaaaccttcgctgctgcttcgcaacggtgccgcggcttcggacagggctctcgcgacgcgatcggccatggcggcgtctctgcgggcctcgtcctccctccgctcgcgcctcctctcgttctcctcggggtgttctctgtgtccgtggcgtctcctcctctcctcacctgtccactcggacgccccccaccagaccgaaaccctcgctttcgacgagatccagctgtcgccggagaagccggctaccgccactgccttcgtcctgcacggcctcctcggttccggccgcaactggcgctccttctctcgcgccctcgtctccgaactccgtaaccgctccccttcagacgagtggaggatggttctcgtggacttgaggaaccatggcagatcggctgggatcaaggggctcggcccaccccacaacatatctactgccgccaaggacctcgctgatttagtgaaggcccgtggttggccatggccggatgttgttgtgggtcactccatgggtggaaaagtcgctctagatttcgcggagagctgctctcgcggtgtgtatggagattctgctaatcttcccaaacagaacagctctgggtccttgattctgtccctggacaagtagaaacagagaacagtgatggtgaagttgaacaggttttgcaaacgctagcgagtcttccttcttcacttccatcacgcaagtgggttgtcgaccacatgctcagccttggattttcgaagtctctttcagaatggatcggcagtaacttgaagaaggacaacgatcatgtgacctgggctttcaatcttcaggctgccatagacatgtttagttcttatagggaaagggactattggtcggtgctggaacacccacctaaggatttggagattgcaatagtgcaagcagagcacagtgatcgatgggtccctgatgacgttcaaaggctaaaagcattagccgggagagagtccaagcctgatgtaggaaaagtgtcacttcacgttctccctaactctggccactgggttcatgtggacaatccgaaagggctactcgagatcatggtacctaactttctatcagcagttcaaaattgagtggtaccttcaatcagaaccttcatttattgtgacatattgagtttgacaacccatgggataacgtttcctctctcatattgttgcccaacaagaattctttgcttcttttctgaggaaatagtgcacccttctgttaataatcgagagaaaagtatacataatcccatgttctctttctgcagattattggatgttgtaaaaaagagagaccactgcttaatattacatttttcctaccctgaataagaacagatactgcattgccaatcatattctcatatattctactgt

SEQ ID NO: 112368 - DNA, 2053 bp, Zea Mays
cttttctaaaccttcgctgctgcttcgcaacggtgccgcggcttcggacagggctctcgcgacgcgatcggccatggcggcgtctctgcgggcctcgtcctccctccgctcgcgcctcctctcgttctcctcggggtgttctctgtgtccgtggcgtctcctcctctcctcacctgtccactcggacgccccccaccagaccgaaaccctcgctttcgacgagatccagctgtcgccggagaagccggctaccgccactgccttcgtcctgcacggcctcctcggttccggccgcaactggcgctccttctctcgcgccctcgtctccgaactccgtaaccgctccccttcagacgagtggaggatggttctcgtggacttgaggaaccatggcagatcggctgggatcaaggggctcggcccaccccacaacatatctactgccgccaaggacctcgctgatttagtgaaggcccgtggttggccatggccggatgttgttgtgggtcactccatgggtggaaaagtcgctctagatttcgcggagagctgctctcgcggtgtgtatggagattctgctaatcttcccaaacagctctgggtccttgattctgtccctggacaagtagaaacagagaacagtgatggtgaagttgaacaggttttgcaaacgctagcgagtcttccttcttcacttccatcacgcaagtactatctcgtcccttcccttgctgaggtttagtcattcttgctatttttgtatttatatatagctacatgggtatgtagactaacactctgacagactaacaacaccaacatagagaaaacaatggtacagatgaaaaaaatgctgaaagtggggttgtgattccataactatagtcttatcaactgtaggatgtaaccacatagctgtttataaagattgtatgggtggatgtaaaatttgggtagaacatttttaacaacagttttggtaacatagcaggtttagaaaggtctgtgtgccttgtacaattttgtttcttaatgttaatgagtgataattgtgtattcgtagattgtaggatatggtctttcatcaaatgtgtaatacttgagttacagtccagaagagttgtagtccactgaaaactagaaatatgctcttgtgatgcctgaagcctgaaggtcaatgaatttctttttaatatagattcagtctggcaagcaaatattaatgtcaagaataggaaatattttggacctttctgaatgtttagcatgagcagtgtctggaactgcatatgttaaatggtttacatatgtgcatatccttattccgtaatgctgatttcagttgttacgtgccaccaggtgggttgtcgaccacatgctcagccttggattttcgaagtctctttcagaatggatcggcagtaacttgaagaaggacaacgatcatgtgacctgggctttcaatcttcaggctgccatagacatgtttagttcttatagggaaagggactattggtcggtgctggaacacccacctaaggatttggagattgcaatagtgcaagcagagcacagtgatcgatgggtccctgatgacgttcaaaggctaaaagcattagccgggagagagtccaagcctgatgtaggaaaagtgtcacttcacgttctccctaactctggccactgggttcatgtggacaatccgaaagggctactcgagatcatggtacctaactttctatcagcagttcaaaattgagtggtaccttcaatcagaaccttcatttattgtgacatattgagtttgacaacccatgggataacgtttcctctctcatattgttgcccaacaagaattctttgcttcttttctgaggaaatagtgcacccttctgttaataatcgagagaaaagtatacataatcccatgttctctttctgcagattattggatgttgtaaaaaagagagaccactgcttaatattacatttttcctaccctgaataagaacagatactgcattgccaatcatattctcatatattctactgt

SEQ ID NO: 112369 - DNA, 1402 bp, Zea Mays
cttttctaaaccttcgctgctgcttcgcaacggtgccgcggcttcggacagggctctcgcgacgcgatcggccatggcggcgtctctgcgggcctcgtcctccctccgctcgcgcctcctctcgttctcctcggggtgttctctgtgtccgtggcgtctcctcctctcctcacctgtccactcggacgccccccaccagaccgaaaccctcgctttcgacgagatccagctgtcgccggagaagccggctaccgccactgccttcgtcctgcacggcctcctcggttccggccgcaactggcgctccttctctcgcgccctcgtctccgaactccgtaaccgctccccttcagacgagtggaggatggttctcgtggacttgaggaaccatggcagatcggctgggatcaaggggctcggcccaccccacaacatatctactgccgccaaggacctcgctgatttagtgaaggcccgtggttggccatggccggatgttgttgtgggtcactccatgggtggaaaagtcgctctagatttcgcggagagctgctctcgcggtgtgtatggagattctgctaatcttcccaaacagctctgggtccttgattctgtccctggacaagtagaaacagagaacagtgatggtgaagttgaacaggttttgcaaacgctagcgagtcttccttcttcacttccatcacgcaagtgggttgtcgaccacatgctcagccttggattttcgaagtctctttcagaatggatcggcagtaacttgaagaaggacaacgatcatgtgacctgggctttcaatcttcaggctgccatagacatgtttagttcttatagggaaagggactattggtcggtgctggaacacccacctaaggatttggagattgcaatagtgcaagcagagcacagtgatcgatgggtccctgatgacgttcaaaggctaaaagcattagccgggagagagtccaagcctgatgtaggaaaagtgtcacttcacgttctccctaactctggccactgggttcatgtggacaatccgaaagggctactcgagatcatggtacctaactttctatcagcagttcaaaattgagtggtaccttcaatcagaaccttcatttattgtgacatattgagtttgacaacccatgggataacgtttcctctctcatattgttgcccaacaagaattctttgcttcttttctgaggaaatagtgcacccttctgttaataatcgagagaaaagtatacataatcccatgttctctttctgcagattattggatgttgtaaaaaagagagaccactgcttaatattacatttttcctaccctgaataagaacagatactgcattgccaatcatattctcatatattctactgt

SEQ ID NO: 112370 - DNA, 1850 bp, Zea Mays
agtccctcgcgtagacgcgcacccacctccatccctcccatcggcatcccggacttctcccaggagctccggggcttccaggctatcacctactaccaggccatcatcaacaactcgctcgttgacctctacgtccagtgcggcacggtggagttcgcacgccatgcgtttgaccggatgccggagcggcaccttgcgtcctggaacgccatggccctcgcgctcgccaaccatggccgcggcaaggactcgctcgatttgttcaaccggatgacgcgggtggagaatgtggtgccaaatgccatcacgttcgtcgcggggttcagcgcctgcaaccacggtggactggccatggcggcgatgggcgcgaccgcttcgccactcccttccctattccccacagggcagcgacacactctactcaagcatcgccttcacccgcagcctcggggacctcgccgccgaggccgtcagggtcatcgtcgagccgagctatgggtgcacgttggggacgacgactcggaccactactgctggcagcagcatgtggacatgaccacgtcacgacgagcgtccgaggttgacgcggaccacccgggctccgaggtcgcagccgtcatggctgccgcgaccgccgtgttccactgggccggggacgcgcactacgcgcacctactgctccaccatgcgcagcagctattcgacttcgccaacacctaccggggacgctacgacgccgcgctgcaggtgctcggtctacaccccgaccacgggctcgttaactccttccacgccatcaggctgctgctctccaccgagtattacatctccacgatgctcacctatgtggcccgtgtcagcctcatggtgacggtggcaagccaacctgcatctatttcaattgatgctcaagggatgtttgatgaaatgcagcaaagtgatacctctgttgccatcgcacatactgccttcaacagtttcttcaacacggaggagctagataggtggctagaaagctgcgatgaacagggtgaattagttggagtcaacaagatccatgtgaagcctcagttctttgatgtgggcaaggactgtaactgggcgaggggcatccggagaaccgagatccagctcgctgatggcaagaactgtgagctacataggtgctggacagatatcttggatgctataagcaaggctcaacatttgatttacatcactggctggttgactatattggtgagggatgatagcaattctgtcgacctgcttacgaaggagggcttgctgactacccatgatgtggagattgcaaaaggagagcaggaaatcatgaatgaagtacttccagcagagagccggtcatctcggtttggtgtggctatggatcttgcagacatatggccttgctatgaatccaaaccatctgatgcgcaaggctatgctatcaaagggataccaaatctcagaaacacatgctatcggagtgcagtattgcagtgcctgttgatgctcggtaagctgctagaaaggatactaccatcgacatggttagccatccaagggtgctcacgaactggtatagccatccaaggatactaccatcagttctcttattttatccataagctattttcagttgagctggtatagcacccgatagggcgctgccttttctagtacatttcaaaccagatcacatctgtgcacgtgaagccgacgacagttcacaaaaagtgaatatggctacatacatgcttgattgtgaatcagattaccagtcaacagagaacagccggaaatcatacccatttcaaaacacttccacttttttccgtgtagttactcac

SEQ ID NO: 112371 - DNA, 982 bp, Zea Mays
agctctactgtagcaaatttttgggcttctttgaagtgcggcccaaaaactgaggaggttccttcctatcaaagggaacaatattatagtttgggccgttgtttatcacacagggtccctcggcccgcaccatttcgcgcttgccctaaagaaacccgacacgagccccactcgctcggacgcacaggcgcacaccgacaagcgcagcgatggcggccgcggcgggggacggacagacgccgcaggagccggagccagtggcgggagcggcggctggaggcggcgtgatcgcgaagctggaagaggagtggcggaaggcgaaggagcacgcgcagacctacccgtacgtgtggggctcctacatcctcgtctacggcggcctcggcgcctacctcgcctggcgctggcgtaagctccgccgcaccgaggaccgcgtccgcgttcttcaggaacgcctccgcaagctctccgcggccgaggagtcgcaggctgcctctgccaccggctccgtttccactccctcgacccctcccctgccgcaggagtcggcctctggggccgcaaagccggcttctagaccgtgaaggagtaagcttcctttttttcccagcttcttggcatgacggattacaaaattacagagcgattcatcgtttgagctcgctgctgtgcttcgttccttacttggttggtgatcctagttcagaagtagaggtggaggactataatacaagtgctgagaggttggtgattctctcattgtcatctaatcgtttgggggaagctcaaaatcatgtacatcgtgtgtggtcattcccacgaaggatctggatttactgttgatgtcaccggaacccgtcttagtgacatcgtaacttttggctccatgatgctggtttgcagttttctccatccacttcacttctctattgttactaatgtattgcgccttatactgatcttgccaaatcttcttgaatta

SEQ ID NO: 112372 - DNA, 1362 bp, Zea Mays
aggtgccgtgctggtgctgctgagtgaggtttacggtttagggtttaccctgcggtgttctctgaccctatgttagtttgaggatgaaactgttttaaactgacgacgggcgtcgacagattcaacaggccgaactgttatttattgttatttgcgaaaatcataaagcgcagcgacagattcttcgcagtttttggtggccactgcgtaaaagacagatcggtctcagggggagtcgtcgggcgttccacgctgaaatctggaatgaaaagactaagctcatatattgggagggccgcagcagaaaatgggctctgtcggccgggagtctctccagatcggctggccactcctgtctgcccccaccgttatcttggacttgccagcctcgctgtgctttgcctcccccccatcgtcctcatgggaattttaaagggaagcgcctgctagcagccacctctccctgccgcagctagtcagcatcttcagtcttgcactcccccctctgcaaggaagcgagctgcgcgcgcgatgccccaggtggacctggagagcctggtgtgcggcgtgtcgggcgccggcgccggcgctggtgacaggaaggtgtcgtgcgagacggtcatcgcggggggcagcggggacgcctcgccgccgccggacccggacttgccgcccgagtcgataaccatccccatcggcgacgacgcggcgttctcggagctgaacccgatatacgagcgggacgactccaccaagggcagcaccaaccccaagttcgcggccgccgccgccgtggccaaccccgtcgcggccaagacgcggtccaactccacgcgcgtcgcgggcgccccgccgccccccgcggccggcaccacgttcttcggcctcccggcgaggatccgcccgaccttcacccggcgccgcccgtcgcagggccggatcttgcacggcaagcgcgcgggcggcggcggcggcggcggcggcgaggtggagccgcggtcgcccaaggtgtcctgcattggcaaggtcctgtccgaccgggagcggcacggacggcgccggcgcgggtggtggtacggcgtggccgccatgttccggtgcgacggctgcgcccgtgtgcccggcggcgcgtccaggaagaaggtggcgctggaggacgatgccgggcggcggcggcagcagcagcagcagccgggcggcattgcgggaatgcggaggttcaagtccgggagaagagccgcatcgtggggagacgaggcgctggccgcggcggcgacgggggccgacccggacgagggggaggaggaggaggaacccgacagcaaggacgctgtgcagtggtcccggcggccggtaacttag

SEQ ID NO: 112373 - DNA, 1433 bp, Zea Mays
caaatagtcgaaatccgtttttgcagttcgtttcgtttcagagctggcattttctgcgtcacttgtattatttgtataggacagcctctgagcactgctgaatgcttgctgatgcagcctcgctgtgctttgcctcccccccatcgtcctcatgggaattttaaagggaagcgcctgctagcagccacctctccctgccgcagctagtcagcatcttcagtcttgcactcccccctctgcaaggaagcgagctgcgcgcgcgatgccccaggtggacctggagagcctggtgtgcggcgtgtcgggcgccggcgccggcgctggtgacaggaaggtgtcgtgcgagacggtcatcgcggggggcagcggggacgcctcgccgccgccggacccggacttgccgcccgagtcgataaccatccccatcggcgacgacgcggcgttctcggagctgaacccgatatacgagcgggacgactccaccaagggcagcaccaaccccaagttcgcggccgccgccgccgtggccaaccccgtcgcggccaagacgcggtccaactccacgcgcgtcgcgggcgccccgccgccccccgcggccggcaccacgttcttcggcctcccggcgaggatccgcccgaccttcacccggcgccgcccgtcgcagggccggatcttgcacggcaagcgcgcgggcggcggcggcggcggcggcggcgaggtggagccgcggtcgcccaaggtgtcctgcattggcaaggtcctgtccgaccgggagcggcacggacggcgccggcgcgggtggtggtacggcgtggccgccatgttccggtgcgacggctgcgcccgtgtgcccggcggcgcgtccaggaagaaggtggcgctggaggacgatgccgggcggcggcggcagcagcagcagcagccgggcggcattgcgggaatgcggaggttcaagtccgggagaagagccgcatcgtggggagacgaggcgctggccgcggcggcgacgggggccgacccggacgagggggaggaggaggaggaacccgacagcaaggacgctgtgcagtggtcccggcggccggtaacttaggttgcggtgagggcgggaaacgattgggcgccgctggggtgggcccgctgtaagtgactgccgtggtcgccgataggtgagcccgaggcgtctcgagcagcacggtcggctttggctggctggctggtcgccgctcgatggcgatcgtagactggcctggcctcctagaactgcgagttttggagttcggtggattgtttctgcgtggaattacgcaacccatttggaagagcttgtttgttgaaacttgagctcctcggcagcggcggcctaccgctgtgtacatagcagtgttctactgcctcaagcaataacaggagcgcataatgtgcagtccgcc

SEQ ID NO: 112374 - DNA, 539 bp, Zea Mays
gtacgtgtggaggaagcctcggcggaataatgccgggcgagcaggacaaccacccccccaccccgatacgttatctgcaagcgatcgcaaacccaccaccaccaccaggacaacagaacacacacagacaagcgaatccccatcttcgttgtcagtgccagaaaaccagaccgagagatgattgttttgttgctgcaatttgatgagattggaacatttaactactcggtcctcaaatatttgagaacgtaagtagtatatgagactgaaatttaactattcaccatccgaccaaagccctccttccgtttgccagttttaatcgtgagcagcataaatgattgagtaaaatatagtagctgtccttaaacttgccacactacaattgtgtcatcaaactcagaaaaccagcaaaacagataataccctaacttagtcggtacatgcaaaactatccaaagcttgccatagttaaatatccctttggcattctgtttcagtttcagtttgagttccatgctgccgcccaaggttaacaa

SEQ ID NO: 112375 - DNA, 1583 bp, Zea Mays
acggaagcaacctctatttatcggtagacagacagtatacgagtatcaaacagacaaacacacaaggaacaattctgaacttcgttttgtgccatctatctctgaactgtctgtgtgtgtgtgtgtgtgtcggaatagtccctgtctatagcagcagcagcaacaatctagtgtactttaaggcacaaatgttctgaatctgaaaaaaaggtgatcatccgaaacgaactgaagtttgcaaagtagtagtaagaagctgtatttgcgatttgcttctttccagtctcttccttagcgaatagcgacccagtatacccataggtatgataacgccccgcacgtgcacgcacatggaagcatgtgcctcctacagtcctactccctcctgcacgcccgacatgacacgaggctgcctagctcacacgtaggacttgaccgcgtcgctgtaccccgtgagcccgtcgtagtacctcgaccagagcatgatgcccccgtacttggtggagttcttgaccaccggcagcacctgcgccacgaggtcgctcgccggcacgaacccgctgccagcggcctggggcgcggcggggaggccgaggaacacccgccccgccctgatggacgtccactgcgcccacgcttgcgccaggctgcccacgccggcgctcgcgctgtactggcacggcgggttgttgtagaactgcacccacacgtagtcgaacagccccgtggcgagcgcggtgcccagcgacgcgtccgggaacgggcactgcggcgccgccgacaggtacacgggcctccgcgcgcgcccgcgcccgcgccgggagtaggacttgaggaaccgggccaggtcgtcccagtacatgcccccgccgctctcgatgtcgaagtcgacgccgtcgaggacggcgtcgccgaggggcctggactcggacccgccgccgccgaggtagttgtcccagaggtacgccgcgacgctccgggcgtcggcccgggacgagaggccgtagctgccgacgcccccgccgatggagagcaggaccttgacgcccatgcgctggcacgccttgacgtccgcgcccacgcccgtgcacccgccgctcgccgggtcgcagtggcccgccaggttcagcgccggcgtctggcccctgccgaacgtcgggaggaaggccacgttgacgaacctgtagttgcccgtggcgcaggtctgcgccagcgtcccctcgttgccgttctggccccagtagatggcgatgccgccgccggcgcgcgctgtggcggctaccccgcccagtgccatcagcaccgtggccatggccagtgccattgacggaaactggctgcttctcctacccatcttgtttctcgagctctttggtatggcctttatatatcgcgcgcgcgctacgacgatagtgcgtcctgcctgcgtcgtcggcggcagtgtttgaccgctgacgctgtgcgcgagggtcgtcgctattgacttttgatggaacagacacagcggcctccactgatcgggcgtccaagtgcgacgaccattccctcctcagctcttcgagttttgtcacgcgtgcctctgc

SEQ ID NO: 112376 - DNA, 112 bp, Zea Mays
caaaaaatcacatgataaaatcaagccataccgtaaacaactaccgtcgcataaaattcaagttttatatcaatacatgatacaaaattcaaagaaaaaaccatataaataa

SEQ ID NO: 112377 - DNA, 2052 bp, Zea Mays
acgtctcgtcagttttttcctttttcccgtggcccgtgggtgtgcgtcctaggtgtgcggcgggcggtgcgccgtgcgcctcctctcctcgccgcgacgctgccgtgttcgcgattcagcgccgtgctcgacgcccctcctctcctcagaagtcagcgccgcatctccggttgcagagacttgcgctgccacatctccgcttttcgtccttcagttgctcgacgcccctcctcccctcagaagtcagcgcagcgtctccactctccacgccggcgcgtcggcgacgcgggtccttcgaataagacggtttgttctcgcatcgggcgtcagccggattcgagggacatagatgatggaagtcgatcttgggtgccaccacgtcgaagcggcttgtgctgtgtagatccggcgaaagcgcgcaggcaaagcccgggtctgcgtcgtcattggcctcatgatcttcgtattgccatcgcgctaaagggaacgaaggcgacgaggtcttaaactttgattgatatatgcggatatgaaaatgcatgcaactacatgctagaagtctgtcttggttgtgttggagaaaaattctttgttacgtttttgttgatagcgttgagtgccaaaaatggagcttctccctgttgaagtcgttggcaacattctttcccatcttggtgttgcgcgtgatgttatgattgcctctgcggtatgccgcaagtggcgagatgcatgcaggaggcatctccgtttgctgtccttcaactccaatgactttccacgggacatgactacacgtcagttggagattgtcatcacacagactatatttcagactatggggctgcaacgcctttcgattcacattgataacacccatgagttctctgcagcaccagtgattgcatggctcatgtataccagggagaccctccgaagcctgtcttacaatgtcaggacaatacccaatgtaagcattcttgaaaagtgtggtaggcaaaagctcgaagtgctagatttggaattggaccataacaccatcacaggtgtcgaaccaagctatcagaggttcacttgtctgaaatccctttccctgaggcatgtcagcattttggccttggatttgagccttttagttgctgcttgcccaagaatagagtcattagcacttgatgtccttgaggttgtcacttcagaattacagtctacgatggagctcacaagccatacattgaaaagtctatttgcaaaatcggtaggtgtagataagatcatacttgatgcagataatttggaagttctgcacctgaatgctttaaatctcgatctgtttgagcttaacgggaaaggaacactaaaacattttaagattgatgatgtcagtgttactcatttggatattggggacaatactgatcatttggaggcagtagacgtgagcaacttcacaatagtctggccaaaattctatagcatgatatccagggcatctaatttgcgtatgctacgattttggggtgttgtgtttgatgacgaggatgagatcgtggattcagaaactatagctgtttcatttcctcttcttaggcatctttcattgagttatgaattacgagatgggttacttcactacagccttcagggatcatcattactggagaatgtctcagttctggaacttggttggacagtaataagtgagcactttggaccctgggtgtttggtatgattggaaggtgtccaaatctcaagaaacttgttattcatggtgttctttctgagacaaaaacgcgagaggatcgccagatgttagcaagctttacctcattcatagtctgtgtcatgaggaagtatgtgcatgttgatgtacaatttgagtatgagtgacagctactaggttgggtgggcatcttgtcattgttcagatgaagctgtgccatcaggtaacctcttgcttattgtggcttcaaaatattttattcagcatggtcttattacagattctcagttctctttgtgttactagctttttataaatggtttcttttgggtct

SEQ ID NO: 112378 - DNA, 1450 bp, Zea Mays
atggagcttctccctgttgaagtcgttggcaacattctttcccatcttggtgttgcgcgtgatgttatgattgcctctgcggtatgccgcaagtggcgagatgcatgcaggaggcatctccgtttgctgtccttcaactccaatgactttccacgggacatgactacacgtcagttggagattgtcatcacacagactatatttcagactatggggctgcaacgcctttcgattcacattgataacacccatgagttctctgcagcaccagtgattgcatggctcatgtataccagggagaccctccgaagcctgtcttacaatgtcaggacaatacccaatgtaagcattcttgaaaagtgtggtaggcaaaagctcgaagtgctagatttggaattggaccataacaccatcacaggtgtcgaaccaagctatcagaggttcacttgtctgaaatccctttccctgaggcatgtcagcattttggccttggatttgagccttttagttgctgcttgcccaagaatagagtcattagcacttgatgtccttgaggttgtcacttcagaattacagtctacgatggagctcacaagccatacattgaaaagtctatttgcaaaatcggtaggtgtagataagatcatacttgatgcagataatttggaagttctgcacctgaatgctttaaatctcgatctgtttgagcttaacgggaaaggaacactaaaacattttaagattgatgatgtcagtgttactcatttggatattggggacaatactgatcatttggaggcagtagacgtgagcaacttcacaatagtctggccaaaattctatagcatgatatccagggcatctaatttgcgtatgctacgattttggggtgttgtgtttgatgacgaggatgagatcgtggattcagaaactatagctgtttcatttcctcttcttaggcatctttcattgagttatgaattacgagatgggttacttcactacagccttcagggatcatcattactggagaatgtctcagttctggaacttggttggacagtaataagtgagcactttggaccctgggtgtttggtatgattggaaggtgtccaaatctcaagaaacttgttattcatggtgttctttctgagacaaaaacgcgagaggatcgccagatgttagcaagctttacctcattcatagtctgtgtcatgaggaagtatgtgcatgttgatgtacaatttgagtatgagtgacagctactaggttgggtgggcatcttgtcattgttcagatgaagctgtgccatcagttgcttgatactgggttcttccacattgatccacatctaggcaatatgatcagaacacctgacggagattatgttgcagaactgtatcaactccctctaattttatgttatattatatttggtaggaatttcta

SEQ ID NO: 112379 - DNA, 352 bp, Zea Mays
agcagaggctggagataatcgtaggagttgccaaaggtgttgcttatctgcaaggactaagaaaggaagtgatacacagtgatctaaaaccatccgacatactcttggatgaaaactagagagctaaaattgcagattttggcaccacaaaagtgttcgtggatggccagacgaatccaacacttgtacaatagagggacacagggctctagagtacactgtttgagatccagtgtttcaaagtccagccaaaaatgttgaaattcaggttcagttcagaactaagtttcagttctgtctaagccatgatagtgttcaatttagttattaaataattgttgttctttggtta

SEQ ID NO: 112380 - DNA, 2010 bp, Zea Mays
ccatcgccaccgcccacagcgcttcctgctggtctcttgttggtcgtagaactagcagtggccatggtgcaaggcgaggagagttcttggaggatggagagggcagcgctgcctctcaaccaggcgctcgcgtacggagtccaagcccacgccgccgccgccgctgcaccgccgacctgcttcctggacttccagcctgcggccgcatccgctgcctacttcgggttcggtgagctggaggaggccctcatccacggtggtggcgccgccagcgccggcggcggcgtcgatccgggcgtgatcatcaagaacgacgtcgcgcaggcaaagtcagcggcaggatatctcgcgggcgctggcaccggcaggccccccacgctggagatcttcccttcgtggccaatgaggcaccaacagcagctgcacagtgggaattcgcagtcagtagggagcaccggcactgactcgagctcagctcagaacacaatgtctcagatggagttggtgtccccagcctcctctgcgccgcggcaggaggtcatgatggtgaccactgatgattacagctacaagccaggcctcgccgctgcgcccgctgctgccgccccgccgagctttcagcagcaccacccgctcccgctgcagctgcacggaggagagggagggggagaccatgacaagaggaagcatggatccacaagaaaagatggcaagttggtagatgccaagacggaacggcggctggcgcagaacagagaggctgcgaggaagagcaggctgaggaagaaggcttacgtgcagcagctcgagactagcaggatcaggcttcagcaggtcgagcatgagctccagagagcacggtcacagggcctgttcgttggagggtgcagcgccgccggggacatgagctctggcgccgccatgttcgacatggagtacgcgcggtggcttgacgacgacaccaagcggctggcggagctccgaggcgggctgcaggcgcacctgctggacggcaacctgggactcatcgtggaggagtgcatgcagcactacgacgagctgttccagctcaaggcggcgctcgcgcgctccgacgtcttccacctcctcaccggctcctgggccacccccgccgagcgctgcttcttctggatgggcggcttccgcccgtccgagctgctcaagatcctgataccgcagctggacccgctgacggagcagcagctgctggggatctgcaatctgcagcagtcgtcggagcaagcggaggaagctctcgcccagggcctgcaccagctgcaccagtccctggccgacacagtcgccgcgggcacgctcaacgacggcgccgccgcccccaactacatgaacatcatggccgtcgcacttgagaagctcgccagcctcgaaaatttctatcaacaggccgacaatctaaggcaccagacgttgcatcagatgcgccggatcctgaccactcggcaggctgcgcggtgcttcctctccattggggagtactacagccgcctcagagctctcagcaacctctgggcttcccgtccccgcgacaacttcatcgggacagagagcctcagccccacagcaacggaactgcaagccctgcaccaccagcagcagaaccagttcgccggattttgaggcctcacctggtgagggagggtgtaaaactttggccgcgagggtggtgttacaaagattagaggttttgagagggagatgcattgtaatgttctatcattaaagtactgagaaagcaacatcactaggcgaaaagggcggggagaaggaattgctgtagtgcgatgttgggtggctcacctgttcatatggctcttgaactgattgaagggttagcaccgcagaatttttgtgcgtgtcaggagagaacaaatcagttacacaagattctggctgctcacttgccagagaggactaactgcaattagagtgacagattaaccattaaatacctttccaaatcaagtattt

SEQ ID NO: 112381 - DNA, 2157 bp, Zea Mays
cactttggttggattacacctccgccgcacgcaccgaaattttttcttaatgctcgaggcctgaatcctgcgagtgcgagtgatttgtttgggcaccaagatcgatcggccggcaccatcgtcttttggccctcatccttatctgctgcctgccccagagccacggctacagcagctacaagcctcgtgctttaggcagtctcggcctttccattcttgaaaaggctttatctgctactagcttcgccttcgccttggcttctatagctcggggggcgggccgcggcgggcgggcgatgactgatggtctctgtgcgctactgcttgggcagggacttccagcctgcggccgcatccgctgcctacttcgggttcggtgagctggaggaggccctcatccacggtggtggcgccgccagcgccggcggcggcgtcgatccgggcgtgatcatcaagaacgacgtcgcgcaggcaaagtcagcggcaggatatctcgcgggcgctggcaccggcaggccccccacgctggagatcttcccttcgtggccaatgaggcaccaacagcagctgcacagtgggaattcgcagtcagtagggagcaccggcactgactcgagctcagctcagaacacaatgtctcagatggagttggtgtccccagcctcctctgcgccgcggcaggaggtcatgatggtgaccactgatgattacagctacaagccaggcctcgccgctgcgcccgctgctgccgccccgccgagctttcagcagcaccacccgctcccgctgcagctgcacggaggagagggagggggagaccatgacaagaggaagcatggatccacaagaaaagatggcaagttggtagatgccaagacggaacggcggctggcgcagaacagagaggctgcgaggaagagcaggctgaggaagaaggcttacgtgcagcagctcgagactagcaggatcaggcttcagcaggtcgagcatgagctccagagagcacggtcacagggcctgttcgttggagggtgcagcgccgccggggacatgagctctggcgccgccatgttcgacatggagtacgcgcggtggcttgacgacgacaccaagcggctggcggagctccgaggcgggctgcaggcgcacctgctggacggcaacctgggactcatcgtggaggagtgcatgcagcactacgacgagctgttccagctcaaggcggcgctcgcgcgctccgacgtcttccacctcctcaccggctcctgggccacccccgccgagcgctgcttcttctggatgggcggcttccgcccgtccgagctgctcaagatcctgataccgcagctggacccgctgacggagcagcagctgctggggatctgcaatctgcagcagtcgtcggagcaagcggaggaagctctcgcccagggcctgcaccagctgcaccagtccctggccgacacagtcgccgcgggcacgctcaacgacggcgccgccgcccccaactacatgaacatcatggccgtcgcacttgagaagctcgccagcctcgaaaatttctatcaacaggccgacaatctaaggcaccagacgttgcatcagatgcgccggatcctgaccactcggcaggctgcgcggtgcttcctctccattggggagtactacagccgcctcagagctctcagcaacctctgggcttcccgtccccgcgacaacttcatcgggacagagagcctcagccccacagcaacggaactgcaagccctgcaccaccagcagcagaaccagttcgccggattttgaggcctcacctggtgagggagggtgtaaaactttggccgcgagggtggtgttacaaagattagaggttttgagagggagatgcattgtaatgttctatcattaaagtactgagaaagcaacatcactaggcgaaaagggcggggagaaggaattgctgtagtgcgatgttgggtggctcacctgttcatatggctcttgaactgattgaagggttagcaccgcagaatttttgtgcgtgtcaggagagaacaaatcagttacacaagattctggctgctcacttgccagagaggactaactgcaattagagtgacagattaaccattaaatacctttccaaatcaagtattt

SEQ ID NO: 112382 - DNA, 1157 bp, Zea Mays
cgcgacgacgagctgatcaaacaaaaactccacgacgccgactgacacacgggttagagaacggcggctagcgaaatccgagttggcaagcgcacggcagggagcttcgcaatttgacggaaccgtggccgagcgatttttatagcgtggactggggacagactgcggtcgggtgaactctatggtgcggactgccttacggccacgacagctgtcgcgacaaaaggagcacagggagatgctcacaagctccacgcgggaaccagggacacgacagaaaactcagcgcgcagcaaggaactcgacggcgacgcgtgagcaaggagacacgcgcgcgcaggaaaatccacggcgcggcggtcagggagctcgacacgcgcaaagcttcgatctgcgacacgagcaaggaaataggtgcgcgacgcaggaggctgaagcatcaccggccatgggagaggaagctccgcgagctggggcagaggacacggatcggcgaggtcgcggtatgggcgagcagcagcacgacggcgcgagcacaggagttgggcgccgagcagccgaacgccatgggagagggaaatccaagctgggaaggtccagggcgcagggaaagaagagcgccatgggagaaccgagcgagctggagagagccgcggcttgcgacggcgagcagagcgtgcgccatggcgaacagaaaccggggcgccgcagttgccagggagactcagaacagggagatggacaccgctgtagcagccagcgaaggaccccgagccctggccacacgcgtaggagaggcagggcgcgacgccgacgggagcaagcagggagcgacgattgagggaaagagagagggagaaatcaagaacagggaaatggagccaagctggggcttcgacggctggacgcgcaggactccacgcttggggaaaatggaacctgggcgtagggaacaaggggatgaaagggagatgggaaaccacggcgccatggaagctccaaaaccgggagcaggaagctgacgctccataggagagctcggccagcgcaggctactgggcatgggaggacgcgctggcgagttgaagagggcgcggtctgagcgccgggcgccgggcggagtacgtgaggcaggaggagctcgagcgcgagacatg

SEQ ID NO: 112383 - DNA, 1812 bp, Zea Mays
ccccgcacgcatgtcaccgaacaaccgggaccgggcaattcgtccagcagcatggacgcgcctccgccctcacagccggacgatgctgctccggcgccctcctcgaccttggcttctgctccctctccggcgccaacatccaacccacccacttccgccgccgccgccgcacccgccccggactccgccatcgccaaccctaacccgaacctaggtaccgtcgcaaaccctgctcaaaccctagaggctcctggccccagctccgccgccgcgcggccgccgccgccgcgaatgagaacgccttacacgcacctggccgcgcccatcacgatgtcgtcctcctcctctgctgccacagccgcggcctcctcggcatccgttccggccgcatcctcctcggctcctcctataccacgcggaggggttgtcctgggggtgcccgcgccgcgttccgcacagacgcccgctggttacactgggttcgttccgccgcctccgcttgctcaccagtttggatcgatgcatcgaggccccgaccagcccccaccttcatcttcacagtttaggcaaccttcccctgggactcagaatattgggattgttggatcactcaatacatcccagattagtccaggcacaatatctggtccgcagaagcccagacctggtcttccatcatcaactcctattccatctggtagccaaatgccaggttcacaaagacccccatctcagtctttaatgaggccggtgactgtgagttctccttcgctggcttcacaacaaactccacaaagttcgtcttcaacatttaggccccaacagaggccacaagtttcacaaccaagaccacaacaatctcaacttgttactccacctcaacagaacacaattttaacacagcagcagcagcagcagaaacaacaacagagtgcctcacatcaaaatcaacaaattgctgcccctaaaaatcagccacagctttctcagcatccaactgctcgtactccaatatcaatgacaccaaagcctgatttgcctgctatacaaaatgttgctgttttacaatctgtggatacagctgcaactgatgcaaatgctagtgaaactggtactcgattactcaccaagagaagtatacatgaattagttgcacagattgatcctaatgaaaagctggatcctgaagttgaagatgttcttattgacatcgcagaagattttgttgagtctgtcacaacttttgcttgttctttagcaaagcataggaagtcaagcacattagaagcaaaagatgtactcctacatgcagaaagaagctggaatatcaccttgccaggcttcagtggtgatgaaatcaaactgtacaagaaacagcacataaatgatattcacagggagaggcttgctctgataaagaagtccatggcgactgacacgagaaactctgctgcccaagctgcagctaaccagaaaaatcagactccgaaaccacctgccccagcttccccgtgaaacatgtccacaggccctgcaaacacagtatcagtgtaccacgcatcacatctgtggtgttcggacagttgtcggttgtatgttggtagtgttgcaatgagtacatgtatagattattctgtcgttactcgttactaggatctggttagaatgttgtttagttaatccaatgcatggtttctgttattgtatatcacttctgttctaaactataaatcatttagggctagtctaggagccacaaaacctgagtggattgaaggggttaaaatcccctcatttaattttaaataagaa

SEQ ID NO: 112384 - DNA, 1653 bp, Zea Mays
ccccgcacgcatgtcaccgaacaaccgggaccgggcaattcgtccagcagcatggacgcgcctccgccctcacagccggacgatgctgctccggcgccctcctcgaccttggcttctgctccctctccggcgccaacatccaacccacccacttccgccgccgccgccgcacccgccccggactccgccatcgccaaccctaacccgaacctaggtaccgtcgcaaaccctgctcaaaccctagaggctcctggccccagctccgccgccgcgcggccgccgccgccgcgaatgagaacgccttacacgcacctggccgcgcccatcacgatgtcgtcctcctcctctgctgccacagccgcggcctcctcggcatccgttccggccgcatcctcctcggctcctcctataccacgcggaggggttgtcctgggggtgcccgcgccgcgttccgcacagacgcccgctggttacactgggttcgttccgccgcctccgcttgctcaccagtttggatcgatgcatcgaggccccgaccagcccccaccttcatcttcacagagacccccatctcagtctttaatgaggccggtgactgtgagttctccttcgctggcttcacaacaaactccacaaagttcgtcttcaacatttaggccccaacagaggccacaagtttcacaaccaagaccacaacaatctcaacttgttactccacctcaacagaacacaattttaacacagcagcagcagcagcagaaacaacaacagagtgcctcacatcaaaatcaacaaattgctgcccctaaaaatcagccacagctttctcagcatccaactgctcgtactccaatatcaatgacaccaaagcctgatttgcctgctatacaaaatgttgctgttttacaatctgtggatacagctgcaactgatgcaaatgctagtgaaactggtactcgattactcaccaagagaagtatacatgaattagttgcacagattgatcctaatgaaaagctggatcctgaagttgaagatgttcttattgacatcgcagaagattttgttgagtctgtcacaacttttgcttgttctttagcaaagcataggaagtcaagcacattagaagcaaaagatgtactcctacatgcagaaagaagctggaatatcaccttgccaggcttcagtggtgatgaaatcaaactgtacaagaaacagcacataaatgatattcacagggagaggcttgctctgataaagaagtccatggcgactgacacgagaaactctgctgcccaagctgcagctaaccagaaaaatcagactccgaaaccacctgccccagcttccccgtgaaacatgtccacaggccctgcaaacacagtatcagtgtaccacgcatcacatctgtggtgttcggacagttgtcggttgtatgttggtagtgttgcaatgagtacatgtatagattattctgtcgttactcgttactaggatctggttagaatgttgtttagttaatccaatgcatggtttctgttattgtatatcacttctgttctaaactataaatcatttagggctagtctaggagccacaaaacctgagtggattgaaggggttaaaatcccctcatttaattttaaataagaa

SEQ ID NO: 112385 - DNA, 3968 bp, Zea Mays
cagtatcttgctgtttctgcgcatcctcctggttcttcttaccataaacttggcatgcccttaaccgggagaggtatcattcaagtttggtgtctgttagcaccatttgaagattcacattctcaccagccagtgaatgcattcaataatggtaagcaaagaggaaggcctagaaaaataccttgtagtgataagctggtacctgttccaaaaggaccaagggggaggccaaaaaagagatcttacgatgatcagttagaacctgttccgaaaagaccaaggggcagaccaagaaagtatccattaccagttgcaaaatttgaaggttcatctcaaaacggtgaaagtcaggatattattctttttgatcccctttctacttcaagttttattccagatgacctttcattggcttctgtcatgccaactgaaaagtctgtgcaatcaacacctaaaagaggcgctgatgttgaattagggaaagagacaacttgtcagactgcttcatttggctgcagtttggaccacactgcttgcacagagtttaatgccaagttatgtattgttgcagttgatgcagcattgccacctattgacaaactgacctgttcacctggtactgtatcaggagatgtgtgtacagccccaactctaacaactgcaatctgtacaaaacctaagagaccacgggggagacctcgaaagtatccagttcaaatcaatggtagatctgtttcaggcactgttgctgaattaggacaagagtcaacttgtcagccagtttcatttggccacactgtttgcacagagtttaatgctaatttaagtattgttccagttgatgcagcattgccaattgtcgacaaactgtgcagttcatctggtactgtagtaaaagaaagtgtgtgtaccgaaccatctccagcaactgcaactcgtaagcaaccaaagagaacacgggggatgcctcgaaagtattcagacactatgattgacctggggaaagatacaactggtcatcctgttttatttggacgcagtatggatcacactgcttgcacagagtctaactctagttttagcattgttgcagttgatgcatcatcactgtttgcatcttcatctactgcaacttgtgatgataagtcaaaagatgattctgaactgcctatccacatttcacctaaatcaagtaataaaagagagtcaagtggcaggaggggaagaggaaggcctaaaacgataccactttctgctggaactggtcattttgtggcttctgttgccagtctcccaaagacaacctgtgtactgactagttcaagcaatctcacgtcgttgaacaagagtggtggcaaatttatagtaagtagcgttagttcatgtggctgtgatgttgagaaatgcagtgttcattcaggtgttttgttgtctgatgatgcaccaccagcacatggcttacaaaatacaaattgtaaggaagaatcgaataccaaaataggaaaagcgggatctagaaataagcctgttgcagttgagcacaatcattttactgatcttaatgtaaaagaacaaaaagtgcagacaactccaatgtcaggtgatcctgtgatcttggttgaaaattgtatggaaggacaaggccccagaaaggctggggggcaacttcaaaggatacctgcttcaaacaagagtagtggcgcatctgttggtggtggaacatataaaatagagacattatccacaccaatgactaaaggatcatctaaaaataatgacatggcttatggggctggtttgaatcagtctcagaatgcaattgttggttgtgaaggcatggaagttattgaaagcaacactgccaattatacttctcattgtaatgaaaatgcacgagcaaatcaagttgcacccagtttcaagaacagtgatagggtcattgatgaaacggaagctgcggaacttgggccactcaaggaaccaagggaagatgacaatttgtttacttgtgtaaactcaaactcagcttcaattacaagtgacattgctcaaccaagagttgtcttgtgtttagctcacaacggcaaagtcgcttgggacatcaaatggaagcctcctttactaagtcaacctgaacagaaatcacgacttggttttcttgcagtattgttggggaatggcgctcttgaagtgtgggaagttccatcaccatgtatgatccagaaaatatattccccctctaaggtggagggttctgaccctcgttttctaaagctccaacctgtatttaggtgtgtcaaagtgaagtgcaggaacaggcaaagcattcccttgacagttgattggtcaccttctcctcctcatgatatgatattggcgggttgtcatgatggaacggttgctttatggaacttctcgatgaatttgccaacacaagattcaaaaccttttatgtgtgtcactgctgattctgttcccattagagctctctcttgggcaccatatataagtgaagaaagcacagatacctttgtcactgctggagaggatggtctaaagttctgggatttaagagatccataccatcctctttgggagctaactactgctccaagggctgtattaagtcttcattggctaaaagatggaagggggatcattatctcactggaagatggtacattgaagtttctaagcttgcctcggattgcaaatgatgttccagccactggaaggccattttccggaacaaaaactcagggtgttgcaacttatcagttgtcagaatatttgatttggagtgtccatgcttcagaacctacaggttgtgtggcttactgtggggcagatggtactgctgtgtacttccagctaaaatcgagattctgggataaggagcctgggcgtaaccgtgttccttatttcctctgtggatcattatcagaggatggagaaaatattaagattggcagcaggctgcaaacatctccattaccaaatgtgcctgtggggaccaaaaagggttcaaaaccatcccaaagtatagttcaggcgcttgctacaagcgatgtcactagcctgctgacatatcagctcaactcccccacaggaaacaatgatgccgtaaatctagaagctcatgatgatcaagatgatggacgcagcaaagagcaaggagcaggtgctgtaaatcaagaacttgatggtgaacaagatgatggacaccgtgaagaacaagcagcaggcatggtaaccacagaatttggcgatgatcaagccgatggacacagcgaagaacaaggagctggtgcaataatctcagccactcctgcaaaggaagagaatgatggaacatggaacgacaagggtgttcaatcccctaaagaccttaatgtcgtccctccgaattctgtcgctttgaatcaagtgcggtggaacatgaacaagggtagccagagatggctgtgctatggaggtgctgcaggcatcatacgatgccagagaatctgaagagccgcaatctggaatgctcttcgagaaacagaggcttgtcacacagatggtggtaggttctactctattcttttctgctacttttgaccgggtcgccgagggtggttggcttagctgtgcataggggagaaccgatgcaatagacctttgcatcttagaattgcagtccccaggttctgaatacatatggtatggaacctgggtcctgatagttgcggtagtaccagtgcatgcgaacctgagcttttgcgttccattctgtgtaagggcttgttcgtttgtctaggaatggatttggaatcgtttcagctaatcaaaacttatataacttagagaagaaatccagctagaaattgttccctaatgtggttcctaactgttaccttatgatgtgaacagaacatgatgcattcgggaggaaataataaatgccatagtgctcgagattctggttt

SEQ ID NO: 112386 - DNA, 3954 bp, Zea Mays
cagtatcttgctgtttctgcgcatcctcctggttcttcttaccataaacttggcatgcccttaaccgggagaggtatcattcaagtttggtgtctgttagcaccatttgaagattcacattctcaccagccagtgaatgcattcaataatggtaagcaaagaggaaggcctagaaaaataccttgtagtgataagctggtacctgttccaaaaggaccaagggggaggccaaaaaagagatcttacgatgatcagttagaacctgttccgaaaagaccaaggggcagaccaagaaagtatccattaccagttgcaaaatttgaaggttcatctcaaaacggtgaaagtcaggatattattctttttgatcccctttctacttcaagttttattccagatgacctttcattggcttctgtcatgccaactgaaaagtctgtgcaatcaacacctaaaagaggcgctgatgttgaattagggaaagagacaacttgtcagactgcttcatttggctgcagtttggaccacactgcttgcacagagtttaatgccaagttatgtattgttgcagttgatgcagcattgccacctattgacaaactgacctgttcacctggtactgtatcaggagatgtgtgtacagccccaactctaacaactgcaatctgtacaaaacctaagagaccacgggggagacctcgaaagtatccagttcaaatcaatggtagatctgtttcaggcactgttgctgaattaggacaagagtcaacttgtcagccagtttcatttggccacactgtttgcacagagtttaatgctaatttaagtattgttccagttgatgcagcattgccaattgtcgacaaactgtgcagttcatctggtactgtagtaaaagaaagtgtgtgtaccgaaccatctccagcaactgcaactcgtaagcaaccaaagagaacacgggggatgcctcgaaagtattcagacactatgattgacctggggaaagatacaactggtcatcctgttttatttggacgcagtatggatcacactgcttgcacagagtctaactctagttttagcattgttgcagttgatgcatcatcactgtttgcatcttcatctactgcaacttgtgatgataagtcaaaagatgattctgaactgcctatccacatttcacctaaatcaagtaataaaagagagtcaagtggcaggaggggaagaggaaggcctaaaacgataccactttctgctggaactggtcattttgtggcttctgttgccagtctcccaaagacaacctgtgtactgactagttcaagcaatctcacgtcgttgaacaagagtggtggcaaatttatagtaagtagcgttagttcatgtggctgtgatgttgagaaatgcagtgttcattcaggtgttttgttgtctgatgatgcaccaccagcacatggcttacaaaatacaaattgtaaggaagaatcgaataccaaaataggaaaagcgggatctagaaataagcctgttgcagttgagcacaatcattttactgatcttaatgtaaaagaacaaaaagtgcagacaactccaatgtcaggtgatcctgtgatcttggttgaaaattgtatggaaggacaaggccccagaaaggctggggggcaacttcaaaggatacctgcttcaaacaagagtagtggcgcatctgttggtggtggaacatataaaatagagacattatccacaccaatgactaaaggatcatctaaaaataatgacatggcttatggggctggtttgaatcagtctcagaatgcaattgttggttgtgaaggcatggaagttattgaaagcaacactgccaattatacttctcattgtaatgaaaatgcacgagcaaatcaagttgcacccagtttcaagaacagtgatagggtcattgatgaaacggaagctgcggaacttgggccactcaaggaaccaagggaagatgacaatttgtttacttgtgtaaactcaaactcagcttcaattacaagtgacattgctcaaccaagagttgtcttgtgtttagctcacaacggcaaagtcgcttgggacatcaaatggaagcctcctttactaagtcaacctgaacagaaatcacgacttggttttcttgcagtattgttggggaatggcgctcttgaagtgtgggaagttccatcaccatgtatgatccagaaaatatattccccctctaaggtggagggttctgaccctcgttttctaaagctccaacctgtatttaggtgtgtcaaagtgaagtgcaggaacaggcaaagttgattggtcaccttctcctcctcatgatatgatattggcgggttgtcatgatggaacggttgctttatggaacttctcgatgaatttgccaacacaagattcaaaaccttttatgtgtgtcactgctgattctgttcccattagagctctctcttgggcaccatatataagtgaagaaagcacagatacctttgtcactgctggagaggatggtctaaagttctgggatttaagagatccataccatcctctttgggagctaactactgctccaagggctgtattaagtcttcattggctaaaagatggaagggggatcattatctcactggaagatggtacattgaagtttctaagcttgcctcggattgcaaatgatgttccagccactggaaggccattttccggaacaaaaactcagggtgttgcaacttatcagttgtcagaatatttgatttggagtgtccatgcttcagaacctacaggttgtgtggcttactgtggggcagatggtactgctgtgtacttccagctaaaatcgagattctgggataaggagcctgggcgtaaccgtgttccttatttcctctgtggatcattatcagaggatggagaaaatattaagattggcagcaggctgcaaacatctccattaccaaatgtgcctgtggggaccaaaaagggttcaaaaccatcccaaagtatagttcaggcgcttgctacaagcgatgtcactagcctgctgacatatcagctcaactcccccacaggaaacaatgatgccgtaaatctagaagctcatgatgatcaagatgatggacgcagcaaagagcaaggagcaggtgctgtaaatcaagaacttgatggtgaacaagatgatggacaccgtgaagaacaagcagcaggcatggtaaccacagaatttggcgatgatcaagccgatggacacagcgaagaacaaggagctggtgcaataatctcagccactcctgcaaaggaagagaatgatggaacatggaacgacaagggtgttcaatcccctaaagaccttaatgtcgtccctccgaattctgtcgctttgaatcaagtgcggtggaacatgaacaagggtagccagagatggctgtgctatggaggtgctgcaggcatcatacgatgccagagaatctgaagagccgcaatctggaatgctcttcgagaaacagaggcttgtcacacagatggtggtaggttctactctattcttttctgctacttttgaccgggtcgccgagggtggttggcttagctgtgcataggggagaaccgatgcaatagacctttgcatcttagaattgcagtccccaggttctgaatacatatggtatggaacctgggtcctgatagttgcggtagtaccagtgcatgcgaacctgagcttttgcgttccattctgtgtaagggcttgttcgtttgtctaggaatggatttggaatcgtttcagctaatcaaaacttatataacttagagaagaaatccagctagaaattgttccctaatgtggttcctaactgttaccttatgatgtgaacagaacatgatgcattcgggaggaaataataaatgccatagtgctcgagattctggttt

SEQ ID NO: 112387 - DNA, 819 bp, Zea Mays
agcattatgttggcccttttgcttactccatttgcatgatgccaggacatttattgagacagcatgcctaagataaagacaagtcgtgtcaagtatcctgaaggatgggagcttattgaaccaaccatccgtgagttggatgccaaaatgagagaagctgaaaatgatccacatgatggaaagagaaagtgtgaagcgctctggcctattttccgtatttctcatcaaaggagccgctacatatatgatctttactacagaaggaaggagatatcacgggagctttatgagttctgcctggaccagagctatgcagaccgtaacctgatcgcaaagtggaaaaagccaggatacgagcgcctttgctgccttcggtgcatacagacacgtgaccacaactttgcaacgacttgtgtctgccgagtccccaagcatctgagggaggagcaagtgatagaatgtgtccattgcggctgcaggggttgtgccagcggtgactaatcttgtcatcatgttgttgggctcacgactcatcatcaccatcctaaccacattagatgtctcgtgagcatggatcggctatggtgattagcatgaatgtgttgtggtaactagttggaagactaaatttcctgacgtttggatgtttgcaactgctatgtactataaagactcctcgtgccacaaatgtttttgttaaattagtagcgcttttgcatcttgtatgattctgtaaattgtcttttatcaccaattgctcaggagccaagctagtacattgctcgaatccttattgagccccagccccggttctatttt

SEQ ID NO: 112388 - DNA, 167 bp, Zea Mays
cttttctccagatctcaaaggaagaaaaagatttgatcagatatgtgtcgatgctcattcccaatgtacataagttgtcaatggtattatgggggagtttggtttgcccctactaaaatttagcccctatcacatcgaatgtttgaacctccgttcggggtattaaa

SEQ ID NO: 112389 - DNA, 1022 bp, Zea Mays
aaataggtgttttacgttttagggttgtaaaaaaacttcttccatatctcggccgaggcttcctctgctcgggatcgaccgcgagagcttcgctccaccccgcgcggccgcgcctgccgcctgcgctagccggaggtcggccagccgccccagcctcaacagtcgcacagccgccgccgaggcaaactcgaagccaccccgccgccgcagccacagccgcgccgagcttgagccgtcgttgctccgctgaatcgcccccatcgtctctcctgaagagagaggacatttattgagacatcatgcctaagataaagacaagtcgtgtcaagtatcctgaaggatgggagcttattgaaccaaccatccgtgagttggatgccaaaatgagagaagctgaaaatgatccacatgatgggaagagaaagtgtgaagctctctggcctattttccgtatttctcatcaaaggagccgctacatatatgatctttactacagaaggaaggagatatcacgggagctttatgagttctgcctggaccagagctatgcagatcgtaacctgatcgcaaagtggaaaaagccaggttacgagcgcctttgctgccttcggtgcatacagacacgtgaccacaactttgcaacgacttgtgtctgccgggtccccaagcatctgagggaggagcaagtgatagaatgtgtccattgcggctgcaggggttgtgccagcggtgactaatcttgtcatcatgttgttgggctcacgactcatcatcaccatcctgaccacattggatgtctcgtgagcatggatcggctacggtgattagcatgaatgtgttgtggtaactagtgggaagactaaatttcctgacgtttggatgtttccaactgctatgtactataaagattcctcgtgccacaaatgtttacgttaaattagtagcgcttttgcatcttgtatgattctgtaaattgtttttttatcaccaattgctcaggagccaggctagtacattgctcg

SEQ ID NO: 112390 - DNA, 2074 bp, Zea Mays
atgtgatgtgagcctggcagcctgctgcctgcccgcgtccccgggactagttcagttgcttcactgtggcggtggcctggccctgcgtgcgcgctgcagcagtgcggtagcgggcagatggccgactccacggccatgaccgtcgacttcctccgtgcgcggctgctctccgagcggtccgtctcccgcgccgccaaggagcgcgcggacgagctcgccaagagggtcgcggagctggaggagcaggtccgggcggtgacggcgcagaggcggcaggcggagtgggcggccgccgaggtgctcgccgttctggagtcccagggctttggcgaccatctctcggatggggccgacgactccgacggctctgaagtccaggacggcgaggaggaggacggcaagagtcgcggcgatacggccggtgccgctggcgaggatggtgagggggagccatcggcagccaagggcgaggcggaggacgcgctgtccgggaccacggcccagcccggcgggctttcgtggaaaggccgcagcgtgagcccgcgcaaggccaggcagctcaagcagcggcacaggcggagcttcttctacttgctctcctccgccgatccctcgcccaagtaccgagtggggcaatcgtgccgcaagaacaagaggcggatggagctgagcaatgtcagcaggtcggtggcaacggaagaagacggcgagggcggggggagtcagagaggtcggcaagatgggccggattttacggacgacggcgaggtgggtgtcgatgagcggagtccaggggccggtggtggtgtcggccagtacgtgatcaggtacgagaaggatggtggggagatggcgagggtgctggagaggcaggccgagctgatagggcagtacgaggaagaggagaacgctcagagggagtgggagaaacagtacaacgagaacaggaatgcaaataagggtgatgtcgagccaaagaataatgcgaaaaacgtccccagcaccaacaacccgtctgctgaacgtctgccgaacaaagagagctccaacaacagcgcggtcccaaggcaagatcaaacatcagacggcgattcaggatacagcagggacactcggtctcctaagcgcgacaccaccgtcagcgcaccatcagatgggagcccatcgagtgacaccctcaacagcaaggcgtccggctggagctcgtcacggttccacgactgcacggacagacagcttgatgacacaccggcgccatgcagcatcgcggacatagagagtgtcctgcaggcgctgcaacgcgccaggatatccctgagcgccaagctgagcaagccagtcccccccagccaggtgacgctggcgctcccggcgcccggagacgagcacagagagtacgacgacgaggacctgccgaccgacgaaggctcgtacggtgatgaaaagctgagcggctcaagtccttcctgccaggagatgctggcgctcccggcaccggaggattaccatggccatgaaagggagggctcgccgctggtttcgcatgtagagaaagcaagcacctcgagccctccacgcgaggaaatgctggcgctccccgcgccaagagacgagtaccgcaaccgcaaggaggccgaggattacatgaggatccccgccggcattcccggtctgttccggctgcccgtagactcgtttccagtggatgagaagatgttctcaggtaccgcctgtggttcagggtttcgtctgggactgcgagcagcggcgcctacttctggtaggtgtatcagcgtgccaacaccaccagatcttacggttgggagtgctcctttcctttctggaattccaggacttcagagtctgagcagaggaatgcctcttgcagatgaagatctgttcatgcagcggggtatcgattgcaccgtctctaatatgtggatgctgtaagtacgacaaacgtcttgtgtgtcgatttcttccttgcatgtggtttggtatagcggtacatatgtagcattggtcataagataggagtgtgttgagcactagttaagcaagcagcagctgcccc

SEQ ID NO: 112391 - DNA, 1964 bp, Zea Mays
atacatttcgcgtcagccctcgggtggtcagtccatatagctaagccgcctacctcccgcgagctctgcgatatatatgcaaacccagcttgccgatacagcgcacgcaaccgccgggggtcgtctcagccagtcccagctagctccacaccgtgcagctcggccggcaaaaactagctaagctagcaagtagccaccgtttcgttccaggctccagcctaggggcgcgcgacgacgacatggggttgggagctgttgctgcgacccgggaggatgaggaggcgaagatggaggccggcggcgacaccgctggccagaagctcgacgccggcgcgctcttcgtgctccagtccaaaggttcgtggctgcactgcgggtaccacttgacgacgtcgatcgtggccccggcgctgctgagcctgccgttcgcgttcgcgtcgctggggtgggcggcggggacgatctgcctcgtcatcgccgcggccgtcaccttctactcctacaacctcatctcgctcgtcctggagcaccacgcgcggcagggccgccggcagctccgcttcagggacatggccacggacatactaggtcctggatggggcaaatactatattgggccgatccagttcctggtgtgtttcggagcagtcgtcgggtgcactctcctggccggacagagcatgaaggcaatctacctgctagccaaccccggcggcacgatcaagctgtacgtgttcgtggccatcttcggcgtcttcatgatgatcctggcgcagctgccgtccttccactcgctccgccacgtcaacctcgtctccctgctgctctgcctcgcctacagcttctgcgccgtcgccggctccatatacctaggaaactccgataaggcgcccccaaaggactactccatctcaggtgacgcccagaaccgtgtgttcggcgtcttcaacgccatcgctatcatcgccaccacgtatggcaacggcatcatcccagagatacaggcaacagtggcggcgccggtgacggggaagatgttccgggggctgtgcctgtgctacgcggtggtggtcacgaccttcttcagcgtggccatctcggggtactgggcggtcggcaaccaggcgcagggcatcctgctgagcaacttcatggtggacggcgcggccgtgatccccaagggcctcctcctcgtcacccagctcttcacgctgctgcagctctcggcggtgggcgtggtgtacctgcagcccaccaacgaggtcctggagggcctcttctcggacgccaagcagggtcagtacgcggcgcggaacgtggtgccgcgcctcgtgtcgcgcacggtggccgtcgcgctggccaccaccgtcgcggccatgctgcccttcttcggggacatgaactcgctcatcggcgccttcggtttcctgccgctcgacttcgccgtgccagctctcttctacaacgtcaccttcaagccgtccaagaagggattcgtgttctggctcaacaagactatcgccgtcgtcttctcggggctcgccgtcatcgcgtccgtcgcggcggtgcggcagattgccttggacgccaaaacttacaagcttttcgccaacgtgtgaggagagcccaaactcaagcaactacaaacgccctagatgtttttgtggtgagcgttttgtggtggtgtacgatctacgatggtacgaacacgcgaaaaaaagtgttttcctgcttggctaagtaagctaagaactagtataataccccgacggcatacgaatcatatttctaaaaaaatctatatattaaagctgggcgctaagggtatgtttgtttccgcttatagattatataatctggattataatctaaattatataatatagattataatctagatatattataatctatatgtagttgtttggtagtttagattatataaatgtagattatttataaag

SEQ ID NO: 112392 - DNA, 378 bp, Zea Mays
aaaagccgccgtccatacttatcagacccatctacccagtgcgcaaggtgtgttatcgctgattccgtttagagatcacgatgattggttgctctctttaccgctgtttcacgtctccggtcagggaattatgtacgctggttatacgctggtgcgcggatgacggtacgtgataaacagccattggagcaaatgctggcaggctgtactcacgcttcactggtgccaacacaactctggcgtttgctggttaaccgtagttccgtttccctgaaagcggtgttacttggcggcgcggctatcccggtcgagttgacggaacaggcgcgcgagcaggggattcgttgccaccccacattcaatggcatccaagtttcc

SEQ ID NO: 112393 - DNA, 1998 bp, Zea Mays
acgtgtcttctccgtcctgcgaactggcctctgccatccccgttgccaaaacaactcttccttcgttcagtgtcgaactatcgatgcggccgacccgcgcggcgtcgcgtgggggatgggcgttatacgagctgtacaggacaacgagccgcgtggcggcgccggcagtgctattgtggcggcgactgcaagggctggagcacccgacgcggtggccggagcggctaggacggccgtccgcggcgcggcctcggccgggctctccgctcgtgtggtttcatgccgtatcccttggcgagggaatggccgcgcttcccattgttcgccactgcgtccgcctccgtcccggcctccccgtgcttttcaccaccaccaccctctcctcgtccgaagttatcatggatctactccctgatggtgtcatatatcagtttgctcctcttgactgtcctactgcaatagatagttttattggatactggaagccaagtttggtacttcttctggaaagtgaactctggccaaacctcatcatgtctgcagcagcaaaagggattgcagtggctcttttaaatgcacgcatatcattgaaatccttcaaccactggtcgatgcctctaatgttcccattagtttctttgatgctctctaaactatcacttgttgtcccattgagtactattcaagctgttcgttttcagctgctacatacaccaccaggaatcatacattttgctggagatttaaaatatgctgttggagatgttaataccggggagaatcaggtcaaggaaataaaagatttgcaacggcagtttagcaataggcccctctggatggctgcttctattcacagaggtgaagaagaagtcatcctccgcattcatgaagagttggtcaacgtgtatcccgttctactactaattcttgtgccaagacatcctgaagactgtaagaatatttccttggcactaaagaaacagaaggtcaattttgtgctgaggtcaactagggaagtggtctcttcaatcactagggtatatatggttgatactttaggggaattaagaatgctttacagggtcaccccaattgcagttgttggtggttcatttctacctggcttagccggccataatttttctgaggctgctgccgctggttgtgctgttatgactggaccccacgttggacacttctaccatatgctggtcgaaatgtggcaaataaatcctttagctgtcaagcaggtgtcaggagaatttgaactgctgcaaacactaaaagaactgcttggtgatgccagcactctgggagcacgtcaaagagctgcaaaagatgcattttcgattatgtcagatggagttgtgaaccgtgtatgggatttagtctgcaggctgggcattgattcccaaacaaatacgttgagcagttgacttagctgaggcttattcttgtaatctctgtgggactgtaggagtggaaatgcacagggagactgaaaccaaaaaccggcgattgtggcatgctggcgacctggtgagtggtgagtggtgacaaaggactaagctcacatgatagaacatatatccacgtcatttgctcgacttgctcctgtcggaaatttagatatattccataaaaatcctttgagatgtctgtcatcttttcatttccttgtagcatggatatgatatattttgtcattccttagtgccagccagcagatgatgttttgcagtgccttttcctttgttaaattggcacattcaaggctccaggaatttcaagggccatgccaattttagggttagatgtgaactgttaaatgcatatgacatgctttttcaggcgtgatatgtgtgattgatgttcttttctatcttggcaaagtacagttttggggataggaaagcgggaatgggaaatggacacaatttcctcgaatgtatgccataggttggactgcaatttgcaaattgacctgaggtaaccagg

SEQ ID NO: 112394 - DNA, 2135 bp, Zea Mays
acgtgtcttctccgtcctgcgaactggcctctgccatccccgttgccaaaacaactcttccttcgttcagtgtcgaactatcgatgcggccgacccgcgcggcgtcgcgtgggggatgggcgttatacgagctgtacaggacaacgagccgcgtggcggcgccggcagtgctattgtggcggcgactgcaagggctggagcacccgacgcggtggccggagcggctaggacggccgtccgcggcgcggcctcggccgggctctccgctcgtgtggtttcatgccgtatcccttggcgagggaatggccgcgcttcccattgttcgccactgcgtccgcctccgtcccggcctccccgtgcttttcaccaccaccaccctctcctcgtccgaagttatcatggatctactccctgatggtgtcatatatcagatagttttattggatactggaagccaagtttggtacttcttctggaaagtgaactctggccaaacctcatcatgtctgcagcagcaaaagggattgcagtggctcttttaaatgcacgcatatcattgaaatccttcaaccactggtcgatgcctctaatgttcccattagtttctttgatgctctctaaactatcacttgttgtcccattgagtactattcaagctgttcgttttcagctgctacatacaccaccaggaatcatacattttgctggagatttaaaatatggtatactcaagttttgtctagtctttcctgagaatagattttaagtgatcatatgagtgatttagttttaaagattgtcttgggagcttgaaagataaccaggtttacaaatcaaatgatttattagatgattcatgtaattcacatagctgttggagatgttaataccggggagaatcaggtcaaggaaataaaagatttgcaacggcagtttagcaataggcccctctggatggctgcttctattcacagaggtgaagaagaagtcatcctccgcattcatgaagagttggtcaacgtgtatcccgttctactactaattcttgtgccaagacatcctgaagactgtaagaatatttccttggcactaaagaaacagaaggtcaattttgtgctgaggtcaactagggaagtggtctcttcaatcactagggtatatatggttgatactttaggggaattaagaatgctttacagggtcaccccaattgcagttgttggtggttcatttctacctggcttagccggccataatttttctgaggctgctgccgctggttgtgctgttatgactgagtgaactctggcatgcaggaccccacgttggacacttctaccatatgctggtcgaaatgtggcaaataaatcctttagctgtcaagcaggtgtcaggagaatttgaactgctgcaaacactaaaagaactgcttggtgatgccagcactctgggagcacgtcaaagagctgcaaaagatgcattttcgattatgtcagatggagttgtgaaccgtgtatgggatttagtctgcaggctgggcattgattcccaaacaaatacgttgagcagttgacttagctgaggcttattcttgtaatctctgtgggactgtaggagtggaaatgcacagggagactgaaaccaaaaaccggcgattgtggcatgctggcgacctggtgagtggtgagtggtgacaaaggactaagctcacatgatagaacatatatccacgtcatttgctcgacttgctcctgtcggaaatttagatatattccataaaaatcctttgagatgtctgtcatcttttcatttccttgtagcatggatatgatatattttgtcattccttagtgccagccagcagatgatgttttgcagtgccttttcctttgttaaattggcacattcaaggctccaggaatttcaagggccatgccaattttagggttagatgtgaactgttaaatgcatatgacatgctttttcaggcgtgatatgtgtgattgatgttcttttctatcttggcaaagtacagttttggggataggaaagcgggaatgggaaatggacacaatttcctcgaatgtatgccataggttggactgcaatttgcaaattgacctgaggtaaccagg

SEQ ID NO: 112395 - DNA, 880 bp, Zea Mays
gtcatccgcgcgcccccgctctcctccatctgccgcgtgaagctctcccgaaaacctcctccacatcagcgccccccgccatgcccctgtatctcgcctagcacacgccgcgcccacgcaggcagccgtggatctcgcccccaccgtcgagcttccatggtaggcatcctcttccatactaggcggccatggcatgaacccatcccctatccgcgcccccatcgcacgggccctaatcctagaatggtgccttcctccttctctgtcgcctctgccctactcagaccttcgagacttccactggcgatacacacccactagggaattcttagaccaacatgaggaggaagaaatgcctcatgttattagtgttacaccagacgtacaagaggccattggacggcattctttgcctgcgataggaatgaggagctatctgcaaactatcttcttgagcaagctggtgaggaagattaagccagagtagttttcgtatgggtacaaacatagctttgcgtcaatcgatgccaggcaaatgtagaacgcttggtagccggtcagcgctatgtgtagaacacatactccagagatgaacatggatcacgagaactggaataattgctgtcagccatggacccatgacatcggtggtttcgcgcacctcaaagacatgggtggggaggcatcgcggctgctgcacgccctctagagaatgcttatcgatcatcaggtgcattcaattacgctttcggttgctgcattgagaaatgaatcagtcgaactgtgaaccaactacttgaaatttcacgtgatgtggggtatagtggcaatgcataagcccacatggagcactgggtcttcgaggtgacacactgacatt

SEQ ID NO: 112396 - DNA, 1148 bp, Zea Mays
gtcatccgcgcgcccccgctctcctccatctgccgcgtgaagctctcccgaaaacctcctccacatcagcgccccccgccatgcccctgtatctcgcctagcacacgccgcgcccacgcaggcagccgtggatctcgcccccaccgtcgagcttccatggtaggcatcctcttccatactaggcggccatggcatgaacccatcccctatccgcgcccccatcgcacgggccctaatcctagaatggtgccttcctccttctctgtcgcctctgccctactcagaccttcgagacttccactggcgatacacacccactagggaattcttagaccaacatgaggaggaagaaatgcctcatgttattagtgttacaccagacgtacaagaggccattggacgggaatgaggagctatctgcaaactatcttcttgagcaagctggtgaggaagattaagccagagtagttttcgtatgggtacaaacatagctttgcgtcaatcgatgccaggcaaatgtagaacgcttggtagccggtcagcgctatgtgtagaacacatactccagagatgaacatggatcacgagaactggaataattgctgtcagctgcattgaaacaggcagatcctattaacaactccgcattggctctctgccccagccatggacccatgacatcggtggtttcgcgcacctcaaagacatgggtggggaggcatcgcggctgctgcacgccctctagagaatgcttatcgatcatcaggtgcattcaattacgctttcggttgctgcattgagaaatgaatcagtcgaactgtgaaccaactacttgaaatttcacgtgatgtggggtatagtggcaatgcataagcccacatggagcactgggtcttcgaggtgacacactgacattgcaactgaacacacttgtctatgtggctatggctacggtatacatagagtcgtacattaggtagcttattcaatcaaataatgtccggttttgtcatgaaagtgataataatcttctatataaacttggtcaaacgtaagacatttcacttaaaataaaaccagaacgtctctctttttcggtggagatagtattaatataatttcgaaaattctgatctgcgagttggtac

SEQ ID NO: 112397 - DNA, 2102 bp, Zea Mays
gtcatccgcgcgcccccgctctcctccatctgccgcgtgaagctctcccgaaaacctcctccacatcagcgccccccgccatgcccctgtatctcgcctagcacacgccgcgcccacgcaggcagccgtggatctcgcccccaccgtcgagcttccatggtaggcatcctcttccatactaggcggccatggcatgaacccatcccctatccgcgcccccatcgcacgggccctaatcctagaatggtgccttcctccttctctgtcgcctctgccctactcagaccttcgagacttccactggcgatacacacccactagggaattcttagaccaacatgaggaggaagaaatgcctcatgttattagtgttacaccagacgtacaagaggccattggacgggaatgaggagctatctgcaaactatcttcttgagcaagctggtgaggaagattaagccagagtagttttcgtatgggtacaaacatagctttgcgtcaatcgatgccaggcaaatgtagaacgcttggtagccggtcagcgctatgtgtagaacacatactccagagatgaacatggatcacgagaactggaataattgctgtcagctgcattgaaacaggcagatcctattaacaactccgcattggctctctgccccagccatggacccatgacatcggtggtttcgcgcacctcaaagacatgggtggggaggcatcgcggctgctgcacgccctctagagaatgcttatcgatcatcaggtgcattcaattacgctttcggttgctgcattgagaaatgaatcagtcgaactgtgaaccaactacttgaaatttcacgtgatgtggggtatagtggcaatgcataagcccacatggagcactgggtcttcgaggtgacacactgacattgcaactgaacacacttgtctatgtggctatggctacggtatacatagagtcgtacattaggtagcttattcaatcaaataatgtccggttttgtcatgaaagtgataataatcttctatataaacttggtcaaacgtaagacatttcacttaaaataaaaccagaacgtctctctttttcggtggagatagtattaatataatttcgaaaattctgatctgcgagttggtactttgataattcaaatccatgttgccaaaagctaactgatataatactttcttcaacagtaactatcatactatctgcatcttctatgatctattaaagtacctcacaagagatccaattaatgattcacacctgcaagataacacctgtagtggaaatccagttttctggtgtgagtctaaatatttcagaaacaatgaaagcatagaagaaaatgctgcagtaggacaatacctaattatcatgtgcatgcccctagaccctccatttttctcttagcgaggaagcagaaaaccaaactcaaatacaagaaatattagtcaatacaaagtggccaaatttctcgagacagaaaaagacaggtgggatgtagaaagggacttaaaagttgaaaccattggccccatgtactgcggcaaaatatttctcttcttctggcagtacagtagcttgcatcatatgtgacatcctctttatagtacaggaagtcaagaatagcccgagtgctcagcacatatgctacatgctcccaactacattaccccttctttgaagtggcgagcaaagcgagaagtttgagtggggcccaaaacctgagtggggcctaaatagaaacctacttactaatggacctttatagctacaatgaataagataaaaactccactgaaaccagaaaattgagtgggaccccgtgccccagtcagcccaacgtgagcctacccttgcttctctgctcagacatgcacataaactgaattcgtctcatttatttatgtttaaggtgtgtcgtttattcacttgctccagctgctgctatcaccccaaccaaatcaattttgaaggccgaattatctaacaacatttccaaagggaatatttcaagttcacctacacggccgcaccttctcccgaacaacgtggagcaagcaatcatttcctgtagaataatatg

SEQ ID NO: 112398 - DNA, 555 bp, Zea Mays
gccccttctccgccttcattccccaaacaccaaaacccggctccgcgtctccgccgaagcgggaggcgggcgggggcaggcacctgttcgcgctgcgcgaaattacactccccctccctctcttttctcactccgattccccactcgcgatggccgcgcctcgacccccgccgctgggggccctgggaggcgttgtcggtggcagcggtggcgccgcccccgccgccggggcgcccgccggagtcagcatgcggatgttccacggcgagtcgttccttggcgagatggaggtcttcccgatgaagcgggacggcgaggggggcctccctttcccgaccaacgagatccgcgtcagccacttctcgccggcgagcgagaggtgcccgcctctcgctatcctgcagaccatcgcgcccttctccgtacggtgcaagttgcagaccaagcttacgcctcccaacccgggcctccagcgcttgtatctcacttgtttcaacgagttcaaggtttgtccccaatttttgtgaacaaccgcgaatatgtggtttcgtcttc

SEQ ID NO: 112399 - DNA, 2876 bp, Zea Mays
gccccttctccgccttcattccccaaacaccaaaacccggctccgcgtctccgccgaagcgggaggcgggcgggggcaggcacctgttcgcgctgcgcgaaattacactccccctccctctcttttctcactccgattccccactcgcgatggccgcgcctcgacccccgccgctgggggccctgggaggcgttgtcggtggcagcggtggcgccgcccccgccgccggggcgcccgccggagtcagcatgcggatgttccacggcgagtcgttccttggcgagatggaggtcttcccgatgaagcgggacggcgaggggggcctccctttcccgaccaacgagatccgcgtcagccacttctcgccggcgagcgagaggtgcccgcctctcgctatcctgcagaccatcgcgcccttctccgtacggtgcaagttgcagaccaagcttacgcctcccaacccgggcctccagcgcttgtatctcacttgtttcaacgagttcaagagtgctgtggtagtagttggggatgaggagctgcacctggtggcaatgccgaccaaatcagggaaggtgccatgcttttggtgctgctcagcacgctcggggctctatgcagcgtccgttggcatgctcaacttgcgctgtcttgccattgtgtttgatcttgatgagacccttattgttgctaacacaatgaagtccttcgaggatcggatcgagatgctctcccgcagaatggatgtcgaagatgatcctatcagaatagcagggatgtctgcagaaatcaaacgatatattgaggacaaagagcttctcaaagaattcattgacatggatacagttacggacaatggcaaaatagttggaacccagaaagaggaggttcaacctatgtctggtggtcaggagcgtgttttccgtccagttatcagactgcctgacaggaatgcaattttgactcgcatcaatccagagaatcgtgataccagtgtttttgtaaagctaagacctgcttgggaagaattgaggagttacctaactgcaaagggacgaaaaagatttgaggtttatgtatgtacaatggctgagagagattatgctcttgaaatgtggagacttcttgatccagaaggcaacttaataagtccacaacagctctcagaacgcgtaaattgtgtaaagtcaggttccaaaaagtccctgcagaatgttttccgagacagaagatgccatccaaagatggccatggtaattgatgaccgacttaatgtttgggatgataaagatcaacacagagttcatgtcgtccctgcatatattccatactatgctccacaagcggagatggccaatgctgttccagttctatgtgttgcaaggaatgttgcttgcaatgttcgtggtgggtttttcagagagtttgatgagaatctattgaggaaagtgttcgaactatactatgaaaatgggttattggatcttccatatgctccagatgttggtgactatttagtctgcgaggataccagttttgtaccaggcaacaaagatcaggctcctatacctgagggcatgaggggaactgaagtagagaagagattaaatgggcagtcatatcggtgggagcaaagggaaggacaacaaatgccatcttcaatccgttcaccagatgacgagggaatgcctatccgaggtactggaggagttaggaatatccagccaaatgggggctcgctagcaataaccccctcggtatatgtcacagtgttgcaagaaattgggcggctgtgcgactccaaggtggaatttagatctactgtaagcagtgtcagaagtatgctattttctgtagaggttctgtttaataatgaaaaaattggaataggcgtcggaaaaacaagagatgaagctcaagttcaagctgctgagaaagctctccaaaatttggagaacagttatttgtcatctggtgctccagttgctggagttcctaagaaagattcaaggaagtcccctgggaggagtggtaatggctttctggaggatgctacttgttcagataacgatatctctatgcgagaaccttctggaagtgcattgaaattggatcattcaaataatgtggatacattgtcgtctattatgagtcttattagagaacattgcttggaggaccaacatgtagtatttcgagatgaagtccagaattctagcccagccaggaatgaagaatatcatttccaggttgaactagcaggattgattctcgggaggggcgttggttcggacagagaggccgcgaagcttctggctgcagaagaggcactgaagaccttgaaatcaaccactgacccacaaattaagaagtatctgagacctgtaagatgcaatggctgattcccttccacgttctgagctccgcaaccaaatgagctttagctcatttcaccgttacagatgtcattgatttagcagaagtgcatcaccctttctgtgagtatggttgacatctcacctcgagcacatgatgtgtgccaaacacatgtcttgttctggaaatcctggctttgaaggtggtaacatagagagcggacatggtgctttatgcattcttttgaccatcatacaagtatagatgttatgtcttgtttaggatagtggcatagttggctgtaaacaagcaggagagtagatgcggatctaaaattcttgttttgaaggttatgctgactcattaacagttatggatcgttaaaaattgaatgcctgtaccagttgtcatgtttacatgtctgttataaagtgctaaatcctttacaaacttatttcaactacaaataaattcaagtgctcgtatttgttgagttatacatt

SEQ ID NO: 112400 - DNA, 2209 bp, Zea Mays
caaacaccaaaacccggctccgcgtctccgccgaagcgggaggcgggcgggggcaggcacctgttcgcgctgcgcgaaattacactccccctccctctcttttctcactccgattccccactcgcgatggccgcgcctcgacccccgccgctgggggccctgggaggcgttgtcggtggcagcggtggcgccgcccccgccgccggggcgcccgccggagtcagcatgcggatgttccacggcgagtcgttccttggcgagatggaggtcttcccgatgaagcgggacggcgaggggggcctccctttcccgaccaacgagatccgcgtcagccacttctcgccggcgagcgagaggtgcccgcctctcgctatcctgcagaccatcgcgcccttctccgtacggtgcaagttgcagaccaagcttacgcctcccaacccgggcctccagcgcttgtatctcacttgtttcaacgagttcaagagtgctgtggtagtagttggggatgaggagctgcacctggtggcaatgccgaccaaatcagggaaggtgccatgcttttggtgctgctcagcacgctcggggctctatgcagcgtccgttggcatgctcaacttgcgctgtcttgccattgtgtttgatcttgatgagacccttattgttgctaacacaatgaagtccttcgaggatcggatcgagatgctctcccgcagaatggatgtcgaagatgatcctatcagaatagcagggatgtctgcagaaatcaaacgatatattgaggacaaagagcttctcaaagaattcattgacatggatacagttacggacaatggcaaaatagttggaacccagaaagaggaggttcaacctatgtctggtggtcaggagcgtgttttccgtccagttatcagactgcctgacaggaatgcaattttgactcgcatcaatccagagaatcgtgataccagtgtttttgtaaagctaagacctgcttgggaagaattgaggagttacctaactgcaaagggacgaaaaagatttgaggtttatgtatgtacaatggctgagagagattatgctcttgaaatgtggagacttcttgatccagaaggcaacttaataagtccacaacagctctcagaacgcgtaaattgtgtaaagtcaggttccaaaaagtccctgcagaatgttttccgagacagaagatgccatccaaagatggccatggtaattgatgaccgacttaatgtttgggatgataaagatcaacacagagttcatgtcgtccctgcatatattccatactatgctccacaagcggagatggccaatgctgttccagttctatgtgttgcaaggaatgttgcttgcaatgttcgtggtgggtttttcagagagtttgatgagaatctattgaggaaagtgttcgaactatactatgaaaatgggttattggatcttccatatgctccagatgttggtgactatttagtctgcgaggataccagttttgtaccaggcaacaaagatcaggctcctatacctgagggcatgaggggaactgaagtagagaagagattaaatgggcagtcatatcggtgggagcaaagggaaggacaacaaatgccatcttcaatccgttcaccagatgacgagggaatgcctatccgaggtactggaggagttaggaatatccagccaaatgggggctcgctagcaataaccccctcggtatatgtcacagtgttgcaagaaattgggcggctgtgcgactccaaggtggaatttagatctactgtaagcagtgtcagaagtatgctattttctgtagaggttctgtttaataatgaaaaaattggaataggcgtcggaaaaacaagagatgaagctcaagttcaagctgctgagaaagctctccaaaatttggagagtgagtatatatcctctacatcctgtgtacaccaggctttgctatgtactttaaaaagttacttgtaacagatgtaccatagtcaccaagcatcctggaagccctaaaatgctttcatgtagttttatagaaaatgtccttttaagtatcggtaaatatatgaaagtggtctgtaaatgctttactgtcattgtgttttatggctttgacagcctacgatttgtcatgcgatgaatcagttttcatcttggcttatctattgggtttttggattttatc

SEQ ID NO: 112401 - DNA, 489 bp, Zea Mays
atgccaccgccagcagatgccggggccaggggccgcgcccgccgccgctgtggccaggggccgcgtccgccccgccgggagggccgcatgcctcgcactcaccgcgacggagaggagagcgcgcccgccgctctcaccgcgacggagaggagagcgcgcccgccaaagccggggccagaggtcgcgcccgccaccgctgtggccaggggccgcgtcctcgcccgcgtcgtcgagtgggggccgcgcccgctcgcgccggggggccgatggggcagcgcgccgccatcggggctgaggccgggggccacgtccgtgcaggggccaccctctccggtgccatgcaaggccgacatcctccccttgctccaggtgttgtggtcttggttagcaggcatggcgcgcagagcccgtcgggggagggggcgctgtgaccgtgggcatcgcagggacgggggcgggggcagaggcagcacgggcgtgggccgatga

SEQ ID NO: 112402 - DNA, 816 bp, Zea Mays
ccagccactgcatacgctctctaatcctcagcacgtcagtcggcctcatcctctcctcccagccgtgcctgatttttttggccgccgctcaccgccggtggagattccgccgccgttctcctctggcgcggccttatctcctccctctgtgctgatgccgcgtgtttctctctctctcagagttccttgctgttctctctctgtaagattttttttcagccgcctagttgtcctcttctttatctacctgctcttctcctctggccacagcagtgtcgtgggtgagctcaaccagtcgcacgcacagggccgcgcgaggagaccctctgctcggttccctgctcctcgccttaccccatggctgcgtcgcgcccagcccatgctcgctagacgagctctccccagccgcgttggctcccctgctcgcccctgcttctcccttcggccaaccggatctctctccttccccgcgcgcaaccttctgtcggcttcctgctcccgggtctggagcttccatggcgtcgtggtttcctatcttccatcccctttgttccctgcgcccaagttttattttcccttgccatggccgcacccctcaagctcctgcgccgcgctgggctctctgcttgagcgcgcgcccctgcttccctgttctctattcccgcgccggatttccagcgggctccctctcccacggtcgtctccttcccctagcaattggctgccgctgcatcacgcccagaaagcgctcgaccaccgttcctagcttcggcttcttcagtctgccccggctcggcgcttggacaccgggtccac

SEQ ID NO: 112403 - DNA, 1118 bp, Zea Mays
atcctaaaccaaccccttcgcgaaaagaagaaaagaacggtggtcgcctacccgatcggatcccaaaattctccacaaccccatggcggcgagtttgtggcgggcggtgatgggcaccggcgcggcgtccacgaacaccaccgactcctcgggcggcggcgttgagttctggcgcgccccggagcgcgtgggttggctgaccaagcaaggcgagtatatcaagacatggcggcggcggtggttcgtgctcaagcaggggcggctcttctggttcaaggaatcgaccgtcacgcgcgcttccgtgccccgcggtgtcatccctgtcgcctcctgcctcaccgtcaagggcgccgaggacgtcctcaaccgaccctacgccttcgagctctccacgccgcgcgagaccatgtacttcattgctgacaccgagaaggagaaggaggagtggatcaactccatcgggcgctccatcgtccagcactcccgctccgtcaccgacgccgaggtcgtcgactacgacagccgccctggcgacaaatgattgatttgtgagccggtcacacctgttactctgcagcgtctctatgctactttatctctgcagcgtctctatgataattagtgcctgtttggtttgtgctaattatgtcatgctttgcctaatgttagtcgtttcaattaaataactaaccttagacagaaaagttagtcaaagtgtggtaagctaggacatgtttggtttgatgactaaattatcacattttgtgtaacttttatgtttaagattagtttttcaatttgaacgactaagcttagacaaagtgtggcgcagttagccacgaaccaaacaggtctttagtcaccgaaccaaacaagcccttagttaaacaggtttttagtcaccgaaccaaacaagcccttagtttcacacttgttattgttgttttgtggatgtatgatctgtgtatttgtataatattttggtcattggggaataagttcggcatcttatgtatagcgtgctatctgatacagtactgcatatcagttgtctactttcaaatttgtgcactgcccgtttgatttgtttggtcaatcgtttatagtatttggttaca

SEQ ID NO: 112404 - DNA, 459 bp, Zea Mays
atgctgagcttgccgccgccgtgctggtcgtcggcgccgtccgcggcgccgatgcccatgaccccgacctcttcctccttgccgttgccgtcggccacgatggactcctccagctgctcgcgcgccatccttgagcgcacggccttcccgtctccgcccgctttttacagtggaagatttgaagatcgcggatggccggagggcgagcgacgtgcagtaaatgcagggtgcgtttcgagagggaaagcgaatggaatgccgcggaatttactgttgtatcgactgcaggctctgttcacctacgaggagggcgaggggcctagcgtggtggccgcgccgcgcggttggcaggcggcgagccggagttgcacagcagacctacggctggggacctctctcctcttgccccgcggcccagcttcttcctcgctacccgctcgctctgttcttcctttatga

SEQ ID NO: 112405 - DNA, 670 bp, Zea Mays
tttaaatattgtcatagaattatctctacttgtattaatgaatataaatgactttgaattacaaatgtaccttcggtcctgcggaaggcaaaagtacaagcgtgatgcgaaagcaaatgacagattcacatgaatagtacagaggtactgttcatctatttataggcacaggtcgcagcctgtgacaaattacaattatgccccttgcgaaagtttatagcattgactcagacctatatgtataaaaaggtcattctatctctatgtcggtttaaaacgccgaagctccatgaaaagggaccttcggccatctcttggagacgacttcagccgaagctgcttcttcgtgtgagaccttcggcgcaccgaagcacgaccccaacagtaatctacaatgcaaaagcaatagtttgcatgtccatatacatagcctactagagagtctaaagcggctagttttatattctattgaacatgggatgaggggaggtgtggggcatcgttggagatggttttatagaggcctatcaaacaggactttaagtttgttaatctcttgcttttatatagatattagaatttatttaatttaaatttaggttaggcacaacttaattctataaaaaaaataggtagctcattgttgttggcataaattatacagaaagca

SEQ ID NO: 112406 - DNA, 1865 bp, Zea Mays
cacgccttttccttatcgtcctcgaggctaaactcaaaacaagaacccgataatcaacttcagtctcgtcccgtaggaggaatttgaaaacccaaacgtacacctctgatacttcagctggagctgcaatggcaacgcccgatttgtccccggtctcgccggtgcggcgggacgacaagcagtgcgcgccatcctcctcgtcgtgcacaattctgagagtgcaggacgcgtccgcggccgaggcgtacgagcagtacctgcggctgccggaactgtcgagcctgtgggaggccgggtgcttcccggagtgggcgagcgagggcctggtgaagccggcgctgcaggcgctcgaggtcaccttccgcctggcgtccctcgcgctctccgacccgcgcgggtacgccagccgccgcgagctcgcgcgccggctggagtcgctcgcggcgcgggaggtggggctggtgtccgcgctctgcgagggcgaccggagcgcgccgctcgccgagctgggcgcctccggtggcgtgctcccgcgcgagcgcagcgcgtccgaggtgtggcagctgcccgggagcgccgccgcggtcgtgtgccaggtcagcgaggccagcctgctcccgcgcctcgccgcgtgggacaagtccgagacgctcgcggccaagatcatgtacgccatcgagagccagatgcagggctgcgccttcacgctcggactcggcgagcccaacctcgccggcaagcccgtgctcgagtacgaccgcgtcgtgcgcccgcacgagctgcacgcgctcaagcccaagccagcgccggagcccaagtctgggtacctcaacagggagaacgagacgctgttcaccatgtaccagatactcgaatcgtggctgcgcgccgcgtcgcaactcctcgcccgcctcaacgaacggatcgaagccaagaactgggaagcggcggctgccgactgctggatcctggagcgcgtgtggaagctgctcgccgacgtcgaggacctccacctgctgatggacccggacgacttcctgcggctcaagggccagctcgctgtacgagcggctccatggtctgacgcgtcgttctgtttccggtccagggcgctcctgcacgtcgctaacaccactagggacctcaagaagcgtgtgccctgggtgctcggtgtcgaggtggaccccaacggcggcccgcgggtgcaggaggcagccatgatgctgtaccacagccgtaggcgcggcgagggcgaggaggcgggcaaggtggagctgctccaggccttccaagcagtggaggtggccgtgagaggattcttcttcgcgtaccggcagctcgtggcggcggtgatgggcacggcggaggcgttgggcaaccgggcgctgttcgtgccggcggaggggatggatccattggcccagatgttcctcgagccaccctactaccccagcctggatgccgccaagacgttcctagcggattactgggttcagcagatggcgggggcctctgctccgtcaatacaaagctgaaacggcgaaatggcgcggctggatagcgaccgaatcgcgcagttttgcagcctgaagatactatgtatgcatgcatcgtaatttcgctgtggccttgtggtgatagagtgattcatttctatagcgatcctgtactagtgtagtacatgtagcactaaattgtcttattatcgttgtgcttgtgcactgcgttgtgttgtgttctacatagagattgattcagttagatgccatttgtcactctaggcaagtgtttcaattgggcaccgtgtatatatagaacttttgtaaacactggtagatggattcatcaattacagaatgttgatg

SEQ ID NO: 112407 - DNA, 928 bp, Zea Mays
gacgctgtcgcccatggagtagacggtgaagttggcgaggagcagcatgagggagaccataagggccggggtgccggagaagatgtgctggaagagccagacgaaggaggcgtgcatctcggcgtggacgcgcgccaggacgccctgcaggtcctcgtacaagagcgtctcccgcatctgcagcgtgaagctctggagctcccggatgatgagcaccatcgaggagaaggcgcgccccaccgcggcgcgcgcggactcgccggcgctgtcgaccagccgctcgtcccaccgcccctgctccagctgctgctgcttcctccgtttgagcatccgcagggacagcggcagcccgacgctgctcgcgctccgctccacgctcgccggccacccgcagccgccggcgcccgggtgctgacccaccgcgagctcctggatcctcctcgagaactcctcgtcgtccccgccgtcgctcccgacgctgtcgatgctcgcgctgagagcgcgcctgatcgtgtgctccccgccgcgccgccggccgagaccggcggcgttccagcaagccagcgacgactggctcctcgccagcctggcgccaagaacggcatgctgcggcgacgtggcaatggccgaggacgaaggcgacgccggagaggaggaggaggaggaaggagaagagcagggcggcgggatcacgaccgccgcgacctggatgcccatgggtctcggccaataccggccaccaccgcaacgatggttgggaatggcccgcggctccacaacagcgggaggctaaacgcaaggggagggagtgaaggaggagggaggtggagaggaaacgagcggtggccttatttcaggatccggaaggagtcctggtcaacctcaccacgcagctcgtgaaggttgctggtaccagtgctagtgctgc

SEQ ID NO: 112408 - DNA, 97 bp, Zea Mays
aagggaaagagtagtatacagcattggcgctgcaaactatttaaaaaaagacgattcagaatgtttagctgatcatgagagctcagagccccaggca

SEQ ID NO: 112409 - DNA, 84 bp, Zea Mays
gtacctgtaataccgtggtattattagctgctgtattgactggcgagcgaggcttatccacgtccgagtcggcgagcggcgacg

SEQ ID NO: 112410 - DNA, 2283 bp, Zea Mays
actttgcctaagtttagtcgttcgaattgaagaactaatcttaggcagaaaagttaggcaaaattcgaacgactaaccttaggtaaagtgtgacacatttagccatctctttcgtagggaagaaaaaaaaaccattagctttccgtcccggccgggcatcgtaaatgtggatggatccacgcacgatatgacacggctgcccgttggcgccactttacccgtctgtccgcctcataaattcaacgtgttggtgagaaaacacgaaacagacgagataacgcaacggctttcattcaccttacctggcgcggcgtacagcgacctcatcagctcagcttggggctaaacaagcgacaggtatcgctgctagctaggcgctactcgaacggtgctctcccgtggtcactggagcaccgcatagacatcgctctctagaagtaatggccactcaagttagctgcgactgcgaggagaggatgacttgctgcactactgcaattatacaccgtcacctcgcgcgtcgtggccctggcctgcaaatgcaatgcaatgtcatgaccaacctcgcgcgcgtatattaactccacctcgccgccccactccactgccaagcaactcgcacgcagcagtacgacgtctctcctctgggtctggggccgagacaccgagcacgtactaccagcaagatggtggcgtctcccagattcaagcccatcgaggagtgctgctcggaggggcggtcggagcagacggtggccgccgacctggacggcacgctgctcatctccaggagcgcgttcccctactacctcctcgtggctctcgaggccggcagcgtcctccgcgccgcgctgctgctcctgtccgtgccgttcgtctacgtcacctacgccttcttctccgagtcgctggccatcagcacgctggtgtacatctccgtggcggggctcaaggtgcgcagcatcgagatggtggcgcgctccgtgctccccaggttctacgcgggcgacgtgcacccggagagctggagggtgttcagctccttcggcaggcgctacgtcgtcacggccagccccagggtcatggtcgagcccttcgccagggccttcctcggcgccgacaaggtcgtcgggaccgagctggaggtcggcagggacggcaaggccacgggcttcatggccaggccaggcgtgctcgtcggcgaccacaagaagaaggccgtcgtcaaggagctcggcgacgcgctgcccgacgtcggcatgggggatagggagaccgacttcgacttcatgtccatctgcaaggttccacgtactccgatcccacggctcagctaccacttcttaatttcctgctaaaataatagtaataatagtttcatctcgatcgctggatgcattcgtacgtagtatttggtagcacccagacccaggttcgcaattacagactatttattaccggcaacacggaacatatcgggtagttgaagactggaattaaagtagaaataacacccaactgttccacaatttaggtaacatctgaccgctatttaaatgacagttgttcaattttccatccgcctgaaggccacccagattggaatttaaggcgtgattgtgaatttggtctgactgagggtttgtagtagcatatcgacatggaaagaaagaaagaaagaaatttgaaatgtcatcgtaggcaatcgttgcgccctgctgtgctttcactagttcccgtccatctgttctctcaagaatttattagatagtttagcagcttgtcaggtccttatgacacatgcatgcagacactgtatacgcacgtccatctgtttacgggtggcgttgtcacaaccagataggaagggggatcatcggtttcactagcggctgagccgggcggattgaaggcgcgcccgtccggctccatttacgccacggttgtttggtggagaattcatggcgccctgtccccgcgcgcaatgaaggagaccgccccagctggctggcgcgtgagccatgaaagctggagctgagcgtgccagatctatttgcagtctctcgcactcaacaaatgattaaaaaaaataatgcccatacggatcatgtaaacgacggtataaagtactatttttactgtagattgcgtttacagagtgaagtttaaaatagaaagtgctgaagtaccatgtgtaaacgactatgtaaagtgttgttttagaccgtagattgcattttgcagagtggaatttcaaatagaacgtgagatagagagtgaaat

SEQ ID NO: 112411 - DNA, 2548 bp, Zea Mays
actttgcctaagtttagtcgttcgaattgaagaactaatcttaggcagaaaagttaggcaaaattcgaacgactaaccttaggtaaagtgtgacacatttagccatctctttcgtagggaagaaaaaaaaaccattagctttccgtcccggccgggcatcgtaaatgtggatggatccacgcacgatatgacacggctgcccgttggcgccactttacccgtctgtccgcctcataaattcaacgtgttggtgagaaaacacgaaacagacgagataacgcaacggctttcattcaccttacctggcgcggcgtacagcgacctcatcagctcagcttggggctaaacaagcgacaggtatcgctgctagctaggcgctactcgaacggtgctctcccgtggtcactggagcaccgcatagacatcgctctctagaagtaatggccactcaagttagctgcgactgcgaggagaggatgacttgctgcactactgcaattatacaccgtcacctcgcgcgtcgtggccctggcctgcaaatgcaatgcaatgtcatgaccaacctcgcgcgcgtatattaactccacctcgccgccccactccactgccaagcaactcgcacgcagcagtacgacgtctctcctctgggtctggggccgagacaccgagcacgtactaccagcaagatggtggcgtctcccagattcaagcccatcgaggagtgctgctcggaggggcggtcggagcagacggtggccgccgacctggacggcacgctgctcatctccaggagcgcgttcccctactacctcctcgtggctctcgaggccggcagcgtcctccgcgccgcgctgctgctcctgtccgtgccgttcgtctacgtcacctacgccttcttctccgagtcgctggccatcagcacgctggtgtacatctccgtggcggggctcaaggtgcgcagcatcgagatggtggcgcgctccgtgctccccaggttctacgcgggcgacgtgcacccggagagctggagggtgttcagctccttcggcaggcgctacgtcgtcacggccagccccagggtcatggtcgagcccttcgccagggccttcctcggcgccgacaaggtcgtcgggaccgagctggaggtcggcagggacggcaaggccacgggcttcatggccaggccaggcgtgctcgtcggcgaccacaagaagaaggccgtcgtcaaggagctcggcgacgcgctgcccgacgtcggcatgggggatagggagaccgacttcgacttcatgtccatctgcaaggaggcctacctggtgacgtcaaggaagtacagcccggtgcccaggaaccagctgctgagcccgctgatcgtgcacgacggccgcctcgtgcagcgcccgacgccgctcgtcgcgctcgtcaccttcctctggatgccgttcggcttcgcgctggcgctcatgcgcgtgtacatcaacctgccgctgcccgagcgcatcgtctactacacctacaagctcatgggcatcaggctcgtcgtcaagggcaccccgccgccgccgcccaagaagggccacccgggcgtcctcttcgtctgcaaccaccgcaccgtgctcgaccccgtcgaggtggccgtggcgctgcgccgcaaggtcagctgcgtcacctacagcatctccaagttctccgagctcatctcgcccatcaaggccgtcgcgctgtcgcgggagcgcgacaaggacgccgagaacatccgccgcctgctggaggagggcgacctggtcatctgccccgagggcaccacctgccgcgagcccttcctgctgcgcttcagcgcgctcttcgccgagctcaccgaccgcatcgtgcccgtggccatcaacaccaaggagaccatgttccacggctccaccgtgcgcggcttcaagctcatggatccctacttcttcttcatgaacccgcgcccgacgtacgagatcacgttcctcacccagctccccaaagacctcacgtgcagcggcggcaagtcgcccatcgaggtggccaactatatccagaagacgctcagcggacagcttggcttcgagtgcacgtccatcacgcgcaaggagaagtacggcatgctcgctggcaccgacggccgtgtcccgtccaagaacaaggagaaggagaaggagaaggataagaactaacggccaacgtcgctctcttgctgctgcccagcagactgccgtttaattactgctcaaatttattccaatttattgttccttgtcgacaagttggccagtgtgatgtgggccgtgtactagtacaagcttgatgatgattagtatatctacaattcttcctttccggaagaagggcggaagagttgttagagccgtcttaatacaaagtttcgtcacattagtcggtttgtttggctttaatctgtaactgcttatataataattttgtctctatagattatagctgtaacaatctaaacaactgactttaataccacatcagttttacgtatttccgttgataaatgaaataa

SEQ ID NO: 112412 - DNA, 156 bp, Zea Mays
tctactttgattataccagtcctggacaatcaactgaaatcaccaagtcctctattgctccctggcagggatgctgtcacaccattgtcggagtcagaggccatcgatctagttaaggatgtgtttgcatctgcagctgagagagacatatacact

SEQ ID NO: 112413 - DNA, 1496 bp, Zea Mays
ctgctgctgatcgtcggcgcgccgggctcatgatcggaaattcggaaccagatcccctcactttttatcccatctttggctccggcgagctatgcgagcatgcggcaccaccaagcctgcagccgcgctcaccaggtgggcgctctggtcctcgtctctgccaccttcctcctcacccgcctcttcgaccgcttcctcctcgacacatattcctccgcccccataaaccccggccggcccttctcttccgctgacctccgcatctacgtctacgctgaggacgagatccagggcctccgcgccctgctccggggacgcgacggcaccatcaacgccgccacatgcctcaagggccaatggggcacccaggtcaaggtccaccaatttcttctaaagtcaaggttcagaacatttaacaaggatcacgcaaatctcttctttgttccgagctatgtcaagtgtgttcgcatgacaggggcactaagtgacaaagaaatcaatcagacctatgtcaagatcaggtgggcgcgaccacatttttgtcttcccaagtggtgcaggcgctcatctgtttcgttcatgggcaatatttctgaatcgatctattatccttactccagagggtgaccggactgacaaacgtggtacgagtgcatttaatacatggaaagatattattatacctgggaacgtggatgattctatggtgaagtctgatgctcctgctgtccaaccaatcccgctaacaaaaaggaagtacttagccaacttccttggacgtgcccaggggaaagcaggacgccttcaactggtggagcttgcaaagcagtatcctgacaagctggaatctccagaactcaagttataggacccaaaaaattgggaaggatcgagtacttcaagcacctgagaaatgcaaagttctgcttggctccacgtggagagtcatcttggacacttcggttctacgagtccttctttgtgtgattttgtcagatgaagttgagcttcctttccagaatgtgatcgactacagtgaaatctcgataaagtggccgtcgtccaggattggacctgaactccttgagtaccttgaatcaatatcagatgaaaggatcgaggaaatgattggtcatgggcgtgagatgagatgcttgtgggtgtatgcagctgatactgagccgtgctctgccatgagcggtatcctgacggagctgcagaagaaagtgcggcggttccatcaatcgccggaaacgttctggctgcacaacagaacaattgtgaatagagatctgattgagttccacagctggaagacgcctgttccgttgccatgaaccatgtattctgatttcaactatagccggcatctgtttctgtaccatgttagacatttttcttgtgaagctgtgtttgttgttgttcttgctaatcttgagaataaacacatacatcgtgttaaggattgacaatagtacgctagatatattttttta

SEQ ID NO: 112414 - DNA, 1538 bp, Zea Mays
ctgctgctgatcgtcggcgcgccgggctcatgatcggaaattcggaaccagatcccctcactttttatcccatctttggctccggcgagctatgcgagcatgcggcaccaccaagcctgcagccgcgctcaccaggtgggcgctctggtcctcgtctctgccaccttcctcctcacccgcctcttcgaccgcttcctcctcgacacatattcctccgcccccataaaccccggccggcccttctcttccgctgacctccgcatctacgtctacgctgaggacgagatccagggcctccgcgccctgctccggggacgcgacggcaccatcaacgccgccacatgcctcaagggccaatggggcacccaggtcaaggtccaccaatttcttctaaagtcaaggttcagaacatttaacaaggatcacgcaaatctcttctttgttccgagctatgtcaagtgtgttcgcatgacaggggcactaagtgacaaagaaatcaatcagacctatgtcaaggttctgagtcagatgccatatttccgtagatcaggtgggcgcgaccacatttttgtcttcccaagtggtgcaggcgctcatctgtttcgttcatgggcaatatttctgaatcgatctattatccttactccagagggtgaccggactgacaaacgtggtacgagtgcatttaatacatggaaagatattattatacctgggaacgtggatgattctatggtgaagtctgatgctcctgctgtccaaccaatcccgctaacaaaaaggaagtacttagccaacttccttggacgtgcccaggggaaagcaggacgccttcaactggtggagcttgcaaagcagtatcctgacaagctggaatctccagaactcaagttataggacccaaaaaattgggaaggatcgagtacttcaagcacctgagaaatgcaaagttctgcttggctccacgtggagagtcatcttggacacttcggttctacgagtccttctttgtggaatgtgtgccagtgattttgtcagatgaagttgagcttcctttccagaatgtgatcgactacagtgaaatctcgataaagtggccgtcgtccaggattggacctgaactccttgagtaccttgaatcaatatcagatgaaaggatcgaggaaatgattggtcatgggcgtgagatgagatgcttgtgggtgtatgcagctgatactgagccgtgctctgccatgagcggtatcctgacggagctgcagaagaaagtgcggcggttccatcaatcgccggaaacgttctggctgcacaacagaacaattgtgaatagagatctgattgagttccacagctggaagacgcctgttccgttgccatgaaccatgtattctgatttcaactatagccggcatctgtttctgtaccatgttagacatttttcttgtgaagctgtgtttgttgttgttcttgctaatcttgagaataaacacatacatcgtgttaaggattgacaatagtacgctagatatattttttta

SEQ ID NO: 112415 - DNA, 1293 bp, Zea Mays
cttctcttctctctcgccccaacgcgcccagttcgagaaagggaaacaaaaggaaagcaccgagaccttcgaatccgctacagccactgccacgagaccacggcctcggcctcggcctcgccactgcccctgagccggctatataaggaccactcctgcgcatctattgatttcagcatttcctctgaccagaggaagatcccggaagcaaccaaatcagaagcagaagctagagctactagtttttgcactcgaccatcgatctttcacaaaaccacacatatagcttgcttaactggcggtgtagtgtagctgcgatcgctgcaaactacagggtgtagtgatcgtcgatcggctacatatcatataccatggaggcgctgagcgggcgggtaggcgtcaagtgcgggcggtggaaccctacggcggagcaggtgaaggtcctgacggagctcttccgcgcggggctgcggacgcccagcacggagcagatccagcgcatctccacccacctcagcgccttcggcaaggtggagagcaagaacgtcttctactggttccagaaccacaaggcccgcgagcgccaccaccacaagaagcgacgccgcggcgcgtcgtcgtcctcccccgacagcggcagcggcaggggaagcaacaacgaggaagacggccgtggtgccgcctcgcagtcgcacgacgccgacgccgacgccgacctcgtgctgcaaccgccagagagcaagcgggaggccagaagctatggccaccatcaccggctcgtgacatgctacgtcagggacgtggtggagcagcaggaggcgtcgccgtcgtgggagcggccgacgagggaggtggagacgctagagctcttccccctcaagtcgtacggcgacctcgaggcggcggagaaggtccggtcgtacgtcagaggaagcggcgccaccagcgagcagtgcagggagttgtccttcttcgacgtcgtctccgccggccgggatccgccgctcgagctcaggctctgcagcttcggtccctagctagcagctgatcgaccgtcgacgcatgcatgcacgtactgcgtgctgctgtggccttgtctcacgcatcattgtgtagtccttgggttctagctaataccgacatgaaaagatgtgcgagatgtggaaatactgtacgcatatataagctgtagaacgtacgcgcgtatcgctgccctaccaaacgacgtacgttgcatgaagaatctgagagggtcagggaatgagcatgcagctgcagctgctgagatttcta

SEQ ID NO: 112416 - DNA, 802 bp, Zea Mays
gtctcattcccgcccacgcgcttctatctctcaccagcagaccgcgccgccgccgcgccaccgctctccggatcatcggccgtccacctcctcctcctcctcgcccgctcaccggccgtccctgctgcggtgccgtccacttcctctccctgccgccgtagctcgcacaacccccatctcgccctcttccttcttgccacaccgtcgctaccaccgccccgcgctgagagggaccgacgccatggacctcctcgagaagatgatggcgcttggtatgacgtggtgtctcggtagcatttgccggctcatcactttgccatctgtgcacctgcttgattagatgtccacctagggttttgggtctagtgcggaaacaggtgcccacgcggggtacggcgcggaggaggacgacgaggtggggtacggcggcgggggcggggaagagatggatgaggatgcggacggggacgctgagcagcaggaggatatcactcaggacgacgcctgggccgtcatatccgcctacttcgaggagaagggcctcgtgcgccagcagctcgattccttcgacgagttcatccagaacaccatgcaggagattgttgatgagtccgccgacatcgagatccgccccgagtcgtagcacaaccctggccgccaggccgaatttgccgaggttgttgccccactctgatcgattgttacaagtgatgcctgaatggttcactatttgctgctgctagactgggcgattagcctggggtgctgggggagcttggtatgacgtggtgtctcggtagca

SEQ ID NO: 112417 - DNA, 246 bp, Zea Mays
ccaaacacaggggacacaatcagcctatggtatgatctgatagatggaaggatactcagtgatgttctccccaacctcttcagctttgcaaagaatccaaaaatatccctctgggggatcaggaacaatgatcaagtgctggaatgtttcagaattcccatgacaaggcaggcccataatgaattcatcatgctacaaaacctgttgcatgccctaggtcctacacagttggagtcaaaagacctt

SEQ ID NO: 112418 - DNA, 1757 bp, Zea Mays
atatcaaatttaccagggatctacaatgagaaagtggcctttggttgagagttgagaggccacgaactccaccaagagtccaagacccaatcacaagcatccgcttccttgctcgccttttctttaaggcctccaacggtggagccggaataaactccgtccacttcggcatccgccgggaatttgattcttctcccctaaatactcacgctaccttccacctccccctacttctctccctcatcttcttcgctaccagccagacaggcagctcacgtgtgcaggcagcggccaagatgatggcggaggcgtggacgccggtgccgttcccgccgacggcgccctgcttctggctgcacgacacgcactcggttttctggcggggaggagacgcgtggacggcggcggagaacaaactgttcgagaaggcgctggcgcagatcgaccgtaacgcgcccgacaggtgggagaaggtggcggaggtggtgcgcacgaagacggtcgacgacgtgaggaaccactaccacgacctggagaacgacgtcggcttcatcgaggccgggctcgtgccgttcccgcactacagcggctcggttccgtcgttcgggttcacccacgaggattgggacggagggttcaggcgcggctactgccttaagcgcgcgcgcggctccgacccggagcggaagaagggcgtcccctggacggaggaggagcacaagcttttcttgatgggactgaagaagtacgggagaggggactggaggaacatctcgcgcaagtacgtgacgacccggacgccgacgcaggtggccagccacgcgcagaagtacttcatccgcctcaactccggcggcaaggacaagcgccggtccagcatccacgacatcaccaccgtcaacctccccgacgaagaccgcggcaacgcgccgccgtccgcggtcaccaccaccaccaacccctccgtcgccctcgtggacatgaagcccttcgttgcgccgtcgctcggcgtgccgcacccctacggcgacgtgaagctggagcctaagagctcgctggtggccggcctgggcttcaacgactccgtcctcctgatgcactgcggacagttgtaacgggctgttcttgcggcgagaaccgctcccgtcgcaacgtacgccaccaaccaccacctcatctatccccgggcgggcatcagggccggcggcacaagtcgcacgtcgtcgtgctaggcttggatgcagagttgcttcaggtgtactcctaccgatcagatggctggcacgtcccgccgcgtgtgacgaggatgaagagtggaacagtctcgtcgtccagctgccagctcgcggcagctccgagtggctgtgttgtgttcatcgagaacaagaggccatggcccatgggcgtacgcgtgccgttccagcgtccatttcggttcagtgtacaaaattcgacaagtacagagtccaacaacttccacggtaccgaacaataaagcattcgataaaaagcctcttccagcgtcaccggcggcttggattaggatccaggatcagaagatttctgtaccggcttaattgttaatgtatttttggtgtgtgcaacatctcccaccagatggtgttaacacttgtagtgtgtgatgcttgtagtggggtctcgcaaggtttttgtccgccattgttgctttgccagttactagctagtagaagtttagacatgatgttctattaaaaaaatgaaagcttagatgtgct

SEQ ID NO: 112419 - DNA, 454 bp, Zea Mays
acgcgccagcatttgcaatccctcacctgcatgcattgctgttgaatctcttgttagtagtatcgacgagtaggtgatggcagcgaggaagaagctgttttcccctcttctcctgttggccatgctcctcatcgcgtctaaggaggcgggcaacatgaggatggtgggcgctgagcaatgcgatggcatcagggacaacatgtgcccggacatctccaagtcgtttctcatctgcgtacactcgggcgactgcaacaaatgctgccaagaacagggctacgtccacggctactgctcctttctcagctgcaaatgctgcagatagctcgctcgctcgcttatattagttacacacaaacttatatatttcagttgcctatgctttactacaattgtgatataacatataaataagtattgtgatatttatttaaatataattattgtttatttc

SEQ ID NO: 112420 - DNA, 905 bp, Zea Mays
tcattgaggacatgagtgctctgccttgatcagcagatgaacacgactacacgacgaacataagtacgggtactacctgcaggagcgcgcgacgaggcagagggcgtctgttgagaagccggagcacttgtcgagcttgagcacctgtagcatgtggccgcgcgcgcggacgagcacggcgatgtcctcgtcggtgacggtcatgcggcgcaggtggagcgccttgaggcagtcaaggggcgcggcgagctcggcgacccagggcgccgcgtaggcgccaaagtcttcggggatgagcccgtacatggcggcgcggggcctccccttgagcgcgagcgactcgagccgcgggaacctggcgagcagccgcgcgggctccacggcgtagcagaagcccacggtgacgtgcttgcgcgagagcgcgtcgatgcggtgccagaggcggcacacgagcgaggccgcctcccggtctcgcgggtcgtccatgtagccgaacacgaggtgcagcgcctcctcggggacgccgccgcagccgaagctgagcgcgcggctcagccggcgcggctccggcacctcaccgcccatcggtcgggataggggagcgaatctgctaccgcgcggggccggctcgtcggagatctagccgagcgggggcatggagatttttgctgcacctgccgctgtgatttctgcaggtgtggtgtgggcttgcgagaggacgggaggagaggcggaagggaattattggaggtaggagcaagcctctgcctcgcctccgcaagagcgagggatgagtagtagcggccagcgaggaacggggaatggaggctgcgcttactccgttcctgcgccgatcagccggtggtttcacgccacgtaagcacccgggtgcaggaggtgaggtg

SEQ ID NO: 112421 - DNA, 2287 bp, Zea Mays
cagcccgtgcaatggtgcaactgtactaaccgcagagtgacgtcggggggtgtgggtgtggggggcggggggagtgacgcccggggtggcgatgacgacgctgcacatggacccgccggcgccgcctgcgcggcgttcggtgtcgaccagctgcgacctgcacccgggcgaggcgttcaccggcttctgcgccgcgtgcctgcgcgagcgcctccagggtctcgaggcgtctgccgccgcggcctccgcgccgggccgcaagtccacatcggccatccggtccctcttcgccagaccgttcgccgccggcagctcgtctgcgtccggtcccgctgagccgccggacctccggcggtgcaagtcgttctcgtgtggccacggcggggacgctcttgccgcagcggcggcggcggctggtgctgctgccaccagggcggacgagccgcagcggcgttcgtgtgacgtgcgggggcgcagcacgctgtgggcgctgttccaccaggacgaccgtgaccgcgtccgcgatggcacggcgttcgcggcgttcccagcctcctcatcgaccgccgcggccgcgctcgccgtcgacgtgcatcccccaccgcaggcaccgtgcatccccgacgttttctcggacgaggacatcccagtggtgatggagcccgacgagatagtcccggtggtcgagcaagaccccgtcgtcccgatggacatttctggcgaggtggaagccggaggcaatgcggcgcagagaggtatggccatcaaggatcacatcgatctcgagtcggcgcagagcaagaaggcatcgcccaaagacctcgccggtagcttctgggtcgccgcctccgtgttcagcaagaagtggcagaagtggcggcgcaagcagaagctcaagaaggaggctgccgtgagcaaaggcgccgcagcggcaatgccccctccggagaagccctcaagccgtcgttccttcgccggagtcggctccgtggggaggcaggctccgagctcgccgatggccggcgctcgtgcgacaccgacccgcgtttctccctggacgccgcgcgcatgtccatcgacgacgctggcttctcatgggacgagccccgcgcgtcctgggatgggtacctgttcggcggcggcgccggcattgggctcgggcgcgcgcctccgccgctctcccgcctccctcccatcctgtccgtcctggaggacacaccgacagacgtcgtcgagcgctccgatggccagatccccgtagaagacgacttcgaccccgacccgcccggtggctcgctacagaccagagactactacctggactcctccagccgcaggcgccggagcctggaacgttcgagctccgtacgcaggccgtccttcgaggtcacggatccaacaaggccgatggcgcccgcggtaaacgggaccgggagggagtccccgattggcggcggttcagagttctaccacttccagcacgccgaggacttgctggaccgcggcttcagctccaactcgctcatcgaggacatctccgcgagcctggaggcggcactatccgggcgcgccgcggggcgcaggagcggcggggggccgtcggacatcaccgaccgttccttctccgagccgtggccggacctgcgcgtccgcggagccaaccccaagatgcagcggtgcaacagcagcaacctgagcgcgcgcagctcgttcagcagcaacagcggcgggctcggcagctcccggcgcagctacgtggacgccaacggcaacgtgaggcggagggaggagcctcacgcgcaggcgcaggtggagcggacccgcagcgcgcgctactcgcccgggcgcgccgccgcggacaacggcatgctgcggttctacctgacgccgatgcggagcggcagcgggcggccgcgcggcggaggcggcctgcccagcaaggccgggcccgggcggccgctggcgacgcagtcgttcgcgcgcagcgtgctccgcctgtactaggtaggctacggcgtcaagtccaggttcctctgtctaatctgcatgttcaaggagagtctgggggttatagccataaacctttgtgtactgtactgtactgtaatgtaatctgtcgtttcatttcgggggattggataacacgcatctcgtctcataatttcctctcatctcatgtgcccatatctctcgtctcgcatgtcgagtcacgagggttttcaacgtgagttattgtagttccatccatcagcatatatttatatgtgaccgtgacttttgtcgttaa

SEQ ID NO: 112422 - DNA, 2132 bp, Zea Mays
aacccacttcagcaggatgccaggatcactcccactcggcggctccccctttgccccgtgaggccgtgactcggcgacggagaagacaaaccatgacgcctcccggccaactgctccccttgtcccggctgcctcccggcctctccagccgctgcccgcctcccgctcatgcccaagccagagtgtcgcttctgcatccatgggcccaccgcctccatggccgcttcatgccttctcctcatctgttccggtctccagcctgcccccctcgtgctccaacgcctccagggctttcggccgccgcaggaggcgaggctcaggcggctgcggtggcggagttcgtgacgtcggagagggtcaaggtggcggcgatgctggggctagccctcgcgctctgcaacgccgaccgcgtcgtcatgtccgtcgccatcgtccctctctcgcaggcgtacgggtggaccccgtcattcgccggcgtcgtgcagtcatcctttctttggggatatctgatgtcgccgataattggtggagcacttgttgattactacggtggaaaacgagtcatggcttacggtgtagcattatggtccttggctacgttcctgtctccatgggcagctggtcgatctatctggttgtttctctttaccagagtcctgctgggtattgcagaaggagtggcactcccaagcatgaacaacatggtgttgaggtggtttcctcgcacagagagatctagtgctgtgggtattgcaatggctggctttcagcttggcaataccattgggttacttctttccccaattatcatgtcacgaactggaatatttggaccttttgtgatatttggattatttggatttctctgggtgttggtgtggataccggctatatctggcacgccaggtgaacatgcacagatatcagcatatgaactgaagtatataaccaaaggccagaaattggtgaaaccacaaattggaagtgaaaaaacaaaaaaggttccccctttcagtaaactgctttccaaatggccaacatgggctttgatttgtgcaaacgccatgcatagctggggttattttgttatcctttcatggatgccagtctatttcaaaactatatatcatgtcaatttgagagaagcagcttggttcagtgcactcccttgggtgatgatggcagttttaggctatgtggctggtgttgtatcggacatgcttattagaaatggtacagacattactttaacacggaagataatgcagtcaattggctttctggggccaggtattgctttgctctgtctgaatgcagcaaagagtccaatcattgcttcagcctggcttacagttgctgttggattgaaatccttcggccactcaggtttcttagtaaatctacaggagattgccccacaatatgctggagtcctacatggaatgtcaaatacagctgggacatttgctgccattctaggaactattggagcagggttttttgttgataggatgggttctttccgtggatttttgatattgacgtcgctcttatacttcagcagtgctcttttctgggacatctttgctactggagagcgtgttgattttgatggcactggctagcaactcagaggaactctgcggttttctgtccttaaaacacataatgttgattcaggacagtgtttttaccgccaaccatcaagaagttatttgcacctgaagataaacaacttcagttacgactgtacagtattgggttcaactttttaaagcacgcagtgagtttatcttggatgtcgagtatcagtgatagataaacacacgctgtgagtttatcttggaagttgaatatcagtgatggataaacacatggaactgtctttatagatcgttttagattttcttggagggatagtccctgacgatgtaacatggaataaacaacgggcaggatgccaaccattaatggcgccgaaagtagtacataactgaaactgatttgcagggtagttaggaaattggaatcccaaccattaagggagtatgggtttgaaaaacatgtgaatctggtgtacatgctacggaaagttgtgccctcgttggctcgttataacttgcaactttttt

SEQ ID NO: 112423 - DNA, 2132 bp, Zea Mays
aacccacttcagcaggatgccaggatcactcccactcggcggctccccctttgccccgtgaggccgtgactcggcgacggagaagacaaaccatgacgcctcccggccaactgctccccttgtcccggctgcctcccggcctctccagccgctgcccgcctcccgctcatgcccaagccagagtgtcgcttctgcatccatgggcccaccgcctccatggccgcttcatgccttctcctcatctgttccggtctccagcctgcccccctcgtgctccaacgcctccagggctttcggccgccgcaggaggcgaggctcaggcggctgcggtggcggagttcgtgacgtcggagagggtcaaggtggcggcgatgctggggctagccctcgcgctctgcaacgccgaccgcgtcgtcatgtccgtcgccatcgtccctctctcgcaggcgtacgggtggaccccgtcattcgccggcgtcgtacagtcatcctttctttggggatatctgatgtcgccgataattggtggagcacttgttgattactacggtggaaaacgagtcatggcttacggtgtagcattatggtccttggctacgttcctgtctccatgggcagctggtcgatctatctggttgtttctctttaccagagtcctgctgggtattgcagaaggagtggcactcccaagcatgaacaacatggtgttgaggtggtttcctcgcacagagagatctagtgctgtgggtattgcaatggctggctttcagcttggcaataccattgggttacttctttccccaattatcatgtcacgaactggaatatttggaccttttgtgatatttggattatttggatttctctgggtgttggtgtggataccggctatatctggcacgccaggtgaacatgcacagatatcagcatatgaactgaagtatataaccaaaggccagaaattggtgaaaccacaaattggaagtgaaaaaacaaaaaaggttccccctttcagtaaactgctttccaaatggccaacatgggctttgatttgtgcaaacgccatgcatagctggggttattttgttatcctttcatggatgccagtctatttcaaaactatatatcatgtcaatttgagagaagcagcttggttcagtgcactcccttgggtgatgatggcagttttaggctatgtggctggtgttgtatcggacatgcttattagaaatggtacagacattactttaacacggaagataatgcagtcaattggctttctggggccaggtattgctttgctctgtctgaatgcagcaaagagtccaatcattgcttcagcctggcttacagttgctgttggattgaaatccttcggccactcaggtttcttagtaaatctacaggagattgccccacaatatgctggagtcctacatggaatgtcaaatacagctgggacatttgctgccattctaggaactattggagcagggttttttgttgataggatgggttctttccgtggatttttgatattgacgtcgctcttatacttcagcagtgctcttttctgggacatctttgctactggagagcgtgttgattttgatggcactggctagcaactcagaggaactctgcggttttctgtccttaaaacacataatgttgattcaggacagtgtttttaccgccaaccatcaagaagttatttgcacctgaagataaacaacttcagttacgactgtacagtattgggttcaactttttaaagcacgcagtgagtttatcttggatgtcgagtatcagtgatagataaacacacgctgtgagtttatcttggaagttgaatatcagtgatggataaacacatggaactgtctttatagatcgttttagattttcttggagggatagtccctgacgatgtaacatggaataaacaacgggcaggatgccaaccattaatggcgccgaaagtagtacataactgaaactgatttgcagggtagttaggaaattggaatcccaaccattaagggagtatgggtttgaaaaacatgtgaatctggtgtacatgctacggaaagttgtgccctcgttggctcgttataacttgcaactttttt

SEQ ID NO: 112424 - DNA, 418 bp, Zea Mays
gtcctcctcgtcgagctcgtcaccggccgacgccctatcgagcgtggccgcggccgcgggcgccaccaacgcctcaccaccgaatgggtaaagcaagcacacccaaacaaaaccagcgcttctgatactgaaatgtaccgcacatgaggtgtttgacaaaattaccgtgctggcgcaggcgctgcgcaagtgcagggagggcttcgcagtggtggtgatggacccccggatgcggcggaccagcgctgtcgtggcggcggtggagaaggtgatggtgctggcagccgagtgcacggctccggatcgcgccgcgcgtccagcaatgcggcgctgcgccgagttgctctggtccgtgagacgcgacttgcagcaggagcagcagcgcgcgtcggccgcgagcgcaggagcgaggcggcac

SEQ ID NO: 112425 - DNA, 2881 bp, Zea Mays
attccactcggtgctttgcccgaggcccggagaagccttatcgcctcctccttgcacgccgaccgatcgccacaatcccccaccgctcgcctgcctggtgcccgccatgccggagatcaagtgcggcgcggccgagaaggtgaagccggcggcgagcccggaggcggagaagcccgcggacatcgctggcaacatctcctaccacgcgcagtacagcccccacttctcaccgttcgcgttcgggccggagcaggccttctacgccaccgccgagagcgtccgcgaccacctcatccagagatggaacgagacgtacttgcatttccacaagacggatccgaagcagacgtactacctgtccatggagtacctgcagggccgcgcgctcaccaacgccgtcggcaacctcggcatcaccggggcatatgcggaggccgtgaagaagttcggctacgagctcgaggccctcgcggggcaggaaaaagatgcagctctagggaatggcggcttgggtaggcttgcatcttgctttttggattcaatggcaacattgaatttgcctgcttggggctatggcctgcgttaccgatatggactgttcaaacaacacattgccaaggagggccaggaagaagttgcagaagattggcttgataaattcagcccttgggagattcccaggcatgatgtggtgttccctgtcagattttttggccatgttgagattttgcctgatggctctcggaaattggtcggaggagaagtcctgaaggctttagcatatgatgtgccaatccctggatacaagacaaaaaatgcaatcagtcttcgtctttgggaagcaaaagctactgctgaagatttcaacttatttcaattcaatgatggtcaatatgagtcagctgcccaacttcatgctagggctcaacagatatgtgccgttctttatcccggtgatgctacagaagaaggaaagcttctaaggctgaagcagcagtttttcctttgcagcgcatcacttcaggatatgattgccagatttaaagaaaggaaatctgatagagtttcagggaagtggagtgagttccctactaaagttgctgttcaactgaatgacactcaccctactcttgccatccctgagctaatgaggttacttatggatgaggagggacttggttgggatgaagcttgggacattacatataggacaatttcctacaccaatcatacagttctccccgaagctcttgaaaaatggtcacaaattgtgatgaggaaattacttccccgacacatggaaattattgaggaaattgacaagcggttcaaagaattggtaatctccaaacataaggaaatggagggaaaaatcgattcaatgaaagttttagataattcgaacccccagaagccggtagtgcgcatggcaaatttgtgtgtggtgtcttctcatacggtgaatggagtggctgagttgcatagcaacattttgaagcaagaactatttgcagattatgtctctatatggcctaccaaattccaaaacaaaactaatggaatcacgcctcgaagatggctccggttttgtaaccctgagttgagtgaaatagtcacaaaatggctaaagtcagatcagtggacaagtaatcttgatctgctcactggacttcgcaaatttgcagatgatgaaaagcttcatgctgagtgggcagcagccaagttatcttgcaagaagcgcctggccaaacatgtgttggatgtgacaggtgttacgattgatccaactagcctttttgatatacagattaagcgcatacatgagtacaagagacagctcctaaacatattgggagctgtttacagatacaaaaaattaaagggaatgagtgcagaagagaagcagaaggtcacaccgcgcactgtcatgataggagggaaagcgtttgcaacatacactaatgccaaaagaatagtgaaattggtgaatgatgttggtgctgttgtgaacaatgatcccgaagttaacaaatatctgaaggttgtctttatcccaaattacaatgtatcagtggctgaagtgcttattcctggtagcgaattgtcacagcatattagtactgctggtatggaagcaagtggaacaagcaacatgaaattctctctgaatggttgtgttatcattggcacccttgatggagctaatgttgaaataagagaggaggttggagaagataatttcttccttttcggtgccaaagccgatgaagttgctgggctgaggaaggatagagaaaatggtctgttcaaaccagacccacgttttgaagaagccaagcagtttataaggagtggcgcttttggcagctatgactatgaacctctcttggattcccttgaagggaattctggatttgggcgtggtgattatttccttgttggctatgacttcccaagctacatcgatgcacaggatcgggtggatgcagcctacaaggataagaagaagtggaccaagatgtccatcttgaacacagctgggagtggcaaattcagtagcgatcgcaccatcgcccagtatgccaaggagatatgggacatcaaggctagccctgtcgtgtgaacgagggggttgcgattcaacaccaaacgtagtttcttggggtgctataatagtaaggaagaataatgacccacggtgcttgacgcccacttgcgttgtaggcatggaacgggggcacctagcttgttctacagcgctgtctattttgaattggtgcgactttgttgctcttttttcctcccccttatatcttatgaaacaagatccttttgatctgtgctctgaaataaaataattcagttatgatattcgtcgcca

SEQ ID NO: 112426 - DNA, 109 bp, Zea Mays
gtgtatgtccattttgtcacgatagggatgggcagacggttacctgaaaattttaggtcgagtttagataattcagatatgagaaattgctagctaattgtagttcggg

SEQ ID NO: 112427 - DNA, 1397 bp, Zea Mays
accactgagacggaaccgagtaaccgacccacgcaaaaagcgctcagcagctcctgcgcgccccctttcccccgtcggccgatttcgtttatctcctcaatcctggcttgaatccgtgatacgtcgaggcggcgaagagccgaatcgtgccgcaccgtagaggaggctcaggcttctgcagggttttggagcggggcgatggaggcggcgagcaacggtgggctgctgtaccacgaggtgcaggaggggaagctctgcgccgtgcactgcgtcaacaccactctgcagggccccttcttctccgagttcgacctcgccgcgctcgccgccgacctcgaccagcgggagcgcctggtgatgctcgagggctcccgaagccccggcgcggacaacgctaccgcaggggacttcttcgccgagggcgaggggtcccacaacgtctccctcggcggagatttcagcatccaggttttgcagaaggcgctggaggtttgggacctccaggttatcccccttgattccccagctgcagggtcgtcccaatttgaccctgagcaggaggttgctttcatttgccaccttcaggaccactggttttgcatcaggaaggtgaatggggagtggtataacttcaatagtctgtacccagctcctgagcacctgtcaaagttttacctctcagctttcattgacaccctgaaggggtcaggctggagtatctttgcagtcagaggcaattttcccaaggagtgccctatggcaactgaaggctctaacggttttggtcaatggctcacccctgatgacgcccggaggataacagcctcctgtaaccaggttcaagcacctactcagcaggtacaaccccctctacttggtgaccgatcaggagggatgagtgaaatggacatgattgtagcgcagcaagaagaggctgatctgaatgctgctatagctgctagcttgatggacactgggggtccatttgccagctatgatgcagatcaagaatacagcaactcacaagatgctcctgccgctggaccagctcggagcaaagaagaagctgataaatctgagccgagcgcacctccctgtgaggaggaaactcaggagttggcttcaggaagcgacaccaaaagggaggtttcttctgtagaggagaaaggaacagcgagagaagaataggatggcacttttgatcagtctgtaactgagttagactatacacagagaaactgccctccatttcagtggagttatgccttttttggttccgaacgccgtacgtatacaaaatgcatagtctgaactgaatgggcttaaaaactttaactggtgtaactgctatgtgcgaactgcatagagactagagtggccgttttgaaccccccctc

SEQ ID NO: 112428 - DNA, 827 bp, Zea Mays
aattttccaaaatttccagctcgacaagttggacttgttagagaccagtcagtagctgccattcatccactcccctttcccatcggaggaggacgagagatccgtcctgcggtgtgcgatggactcccccagctgccggctgttcggtgcccagagatcgccgcacgatctcctcggcggcggcgccgttgcggatgtggtgctgtggaggaagaaggaggtggccaccgggacgctggcggccgtggtggcctcatgggcgctcttctactgcgtgcccggctacactctgctctccttcctggcccaggtgctcatgatcctgctcaccgtcctcttcgtctgggccaaggctgcgcagctgctcaacagggcacctccgcctatcccattgatgaaaatttctgacgagtcaatgagtgaagcagcagaaatggttggtagcttcatcaacaaggtgctcaaggatttcgaaaacattgcacttgggaaggataacagcctcttctacaaggtggcttttgtgctgttgctggcctccatagttggacgactgaccgatcttatcactttagtatatacaagtaagttcttctactgttttacatttcttatgagctaaggaccactgcgcatcttaagaagaaccttgacatgaatagcaatatgaaacatgtacagcagtacacttatcatcagatcacttacaattgcactgaaaatctgtgctggtaataacgcaaaatgcaatagcattatagcaatggaaacagaggcaatgctcacactatcacttcgtttgatagaatagcaggatggttctagtt

SEQ ID NO: 112429 - DNA, 861 bp, Zea Mays
aattttccaaaatttccagctcgacaagttggacttgttagagaccagtcagtagctgccattcatccactcccctttcccatcggaggaggacgagagatccgtcctgcggtgtgcgatggactcccccagctgccggctgttcggtgcccagagatcgccgcacgatctcctcggcggcggcgccgttgcggatgtggtgctgtggaggaagaaggaggtggccaccgggacgctggcggccgtggtggcctcatgggcgctcttctactgcgtgcccggctacactctgctctccttcctggcccaggtgctcatgatcctgctcaccgtcctcttcgtctgggccaaggctgcgcagctgctcaacagggcacctccgcctatcccattgatgaaaatttctgacgagtcaatgagtgaagcagcagaaatggttggtagcttcatcaacaaggtgctcaaggatttcgaaaacattgcacttgggaaggataacagcctcttctacaaggtggcttttgtgctgttgctggcctccatagttggacgactgaccgatcttatcactttagtatatacaagtgctattattgctctcacggtccctgcattgctggagaaatccgaagaacacattgccagattcttcaagaaaacttcgatatatgttcaggcatttggcagagcatgcaaagagtataaatgtaagatgacgaatatgatatcggaaacgaagaaactgcgttgatgtcaatgtgtattcactagcaaattttgacttgtgagattgcttcttcggaagcgaaatagttgtgacttttggcatcaatcacaatcgtgatcttacatcaatcacaa

SEQ ID NO: 112430 - DNA, 1798 bp, Zea Mays
ggcggcagccgggcaaccatcccatcccactcccagcaccaccagagtggtggggccttgtctcttctcctctcccactcttcgacacagccagagccagccacggccaagtcctttctctccccttccctcttctgcctactctccaactccaggcgcgattcgaagcatacaacacctccaccgcttctcaactcccctctgcgccctcgcctcttctcttttgttttacctgctgcggaatgcggtccacgactatggatcttcgagagattacttaaaaaaacacacacacacaaatcttgcagcagcctccacacctgggattctcctccatagcgtgtgccgtcagccgtgtactactggcctccacggctccacccgcctttggttggattcctgttgccgcttcctcctcccgtgatcggccgcattgcgctgagggattctcgttcgctttttcccgacgccgcctgcggcagcggtactatttactgctccgctctttcggcggtttcttcgtctgctgccttcccagtttgctagctcttatccggaatggatgccggagcggggggagctatatgagtgattccttctccttcccgtctcttggattgcctccgttttggttctttggtgggcggccatggcgaacggcggcgagcaatcggcgatcacggcggccgtggagcggggccgcgtgagcggcgtctcccggcggctcgcgggggaggagagctccgacaacgacgacgaggggagccagcgcttctcggacgccgaggatcggtcctggcactctcactcgcgccaaggctccgccttggagttggaggactgtatctccacgtccgcgcccatcagccgcgacgccggcgccgccagtgccggcggcggggacacggccacggccacggccacggccgagcgcgccaggaagtcgggcgtgtcggagtgctcgctggacggcgtcgtcgacctggaggccgggctggctgagatcgtcaaggccagcccggacaaggccgagaggaactgccgcatctgccacctcggcctcgacagcgcctccgccgagtccggcgccggcatcgtgctcggctgctcctgcaaggacgacctctcgcgtgcccacaagcagtgcgccgagacctggttcaagatcagaggcaacaagatctgcgaaatctgtggctcaaccgcatgcaacgtggcaggtttctgtgatgcggagttcatcgagcagtggaatgaatcaagcaacactgcatctgcccaggcaacagccactgagcctcgtagattttggcaagggcaccggttcctcaacttcctcctcgcttgcatggtatttgcatttgttatatcctggctcttccacttcaatgttcctggatgagtactattggtgcagattgttcttaataaaagctccaaaaccacagaggaagcatggggaagtttcagaattcaaactggctgagcatgagaaaacaactggagatggacaagagttgctttggtgaaatgaagggtagtgttaattctgcagggaggaaggggaaagctggcaattctgtaaatattggttgagtggtggtgaatgaggagtggaacttattttcgattgcgtcatgcttccatgatttattgatttgtgtaccttctggttaagtagattattagatattcttgtcttctagcttagttggttatattctttgtggtggaatacatctatccaggtcggacattagcttgtttagtttgctgcctaaattttcacgatttggct

SEQ ID NO: 112431 - DNA, 1601 bp, Zea Mays
ctctcccactcttcgacacagccagagccagccacggccaagtcctttctctccccttccctcttctgcctactctccaactccaggcgcgattcgaagcatacaacacctccaccgcttctcaactcccctctgcgccctcgcctcttctcttttgttttacctgctgcggaatgcggtccacgactatggatcttcgagagattacttaaaaaaacacacacacacaaatcttgcagcagcctccacacctgggattctcctccatagcgtgtgccgtcagccgtgtactactggcctccacggctccacccgcctttggttggattcctgttgccgcttcctcctcccgtgatcggccgcattgcgctgagggattctcgttcgctttttcccgacgccgcctgcggcagcggtactatttactgctccgctctttcggcggtttcttcgtctgctgccttcccagtttgctagctcttatccggaatggatgccggagcggggggagctatatgagtgattccttctccttcccgtctcttggattgcctccgttttggttctttggtgggcggccatggcgaacggcggcgagcaatcggcgatcacggcggccgtggagcggggccgcgtgagcggcgtctcccggcggctcgcgggggaggagagctccgacaacgacgacgaggggagccagcgcttctcggacgccgaggatcggtcctggcactctcactcgcgccaaggctccgccttggagttggaggactgtatctccacgtccgcgcccatcagccgcgacgccggcgccgccagtgccggcggcggggacacggccacggccacggccacggccgagcgcgccaggaagtcgggcgtgtcggagtgctcgctggacggcgtcgtcgacctggaggccgggctggctgagatcgtcaaggccagcccggacaaggccgagaggaactgccgcatctgccacctcggcctcgacagcgcctccgccgagtccggcgccggcatcgtgctcggctgctcctgcaaggacgacctctcgcgtgcccacaagcagtgcgccgagacctggttcaagatcagaggcaacaagatctgcgaaatctgtggctcaaccgcatgcaacgtggcaggtttctgtgatgcggagttcatcgagcagtggaatgaatcaagcaacactgcatctgcccaggcaacagccactgagcctcgtagattttggcaagggcaccggttcctcaacttcctcctcgcttgcatgaggaagcatggggaagtttcagaattcaaactggctgagcatgagaaaacaactggagatggacaagagttgctttggtgaaatgaagggtagtgttaattctgcagggaggaaggggaaagctggcaattctgtaaatattggttgagtggtggtgaatgaggagtggaacttattttcgattgcgtcatgcttccatgatttattgatttgtgtaccttctggttaagtagattattagatattcttgtcttctagcttagttggttatattctttgtggtggaatacatctatccaggtcggacattagcttgttt

SEQ ID NO: 112432 - DNA, 1192 bp, Zea Mays
atcacaagggcaagtggcgagcagcggccgggcgcacgcaacccatgaaaccacaagcttgtcacgggagatcgatgccaaagcaaaccggagtgaaagcgaacggaaatctagcggacgacgagaccgcgattaggaggaattggaccgtccgcaacggcgacccgctcgtgcacctccatatccggcagccggcaccacggccacggccgcgaggaggcgaagaacgtcgtctggtcccgcaccggatcgctaagctgtcatgggcgtccgatcccgaggtgttctacatgctcaacgccgtggcccggcagaaagaggtgcgcttcttatcggcgccaccggttcaccatgccttgttcatcatcggcggtgctgttctgttgctgttcgatgcaaggcaagctgcgtctagatggtaatactgatgccgcgtttgtgctgcacgcaccatgctggacgcaccatgctggacgcatacagctgtgcgtggcgatcaacgtgtgctggggtgaccagagggagaaggtgtgcgacgcgacggaggacgggaggagctccatctcgagtcgctcgtcatggctagccgtggcctcggccagatccaaagatctgcaagctcatgaagtactgctactgatagctggtttccttcttagttatggggagtgctatatgcgattagataggaacagatatcagaacactaatagcgtgtttggtttgcaagatgaccggtctgaaataatccgattcaaacaccgaagctgctggaactgtttggttaacgtagtggagccaactcgtccgtcacaaacacgttcagcaacataccaaatctgcaggttgggtcggttcctccaatttcgccagacaagtatgacgagtgtatgctgaacgtactcaaccctacaaccaaacacgttgtaaaagatgcacatatttgcactagtcactctatgaatttcaaattgttgctgtaaaaaattggaatcagacactgaaaatccacgctgtgctatgttctgttactgtttttttttaaaccatgcacgtcatgctgcaggagacgaaaaattgggacgaaacttgggtccagataaactgacacactgaagccgcctgaaactctgaagcagactaaaagttttcagggagcaggggaacttcagttctttattgcccaacggaa

SEQ ID NO: 112433 - DNA, 966 bp, Zea Mays
atggacctcaaccgcggcgcctactccgtcctcgacctccccgtgatctgcatcgttggcgggcccaactccaatgaatacggcaccaaccacgtcctgcaccacaccatcggcctcccagacttctcccaggagctacagggcttccaggctatcacctactaccgagccatcatcaacaatctggacgacgcacaggagcagatggacatggccatcgcaacggcgccgaggaagagcaagcgagcagatccggacttcagttcctgccaggacaaggagctgttggaccatcttgcaggcgtgctggccaccgaatccgtgggggtgaagggagaccaatgcatcgtgccactcaacgtaacgctcaaggggaagagcgtctccgtgcgcgccaacctcaacgcattgcttgacgggcaccagaacatcaccgaagacatccacgccatccaatacttcttcagcaagggcgccaaggtgcaaagagccgatgatgtgattgagcctgaagttgagaagcttatggttaccttgcccaacagatgtttgacgaattgcttcaacctcgtagacaagatgagaagccattcatcaccagctgatcgtgttgtatcactcaaaaaggggttatgcgcctgttgtgctgaaaagtggctctcgggtcgtaaatgtgcagccacagcccaacagccccaactacatgccatagaggaggtgtggaatttgtttgctgaagaatttgttactgcacctgacgcagagtctattgaagcacctgatgatcagttgttcaagaacttgcctcattctgcctggttgggctctgaaatccatcagactctgaagctacatgatggattgctcatggaattggcgtcggtgctggccttgttaccgatggtccgggtgctgttaacagtggcaattttgcaatccgtatttgggatccaggtggccatgtga

SEQ ID NO: 112434 - DNA, 121 bp, Zea Mays
aattggtttaattcatccctcaagaaattcttcctttttcatttttatgtacaaacagagttttcgttcaaacttttgttggttagtagctaatagcataatttatcctagaaaatatatt

SEQ ID NO: 112435 - DNA, 2773 bp, Zea Mays
ctagcactgagaatttaagatatggttacctccagcgtgcagggcagcggagaccctcacctcacgccgatccggccgtttcattattcccacgccgctctcctactactcccgttgcccgctgctgctgccggtgccgcccgcccgcccgcccgttccatttcatctcggcttctctcgctggaaagtaaacccgggccaacggtcactcttcccaatcgagctgccaaactttttaaagccacccgcccccgtctccccgagaccgaaacgccaagaggagcccggacaagcaacgccactccactccccccggctcgaaacgcacaccgcgcgcgcaagcccacacaccacacacagagccctcgcgcctcgtcgcgcgcgcgatcagggccggccgaggaacggagcagcgcgccgctgcaccgcatcgcaccgcactgcagcagcaggtgagcacggcacggtgcacgacgccactggcgcggcgcgtacgcacgggcacgtggtggtacttggtacctgctccgcgacaacttggagctcgatagagcgggctggcgcatcgtaggatggggagcgcgggggaggaggagagggaggcccggagcgaggcggcgttcacggactccgcctccatcgacgggagcagctccagctccgacgcagcgtccaccgacgagtggctgcccgcggcgccggtgccggtgccggcggccaggaagccgggcggctgcgcctccgacaccgacgtggccaggcagcagcacaagcacaagcgcagagcaccatcagagatggagatgatgaaggagcggttcgcgaagctgctgctcggcgaggacatgtcggggagcggcaagggcgtctgcacggcgctcgccatctccaacgcaatcaccaacctctgcgccaccatcttcgggcagctctggaggctggaaccgctcccgccggagaagaaggccatgtggcggcgggagatggactggctgctctgcatcagcgaccacatcgtcgagctggtccccacgtggcagtcgttccccgacggaaccaggcttgagatcatgacaagcaggccacggtctgatctgtacattaatcttccagcacttcggaagctggatcatatgcttctcgaaatcctggaaagcttcagagacccggaattctggtatgttgagcaaggtatcgctgcaccagactgcgacggctctgcctccttcagggtggctttccaccgccgtgatgagaagtggtggctcccggtgcctcgtgtgcctcccggtggccttcacaacaaaacaaggaagcagctccagcacaagcgtgattgtgcaaaccaaatcctgaaggctgccatggccatcaacagcaatactttagcagagatggaggtccctgaaccttatcttgactccctaccaaagaatggacggtcaaccttaggtgatatcatataccgctacataacctctgatcagttctcccctgagtgtcttcttgattgcctggacctgtccacggagtaccaggccctggaagtcgcaaaccgtgttgaggcgtcagtgtatgtgtggcgccggagggttgctgccaaaccagtaaatggattgggccgaagcagcagtgctagatcatcgtggggcatggtaaaggacatgatggtagactcggagaagagagagctgctgctagctgaacgagcggagggcctgctaatatgcttgaagcaaaggtttcctgggttgacacagacaagcctggacatgagcaaaattcagtacaacaaggatgtgggcaaatcaatcctcgagagctattcgagggtgttagaaagtttggcttcaaacatcgtcacccgcatcgacgatctgctgaacatcgacgagctgaacggacacgctgaacatttcgcagcgacaggtgacgctgactgcaagattgcagtcagccagactgctgttccatccttcccagtgccagcctctggcacgccattcatgatggcatataccacgccgagcttctcgccggcgcaattggcaagcccgtcgaagaaagagaagacgtcgctgactccaggcagacgttctcagcacagtaggggtgctggcacaaagaaaggcttgatggatcgtgtgggtacagaaatcaagggtatgatgatcagcaacggtatgatgatcgatgtctctacaactacggagctgtaagcgtaagatgatagctcatcagatcgccaagagtagtcgttgtgtatatgtgtctgtctgtccagtctttgtgtgagcgtccaggttttttactggcatgttgcatttctgatttctgtgcctaggcttttactggtatgctgcttgcggacagcctgatgctctctacgaggagtttcagtctctacgaggtgttgttacatagatgggtgttgttacgtactctctacgaggagtttcagtctggtctgaatttgttgaatttctgtgattcaaatcaacaaagaccgagggtatttgatgtagttgttacatactctctacgaggagtttcagtctctacgaggtgttgttacatagatgggtgttgttacgtactctctacgaggagtttcagtctggtctgaatttgttgaatttctgtgattcaaatcaacaaagaccgagggcatttgatgtagttgttacatactctctacgaggagtttcagtctggtctgaatctgtagaatttctactgttgaaatcaacaaatactgaggatatttgatgtg

SEQ ID NO: 112436 - DNA, 781 bp, Zea Mays
gcgcatgccgcacaaaggcagcgctagtgcagcgtccactccgagcgtttcacaccatgaggcgcgcaaaacctcaagcaaacgatgatgagttccgttcacgctcgaggccccgagactgtgtatatatagccaccactccatcagagacttcatcagggttcagtgaagtgtagtgcagccaaggcagcagagcgtgaggtgcactaccaggcaacaaggaaaaaaatggagctccaggcaaggtgcgtctgcgtcgtcgcgatgctcctggtggccagcttcgcggggctggatacggcgcacggcgcgggagagtgcggccgcgtcccggtggaccaggtggcgctcaagcttgctccgtgcgcggcggccacgcagaacccgcgcgccgcggtgccgccgagctgctgcgcgcaggtgcgcgccatcgggcgcgtccccaagtgcctgtgcgccgtcatgctgtccgacaccgcgcggaaggccggcgtcaagcctgccgtggccatgaccatccccaagcgctgcgccatcgccaaccgccccgtcggctacaagtgcggcccatataccctgccatgaggtgatcatgaggagccaagtgatggcgggcagtgttgtggcagtggcacctgaaggactccaaactctgactgccaatatgccgtgacctctgtcgcatcttactttccaaagatcccgagaataatgtggctgtaataatgcctcaactttggaataaaattgtatctttttcaccaagaaaatggaaaaaaaa

SEQ ID NO: 112437 - DNA, 1637 bp, Zea Mays
gcgcatgccgcacaaaggcagcgctagtgcagcgtccactccgagcgtttcacaccatgaggcgcgcaaaacctcaagcaaacgatgatgagttccgttcacgctcgaggccccgagactgtgtatatatagccaccactccatcagagacttcatcagggttcagtgaagtgtagtgcagccaaggcagcagagcgtgaggtgcactaccaggcaacaaggaaaaaaatggagctccaggcaaggtgcgtctgcgtcgtcgcgatgctcctggtggccagcttcgcggggctggatacggcgcacggcgcgggagagtgcggccgcgtcccggtggaccaggtggcgctcaagcttgctccgtgcgcggcggccacgcagaacccgcgcgccgcggtgccgccgagctgctgcgcgcaggtgcgcgccatcgggcgcgtccccaagtgcctgtgcgccgtcatgctgtccgacaccgcgcggaaggccggcgtcaagcctgccgtggccatgaccatccccaagcgctgcgccatcgccaaccgccccgtcggctacaagtgcggcccatataccctgccatgaggtgatcatgaggagccaagtgatggcgggcagtgttgtggcagtggcacctgaaggactccaaactctgactgccaatatgccgtgacctctgtcgcatcttactttccaaagatcccgagaataatgtggctgtaataatgcctcaactttggaataaaattgtatctttttcaccaagtcgataacactgtaaaatgcaattgacaagaacagtttccaaacttctgtcaaattccagctggtaaaggtgtacaatgtgaagtcatcgccgcttctccagcacattattattgttttttttttgctttggagcgacgatacaattgtacagacttttgactctaaggagtcagataccaacccgctcgtattactggcggaatggacatggattcttttatgcggtctagttcatactgtgctaaagcttcgttacattgcacatctaaagcagagactataagacgcacactacatctgcccaggccaggtgatgcttctaaatattggcaccaccgctggacgaaagcgggtccactatgacacaagataatactgctagcaatcaaggaaaccgagcttcactgccctccttctgttcctgccatacacaacccaatagaattttgaggaaaatggaaaaaaaacctaataacatgatataaataagtactgttcaccacaagctgcataacaacaggcaaagcatcagttacattataaatgcttgactcctatctccattttcagtttcataaaaaatccagacctttgtcattgattttctgtgttaaaagtaagcgtttctatgctttacagaagaactgttaataaattgaaccttatcagagcagcagaagtttgccacgtactcgttcccctatacaaacttcaagttcttatagatatcatatactatataatttaaagaacagaacaatgacatggaagatggtaacagcagccaaagtaatatatagtacgtcaatagaattaaaactaatttctgcttagcttcttgacatggaactaagttgtggagatatcta

SEQ ID NO: 112438 - DNA, 2831 bp, Zea Mays
gcgcatgccgcacaaaggcagcgctagtgcagcgtccactccgagcgtttcacaccatgaggcgcgcaaaacctcaagcaaacgatgatgagttccgttcacgctcgaggccccgagactgtgtatatatagccaccactccatcagagacttcatcagggttcagtgaagtgtagtgcagccaaggcagcagagcgtgaggtgcactaccaggcaacaaggaaaaaaatggagctccaggcaaggtgcgtctgcgtcgtcgcgatgctcctggtggccagcttcgcggggctggatacggcgcacggcgcgggagagtgcggccgcgtcccggtggaccaggtggcgctcaagcttgctccgtgcgcggcggccacgcagaacccgcgcgccgcggtgccgccgagctgctgcgcgcaggtgcgcgccatcgggcgcgtccccaagtgcctgtgcgccgtcatgctgtccgacaccgcgcggaaggccggcgtcaagcctgccgtggccatgaccatccccaagcgctgcgccatcgccaaccgccccgtcggctacaagtgcggcccatataccctgccatgaggtgatcatgaggagccaagtgatggcgggcagtgttgtggcagtggcacctgaaggactccaaactctgactgccaatatgccgtgacctctgtcgcatcttactttccaaagatcccgagaataatgtggctgtaataatgcctcaactttggaataaaattgtatctttttcaccaagaaaatggaaaaaaaacctaataacatgatataaataagtactgttcaccacaagctgcataacaacaggcaaagcatcagttacattataaatgcttgactcctatctccattttcagtttcataaaaaatccagacctttgtcattgattttctgtgttaaaagtaagcgtttctatgctttacagaagaactgttaataaattgaaccttatcagagcagcagaagtttgccacgtactcgttcccctatacaaacttcaagttcttatagatatcatatactatataatttaaagaacagaacaatgacatggaagatggtaacagcagccaaagtaatatatagtacgtcaatagaattaaaactaatttctgcttagcttcttgacatggaactaagttgtggagatatctaattaacactattagctaaggtttccaatacgccccgatataatgaaaccccacatcagtggctcaatagtcaggtgtgttttccttgattggcttctcactctaactgggtttatgtgacaacaacgctagcccatataagcatactgaaaaggtgtaactaataatcagccaaaataatactgaaatagcggtaattaattatttgcccacactatatgaaaacgatgtaaaggtagattcaatggggtagtgatttacactatttggaacatctggaaagaacggaacagaagaatcttcaacggcgttttcaaaacgacagtgcaagttgcctctagagtgaaagaagacatcgaacaacggcaaagagccttaacttgggatgagtagaaccgtagagtttttccttgatttcttttgcactttagtgctgcccggttacctgttgggagcgtgcttctttttaattctaagcatgtacataacatcttccctatcttaactgaaaggcagagctcctgccattttttcaaaaaaaaaaagttttcactccaagatcgttaatcccaccccacccactggcctttctccacagacacatcgttgtacatcaatctagcagctagttctgcataacaattaattgtctaccaaaaatgatgacagctcgatacaaacaaacaatgaaacaaataaataagctttccttttataggctaatactgcaaacatgaaagggagagatggaagatagactaagcgctgaactacgcactaacagaatttcatcataggagtggaattggttgggtatcctctttagggcttgtttgggagtaaggggattagaggggattgaggggctagaatcccttgctatgcaaaattaaacagtaaggaattctagcctcctcaatcccctccaatcccctgtctcccaaacaagccctcaaagaaaagttatttagacactttatcacttgagatgttaatataaaatcggtttcctcagagaaaacctttaagaaattcacgtcatgctagaactatatattctggcttttggaaaaggagagagcatatgctcccttctatatgaagaactaaggttacgtatcataggccaagtgagccaacataggtatctacgaactatcagctgcgagtattaatatggaatttgaaaaggattctctagtacaaaaatgtgagatggacagcatatgcacaggcacagtacagcaacaaacttggtagcttttaacagtaataggatcctcctgtttaccttgttctccaaggagaggccaccaggttctcttagtaataaaatgagcctgtgagccccacaaaataaaaaaaaatgcagagttaacgatcagaagcttgaacagatagttacggtatctgtttcaatattaaaataatgatataccttgccaccagtcgccatgagaatctgcgactggatctttcttgtcccctttgtactgaaaacacacacacacgttaaattcaaaaccttgcaggagtgtagagtaaattcatgatgatctaaaaaactttgaactacaaattacaagagttctatttctaggttcagtaattcttacgtcagtggaggattctgtcgctttcttggttgt

SEQ ID NO: 112439 - DNA, 3285 bp, Zea Mays
gcgcatgccgcacaaaggcagcgctagtgcagcgtccactccgagcgtttcacaccatgaggcgcgcaaaacctcaagcaaacgatgatgagttccgttcacgctcgaggccccgagactgtgtatatatagccaccactccatcagagacttcatcagggttcagtgaagtgtagtgcagccaaggcagcagagcgtgaggtgcactaccaggcaacaaggaaaaaaatggagctccaggcaaggtgcgtctgcgtcgtcgcgatgctcctggtggccagcttcgcggggctggatacggcgcacggcgcgggagagtgcggccgcgtcccggtggaccaggtggcgctcaagcttgctccgtgcgcggcggccacgcagaacccgcgcgccgcggtgccgccgagctgctgcgcgcaggtgcgcgccatcgggcgcgtccccaagtgcctgtgcgccgtcatgctgtccgacaccgcgcggaaggccggcgtcaagcctgccgtggccatgaccatccccaagcgctgcgccatcgccaaccgccccgtcggctacaagtgcggcccatataccctgccatgaggtgatcatgaggagccaagtgatggcgggcagtgttgtggcagtggcacctgaaggactccaaactctgactgccaatatgccgtgacctctgtcgcatcttactttccaaagatcccgagaataatgtggctgtaataatgcctcaactttggaataaaattgtatctttttcaccaagtcgataacactgtaaaatgcaattgacaagaacagtttccaaacttctgtcaaattccagctggtaaaggtgtacaatgtgaagtcatcgccgcttctccagcacattattattgttttttttttgctttggagcgacgatacaattgtacagacttttgactctaaggagtcagataccaacccgctcgtattactggcggaatggacatggattcttttatgcggtctagttcatactgtgctaaagcttcgttacattgcacatctaaagcagagactataagacgcacactacatctgcccaggccaggtgatgcttctaaatattggcaccaccgctggacgaaagcgggtccactatgacacaagataatactgctagcaatcaaggaaaccgagcttcactgccctccttctgttcctgccatacacaacccaatagaattttgaggaaaatggaaaaaaaacctaataacatgatataaataagtactgttcaccacaagctgcataacaacaggcaaagcatcagttacattataaatgcttgactcctatctccattttcagtttcataaaaaatccagacctttgtcattgattttctgtgttaaaagtaagcgtttctatgctttacagaagaactgttaataaattgaaccttatcagagcagcagaagtttgccacgtactcgttcccctatacaaacttcaagttcttatagatatcatatactatataatttaaagaacagaacaatgacatggaagatggtaacagcagccaaagtaatatatagtacgtcaatagaattaaaactaatttctgcttagcttcttgacatggaactaagttgtggagatatctaattaacactattagctaaggtttccaatacgccccgatataatgaaaccccacatcagtggctcaatagtcaggtgtgttttccttgattggcttctcactctaactgggtttatgtgacaacaacgctagcccatataagcatactgaaaaggtgtaactaataatcagccaaaataatactgaaatagcggtaattaattatttgcccacactatatgaaaacgatgtaaaggtagattcaatggggtagtgatttacactatttggaacatctggaaagaacggaacagaagaatcttcaacggcgttttcaaaacgacagtgcaagttgcctctagagtgaaagaagacatcgaacaacggcaaagagccttaacttgggatgagtagaaccgtagagtttttccttgatttcttttgcactttagtgctgcccggttacctgttgggagcgtgcttctttttaattctaagcatgtacataacatcttccctatcttaactgaaaggcagagctcctgccattttttcaaaaaaaaaaagttttcactccaagatcgttaatcccaccccacccactggcctttctccacagacacatcgttgtacatcaatctagcagctagttctgcataacaattaattgtctaccaaaaatgatgacagctcgatacaaacaaacaatgaaacaaataaataagctttccttttataggctaatactgcaaacatgaaagggagagatggaagatagactaagcgctgaactacgcactaacagaatttcatcataggagtggaattggttgggtatcctctttagggcttgtttgggagtaaggggattagaggggattgaggggctagaatcccttgctatgcaaaattaaacagtaaggaattctagcctcctcaatcccctccaatcccctgtctcccaaacaagccctcaaagaaaagttatttagacactttatcacttgagatgttaatataaaatcggtttcctcagagaaaacctttaagaaattcacgtcatgctagaactatatattctggcttttggaaaaggagagagcatatgctcccttctatatgaagaactaaggttacgtatcataggccaagtgagccaacataggtatctacgaactatcagctgcgagtattaatatggaatttgaaaaggattctctagtacaaaaatgtgagatggacagcatatgcacaggcacagtacagcaacaaacttggtagcttttaacagtaataggatcctcctgtttaccttgttctccaaggagaggccaccaggttctcttagtaataaaatgagcctgtgagccccacaaaataaaaaaaaatgcagagttaacgatcagaagcttgaacagatagttacggtatctgtttcaatattaaaataatgatataccttgccaccagtcgccatgagaatctgcgactggatctttcttgtcccctttgtactgaaaacacacacacacgttaaattcaaaaccttgcaggagtgtagagtaaattcatgatgatctaaaaaactttgaactacaaattacaagagttctatttctaggttcagtaattcttacgtcagtggaggattctgtcgctttcttggttgt

SEQ ID NO: 112440 - DNA, 513 bp, Zea Mays
atggcgacggcatgtacggaaccgaccctacaatgctggtggtgtcgtcgttgcggtttcatggacgatggatggatggaccagcagttattatttgcaagacgtggtggtgggcttgtgtctaacatcacggaggagaagaacgtgttaagagcatctccaacaatgcctcaaactatagggcaccctctcaagtcacgttgttggagatacgttattggagatgctctaagtacacgcagaatgttcttcggtccgtccaagtatacagaggaagaagttccttgtgacaaagaatcgaaccaccggtcaattactggctttcgaagtcaggcagataatgcaaagcgatcttcgcagctagaacaggtcttcgcagaagggaacccttccgaaacctgcatttgttccgttgggatcgggagcaggtcttcgcagctagaacagcacgcgagccattctcgctcaagatggtgtgctgtggaacgccttctcgacgtttatccgacctaa

SEQ ID NO: 112441 - DNA, 521 bp, Zea Mays
atatagaaatatgatatttttgaaagaatcaggatgcaccaaatcaagtattagtccgttgcaaaacaaccagataaaaaagcaatgcaacaatactatcttctaccatcaattattagttactagtgttatctagtgacctttcatgttgagcacgaatggcataggaagcttcccaatgcatttcaccattctaagggctgatttggaaaccacattttcccaagagatttttgttttcccaggaaaattaatttattttcccttgggcaaaataggaatccattgggaaaatggtgttcccaaactagccctaatagtagcccaaatttcccaaggttcattgtgacacgcggattaagcagagctttgttacaacttacaacacatacttcacatgcagttagtgaagctttacttgagacgccagtagtagatatagtacatcaatgtcatggaccttcggtccatggggatagttgtcttctccggcgaggttatacctctctgccgaggggggc

SEQ ID NO: 112442 - DNA, 2647 bp, Zea Mays
gtctctctcccgctcctccagacctccccacccttgctgccgtcgcgcgccctctccccgcccgaccctcacctgtcccggtctctctgccatttctcctttcgctttcacggctcgccagccatcgccctacccctccagcgggcacaggccgcagctagctaccctcttttttttcacctccgcccgcctcttcacgggtccagtcgacttcccggtctcggcttttgccgaaagaaaggcacccggaacccaacgacagcggcagcagtcgagtccgggacgggccggggcaaagctgggatgaggatgaaaaggggggctgaataaaaaggcgggggaggaggcgagaaggctacagcggcggcaggccaggccagcagagcgcagaggaccgccgctcggaaagtgcggagccgtttcccctctagctgctcatgctctctgcttgcctccgtccactcacagcccacgtccacgcctcgcgctcttctccaggctcccaggtgctccccgatcaatcgcttccgctgctagcgcgcgcgcgatccccgaggtcgcgcgcttgatcgcgctcaacgccatgtcgtccgccgcgggcgggtatggcggcggcggcggcgcgggaagcggcgccgagccccacggccacgccgacttcctgctgcaccaccatgcacagcacgtcgccgcgcagcagctctaccacgtgccccagcacagccgccgcgagaagctgcggttcccccaagacgacgcgcccccacacgcctccgcttccgtcccgcagcagcacggcggggcggtggcctggccgccgcctccgccgccaccggcgttctactcctacgcgtcctcttccacgtcgtcctactccccgcacagccccacgctggcgcaggcacagctcgtcgtggcgcacggcctcgccccgccgctctcgtcgcagatcccgacgcagaacttcgcgctctcgctctcctcctcgtcctcgaacccgccgcccccgcccccgcagccgaggaggcctcacgccgcgcccttcgggcccttcaccggctacgcggctgtgctcgggcgctcccgtttcctcctccccgcggagaagctgctcgaggagatctgcgacgtcgggggcgcggcctcgcgcgtggaccgcagcgcctccgacgagggcctgctcgacgctgacccgatggaatccatcgatcacgaaatggacggcgccgaccgcgtcgccaatgacgctggcccaatctccggcgccgagcagcagtggaagaagactaggctcatctctatgatggaagaggtttgcaagcggtaccggctgtactaccagcaggttcacacggtgatcaactcgttcgagacggtcgccgggttcagcaacgctgccccgttcgcggcgatggcgctgagagccatggcgaagcacttcaagtgcttgaagggcatgatactgagccagctgcgcaacatcaccaaggcccctgccggcaaggaggggctcagcaaggacatcgccatgttcgggcttgccggtggtagcgcggccgccctccagagaggtagcagtgtgggtgccttcggccagccgcacaacatctggcggccacagagagggctgccggagcgtgcggtgtctgttctccgcgcttggctcttcgaacacttcctgcacccatatcctactgatggagacaagcaaatgcttgctaaacaaacgggtttaacacggaaccaggtatccaactggtttataaatgcaagggttcgtctttggaaaccaatggtggaagagatccacaaccttgagatgaggcaggtgcacaaacaccctgttctcgacaagggccagcacgtgctgcatcaccaaacccagcattcgttcgagagcagtggaaagccttctgacccttccgactctcagcttggccaaagcagcagcatcacgaggaaccacaacatccctgcgtcccagggatttgccgatgagctctccgagatgtcccattctattcagcaggggcaggtaaccttcgcatacaatgggatgtcggcgccacaccacagcctcgcttcgtcacagcaccaccagcaggccgggccgatgagcggcattggtggcgcggggaacggtggcgtctccctcaccctcggcctccaccagaacaacagagtctgcatagccgagccactcccggcgtccgtccctcccaacctcgctcaccgttttgggttggaggaggtcagcgacccctacatgatgggctctttcgggaaccaggaccggcatttcggcaaggagattggcggccatttggtgcatgattttgttggctgacatggcagctgctgctgcattgttgcttctggtcagctgatctgatctcagcttgctgatggtgcacaagcatgtatttgtaccactactagtatgttagaatggtatataagtgtatcacttggtggctttggcttgatcagtttgaatcaattcctgaggatggagaaaaaacattgctgaattggcgagtccttgttggtccaggcgtgctatcaaatgctatttgacttccaaggctagaagcgattaggtggtttgccttccctagttcacacttgtttggtctgaattgagatt

SEQ ID NO: 112443 - DNA, 1541 bp, Zea Mays
agttctttaatggcatcccgcttccataattgggaagcatgcctgctttgttgatgtcacgtcttcatgcaaagaaaagcgccctgctcccttttcgtaacttgggagtttcttcattgcttaatataaaagctgtctaatctacatgattcaacctctagattgagttatccaataattaagaaactttttttttttacttctaggtttgcaagcggtaccggctgtactaccagcaggttcacacggtgatcaactcgttcgagacggtcgccgggttcagcaacgctgccccgttcgcggcgatggcgctgagagccatggcgaagcacttcaagtgcttgaagggcatgatactgagccagctgcgcaacatcaccaaggcccctgccggcaaggaggggctcagcaaggacatcgccatgttcgggcttgccggtggtagcgcggccgccctccagagaggtagcagtgtgggtgccttcggccagccgcacaacatctggcggccacagagagggctgccggagcgtgcggtgtctgttctccgcgcttggctcttcgaacacttcctgcacccatatcctactgatggagacaagcaaatgcttgctaaacaaacgggtttaacacggaaccaggtatccaactggtttataaatgcaagggttcgtctttggaaaccaatggtggaagagatccacaaccttgagatgaggcaggtgcacaaacaccctgttctcgacaagggccagcacgtgctgcatcaccaaacccagcattcgttcgagagcagtggaaagccttctgacccttccgactctcagcttggccaaagcagcagcatcacgaggaaccacaacatccctgcgtcccagggatttgccgatgagctctccgagatgtcccattctattcagcaggggcaggtaaccttcgcatacaatgggatgtcggcgccacaccacagcctcgcttcgtcacagcaccaccagcaggccgggccgatgagcggcattggtggcgcggggaacggtggcgtctccctcaccctcggcctccaccagaacaacagagtctgcatagccgagccactcccggcgtccgtccctcccaacctcgctcaccgttttgggttggaggaggtcagcgacccctacatgatgggctctttcgggaaccaggaccggcatttcggcaaggagattggcggccatttggtgcatgattttgttggctgacatggcagctgctgctgcattgttgcttctggtcagctgatctgatctcagcttgctgatggtgcacaagcatgtatttgtaccactactagtatgttagaatggtatataagtgtatcacttggtggctttggcttgatcagtttgaatcaattcctgaggatggagaaaaaacattgctgaattggcgagtccttgttggtccaggcgtgctatcaaatgctatttgacttccaaggctagaagcgattaggtggtttgccttccctagttcacacttgtttggtctgaattgagatt

SEQ ID NO: 112444 - DNA, 76 bp, Zea Mays
ttgctgctggacgtcgttgtcctgctgtgcctcctccgccgtcttgcgggtgctccttctccccctcctcgtcctc

SEQ ID NO: 112445 - DNA, 1058 bp, Zea Mays
gccccttctatataaaggccttcatttccgttcgaaaagccgcgtgcaagcaccgcagaaacaaacaaaaaaacacccgggaaatccaagcagctgttgcaaccggttccttcgaggagaacgtgagaaagaagcatgaggccccaggtgctgctcgtcgcactggccgtcttcgccgtcctcgtagctctgccactgggcaaagcgcacgaggaggaggaggaggaagggcttgaactcgaagccagcaggaggcggtggccgtgctgcgaccagtgcggcatttgcaccaggtcgcagccgccgatatgcgagtgcagggacacgtcgacgaccggctgccacccggcttgcaaggcgtgcgccctgtccatctccgacggcctcttcgtgtgcaaggacaagatcgtcaacttctgcaagcgccgctgcacccgtcgtactgatgatgatgatgcgtgacttataatctaagtgggcaaataaccttgccaataaataatttccgttcggagctccatttgcatctttctcaagatgcagacgacagggtttaaataatcaaggcgatgcttgcttgctcgtcgcctttttactcgtacagtttctgaaataaagagcatgggtatgttatgctcggagatatatgtagtcatgagacgtaaaagaatgcaatatacgctttggttatgtgcatctttagatgccatagaccgaggcatgattatttcgcggtgatagctaataacgcatggctactttagcgtctgggaagcttccagaagaaaggcaaggtagaagaagacttgaaagagggggaaactgagtggcgtatggtttctgttattttcttcgatgccgttccagcgttctcgtcgtgcccaagtactgtaggacatccgacaccacgcccgcacggtgtgtcgttcacacggcccaaacacacatagcccacttgtacttacacggcccattgcagcccactatatttgatacttggacgtcgttcccgcgcttgtgccatcttcgcgttcggttcttcagttgtcgacttcttc

SEQ ID NO: 112446 - DNA, 441 bp, Zea Mays
atgccgggtccggccagcaggagccggtcgagcgcgcaggcgctcctcgcgactcgctcgggggccgcgtccgggtggccggatcgaccgcgaccaggccaccgtggccaggcgccaccggctggtgccgtcgccagtgttcggccgaagacgccgcggcttcttgcaaggagccggaccggccacgaagcggcgctcctcccatccaagcaggggccgcgccctggcaaggaccgcgcccagtgtgcccgcgccggggcgtgcctcgcagatccaagtccggtcacgccggtccgcgccaccaagcgcaagatccgccagacggtcaccgcgtgctcagtggcaaatggagagagacaaagagagaatgagacaaatgactggagtctcttgtttattgcagagatcttctttatatacatgtgtacaaagggcatctga

SEQ ID NO: 112447 - DNA, 907 bp, Zea Mays
agtccaaaactgtcagcaatccactgcccaagcctttcagcaacgcctggtcgccgccgatcccaaaaggctgccatctttttcctgaaaaccacgagcagttcactacccatccgccatagtccgaaagttaccaaatcctcctgcgaggccccagcaccgaatgccccagcacaacaaggcggcgtcgtttgagaggaagcggctagaggacctgctgccgggctagatgacggaagtggcgggacgccccgggacgtcgggcggcctggcgctgcgggcgggccagttcgtcttcgccgccgcgtccatctgcgccatggcctccgcgcccgggttcaccaactacacagccttctgctacttggttgcatctatgggactacaagcactatggagcttggggcttggatgtcttgattactatgccttgacattgagaagagatcttcagcaagctcttctcatgagcttatttgttgttggcgattgtgtgacagcaattctttcgtttgctgctgcatgctcagctgcaggcgtagttgtgcttttcgaaagggatgcgtacttgtgcagaagggatcctcaactcccttgtggaagattcgaggttgctgctgcatttgcatttctttgctggacgtttagtgctgcatccgctctggtaatgtcttggctgcttgcctccttgtgaatagtgatcttgtgtaaggtgtctgtaatgctctctttgtatatctcgagcatgctctctcattgtacacatgctcattttgtgtgtgggcagaccacacgctagaaattgtgtttggttggatgtataaggagggatggaaatgggcggctataatttctatagtgtttggatgagagtcaagtgaggacgaggtaaatcggagtaattttt

SEQ ID NO: 112448 - DNA, 1326 bp, Zea Mays
aatcctcctgcgaggccccagcaccgaatgccccagcacaacaaggcggcgtcgtttgagaggaagcggctagaggacctgctgccgggctagatgacggaagtggcgggacgccccgggacgtcgggcggcctggcgctgcgggcgggccagttcgtcttcgccgccgcgtccatctgcgccatggcctccgcgcccgggttcaccaactacacagccttctgctacttggttgcatctatgggactacaagcactatggagcttggggcttggatgtcttgattactatgccttgacattgagaagagatcttcagcaagctcttctcatgagcttatttgttgttggcgattgtgtaaattatttaaggccaccttttatccatgttgttcatcactgaacctcgtttgtttctgctaccatccgaagttatcaattactgcatcctacaactaaattgcctctttttttttgtagaattttcaatctataaaccttatcacctgtatgtataatattcctgcagtacttggaaacatgttgagcattccacgcattcatgctttatttcgtttctgttcatgtttcacattatatattacataagtgactgtaaaattatcccatttctgttcgattgttgcagacatgtaaaatatcaggcatactgttatacctagcactacctagctttacatggccatgaagttgaagcatcttttcctagttttgttagtatttttttctgtcaccttgatcagtaccaatttgagcctgcctgcctgaaacatatgtgaagttgtgaactccaagtaatttctatcacttttacatggattttttttgaatggtagcatcaaatacataatcatattggcattgttttatggagcacattacatctctgatattgaacttttgaaatgtggcttcgtgaagttctgactgactgcactatatacgatgcaggtgacagcaattctttcgtttgctgctgcatgctcagctgcaggcgtagttgtgcttttcgaaagggatgcgtacttgtgcagaagggatcctcaactcccttgtggaagattcgaggttgctgctgcatttgcatttctttgctggacgtttagtgctgcatccgctctggtaatgtcttggctgcttgcctccttgtgaatagtgatcttgtgtaaggtgtctgtaatgctctctttgtatatctcgagcatgctctctcattgtacacatgctcattttgtgtgtgggcagaccacacgctagaaattgtgtttggttggatgtataaggagggatggaaatgggcggctat

SEQ ID NO: 112449 - DNA, 2663 bp, Zea Mays
ctacgcgcacacgtcaaactgtcccacacgacctgtacctgccccgccgcccaccggacgcaaccgcgtccgaccaccgccgccggaaccctacgcccccgcctcgccgcgccatggcggatccgccgcccgtggctgcctccgccttgccggcgcagcccgaccaggtcgccgcctccgtgtccaccccgcagaaccccaaccctaaccccctcctctccccccaaatccccccgtccccgaccgtctccgacctctccgcgcacatctcgtcccctcagcagctcgacccggtggctgcggcagctgccgcttcgggcggcgggggatccatggattaccccccgcgcccgccgcagctgcaggcgccttcgcccacgcaggcggggcccggcgccgccgggtttggccagatcccccgctcggggtcggcctcacgcctctccacggccagccagctccagcagtacgcggctaggatgtacggcgggcagatgagcttctcgggtggcggaggtctcgtgggccaacagcagcagctggcggggcgcacccccgtgcttgggcagggccagctggggatgctgcaaggccagggtaacgcgggatctgcggcacattttgggcttcagtcgcagatgatggcgcaggctaggcaaaagggcatggcacaaggcacccaattgaataatgctaatacagctcaagcgctacaagggatgcagcacatgggtgtcatgggtactatggggatgaaccagatgagaccaaatggaactattccctatggtgctcaacaaaggttcgcccatgcgcaaatgagaccacaagcgtctcaacaacctgcactgtctccacagaaggtgcctggtcaaggtctgtcgaggacagcatcaattgcagcattaaattcacaactgtctggatcatcacaaaatggacagatggtggcaatgtctatgcctcagcaacagcagtggttgaagcaaatacaatcatccatgggctcaccagtttccccacagcaacaatatcagcagcagaggctcctgtttatgcagcaactgcagcagaagacaggattgagccaacaacaacttctccaaatccaacaacagcatccacatctcactgcccaacagctgattcagcagcaacaaattttgcagcagtttcagcagcagcaactgctacaatctccgcgtgtttcagcatctggttcacagaagtctgcgaaccttacaggctcgcagccgggtacaccattgtcaggtggaaccatgactggtggaagtgcaagtcagggagccgaaggaactagccaacttcttgggaaaagaaaaatacaagatctggttgcacaggtagaccccctaggcaaggttgaccctgaagtggaggatttacttctagaaatcgccgatgacttcattgactcggtgactgcatttgcgtgtaccttggcaaagcacaggaaatcatcagttgtcgaagccaaggatgtgttgctgcacttagaaagaaattggcatttatctgttcctggtttctcaagggaggataagaatccccaaagaaattctgtaaagccattggtagatccccaacaatcagaaagtgacgttactggtattagaggtacaagcaataaactaggtgctaataactcagttggcaaccatcaaatacgacctccaatggcagaaacttcggctgtgccaacagtgggctctctatcgaaagcccctcgcttctaagggctatgctgctcttccctattgaaggaaaaattcctgtttcaggacaatctacgtcgaaaacagcccataggctctaactcaaggattgctagcaagtggaagcaaaataaacccacgagcgtctgtggcaaactgcagatgcttgtgtcttacaggaaagcagttgctgacttaccaatcgtctctggcagatcctctctacctggggtcgtatgtaactgtattttctttttgtgcccgtaaatgcccccatccgttgtatataaatgtttttgcaatgggggcattatcgtctccagttttgatgttgctatgtaggcgaacaaatactaaagtggaagttaatgaagtgtaagattgatgtcgttttccgttactgaacagttgtgccatatctaacacgctggccgtcggtgggaagctttggcatttggagctggtggtcgtttggggccaccaacccgtattccaattttcagatagcgaaaatgcatcgtgttaaggtcttgaacctgtacttcatggctcagacaacgaaagtacttgaagacactttgctagggttcggggctccaaaaacgaaacatacatttttgtgatttcgccctctacccctgaaacggctggaacaacttttgaagccaaaaccaagtcaaaaacggcgaaaccgaaactgttttgttgtagaagccatagccactaaaagatggtttttcctgcattctccgttttttataagcctaagcattataaaaaaacctttggtttcggttttggcttaaaaaactctacttgtatgtgcttatttggtaggacttctaataagccagtgaatatgtcataacaaaagcccggccaaacaatatcggaatcgcaaccatcacgatacacaaacattaatta

SEQ ID NO: 112450 - DNA, 1089 bp, Zea Mays
atgtcgcccaccgggcctcccttcgactctgacgctcccaggaccacaccgcccaagccgtcgagcaaatccgcgctgtgcaagtggtggcacagcctcgcgcccgccctgctcgccgccgcactggcggtcacggtggccgcgctgcggccgacgacggagcacgcggacgccaaggggcggccgcctctgtggttcggaccaggaggagtgttcaaagtggccctgttcgcggacctgcattatggcgaggacgcgtggacggactggggccccgcgcaggacgccgcgtccgaccgcgtcatggccgccgtcctcgacgccgagaacccagccatagatgtgcagacatccctattggaagaagatctgaacaagaattatcaagaagacaaaagacaatatacacctcttgttaagaatggagaggttgccaaggatccatcagggaaggacatcaatgcacttgagcagcacatcaagaacctcctaagcccttccaccccatttttcttcaatactctgtacgacccttaccgtgttggcgccgattttgttcgtgggtacccctacagccttcgtgagggtgtcccaactgttgtttctcacgggctttggctcaacattccagactacgatgcccctacccagcttcttaagccccttgagagaaacaccaggtatgtggatgctattcttacgatcccaaagggcaccctctttcctatgtgtggaatgaaccttgcatttgaccgtgagctcattggtcctgcaatgtactttggtctttgggtgatggccagcctattggacttgttttgcagccatttgactggattaagaaaactttcttcgagaaaccccaaccagaggcataaaaggcttgcaagtctgcaactttggtacatcacttttgtctgggatggttcctgactgaagagaacttggataactcagcaaataatacgagaccccctcgtgtttccttgtttgtttttttattattcagatgtaggcaatccccacgagggagatagggaacagagaaactgcttggttcacctgtgttatataatactcctgtattat

SEQ ID NO: 112451 - DNA, 2684 bp, Zea Mays
gcacggcgccgacatcccccgaggcccgagggcccagccatgaaggccctgggcgcgcacgtcgtagacctgctccgcggcccgcacctcctccgcgccgccgtcctagctttcgccgttgcggtcgccttcctcgtcggctaccactggcccaacgcctacccgcgccttgtcttcttctcgtccgcctcctcctcgttggcgtccaggtcctcccgctctcctgccgtcgcgctctcccccaactccaacatctccttcgaaccgtctctgatccctacccccaccaccccgcctgcttctcctgctcccaatgcctgccccccgccctcgctaccaccaccgactccggcgccgccgcctcccctcctgccccctccaccaccagcgcgcctcggcatcgtcggcgaggacggcgctatgcaggacgacttcgacatcgggagcgtcggcgccaacgacaccgatctggccagcgacgagaccgcgccgcaggagcctagcaacggaggcgccagcggcggaccacccagggttcggattgggaggttcctggtctgtcccgagagcatgagggagtacataccctgcctcgacaacgaggaggagatcaagcggttgccctcgacggagcgcggggagcggtttgagcggcactgccctgcccaggacaagggtctcagctgcctcgtgccggtgcccaagggctacaaggctcccataccctggcctcagagcagagacgaggtctggtttagcaatgtgcctcacacaagattggttgatgacaaaggaggacagaattggatcaccaaggtcaaagataaattcagatttcctggaggcggaactcaattcattcatggagcaaatcgatacctagaccagatttcccagatggtaccaaatgttgcatttggatctcatactagagttgtcctggatgttggttgtggagtagcaagttttggtgcctatttactttcacgtgatgtcctgacattgtcaatagctccaaaagatgttcatgaaaatcagatacagtttgctcttgagcgtggtgttcctgcaatggtagcagcatttgcaacacgccggttattatatccaagccaagcgtttgatatgattcattgctcacgctgccgaataaattggactcgtgatgatggtatcctgctcctggaggttaatagattacttagagctggaggctactttgcttgggcagcacaacctgtttataagcatgaacaggcccaacaagaggcatggaaagagatggaggacctcactacccgactttgttgggagcttgtgaagaaagagggatatattgctatgtggaggaaacccttaaataactcttgctacatgaaccgtggtcctgcagtcaaaccttcactttgtgatgctgatgataacccagatgttgtctggtatgttagtctcaaagcttgtattagtcggcttccagagaatggcgaagcaccacctcctgttcaatggcctgcacgcttaatggagccaccaaagaggcttcagggtgttgaaatggatgcctacccatcaaagaatgagattatcaaagcagaaacgaaattttgggaggacataattgatggttatatccatgtctttaagtggaggaagttcaaactccgaaatgtaatggacatgagggctggatttggagggtttgcagctgcattaattagtcggaaacttgattggtgggtgatgaatgttgttcctgttaatgagccaaatgcactgcccgtaattttggatcgggggcttcttggagtagctcatgactggtgtgaaccctttgatacataccctaggacgtatgatctactgcatgcatctggtcttttctcaaaggagcagaaaaggtgtaatatctctagcatcttgctggagatggaccggatactcaggccaggtggtaaagcatatattcgtgaccggagagaagttatacaggaaatcaaagaaataacaagcgctatggggtggcgtggtactatacgtgacactgccgaaggcgcatacgccagtaggaaggttttgatgtgtgacaagcctatggtgcgttaggcgatcaggggaaggttcgatgacacctttgtggctagtttggaaattcaaattctcagggatttaaagagatttaggatttgttcggtttgaattggattgatggggattttaggggatttaatccccttctatacaaatttgtataggaggggatttaatcctccccaatcccaaatcccctcctaaccgaataagacctgagagggaaatgaactcaatctccctcaatccacccctaaccgaataggcctgagaggaaaatgaactaatttctccttcaattctctccaatccccggagaggggatttgagtttccaaactagccattgaagtttcgaattgccaagcaggagtaaattttcaggaacttttggaactgtcaagagctgctgtcgagacttttgactaacatttgttctgtagatagggtaggtcaaggtctcatttgtaactatttatgtgatcattcgtacaatgatgatcagtgtaattcctgacagtcatttttttgttgtagtcgttattgaaatcttacaaaagtgtaggagataatttatcggaagaatggccatttttt

SEQ ID NO: 112452 - DNA, 462 bp, Zea Mays
atggtcaaaatgggggagaaattagcgtggatttcagaagagctagtttcaagcatggagcatatgattttgccctgctctgcttcgctccgagaatcatatgccccggcggagatccacgacgaccacgctaacattgtcggcgctccgccgggccagcgccagctttgccagcagcatggccgcgtcggagcacgccttgtcggagtcctccttgcccacacccttgacaaccgccgatccgtcctcggcgcccgcgccggctgccgggagggccacgccgttcgggcgagcggccggcgccggcggaccgttgctacggaagcacgcccggacgacctcgcacgccatctcgttggtcacgacgtcccacaggccgtcgctggccaggatcagacactcgtcgtcgtcggtgcgctccgtcaccgttacctccggctccgacgacacaaacggctttag

SEQ ID NO: 112453 - DNA, 2189 bp, Zea Mays
aagttcgcggtcgcctttctctcctctctgcccccatcgcaaaagagctagaagccagaacagcacagcaccacgagcgccgatatataaagaggctccgtcacccgtaccgaattaccaacccaaccagacctgtacggggctcaaaaccgcgtggaggatcgtggggtaccagcgaacagcaccagcgaggcctcggccgacagcgctggagctccctctacctagctgcccagcggaatctcttcttcatgtccggtggtataacaagccattgaggagagccggcggagcttcgatcaggcagggcggagcgagaaattgagctgagagagagggggattcatcatagttcacccatggttgtgcttatgcagaagccgtggctgcccgtcgacctgcggctgccggcggggccgcaggcgtcgctggggatcctggcgttcgaggcggcggcggccatgtccaagctgctgtcgctgcaccgttcattgtcggacccggaggtctcccggctgcggtccgacgccatgcgctcgccgggcgtagcgtacctcaactccaccgaccaggcgttcctcctcaagctggcctgcgccgagctggtcgtgtcgctggacaccgccgccgccgccgtcgcgcgcctcggcctgcggtgcggcctcgacttcggcggcgtgtacgcctgcctcaaggccggcacccccgacgcgcgcctggacccgctcctggccaaggggctcagggtgaaggccaagaagatggagcgcctcgtcgccgccaccgccaagctctgctccgagatggagacgctcgacgagctggaatccgccgaccggaagttgaacgtccggggctggagtcgactcagcggcccgatcccgcagcagccacaggcggcggcccagcagcagcagcaacaattgaccggggattcacctggcgcggagtcgctccggcaagagctcaagacgcagcagctcaaagtgaagcgcctcaaggacgagtccctgtggaaccagagctacaagaaggccgtaggcctcatggcgcgcgccgcctgcgcgctgttcgtccgcatctgctccatcttcggcccattcgtcgctggcctcccgccgccgctgccgtcggccagcacggacagcgtccagacccggctgtcgaagctgctgcacccgcggtcggcgaaggcgaaggcgtcgtccgggccgatcacgcgtcgggacggcccgtcccgcgtgcacccgccgatgagcaactcgtgcccgatcatcgggcggcacccgccgggccagaaaccccccaccaactggcgcaaggtcctggacgcgccgcccagcaccgtcggcggcgcggggctggaccagcagtacgcgaacgtgatcgcgtccgcggaggagctgctgcgcatggaggccgagggccgccaggaggaggcctccgcggagcgcgccgagatgtacgagatgctcccggcgaagctccgcgcggcggtccggtcgaagctgcgggagtggtggcgcgacccgggcccgctggacgagggcctggcgcgcgggtggaaggacgcggtggaccgcatcatggcgtggctgggtccgatggcgcgcgacacggtgcagtggcaggcggagcggaacatggaccggacgcgccggttcgacggcgccccgcgcgtgtacgcgctgcagacgctgcggtgggcggacaaggacaaggccgaggcggccatcgtcgaggtgctcgtcgcgctgagctgcatctgttggtacgaggagcgccggcgaggctccgtccgtctcggttgaaccattcaacgcattctttcccctcgctcgatcagatcggtcgtggcgggtggccgtttcttcctcttctctcctgcgtttgtcaaatatttgatttgaagagttgattttttgagccggtagtagaagaattagaagttagaacggggtggtgatgcgttgaacgggttaggaaggaaggagacacagcagcagcagcaatacttgaaacgaaatcgatggttggtatgcgcgttggggtggctgtcagcggcgtgacgccgacacgtgggggcctcgcttcccactctcccgtcggtctcacgccagtgacagagtccggtgtacaacacagcgtcacgaggattgtgtaatatatatactacgattgattctttg

SEQ ID NO: 112454 - DNA, 310 bp, Zea Mays
atggcggcatggcctcgcgacagcgactcccaattaccgcgtgcaagtagatccctgtactgtaccgccctcgccccttggtccttccgcccatccgcatgcgttgacgacttgacatttggcgtcggggtctacgagatcgagatgcatgtgtacccacaaagctaccatttagctttgcccccgccttcctggatgtgttcctggtctagaccaagttaaatcagtagagttagacctcgggggagaagggaacaacagagatggagaggtcgtcctaaggcacgacatcatactatatagtctagcg

SEQ ID NO: 112455 - DNA, 162 bp, Zea Mays
gaacaaacgcaggagagctgcgtgtcattaaattaagaagaaaaaaagaacataggagagacaagacttgtcaacccctaattacaaaggcccctaggccgagacccctccggcaataacacaacgcaccacacacacacaaggtaacaacccgaccaaaaa

SEQ ID NO: 112456 - DNA, 362 bp, Zea Mays
ttttggagaaacttccaaagtatactatccggcagctgtatttgccagaggagttccgtgttctcattaggagcattaagcggcctactgaaaacacaagaatgaaatacctgtcactgttcagccactcacatttcgttattccagaaatattcaagtatctaaaccttgacgcatccacaacgttggaatatatatgtactcatatttggattatagaatacaggcttatctgtagaaatattcaggtttttttttcttcatgtgcttttgtataaaatcaaactggtgagactacaaaattcatgtattaatttatataataatcttgcatttcaaataggccatcgtataggatagtc

SEQ ID NO: 112457 - DNA, 1606 bp, Zea Mays
gccgtcgcgtcgatgcaagttgagacgtccctgcctggctgcctggctccctgccgcaaccgcatcaacgacgcacggcgccacggccacggcacggcaccacgcgctcagacgtccacgggctaccaaccccagctcaccgcactcaacccattgctgccacggcgatcacctcacccaccccgcgcacttttctcatcgcgccaacgcaaacaccacagcgcagcagcaagcgagctaactggagtacaaagcaagccaattcgctctgtgcctgtgccgctgcctaccgtcgcgcgagacgggcgagctcctctcccggccgccgacgccgcgggggattccttttccccggaatgctctgccgctccgtccgggcggaagaggagcactaggcggcggctcggatggggcgcccggggtacatcacggtgcccatactctcggtgctcgccgcgatcggctatgtctactacaccacggtgttcctggcgatccccgcgtggctggggctctcctcggcgaccgggctcgccaacgccgcggtcttcagcgcgctcgccgccgcctgcgtcgctacctacgccgtcgccgtatcgcgcgacccgggccgcgtgccagcgtccttcgtgcccgatgtcgaggacgccgggagccccatccacgagatcaagcgcaagggtggtgatttgagatactgccagaaatgttcgcattataaacctcctcgagcgcaccattgtcgtgcctgcaaaagatgtgttctaagaatggaccaccactgtatatggattaataactgtgttgggcatgagaactacaagatattcctagtttttgttatgtatgctgtaattgcaagcttctattctatggttctcattatagggggtgctgtgcatttacctaaagatgaacaaccaagcagtgattcttctagaacatctatagttgtttgtggggttcttctgtgccctttagcattggcactaatggtcctattgggttggcatgtttacctcatcttacataataagactactatcgagtatctgctaaatcgcaaaagaaactcaggtgcccacacaaagtgctaggtttgctattcttcacagttctgatttttagcatttaaccaaagcgtttgtgtatccttaaaaggagagtgttttccaatgcttgaacttttgtagtaagggtgtgctacatcaaatccagcgtgtttaggatactgctacatacatcaaatcctaaagcctcctagaatctgtcattaggaatttttagagatgctgacatacttagatttttctctctttttggggacattcttgatcaaataagtaattattgcttgtgtagtagactagagtgggctgtattaacacacactaaaaaaaacggaaagaaaaggaaagatgtactcgtggttgttctgttgtaaaattatgtccaaactggtttttttttgtcgtgaaagctcgtcagctcgtgtattgttttgtcagatagtacataggagtaatgagtgttaaggaccaatcaaccaaatactattttatgtatacacttgttgagaaatacacgtggatatagctgtttgcac

SEQ ID NO: 112458 - DNA, 1603 bp, Zea Mays
gccgtcgcgtcgatgcaagttgagacgtccctgcctggctgcctggctccctgccgcaaccgcatcaacgacgcacggcgccacggccacggcacggcaccacgcgctcagacgtccacgggctaccaaccccagctcaccgcactcaacccattgctgccacggcgatcacctcacccaccccgcgcacttttctcatcgcgccaacgcaaacaccacagcgcagcagcaagcgagctaactggagtacaaagcaagccaattcgctctgtgcctgtgccgctgcctaccgtcgcgcgagacgggcgagctcctctcccggccgccgacgccgcgggggattccttttccccggaatgctctgccgctccgtccgggcggaagaggagcactaggcggcggctcggatggggcgcccggggtacatcacggtgcccatactctcggtgctcgccgcgatcggctatgtctactacaccacggtgttcctggcgatccccgcgtggctggggctctcctcggcgaccgggctcgccaacgccgcggtcttcagcgcgctcgccgccgcctgcgtcgctacctacgccgtcgccgtatcgcgcgacccgggccgcgtgccagcgtccttcgtgcccgatgtcgaggacgccgggagccccatccacgagatcaagcgcaagggtggtgatttgagatactgccagaaatgttcgcattataaacctcctcgagcgcaccattgtcgtgcctgcaaaagatgtgttctaagaatggaccaccactgtatatggattaataactgtgttgggcatgagaactacaagatattcctagtttttgttatgtatgctgtaattgcaagcttctattctatgggggtgctgtgcatttacctaaagatgaacaaccaagcagtgattcttctagaacatctatagttgtttgtggggttcttctgtgccctttagcattggcactaatggtcctattgggttggcatgtttacctcatcttacataataagactactatcgagtatctgctaaatcgcaaaagaaactcaggtgcccacacaaagtgctaggtttgctattcttcacagttctgatttttagcatttaaccaaagcgtttgtgtatccttaaaaggagagtgttttccaatgcttgaacttttgtagtaagggtgtgctacatcaaatccagcgtgtttaggatactgctacatacatcaaatcctaaagcctcctagaatctgtcattaggaatttttagagatgctgacatacttagatttttctctctttttggggacattcttgatcaaataagtaattattgcttgtgtagtagactagagtgggctgtattaacacacactaaaaaaaacggaaagaaaaggaaagatgtactcgtggttgttctgttgtaaaattatgtccaaactggtttttttttgtcgtgaaagctcgtcagctcgtgtattgttttgtcagatagtacataggagtaatgagtgttaaggaccaatcaaccaaatactattttatgtatacacttgttgagaaatacacgtggatatagctgtttgcacatatgggtgt

SEQ ID NO: 112459 - DNA, 1509 bp, Zea Mays
gccgtcgcgtcgatgcaagttgagacgtccctgcctggctgcctggctccctgccgcaaccgcatcaacgacgcacggcgccacggccacggcacggcaccacgcgctcagacgtccacgggctaccaaccccagctcaccgcactcaacccattgctgccacggcgatcacctcacccaccccgcgcacttttctcatcgcgccaacgcaaacaccacagcgcagcagcaagcgagctaactggagtacaaagcaagccaattcgctctgtgcctgtgccgctgcctaccgtcgcgcgagacgggcgagctcctctcccggccgccgacgccgcgggggattccttttccccggaatgctctgccgctccgtccgggcggaagaggagcactaggcggcggctcggatggggcgcccggggtacatcacggtgcccatactctcggtgctcgccgcgatcggctatgtctactacaccacggtgttcctggcgatccccgcgtggctggggctctcctcggcgaccgggctcgccaacgccgcggtcttcagcgcgctcgccgccgcctgcgtcgctacctacgccgtcgccgtatcgcgcgacccgggccgcgtgccagcgtccttcgtgcccgatgtcgaggacgccgggagccccatccacgagatcaagcgcaagggtggtgatttgagatactgccagaaatgttcgcattataaacctcctcgagcgcaccattgtcgtgcctgcaaaagatgtgttctaagaatggaccaccactgtatatggattaataactgtgttgggcatgagaactacaagatattcctagtttttgttatgtatgctgtaattgcaagcttctattctatggttctcattatagggggtgctgtgcatttacctaaagatgaacaaccaagcagtgattcttctagaacatctatagttgtttgtggggttcttctgtgccctttagcattggcactaatggtcctattgggttggcatgtttacctcatcttacataataagactactatcgagtatcatgaaggagttagggctacatggttggctgaaaaggctggaaacgtttatcatcatccttataacctgggaatctatgagaacctagtttcggtgctaggtcctaacatgttgtgctggctgtgcccaatatcaaggaacatcggaaatggtgttcgtttccgcacatcatatgacactccactatcaacttcagcaatgtgatgcacaccatatagggacagctgatcaagaggtcgtctggctacgaaccttgggaatgaccctgcagagtagtaatcgtctggcacagcattatagacagtcaatgcaaggctgggctagcgaatcacttcctgcattggctgaaaccctgagcgagaggcagaatagtctgcacgcatactcggaggcccggcgcagaccgtaaagcagtacctctgttgaccagcagcgtatgcctctttactgtgaaggc

SEQ ID NO: 112460 - DNA, 950 bp, Zea Mays
cactagcgtgtcttctccattcccatggattggactttatatttgtctattcaaaggactaactgaagtccaggtcttatctggtgtggtttatgttgtttttcacatatccatttctttattactgggtttgtcgtattaagcttatgttatagatatattctcttgaaattgttgtttctgggttcattgcttaaatacaggaggtgaccaattattaccaaggaccttccaacattttgttgtttttcttatacaggtgctaggtcctaacatgttgtgctggctgtgcccaatatcaaggaacatcggaaatggtgttcgtttccgcacatcatatgacactccactatcaacttcagcaatgtgatgcacaccatatatatctgctaaatcgcaaaagaaactcaggtgcccacacaaagtgctaggtttgctattcttcacagttctgatttttagcatttaaccaaagcgtttgtgtatccttaaaaggagagtgttttccaatgcttgaacttttgtagtaagggtgtgctacatcaaatccagcgtgtttaggatactgctacatacatcaaatcctaaagcctcctagaatctgtcattaggaatttttagagatgctgacatacttagatttttctctctttttggggacattcttgatcaaataagtaattattgcttgtgtagtagactagagtgggctgtattaacacacactaaaaaaaacggaaagaaaaggaaagatgtactcgtggttgttctgttgtaaaattatgtccaaactggtttttttttgtcgtgaaagctcgtcagctcgtgtattgttttgtcagatagtacataggagtaatgagtgttaaggaccaatcaaccaaatactattttatgtatacacttgttgagaaatacacgtggatatagctgtttgcacatatgggtgt

SEQ ID NO: 112461 - DNA, 183 bp, Zea Mays
attaacgtcactaaaacaatcaggcttgattggttgctgcagcagctccaaggcattctagactggaggtctcaagttcgattccttttaaatgcatctttttttgtgcaattactaggggcaacaacgtccaaatctcagacccacgcgcgctatgacttctttttgtgcacgctcggtcac

SEQ ID NO: 112462 - DNA, 759 bp, Zea Mays
atggcgaacctagaggccacagtcaaggatttggggaccgatcaaagcgattcccagaagtggaggccggggatcgaagcgaaggtggtggagatgacggaggcgcttaagtctgtccggaatccggtggtacagaaacagatcggagtttcccttctacttcgtcgggtgaagtcccggcggtggacaacgcctctccctccggaagctacgtcaggcgttgctggtgccgatgcaacccgcattcccactccaatcggaggggcgtccgtgccgctgaacaggacgctgggcttctgctccgcttacggcgggggcgacagcattagcagctgctgcgacgccgcggcggacgccgtgctgcggaagaggtccaatgccatgaacgtctctgatgcgacctgcactggcgtcatcaagtccgtcctctgcgcggactgcagtccatttccggctgattcgttcaactcaaactcaaagattcatagggttcctctcctgtgcaactatacttcctcgtcaataagttctgctcaagcaaaagattctgcacgagactactgtaaactaatttgggaggcttgcaaaaatgtgaaaatagtgaactctccttttcaacctctcttgcaaggaagtgcaagaccgcctagttcatcgtcaaagctcacgaatgtctggcagtcagaagacgattttttgcacatcatttggtggatcatccggcaacggatcatatctgaacatggcttcgcatcctga

SEQ ID NO: 112463 - DNA, 252 bp, Zea Mays
cgaaaattccggtctgctcttgaaatcagccttaacttgtgctaaataacatgaatatcatttttacattcacaactttccatgtttcgagtgacttgcagtttaaatctgaattatccgaggaaattcaattaaacgaacaaaatctaatagttatagtaaacacttttataattttgctaaaatgaaacatataagtctacacagtgtaggaacaaaccacaaaaattttgtttggaaaaagaaaaaaaa

SEQ ID NO: 112464 - DNA, 920 bp, Zea Mays
gatttatcaacatgcaaattctattgtgaaagtaattctcacggttaatctagaagcttgtaaatctcattatgatgtcacattagtatataaattctctgtgtgcatgtctttctgtgacacacaggagctattacaagtgcacgagctcccggtgcggcgcgaagaagcacgtggagaaatctatggacgactcagagatgctgatcgtcacgtacgagggttcgcacctgcacggcccacagccgctcttcccgcgtcgacagtggctgtcggttgacctgtccggcgcgggggtagcggcctcgaagacgaagcagcagcagaccaggtcctcctccccggccgcgtcagccacgctcgcaagcgacgacgggggcggcggctggccaccgagcctgcaaataatgacgcgcaacgccgagacgcgaggaggagggctcacggctgatgcaggcgagagcgagacgacgccggggcttcagagcggacgcacgggtgtgaccgcggactcgtgcgacgatggctccaccgcctccgtgccgccgccgccgcagactgctccctcgtttcactgtgactcgccgcctacgacctggtcctggtcgtgccttgactacaccctcgcctggtcccctgaagctcctctgcttcagtagaagccggtaaactagcttgtttaggaacaggatatgcatacatagatctcaaagagatcgaaagataagagaccccagctgtttattatattccatgcaaaaaaaaaactcaagtgactaaagccagaacgctgacgtgaagctacctaagttggtgcagcgacagtgataaaaaggctaagcacttttctagttaaccagctatactattattgtacagtgatatatatagatgccaatgtgtgcccttagcactagtaa

SEQ ID NO: 112465 - DNA, 2219 bp, Zea Mays
atcgctaccactgcacccctcaaacccagtgacccaacccactacacatcggagtctcgcgcgcgggctcaagcacttgttcttagctgcttagctgctttcttcgttgtaggaactgcaacaatggctaccccctaccgtcttccttgctgctgctatgccctcgtcactgtgctcgtgctcttcttctccgtcgacgctacggagggcgccatcagggagtaccagttcgatgtgcaaatgaccaatgtgacgcggctgtgcagcagcaagagcatcgtgacggtgaacggccagttcccggggccgacggtgttcgcgagggagggcgacttcgtcgtcatccgcgtcgtcaaccacgtcccctacaacatgagcatccactggcacggcatccggcagctgcggagcgggtgggcggacgggccggcgtacatcacgcagtgcccgatccagagcggccagagctacgtgtacaagttcaccatcacggggcagcgcggcacgctgtggtggcacgcgcacatctcctggctgcgcgccaccgtctacgggcccatcgtcatcctgcccaagcccggcgtcccttacccgttcccggcgccctacgacgaagtccccgtcttgttcggggagtggtggacggcggacacggaggcggtgatcagccaggcgctccagaccggcggaggccccaacgtctccgacgccttcaccatcaacgggctgcctgggccgctctacaactgctctgcaaaagacacgttcaagctgaaagtgaagcccgggaagacgtacatgctccgcatcatcaacgctgcgctcaatgacgagctcttcttctccatcgccggccacccgctcaccgtcgttgacgtcgacgcggtctacatcaagcccatcaccgtggagaccatcattatcacccctgggcagaccaccaacgtgctcctcaccaccaagccgtcctaccccggcgccacctactacatgctggccgcgccctactccaccgccaggccgggcaccttcgacaacaccaccgtcgccggcatcctcgagtacgaggaccccacgtcgtcccctcccccgcacgcggccttcgacaagaacctcccggcgctgaagccgaccctgccgcagatcaacgacacgagcttcgtcgccaactacacggccaggctccgcagcctggccaccgcggagtacccggccgacgtgccgcgggaggtgcacaggcggttcttcttcacggtcgggctgggcacccacccgtgcgccgtgaacgggacgtgccagggccccaccaacagcagccggttcgcggcgtccgtgaacaacgtctccttcgtgctccccaccacggcgctgctgcagtcgcacttcgccggcaagtccaggggggtgtactcgtccaacttcccggccgcgccgctggtcccgttcaactacacggggacgccgcccaacaacaccaacgtgtccaacggcaccaagctggtggtgctgccgtacggcaccagcgtggagctggtgatgcagggcaccagcatcctcggcgccgagagccacccgctgcacctccacggcttcaacttcttcgtcgtcggccaagggttcggcaacttcgaccccgccaaggacccggccaagtacaacctcgtcgaccccgtcgagcgtaacaccgtcggcgtgccggcggccgggtgggtggccatccggttccgcgcagacaatccaggggtgtggttcatgcattgccacttggaagttcacgtcagctggggcctgaaaatggcatggctggtgctggacggagaacgccccaacgagaagctgctgcctccgccatcggatctgcccacatgttagacgacacgaggaattgctggcctagtcgtcgccatcaacggccgtgattgatcggcccggaccatcttggaacagggattgcgtgctctctaatttgcacaggatatcttaccgtcttttgcttgtgctggggttggtgttatgcttccatttagtggtgtgctttttccggcttgagtcgtcgtctggttagctgtgtgagagacacgggcaggaaggtccgctgatgctactagacagacgccatttatttttttgattacttatgagttactaccatcttttgtactgcctcggtcctaaaataattgacattcttgtttttaaaaagtcaaacattcaacggt

SEQ ID NO: 112466 - DNA, 183 bp, Zea Mays
aaaatggctttaatccaatttgcagtaacggtaacagaaacgggggcaaacgtgttttccgttttcaaaaaagaggcccgaaatcacaaagtcgaattttgaggggcaaaatcacagttgcactttcatccagggacaggaacacaattgcccctttatgctatatattgatactaaatatgc

SEQ ID NO: 112467 - DNA, 3029 bp, Zea Mays
cggactaaaccctaccgcccttcgtctctggtccatgatggggccctcgaccatggcggcgcgggcagcgggctgctgctcctcggcggcgctcgccttcttccgtctccaccccctccgatgcgccgtccgcccggccgccgctctcgttggagggtgctcctctggcctccgcggcggctgccggagccgcctggcgcatagcatcgtggacttggttatggaggagctccgctcccgccggcgcgtccgggtctcggcgaagataggattgcagggcacgaaggaattgcctgacaataagatagtcaagagaacattacagaaaggattgctgcttgaatttcagaaagatcctgagagatctttgcttgctgtagttgaaaggcctgatggaaagaaaaactggatggtgactgatcaggtcgtttttgaacggatagctattgcttgtccagttgactatccagtttagttaatttatacctgaacatacatatattgttgttatgggttctctggtgacatgacttttacttttgtatagaatggtgtcatgtcttcgataaagccccagcaggttacatatgttgtacctggtatcatgaattttgactattcaaaaatagacgaatttcttgagaaaacgcaaaatcttttggacccaactattttagaatgtgcttggatggagctgtctgagaaggataaatcaataacagttgaggaatttgcagagatagtgtatggtaccaaggagtctttggaaagctactgtgcacatctcttgttgtcaagggatgtagtgtattttgtcaaggtagagagcagagattattccatgtaccaacctcgttcacctgctcaggtagaggaactcctacgacggaagcttgctaaagaggccgctgataaggaactggaagaatttgtccatttactcaagtctgccaaagcattgcctatggagtccaagcctcctaaagcgtcatggttggtggaagaaaaagtcaggcaaaaaatcgagtctcttcaagcatatgcagttgatgcatgtgatgatgaacaaagaagactagcaggaaatattctcaaagctatgggattcacgaggacatcatcagctgctctaaagcttcttataaatgttggatacttccctgtgcatgtcaatctcgaccttttcaggtacgatgtccgtataaggtacacagatgaagttttgtcagctgcagaggagcttctggtggacagccctgacacagacatgcatatcaggaaggatctttcaactttgaaagtgtacgccattgatgtagatgaggctgatgaacttgatgacgcattgagcgcaaccaggcttcctgatggtagaataaaggtctggatacatgttgctgacccaacatgcttggtcaaacctcatagcatcattgatagggaggcaatgcacagaggaacatcaatctttctaccaaccactacttttccgatgttcccagagaggcttgccatgaattctatgagcttgcagcagggtaaagaatgcaaatctgtaactgtatctgttattttaaacctagacgggagtattgcagaatatactttagaaaattcagtcatcaaacctacttatatgttgacatatgagagtgcaactgaattgctttacatgaacctggaagaagaggaagaactaaggattcttcaagaagctgctaggattcgtgaacagtggcgtcgtagccagggttcaatagacactgcgatgatagagccacgtataaaggtgtcaaatcctgatgatcctgaaccaaatatcaatctatatgttgaagatcaagccaatccagcaatgcagcttgtatctgaaatgatgatactttgcggtgaggcagtggctgctttcggttttgacaacaacctccctttgccatatagaggtcacccccagtccaacacagcagtgtcagtgttctctcatctacctgaggggcctgcaaggagctttgccaatatcagcgtgctccgtgctgcagaaatggattttcaaaaacctgtaccacatggtgtacttggtattcctggttacgtgcagttcacctctcctatccgaagatatgttgacctgctagctcattatcaggttaaagcttttcttagaggtgactctccaccatattcagctggcgatctagaaggaatgacatttattgcgagcatgcatgttaaagtagctaggaggcttcatagcaatagcttacggtactggctgttggaatacttgaggcgacaaccaaaggggagaaagtacagagcactgattctgaagtttgtcaaggatcgtatgggagctctgcttttggtggaggttgggatgcaagttacaacgacaatttcacgtgggaaagtgggagatcaagtcagtgttactgtggaaacagctcatccacgtgatgatatattatcagtcagagaggttgtagaggacaccaaggattctgagtaaatgcatgtgacgatagcttatcagacaaagaggttatagaggacaccgaggattctgagtaaatgcttgcaaagctcactcgcactttgcagtcttgtgttcctctgccgtttactgctgttcatttttgtggcagtgatataggcgatttattaccttggaaaatatctgctgattcttcaagttagcgacttgcgtagcatggctacaatacaaatggtaaaaggactagggtattggtcttggtgccaaagctcattccaattcgaggacgaaatgatgaaatcataggtggttttcattggtatacagaatacagtccgacagttcgtttcttccgaggtaggttctctttgtgccgaacaaggttccaagtgctgataactgggaattttgtatagctgaacacgcatgcaacatttttgtacctgaatttggtacctctgacgttgtcggcacattctgctatatttgaacactgaggtggatgatcgatgtacagaataataataattccaat

SEQ ID NO: 112468 - DNA, 2917 bp, Zea Mays
cggactaaaccctaccgcccttcgtctctggtccatgatggggccctcgaccatggcggcgcgggcagcgggctgctgctcctcggcggcgctcgccttcttccgtctccaccccctccgatgcgccgtccgcccggccgccgctctcgttggagggtgctcctctggcctccgcggcggctgccggagccgcctggcgcatagcatcgtggacttggttatggaggagctccgctcccgccggcgcgtccgggtctcggcgaagataggattgcagggcacgaaggaattgcctgacaataagatagtcaagagaacattacagaaaggattgctgcttgaatttcagaaagatcctgagagatctttgcttgctgtagttgaaaggcctgatggaaagaaaaactggatggtgactgatcagaatggtgtcatgtcttcgataaagccccagcaggttacatatgttgtacctggtatcatgaattttgactattcaaaaatagacgaatttcttgagaaaacgcaaaatcttttggacccaactattttagaatgtgcttggatggagctgtctgagaaggataaatcaataacagttgaggaatttgcagagatagtgtatggtaccaaggagtctttggaaagctactgtgcacatctcttgttgtcaagggatgtagtgtattttgtcaaggtagagagcagagattattccatgtaccaacctcgttcacctgctcaggtagaggaactcctacgacggaagcttgctaaagaggccgctgataaggaactggaagaatttgtccatttactcaagtctgccaaagcattgcctatggagtccaagcctcctaaagcgtcatggttggtggaagaaaaagtcaggcaaaaaatcgagtctcttcaagcatatgcagttgatgcatgtgatgatgaacaaagaagactagcaggaaatattctcaaagctatgggattcacgaggacatcatcagctgctctaaagcttcttataaatgttggatacttccctgtgcatgtcaatctcgaccttttcaggtacgatgtccgtataaggtacacagatgaagttttgtcagctgcagaggagcttctggtggacagccctgacacagacatgcatatcaggaaggatctttcaactttgaaagtgtacgccattgatgtagatgaggctgatgaacttgatgacgcattgagcgcaaccaggcttcctgatggtagaataaaggtctggatacatgttgctgacccaacatgcttggtcaaacctcatagcatcattgatagggaggcaatgcacagaggaacatcaatctttctaccaaccactacttttccgatgttcccagagaggcttgccatgaattctatgagcttgcagcagggtaaagaatgcaaatctgtaactgtatctgttattttaaacctagacgggagtattgcagaatatactttagaaaattcagtcatcaaacctacttatatgttgacatatgagagtgcaactgaattgctttacatgaacctggaagaagaggaagaactaaggattcttcaagaagctgctaggattcgtgaacagtggcgtcgtagccagggttcaatagacactgcgatgatagagccacgtataaaggtgtcaaatcctgatgatcctgaaccaaatatcaatctatatgttgaagatcaagccaatccagcaatgcagcttgtatctgaaatgatgatactttgcggtgaggcagtggctgctttcggttttgacaacaacctccctttgccatatagaggtcacccccagtccaacacagcagtgtcagtgttctctcatctacctgaggggcctgcaaggagctttgccaatatcagcgtgctccgtgctgcagaaatggattttcaaaaacctgtaccacatggtgtacttggtattcctggttacgtgcagttcacctctcctatccgaagatatgttgacctgctagctcattatcaggttaaagcttttcttagaggtgactctccaccatattcagctggcgatctagaaggaatgacatttattgcgagcatgcatgttaaagtagctaggaggcttcatagcaatagcttacggtactggctgttggaatacttgaggcgacaaccaaaggggagaaagtacagagcactgattctgaagtttgtcaaggatcgtatgggagctctgcttttggtggaggttgggatgcaagttacaacgacaatttcacgtgggaaagtgggagatcaagtcagtgttactgtggaaacagctcatccacgtgatgatatattatcagtcagagaggttgtagaggacaccaaggattctgagtaaatgcatgtgacgatagcttatcagacaaagaggttatagaggacaccgaggattctgagtaaatgcttgcaaagctcactcgcactttgcagtcttgtgttcctctgccgtttactgctgttcatttttgtggcagtgatataggcgatttattaccttggaaaatatctgctgattcttcaagttagcgacttgcgtagcatggctacaatacaaatggtaaaaggactagggtattggtcttggtgccaaagctcattccaattcgaggacgaaatgatgaaatcataggtggttttcattggtatacagaatacagtccgacagttcgtttcttccgaggtaggttctctttgtgccgaacaaggttccaagtgctgataactgggaattttgtatagctgaacacgcatgcaacatttttgtacctgaatttggtacctctgacgttgtcggcacattctgctatatttgaacactgaggtggatgatcgatgtacagaataataataattccaatatcatttcctt

SEQ ID NO: 112469 - DNA, 2349 bp, Zea Mays
gtcgagccccgaaacccgcccggcacggcgcacgcgaacgcggtcacgcgccgcgcacatgtgcccccgccgtctccccgcaaaagcgcagcgccaccgtcccgccgccgccgccgcccgttggtttccttcgtttttttcccgctccacgccgccgcggaggcgcgatcgcgtgcgagaagccctaactcgagctctggactccagcccagagcccgggcgacgcgtggtcgcccatactcggaggtcccgggtccctggaggcttcgatgcagaaccacgcgtacagccggctgggcatctcggggaccggggcggtcgtgccgtcgcctccgtcgtcgccgcggcgcgcgtgggggaggagggcctcggcgaagggaggatggtctgcgagggccagcgcggacgcgggctggggcgggggcgcggtgcggagggttgcgcgagcggtgcttgcggcgctgctgcggcggcaggctgtgttcctctttgcgccactgctgtacgtggcggcgatgctgctctacatgggctctatctcgctcgacagtgtgccccgcatcatcccgcgcccggcgcccgggtcaatgtaccgcagcccgcagctctacgcccgtctccgcgccgacatggacgccgataatgccaccgacgcgctagcagctgtatggcggcatgcttacagaggtggtgtttggagaccttgcataagcaataataccaatggcttgcctgaatcaaatggctacatatacattgaggctaatggtggtttgaatcaacaacgaacatcgatttgcaatgcagttgctgttgctggctttctgaatgcgactcttgtaatcccaaacttccattatcacagcatttggagggatcctagcaaatttagtgatatctatgacgaggattactttatcgaacgcttaaaaaatgatgtccgggtgattgacaaggtgcctgagttcataatggagcgatttggtcacaatctgagcaatgcatttaatttcaagataaaagcttggtctcctattcaattctatgaagatattgttctccctaagttgatcgaagaaagactcataaggatatcaccttttgcaaaccggctgtcatttgatgctcctccagctgttcaacgtctacgatgtctagcaaattttgaagccctaaaattttctaaaccaatcactactatatctaacactttaatttctcggatgagagaaaaaagtgctgaaaataatgggaaatatgtagcagtgcatctccgctttgaagaggatatggtagccttctcttgttgtgtctttgatggtggtgacaatgagaagaaggaactggatgcagctagggaaaaaggttggagagggaaatttacaaggccaggacgtgtaataaggcctggagcaataaggatgaatgggaaatgtccactgactcctttggaggttggattaatgctgcgtggaatgggttttaacaataatactgcaatatatttagcttctggaaggatatataaagcagaaaagaacatgtctcctctccttgaaatgttccccctcttgcagacaaaagaaacattggcactggatgaagaacttgctccattcaagaacttctcctcaaggatggcagctattgactacagtgtctgtgttcatagtgaggtttttgtgaccacacaaggtggaaattttcctcattttcttattgggcatagaagatacttgtatggtggccatgcgaagacaattaagcccgataaaagaagattggctatactctttgatagtccacgtattggatggaagtcactgaaacgtcaattgttcaatatgagagcacatagtgacgtgaagggtattgaaataaaaagagcaaatgaatctgtatacacctttccatgccctgattgcatgtgccgttcaaacaaatgagaaactccaaatccatcatggccagatagcatctaaaagttgtatcttgactcactgaccccatttctttctcagtgtcacggcatacccacccactccttaatcttcatatgcagtgtggtggtgagatgttccatgtcctctaagcatcccgactgagatatattgaatctttacatttaaccctggcactaacaatacactgatccatgtctagaatgtatgtaaccatatctagggctattccttaacagccagtgttaatctgtttgtgtagtactaagatcccttgtcctccttgtacattgatgaaccatgaagaaattgtcatacacaattttgtagcaagacgaatattgtttattttgccttttttttactaatttctcaagtatactatctc

SEQ ID NO: 112470 - DNA, 5253 bp, Zea Mays
tacacacccacgccattattcccacacctcaacctcaagtcacattcagacagcaaagaaaacctcaagcagagaaccgtgattccgtgaaccaccgtagaggaaaggcgagggggagaaaagaccaaaatattcccctctcatcaggcaacccccgtttcttctcttcccctcgtggcctcgtcgtcgtcatctgtctgctcctcgctcctcactcgtcactcccctcactccccgttccactgctcctccactggcggcgagatggcgagaggcttgggggccgctcccgtctcgtcgtgcctcgcgctcggggcagcggcggcggtgctgctcgtggcggcggcgctgccttccccggcatctggagtcgacgtgacggccgtgctctcggcgtttcccaacttcgcggactttgcgcgtctgctggcatccacccccgtggccagcgagctgtccgggaggtcgtccctgacgctcctggccgtgccgaatgccaacctgccgcagtcaccctcggctttcgtagctagcgctggcgccgacattgccgacgtgctgaggtatcacgttctgctggagtacctcttcccgttcgacctcgcccgcctctctccctccgggaagctcgtgacgacgctgtttcaaaccacgggccgcgcgccctccgacttcggcgccgtcaacctcaccgtggggggcaactccactgtcgtggtccgctctccggcgccgtccccgggatcgaatgccacagtcctcggcgccgtgaccgcggttccatacaatctcagcgtgctcgcggtgggtggccttatcataccttccggattcgacctcgccgcctctgagagccgcccgccaccgccggtgaacatcacccgggttctcaccgacgcgcgggggttcaacgttgcggcctccatgttgcaggcctccggtgtagcgagtgagtttgaggccgacgagcacagtgctggcatcaccgtcttcgtccccaccgacgacgcctttgccggcctccccgccaccgaccgcctccagtccctacccgctgagcgcaaggccgtcgtgctccgcttccatgtgctgcactcttactacccgctgggctccctcgagagctctacggcgtccgccacgtcctccacgctcatcgacgcctggggggagcgcttcgtggcgctggaccggggcagcctccgccacccgcagtggcaggaggtcgccgaggtcgtctcctctcgcgacagctactccaaggcgcccaaatccgacgtccagtgcaagaaccgcatcgacacgctcaagaagaagtacaaggtcgagaaggccaagcacgactccgactggcgctacttcgaccgcctcgacgacctgctcgctcccgtgctgctcaagcccaattcttcttcttcctcggctgctgctgctacggcggcggcggcagcccggagcgccgggcccatggtccctccgcgcatcaacttcccgcagcgcacccgcacgcccctccactcctccgcgggggcaaagtggaggatgccgtcgccgttgccccagccgtcggcgtcgtccgactcctccgacgggttcccgccgtccgcggtggcgaacggcaagaggcagcgcgtggaggagcccgccgccgccgccgcggacaacggcgcggagagcagcgtcagccgcgcgcagggtctgcgcgagctggcgcaagcgatccggcggctaggggaggtgtacgagcgcgtggagagcgccaagagggatcaggagctccggatggagcgggagcgcctggactccgcccggcagctggaggagcagcgcgtgcagttctccactagcatgccccgcagcagtcgcattaccagaacagcacaagccccaccgggggcgatgacaacggcagcgactcggacaaggaagctcaggaggatgcggaagacgaagaggaagagagccagtgattgctctcctcttcagcaatggaatggcatcgtgcaggcatccatcacccgtacagtgttcgaccaaaatcctgtggcagtctttgccgtctccaaggttctactgcccaaggaaatgttcggtcgcggcgattctggcaacactgccatggcaccaccttcagttgcgatggcaccccgcgacgccgggagcgagaagacaccacagacaaggctctcatccccgcctgacctccacagcgaagatagcgagtcatcagcttccttgctgacagcaaaggggacttggtggtgtataggactcatgtatctacagctgcatctattactatctctggtatgagattctggtcgtgcttgttgcttgcttccttgtgctcagtttttgtactttttactctctagaatgtctacaccaggaaaaggacggattggggagagaattccttagatgcaaagtagcaaaatagttgcttcacctgattattctatcttttcattttgccatgtggcaaatggaaataatatcatgcatacaaatctgtgcagtccttttgctccaaaatgaatagtattttctattttgagcatccttctctttttatttgtgcttgaactcaactttagcggttaaagtgggggcattttgcatcaggttagatttgaaggagtgaattcgatagagcccctggattactagggtgaggggatatatcaccatgaaatgtacaggttgttcgcttcggattaaagccggccagctgcaatccataaagacaaaaacattgtaaaagtagtagaaataggtacagattaaagccaagcgaacacttctgcccgggctgtgttttccatggtcttgtaatgctgttatggtctgaatactcatgatagaatgaagttactctaccatgttagaattaggtcatttcactattttgactctagtggcagaactcagatctcatgaatgtcaatctgcttgttagctgaggtcccaactgtaaaagtttttttatgtgagcttattggcagcagacacctctgcctaccaaagatatttgttggtgtaaatttacatacacccgttgagcactctaggtggaatggtggattcactgaatctcatctcaagatccagcactttgttagtgtcttggttattagtggtttgagttatataatagaatgttgtatgactagcaacacattgtgaaagttgggaataaaagctttttttctttgtttggagattataaacgtttaggggttggtcataaaataccattagggaaatatattgtatcactgtagtaccgactaccaatcaaattattcaaatagatgtagtaccacatacagagggagagaatatcagggtgagaaatatttgttgatatgtcatttgctacatgttacaactgatatgcctggcattctgtggtgcttcattgttcagcacgagcagttgtttctttgcaggaccactgacaatacataataattcgtttgtagttttcaacttttcatggggaggtggcccatgttttagttgattaggtactgagcctgttctgtcatgtgcagctcatgtgtactttgcaggagtcatgacctcatgggacccaaccctgagatgagatgttggggatgactatgaatctatgatgggctgatgactgaccacatttgaccaattctttgcaaacatgagttctctgttagaactatatattacttatgatcaggtataaaaatagaatcctagagatatagttggtttagacctactacaacttaagtaacaaagtcctacaaggacatgtaacaattgtgttgactatatataatgaacatgggcagcaacctaagggcttaagatcttaagccgttccaactatttccacactatcaatcaagcattgctgcatgatgagatttgttgcacagttcggaatagttgaagtggctaaaacttgatataattaaaactgatttagagtcctagtactattcaatgtggcaccatctctttgccactcaaaaaggcgagcatattagcggtctttatattgggataccatttgctatataagacttataagtgttccagtggacagtagagtttgggtgttttttaccaaagaaatggaatggagtgccatttgtgacatgcagaaaaggtagcattagggaacatttggaccatgtaaggtgtattcagggggtttgaggcttagtgatgttagtagtaggtatgatgaatatatgacagatgactggtttatgttagtcttgtgtggctgctcactcagagtctacgccggaactgtttgttgcatttgcatctatgtcctgcacactcctgcacactcataggtcttgtcaccaagggctgtcttactatagcttgctcttaaggccatcattgtgaactaccgcatgcactgcacttgtcaactattggtacatccaactgttctgatataactatcttcattaatactgaatatgaaactggaatttaccacttgtttcttagtgtttgtagcatatgaatctgatcatttcctccatgtcacttttacaaggcctgctctctatttatagaatctatttgtggcaagatcagcacatgattctccattttctttatgatatatttatattcacaattttgtgtttgcttccatatatcaagattacggcagtaacacaataagctcagttagtggaagctacttttttctttaccattgctgtaaaagttgtattatcaaaggatttgaaagatgcgaaaggagacatgtcacatgctaaaattattgggtaaagcaaaaaatctggagcaactccagatgatccaaagttgtaggacagttttgatgtcagcggagtcttttgatcaatgcagctgtggaagttagtgtgtgactttgtgatcacatgttggcttcatgtatattattgtactttctgttttctgatattattagctatatatatatacgaaggtgaaatgtaaaaaggcaccggtaaaatacatagccatatgctgcaatgacatcagtaaagcattggtttttgctatacaaattcaagaggtagcagcatctccttatctctggttattgatctgatggccagaggtgcaaattcaactagcagaagctgaccagaaaattgaagcattttttgttacctcgatcactactggaggctttgccgaatgttgtattctttgccgagtgtcttttgtcgggcactcggcaaagaaggcttt

SEQ ID NO: 112471 - DNA, 2049 bp, Zea Mays
atggcgagaggcttgggggccgctcccgtctcgtcgtgcctcgcgctcggggcagcggcggcggtgctgctcgtggcggcggcgctgccttccccggcatctggagtcgacgtgacggccgtgctctcggcgtttcccaacttcgcggactttgcgcgtctgctggcatccacccccgtggccagcgagctgtccgggaggtcgtccctgacgctcctggccgtgccgaatgccaacctgccgcagtcaccctcggctttcgtagctagcgctggcgccgacattgccgacgtgctgaggtatcacgttctgctggagtacctcttcccgttcgacctcgcccgcctctctccctccgggaagctcgtgacgacgctgtttcaaaccacgggccgcgcgccctccgacttcggcgccgtcaacctcaccgtggggggcaactccactgtcgtggtccgctctccggcgccgtccccgggatcgaatgccacagtcctcggcgccgtgaccgcggttccatacaatctcagcgtgctcgcggtgggtggccttatcataccttccggattcgacctcgccgcctctgagagccgcccgccaccgccggtgaacatcacccgggttctcaccgacgcgcgggggttcaacgttgcggcctccatgttgcaggcctccggtgtagcgagtgagtttgaggccgacgagcacagtgctggcatcaccgtcttcgtccccaccgacgacgcctttgccggcctccccgccaccgaccgcctccagtccctacccgctgagcgcaaggccgtcgtgctccgcttccatgtgctgcactcttactacccgctgggctccctcgagagctctacggcgtccgccacgtcctccacgctcatcgacgcctggggggagcgcttcgtggcgctggaccggggcagcctccgccacccgcagtggcaggaggtcgccgaggtcgtctcctctcgcgacagctactccaaggcgcccaaatccgacgtccagtgcaagaaccgcatcgacacgctcaagaagaagtacaaggtcgagaaggccaagcacgactccgactggcgctacttcgaccgcctcgacgacctgctcgctcccgtgctgctcaagcccaattcttcttcttcctcggctgctgctgctacggcggcggcggcagcccggagcgccgggcccatggtccctccgcgcatcaacttcccgcagcgcacccgcacgcccctccactcctccgcgggggcaaagtggaggatgccgtcgccgttgccccagccgtcggcgtcgtccgactcctccgacgggttcccgccgtccgcggtggcgaacggcaagaggcagcgcgtggaggagcccgccgccgccgccgcggacaacggcgcggagagcagcgtcagccgcgcgcagggtctgcgcgagctggcgcaagcgatccggcggctaggggaggtgtacgagcgcgtggagagcgccaagagggatcaggagctccggatggagcgggagcgcctggactccgcccggcagctggaggagcagcgcgtgcagttctccactagcatgccccgcagcagtcgcattaccagaacagcacaagccccaccgggggcgatgacaacggcagcgactcggacaaggaagctcaggaggatgcggaagacgaagaggaagagagccagtgattgctctcctcttcagcaatggaatggcatcgtgcaggcatccatcacccgtacagtgttcgaccaaaatcctgtggcagtctttgccgtctccaaggttctactgcccaaggaaatgttcggtcgcggcgattctggcaacactgccatggcaccaccttcagttgcgatggcaccccgcgacgccgggagcgagaagacaccacagacaaggctctcatccccgcctgacctccacagcgaagatagcgagtcatcagcttccttgctgacagcaaaggggacttggtggtgtataggactcatgtatctacagctgcatctattactatctctggtatga

SEQ ID NO: 112472 - DNA, 291 bp, Zea Mays
atggcggtggtgggcgcggctgaggtcaggtggtgcgtcctgctcctgctcctgctcctgcctgcgcgtggcgcacgcgcatgggcaggtggcgccgtggcggtgcgggctctattctttgcgcgctcgagtggctgtgcggcgtcgtccggccacgccgtggcatgtattctggcggcaaccaaaccaacgtgcagcgtgctgcctcatttcagtatgatgactaagcagtttatgatgctgcacggatgcatgaatcatgaatggatggagaagtctgtgatagaatag

SEQ ID NO: 112473 - DNA, 1707 bp, Zea Mays
gtatcacagtcagaattaaatccacgagacgtatacgctcgcctggctcttggccggacgcggcggcgtgcacgttcgatccatgcactcacacgccggccgagtccgccggacgtcccggtgcttatcgcgacgacgacatggctgcacggcgcgcgtgcgggggaacacgagagggctccagcctccaggcctttgactacaaggcgacagcccagcccacaccgacgaaatgcggctgccgttacagcgcacgagcacgcgccccgccatcacactctcatgccatgccatgcacctcctctttaaaaccccgcacgcccccacgccgcgcgcacacacacacatcgcctccctcctcctccccaagagccggcacagaggcaaaggccagccctccagtgacaggcagatcgaggccacatggagacgccacagcagcaatccgccgccgccgccgccgccgccgcccacgggcaggacgacggcgggtcgccgccgatgtcgccggcctccgccgcggcggcggcgctggcgaacgcgcggtggaacccgaccaaggagcaggtggccgtgctggaggggctgtacgagcacggcctgcgcacccccagcgcggagcagatacagcagatcacgggcaggctgcgggagcacggcgccatcgagggcaagaacgtcttctactggttccagaaccacaaggcccgccagcgccagaggcagaagcaggacagcttcgcctacttcagcaggctcctccgccggcccccgccgctgcccgtgctctccatgccccccgcgccaccgtaccatcacgcccgcgtcccggcgccgcccgcgataccgatgccgatggcgccgccgccgcccgctgcatgcaacgacaacggcggcgcgcgtgtgatctacaggaacccattctacgtggctgcgccgcaggcgccccctgcaaatgccgcctactactacccacagccacagcagcagcagcagcagcaggtgacagtcatgtaccagtacccgagaatggaggtagccggccaggacaagatgatgaccagggccgcggcgcaccagcagcagcagcacaacggcgccgggcaacaaccgggacgcgccggccaccccagccgcgagacgctccagctgttcccgctccagcccaccttcgtgctgcggcacgacaaggggcgcgccgccaacggcagtaataacgactccctgacgtcgacgtcgacggcgactgcgacagcgacagcgacagcgacagcgtccgcttccatctccgaggactcggatggcctggagagcggcagctccggcaagggcgtcgaggaggcgcccgcgctgccgttctatgacttcttcgggctccagtcctccggaggccgctgatcatgggactgaggtagagcgagctcgagtgatgaaagccgagccagacgttcgtgtgatctcgagtcgtcgtcgatggacccggttgccgttgccttttgttgggttattgcatgcatggtgtgcttcatcaactactggaagaagcctgtgccgatcgaaccaaaacagtttgcattgttgagttccgtaccgtcctgtagcaacaatgtagcggagaaatgctactagtagcttctttttcatgcttccccatgttgatcgtttcttagtagtaatagccgagtaagagcaactcaggtagctctc

SEQ ID NO: 112474 - DNA, 1144 bp, Zea Mays
gccgcagttccccttcagcgtcgacagggggtttgtgcggtcgcaccggatgcagcggctcaccgaggcagaccttaggaggtgggcggacctgactgggagggagctcaatttcatcatcccacaggaagccagtgatttcgggacatggaggaccattccaaattcagagcttgagcttgagaagccacaccctgtcatgaagagcaacggcacccaaaacccaaagaaaacaggcttgaatctgtcgtcaccgtccaatcattcaggcgaagatggtatggatctctctccagttagcagcaagcgtaggaaggaattgtccccacaggccatggatgaggaagtattcttcccactgaattcttgccctcagaagacacaacaagatgtggagatgcactcaccaacgcagcctgctgcgtggctccatgagtttactggggtgatgagaaacgcctgtgggccagtgactgctgccaagtctatctatgaggatgaccagggctacttaataatggtcagcttgccgtttgttgatcagcagagggtgaaggtttcgtggaggaacactctgactcatggcattgtgaagatcgtttgtgttagtactgctaggatgcaacatataaggagacatggcaggatgttcgcgcttgccgatccttccccagagcattgccctcctggtgatttcattcgtgaaatacctctagctactcgtatccctgaagatgctaagctggaggcttgttttgatgaggctgcctcagtgctggagatcatggtcccaaaacgagggaatgaacctgaagaacatgaagttagggtctctctgcgaccccctcactacggagctaatgatctacttttgacctaagctatctctgcaccatgctacatcttctttgtaaccccagattaatgccaaatttagctgagaatcaaggtttcagtatgcttgttctttgcctaatgtttccagtacttgtgccatactatgtctcttcagcgacgaagacttgctgaagactagtttattctagcttctgtgttatgggtgtctttttaaccctcatgtttagattttgtactaagttcagttaaaagaaataatattctgagttgccactggtttgttttg

SEQ ID NO: 112475 - DNA, 1218 bp, Zea Mays
acccaccccacgtcctataaaactaacccacctaaaaccacggtccacgaccctcgcttcacttgtcacggactcgcgtccacaaaccacaaccagctcactcaagaacaaagaacccaacccatggcttctcccaagccgctcctcctgctcgccacctcgttcctgagctgcggcctcctggtggccgccgactacgccccaatgaccctgaccgtggtgaacaactgcccctacccggtgtggccgggcatccaggccaactccgggcacgacgtcctggagggcggcggcttcttcctcccgccgctctcccacaagtccttcccggcgccggcccacccctggtccggccgcatctgggcgcgcacgggctgcgcgggcgccggcgcgcagctccactgcgccacgggcgactgcggcgggcggctccagtgcggcgggctcggcggcgcggcgcccgcgacgctggcgtaggtgaacctccaccacggcaacgaccagacctcgtacggcgtgagcgtggtggacggcttcaacgtgggcctgtccgtgaccccgcacgagggccgcggcaactgccccgtcctcgcctgccgcaagaacctcaccgagacctgccccggcgagctgcagctgcgctccccggccggcagcgtcctcgcgtgcaagagcggctgcgaggccttccgcaccgacgagctgtgctgccgcaacatgtacaacagcccgcacacctgccgcgcctccaagtactcggagttcttcaagcgagagtgcccgcaggccttcacctacgcgcacgacagcccctcgctcacccacgagtgcgccgcgccgcgcgagctcaaggtcatcttctgccactagagctcggagggctgggctgggctgggcgcgccgcgcccgcccgtgcgccgccgccgccaacaagtgtcgctagtagaggtagtaggatgcctggaatagctgtgggcctgtgggctgtggctgtgttcccgtcgtgtctgtggcggtgtggcctgtgtaggctgtctgtactctgtagtatactgggttgttggatgcatgcgttctggccgcaagactgatgtcatgctgttgctgcttactacagtttgcagtctgaaataaaaacttgtttgatgagcactgtaatgatcgttcgcgtatgctgaatcacttgctatatacttcgatcggttacatttgcgatgg

SEQ ID NO: 112476 - DNA, 238 bp, Zea Mays
tgccgctcctatggtgtccggccagctctcctgctcttctcggttgcctgcgtgtccatggcgcgtcttctcccctgcgcacagccacacctggttctctgctcgccacgtgcgcagttccctgcgtgcctagtgtcgcacgcatgctcccaggtccgcagcaccagctgcctgttctgcttgctcgtgtctgcgcgccgctgttgcccagctcggatccccctcgctgcgcgctgag

SEQ ID NO: 112477 - DNA, 137 bp, Zea Mays
cccacatggatctccaaatcctaacacatattttgtaggatccatgagccatcatcagaagaacacaaaccacgtgcagacaataaataaagtattaacacacccaaattatgttcagtccttagcataacaaaaaa

SEQ ID NO: 112478 - DNA, 685 bp, Zea Mays
agcggtgcattagcaggcaaaggcaccctaccagagtaccagtcaacagccaccgtttcgatcttcgccacaccgctcggcgctcgcctccgcctgattcccatctttcccgagctccacacctcacgtctataaataaggcgcccgcggtgcccatcaattcgcgtcaccgcgtcccgagagcgcgattcattccgcgcgacgcaaaaccctagcccatccaccgatccttgtcatggcggccaccaccagccaggcgagcctcctcctgcagaagcagctcagagatctcgccaagcacccggtggatgggttctcggctgggctggtcgacgatagtaacgtattcgagtggcaggtcaccatcatcggcccgcccgataccctatatgatggagggtacttcaatgcaataatgagcttcccagaaaattacccaaacagcccgccatcagtcagatttacctctgaaatgtggcatccaaatgtttattcagatgggctggtgtgtatctctattcttcatccacctggtgaagatccaagtggttatgagctcgcaagtgagcgttggacacctgtgcatacagttgaaagcatagttctgagcattatatcaatgctctctagtccaaatgacgagtctgcagcaaacattgaggcagctatatccttcgattgttaa

SEQ ID NO: 112479 - DNA, 1163 bp, Zea Mays
tgcattagcaggcaaaggcaccctaccagagtaccagtcaacagccaccgtttcgatcttcgccacaccgctcggcgctcgcctccgcctgattcccatctttcccgagctccacacctcacgtctataaataaggcgcccgcggtgcccatcaattcgcgtcaccgcgtcccgagagcgcgattcattccgcgcgacgcaaaaccctagcccatccaccgatccttgtcatggcggccaccaccagccaggcgagcctcctcctgcagaagcagctcagagatctcgccaagcacccggtggatgggttctcggctgggctggtcgacgatagtaacgtattcgagtggcaggtcaccatcatcggcccgcccgataccctatatgatggagggtacttcaatgcaataatgagcttcccagaaaattacccaaacagcccgccatcagtcagatttacctctgaaatgtggcatccaaatgtttattcagatgggctggtgtgtatctctattcttcatccacctggtgaagatccaagtggttatgagctcgcaagtgagcgttggacacctgtgcatacagttgaaagcatagttctgagcattatatcaatgctctctagtccaaatgacgagtctgcagcaaacattgaggcagctaaggaatggagggataagagggaggatttcaagaaaagggtcaggcgcatcgtgcggaaatcacaggaaatgttatgaagaaaatggaatactggggaagtcaaccgtgccatgtcaggctacgagattttgctttcaacctcaaaatgctcatctgacatcttgtgtattttccatttagcgtctgttcattggtgcaccagaaatgcattgggacgtggtgtatcgtgtggcctgggctctactaatgtttgacaatcctgaagtgccaccagtggtgaacctggtataagcaggcgccattcatgtcagctaatcgttgagaaaacatatcagtgaaatcgtgcaactgttagtgtaatgaggcagttcctgcttacatattattactcgtgctacctgtctacagtgtcttgaatgcatggaatgtcttgaattttacctgttttccttggtgtaagcatggtatgcaataatgggaaacgcaaatttctcagttaa

SEQ ID NO: 112480 - DNA, 867 bp, Zea Mays
actatacgggattgatttctagtggaggctagtgcggggcggaattttctttgcttgttgattcttgattgttgtagcggtgatggagggtacttcaatgcaataatgagcttcccagaaaattacccaaacagcccgccatcagtcagatttacctctgaaatgtggcatccaaatgtttattcagatgggctggtgtgtatctctattcttcatccacctggtgaagatccaagtggttatgagctcgcaagtgagcgttggacacctgtgcatacagttgaaagcatagttctgagcattatatcaatgctctctagtccaaatgacgagtctgcagcaaacattgaggcagctaaggaatggagggataagagggaggatttcaagaaaagggtcaggcgcatcgtgcggaaatcacaggaaatgttatgaagaaaatggaatactggggaagtcaaccgtgccatgtcaggctacgagattttgctttcaacctcaaaatgctcatctgacatcttgtgtattttccatttagcgtctgttcattggtgcaccagaaatgcattgggacgtggtgtatcgtgtggcctgggctctactaatgtttgacaatcctgaagtgccaccagtggtgaacctggtataagcaggcgccattcatgtcagctaatcgttgagaaaacatatcagtgaaatcgtgcaactgttagtgtaatgaggcagttcctgcttacatattattactcgtgctacctgtctacagtgtcttgaatgcatggaatgtcttgaattttacctgttttccttggtgtaagcatggtatgcaataatgggaaacgcaaatttctcagttaactgtatcct

SEQ ID NO: 112481 - DNA, 151 bp, Zea Mays
cttgcaaatttcacttttggagaaaatacaaaacaaaatatgtagctgcatccatccaaaagaacttttgatctttcttgttgtagcatccataggcaccaccgcgatctgcttgctattgtcatcatggagtaaacaagtgacttactac

SEQ ID NO: 112482 - DNA, 841 bp, Zea Mays
atagcacacagccaaagccaccagcgctcgtcacctccaatcaacaaattcccaatccgccgcttcccatcccgcgttcgccgctccatttgatcgaattcccgatggcgcccaaggccgagaagaagcccgcggagaagaagccgacggaggagaaggccgagaagaagcccagggcggagaagcgcgtgccgggcaaggagggcggcgagaagaaggggaagaagaaggccaagaagagcgtcgagacgtacaagatctacatcttcaaggtgctcaagcaggtgcacccggacattggtatctcgtccaaggccatgtccatcatgaactccttcatcaacgacatcttcgagaagctggctgccgaggccgccaagctcgcccgctacaacaagaagcccaccataacctcccgggagatccagacttcggtgcgcctcgtccttcctggcgagctcgccaagcacgccgtctccgagggcaccaaggccgttaccaagtttacttcctcttagatcgccgccgcacggagcgacggctctgtttcgtttcctcgtacttttaggccagtgctaataggttgctcgaggaacaatgtagtgtggaaatttctaatatattccaaattgtgctgatataatttgcttcaaaccttgaggaggcgctgttttaatttggggttgctacagccgtacaatttttggcgccaatatcttgcttcgtattcactggggttcaatcacctgaatcatgtaatttgttcagggggataaataacatttatcaaaggattgtgagatagtacagataacaaatcagctggcagtgctatgcaaaa

SEQ ID NO: 112483 - DNA, 121 bp, Zea Mays
aatcagtgcgctacgcttaccggggcgctgtgaaagacgagggattctgtaaaaagccgaatgctcacatcagtacacgacacgcgggagacagagcagggcgacgagccgcgcgcggatc

SEQ ID NO: 112484 - DNA, 1264 bp, Zea Mays
atggcggttgcggcggcgggcagcagggcgagagcggagcaggccaggctgcagtggcgggagcaggagccccggagccccgagatggccgcgccgccaaggccgcccaggccgcgcccggcgagggcggcggtcgtgtactacctggcgaggaacggccacctcgagcacccgcacttcatggaggtcgcgctctcctgccccgacggcctctacctccgagatgtgatcgaccggctcgacgcgctgagaggcaaagggatggcgcgcgtgtactcatgggcgtccaagaggagctaccggaacggcttcgtgtggcacgacctggcggacgacgactacatccacccggtggtcggccgggagtacgtgctcaagggcaccgagcgcctgcacccggtgccgccgccggcgctgctggacgcggcggccgcgtcctcctcgtcgtccggctcgcaggagacgcccacctcgtcgtcctctgccgggtgggaggcgcgcggcaggacggctcaccggatgaagagcgccagcgcgtgtggcgcggccgacgccgagctcggggagtacgtggcgtacaagggcgaggagcgcgccgcggacgccgcgacgcagaccgaggacggcggccgcggccacggccacagccacagccagaggcgcgtcctggctcccgccgcgcaggaggagctgagcagggcggagacgacgtcgccgccgacggcgtccacgagccccgagacgctggaggcgctcatcagggcggacgggcgcgttgtggcggccgtcagcggcagcggccgggccagggcgtcctccgtgctcatgcagctcatctcgtgcgggtccgtgtccgtgcgggacgcctcggtggtgccgcgcgcgcaggcgcaggcacaggcgcaccaccaccaccaccaccaccaccgcgcccgccgcccgccccgcccgccggcgtccgcggccgtcgacctgccgtcgtaccgcgccaagatcgtggaggacaaggagtacttcagcgggagcatcatcgagaccgcgaagcgctcgccggccgacgacgtcacgtccctggacctggccgttctccggcgctcgtcgtcgtacaacgcggagagggtgataaagctggaggtggcgaaggaggccggggacctgcacgaccgctgcatcccgcggaagcccaagggcaagaaagacggctggctacctggtcatctcctgcagctgcagcgcgcaggcgcagcaggggaatagcaaggga

SEQ ID NO: 112485 - DNA, 1482 bp, Zea Mays
accatatcgccgcgcagcagcctctctagaagagcagcgtcagcacgagccggtatagccaccagcttgatcgacacacacacacacatgttgactatcacgagggggcgtctgacggtagtaccagtcacacacacacacagctgtggtcaaagtacggcgctcggaagtcggaatagtacacacacatccacgtctagaaacagaccgaaacagagatctcggtccaaccaatgaaccatcagcaccacgtatagtaagtagtaggcgagtcgtcgtacgtgcagggcgcgcagaggcggtctgaaacggaccccaaccgagctggaacccagttcccccgacgccgccatccgctgcctgtgcgctgtcctgtacgttcgcgcaggcgcagctatatatatacacgagcccccggcggcccccatgccttacacaactgcctgcctgcctgccgcacgtcgctctcgcgtggtcttgggggttaaccagctagatcgagctatgcagccgccgacgacggccaagagggacagggcggcgtgggaggcggacgcgggcgccgcggacacggcccgcctgctcatgctcctcgcgcaggcgcaggcgcagcagcagcagcgcctcctgcagcacgcctaccaccacggggtggcgccgttgttccccgcggggcgcgtgttcgagtgcaagacgtgcagccggcagttccccacgttccaggcgctcgggggccaccgcgccagccacaagcgcccgagggcgctccagcagcagcagccagtcgtcgtcgccgacgaccacgacgcggggctgtgcctggggcgccagccgcccaagccgaggcgggtgcacgagtgccccgtgtgcggcctcgagttcgccatcggccaggcgctcggcggccacatgcgccggcaccgtgccgacgccgaggtgcggccgccgcccgacaaggcccgcgacgtcgccggcgggatctgcctcgacctcaacctcacgccgtccgagaactgcgccaagtgccggagcgtcgtcgtgctaggcgccgccgccggccagggtgtgcataaggcgctcgccatgttagattgctcgctgtagtcgtcgatcgagcctcttcgttccgttaggctgcactgcacatatatacatcttctttcatggacgttgtttgttactactagtatagtagtatactatgccgtttctttgtttctgctcatcttcgtgtataccgatccattgttacctttttttttggttagggtaacccagttccttccggggaagatgacacgtcagattctccggttctctgtaagctgtgtaattctaggtttctaccgtacgtatggagttttaggtattattttcttaggctaggatagttttgaaagaaacaataatagagaggaactcgtgtgccgtttccgaggtgtaaatagtaataaatcattagatgcatttcaagttcacaaa

SEQ ID NO: 112486 - DNA, 826 bp, Zea Mays
ccactcgccggaacaagcctgcctcaaactctctcgatctatatatgcgtcctcatccaacaccttccatggaagacccatcgtcaccagcagggtgtcccggccctctctagtttgtaccccccaacattggcctgatgctgctgccatgtagcccatatatgcagcgctcccccctcggcttcaccggcggcggcaacgacggtgaaaactacatcgggtgctagctccgacggtggtgcgtgccctgttgacgatagggcgcgcggggcgcgggcagcttgtaggcgttcgatcggccatgtagggcaactatacatctttggcaggtctccatcatcctccgtgggagagaagatgcatggtaatggagtgcgtgtgtatgtatgtgtatgcccatggcgcgcgcgcgcggctctgggcgagtcacagtagagatgcaatatcatgtatccagtatctttcttacaacacaaacagtgagaaattattagtaaagtgtgcattgtggtgcagccactgttccatgtccgtagcgacaggtcacggcccgttgcctttcggagcttcccggtcccggcatgcgctccaaccgtaagggcaaggcgtcaggagcgacaggtgcaaggcggcggatcggaagaactcggcagtcggcactgggtgcggccgtggagggaaggggatggtcgccgattttatgccaatttactcgcgccccacgccgcgagtctttgatcgatgtgtttgtacagtcgaaagagcattgctttacataggaccatcaatatatatatatggatacatacgcataagagtagctgaa

SEQ ID NO: 112487 - DNA, 713 bp, Zea Mays
ctcacaacacagcacgagcagcagctagctcaagcgctcctcgcaagtcacaaaccgtgtggtgtgtagtagtgcgtgctagctgccagcagccagaccgcagagatgtcgcagaggccaggcaggcaccagaggcgggcgtcgcagagcgtgttcgtgctgccggagaacttcgcgctggaggacgtgccggcggccgtggccgagggcggcggcgtcgagcagcggaagcccgcggccgcagacgcccccgagctgcaggcggcgaggcaggcggggcgccaccgccgggccatgtccatggccgtcgcctcccgggacctggagatgatctcggaggacattgggattggggcctacaagtacggtgcgtagaggtcgtgtgtgcttcgccagcttgttggctgctacatgctgctcccgtcctctggaccggcggtgcttctcgggccgtttagctaggagcggaagcgagtggctggctgtactccgatcgggtcctctcttgtgttgtgctgtcgttgttttcgtcatgtatccatgctgctgctgcttctgtcgatgcttattcgccttcttgttcttgatctagaagtaaataaaaacaacataaacatcatgtttagatgatattagtcaaattcaatgacatccaaacaataaattagaattatatttcattccaatactataaaaaatcaaactaacaaaaa

SEQ ID NO: 112488 - DNA, 2223 bp, Zea Mays
gcatggctggaagttcaaaccgtttcccaccaaccgtggagtccgaaatttgacgggaaatctgacgagcccatttttttcataaaggtccggaacctacacaaaaaagttctgcgtcgtcccggtcctctcagaaaacgcgttgcatgagataaccaaaaccacatacagccggaaccgagggggtgatatggaataacagcgctaaaattgaactaaccatagttagctggggacgcctctcccgcggggctgacaccaaaccgtggttcctcggacgcaacgcgagcacaaccagaccacaacacctcgaggctcgagcatccctgcatccctcccccccttccccatcccacctcctgctacaaccgcttcgtttcctcccctcccaaatcccccaaccccaaatcgagctccgagtcgacggcccttgccgaaccgctctccagttcccaaatccccctcccccgaaattcaccgccggactggcccggccgatggagtgacccagctagggttccgaagccggcaatggaggcgcagtggctcgcggagtatccgcaccagggggccgacaagcggccgcgcaaacgggcccggctcgcctgggatgtcgcgcccacgctgttccagccccccaaggcaattccgatgctatattgtgggcaggaactaattaatggtaatttcacgactgcatttcttccaccaccatcaatttattacaccgggccgccacggaatatttcgcctccttggagaccagatgacaaggatggacactatgtttttgcggttggagagaatctcacaccaagatataggatacttaacaagatgggtgaagggacatttggtcaagttttggagtgctgggacttggaaaaccaagaagcagtggctatcaagattgtacgctcccttcagaaataccgagaggctgctatgatagaaattgatgtgctccagagacttgggaagcatgactttactggcagccgttgtgtgcaaatacggaactggtttgactatcgtaatcatatttgtatagtatttgagaagcttgggccaagcctatatgactttctgcgaaagaatagctaccgttcatttcctattgaccttgtccgagaatttgccagacaaatattagagtctgttgcatttatgcatgacttgcgacttattcacacggatctgaagccagaaaacattctccttgtttcatcagagtctatcagggtgcctgattataaggtttctatacgaccaccaaaggatggttctttctttaagaaccttccaaaatctagtgctatcaagctgattgattttgggagtacaactttcgagagccaagaccacaattatgtggtgtcgacaagacattatcgtgcaccagaagttatccttggtcttgggtggaactatccatgcgacttgtggagtgtgggttgcattttagttgagctttgttcgggggaagctctctttcaaacacatgaaaacttggagcatttggctatgatggagaaggtcttagggcctctcccaaagcatatgattgtcagagctgatcggcgtgctgaaaagtacttcaagcgcggagtaaggttggactggccagagggagcggcctcacgagagagcatgaaggcagtctggaaattgcctcgtctgcagaaccttgtgatgcaacatgttgatcattctgctggagatctaattgatcttcttcaaggacttcttcggtatgatcctaatgagcgcctgaaagcacatgaagctctacaacaccctttctttaccagatgcatcagaagatgtggtttctgaggctacactgagattgaaaatgtcaatgctgtatttcttcattttgatgtgtaagaactacaaaaaagtggagatgttctacgaaaaatgaaatatgctaacttgcattctgttcaatgatttgaaaggtaattggtgtatataagcagagttctctgacactcgatccattttaactggatgtcattttccaattgatacaaattcctgtcttccccattcgtatactaattttgccagactcttcagtactagcaggtagcatgcagaaatccctaaccaggtggtgtcaattgaggataaatgggattaagtggtttcatggaagattggaacactatttaatggtggcatacagtgatctcgggtcaacaggtaatcattttg

SEQ ID NO: 112489 - DNA, 1830 bp, Zea Mays
cttttaatcgcagagaggacgacgcacgcgggggccggggctggggctagacggctagtgcgtttgcccgcttggcaactaccaaaccaactcggccgtcagtctgctcctagtcctcgcgcgccgccgccgcgccgcgggagagcaccacgtacgtacgggtcaaagcgcggttgccccaagctcacagtctgctagggttccagaatggcggcggcggcgaacggcggagacggggaggagctcctcctgctctcggccgtggaggctggccgcggcggcggcgtacccaccgaggtggaggattcgtggcggctcaacttcgaggggttccgcccgccggaggcgcaccaggagaggccgccgaacggtccgcttcaccactgcctcggcgtgctagctcaaggtcctgaggatgttgttgctgaatactatcaacagcaagtggagatgcttgagggttttagtgagatggacacacttacagatcgtggtttccttcctggaatgtccaaggaagaacgagaaaaggttgccaggagtgaaacattagccatacggttgtctaactttgcaaatatggttctctttgctgcaaaagtgtatgcttcagtaaggagtggctcacttgctatcatcgcatcaactttggattctcttctagacttgttgtcaggatttatcttgtggtttactgccttttcaatgcaaacaccaaatccatacagatacccaattgggaaaaagcggatgcagccactgggaatacttgtttttgcttctgttatggcaacccttggccttcagataattctagaatcagtacgttcattggtgtctgatggagatgaattcagcttaacaagtgatcaagaaaagtggcttgtggacatcatgctctccgtgacattggtaaaacttgccctggttatatattgccgctccttcaccaacgaaattgtcaaagcatatgcacaagatcactttttcgatgtcatcacaaatgtaattggcctggttgctgcactacttgccaattacattgagggctggatcgatccgcttggtgcaatcgttctggcgatctacacgatcaggacatggtcgatgacggtgctggagaacgtgcactccctggtggggcagtcggcctcgccggagtacctccagaaactgacttacctgtgctggaaccaccacaaggccgtgcggcacatcgacacagtccgcgcctacacgttcggttcccactacttcgtggaggtggacatcgtgctgccgtcgaacatgcccctgcgggaggctcacgacatcggcgaggccctgcaggagaagctggagcgcctgccagagatcgagcgcgcgtttgtccacctcgactacgaattcacccaccgccccgagcacgccttgtcccacgagaaatagcatgctaggaccgaactgatgcagcaggcggaaggacacggcttcgtaatcgtaactgaaacaattttacttgtagccgcagaaagcttcttctgagacctgatgctcatctcgtcagtcgtcgcagcaaaccagttgggtacatgcgatgagactgaacgtaaaggagtgcttgctctctgcgatggtgtccttgtagcatcatggactacagaatctgattcctcctccaccaccaccacgacgacgacctattttatactggtcttcagctcattagtctaggtttgtttcgttatctttttgcatggagagaccgatgattgaggtatgtatttctgtaagataaattcatatcttgcttcaaaaagtcaaaactttttaaaatttgccagtacgtcg

SEQ ID NO: 112490 - DNA, 261 bp, Zea Mays
cagaacatcaatgttgatctttcccataaattgatggaggacacaactactttaccataaatgacctttttcttgatctggcataatttgtttcactggcttaccctaggattggtgctgcagattttaccatacatgaccaattccacctatttttccacggcagcctgcagcgcctgtccattcaaataaacctcagcaattatatgcgctcaattaaaggcaccaagagaaaatttaaaaagatgctaagtccagggc

SEQ ID NO: 112491 - DNA, 100 bp, Zea Mays
aagctttcatatttatattattgcacatggagggttctaacgactaaaatacaagcagtcattaggtgtaagcaaacctcttgatccgtagatttagatc

SEQ ID NO: 112492 - DNA, 2202 bp, Zea Mays
aaggagacgttaccgtctcggtcttctcctcctcccccacccggccacccgctctttcctcgcgccttcctccttgacgccgccgccgcggccgctcactcacattaaagcgcgccttcgcccaaaccctacctcggaaaccctttcacgccacggggccccaactgcgcctgtcgcaatgtcgctcgagatccacgaggaggatggtggggcgtctggtgcacgttcggcgacgaaggtgatgtctgtttccgggagcgggaagcgggggcggtacgtgcggcaggtgacggggcggcacaacgacaccgacctccacgtggccgcgcggggcggggacgccgcggcgctgcggcgcgcgctgttggacgccgcggcggccgtggctgccacgggggaggcgccagaggacctcgaggcggcgcggcgtgcggtggccgcggagcccaacgaggccggggagaccccgctcgtcgccgcggcggagaggggccacctcggggtggttgtggagctgctccggcacctcgacgcggagggactggccgccaagaacaggtcgggctacgacgcactgcacgtcgccgccagagaagggcgtcatgctgttgtgcaggaaatgttaaatcatgataggatgcttgccaaaacatctggccctgcaaatactactccacttatatcagcagctatgagaggccatattgaagttgttgaacttttgctggaacaagatgactttggattggtggaaatggccagagataatggaaagaatgccttacattttgctgctcgacagggacatactggaatcgtcaaagcgctacttgagaaggatcctcagttagcaagaagaaatgacaagaaaggtcaaacagctcttcatatggccgtaaagggaacaagctgtgatgttcttagagccctagtggatgctgatccagcaattgtaatgctgccagataaaaatggcaacacggctttgcatgttgcaacaagaaaaaagagagcagagatagttagtgttcttttgcggctaccagatactcatgtcaatgcactaaccagagaccacaagactgcctttgatatagctgaagggttaccagtatgtgaggagtcttgcgaaattaaggatattttatctcaacatggtgcgctcagatccagggagctcaatcagccacgagatgagctacggaagacagtgacagagataaagaaagatgtccacacacagctggaacaaacaagaaaaaccaacaaaaatgttcatggcattgctaaagaactcaggaagttgcacagagaaggcatcaacaacgctacaaactctgtaactgttgttgctgtgctgttcgcaacagttgcttttgcagctatattcaccgtacctggtggaaatgacaataatggacttgcagttgttgtccagactacgtcctttaagatattcttcatcttcaatgctgtggctctatttacatcattggcagtggtcgtagttcaaataacagttgtcaggggagaaaccaagtctgagcgaagggttgttgaggtgatcaacaagcttatgtggatagcatcggtttgtactacaatatctttcattgcctcgtgctatattgtgctaggccgccatttccagtgggcagcaatattggtatctttgataggtggtgtcacaatggccggtgtacttggtactatgacatactatgtggtgaaatcaaagcgccaaaggaagattagaaaaaaggagaagatgtcaagaagaagtggctcaagttcttggtatgacaataccgagctctcagatactgaacttaatccagtatatgccttgtaaagagtgtttgtctcaggaatcgagtatgtactaacagatacaatagcttacattatttgttgattgttcaatttctccagttccagtaacaacaaaaccacacagaactttcccattgtgcaaggctcttgcagttgatgaatttgatggcagccaatgtgctcaatctgttgtacatgtgagttacaatttttttttctttctgagagtcacttctgtgctttatcttcaggattgctcgtattgtaaagctcaagccaagggctgattttagatacttaatccttaaagtacttcaagttatgtgcaactccttttttactgattgcgtgagaagcaatgccatggtc

SEQ ID NO: 112493 - DNA, 1353 bp, Zea Mays
atgggcctcgccgccgccgccgccgcccgcgcggtcctcctcctcctcgccgtatccggggtcctcctcagtcctgcggcggcggagatcaagcaggagtccttcaaggacgactcccgcggctccatcctcttcgagaagttcggcttcggcctccacggcatggtgtctatctccgtcaccggcgccaagtactcctccaagctcgctaagcccgaccccgcgcagctcggcttcttcctcctctctgacgagtcgctcttcgaggccatctacgatcagccggcgcccacggatctgaaccccaacccggaatcctcccccacgtgcgtcctcgccagcccctacgtcaggcctctcttcaccttcgcagaggtcgacgacaacggctaccacaaccagactttccccatcacccaccccgacgagtacagcctcttcttcgccaactgcgcgccggagaccagcgtcagcatggaggtccgcaccgacatgtacaacaccaacccggacggcaccagggactacctctccgtcggcatggcctctgtcccaacgatctacgccttcttcgccgtctgctatgtcgtgttcctggccgggtggctctacgtcaccctccaccgcaaccgcctctccgcgcaccgcatccaccacctcatgtcgggtctgctcgtcgcgcggatgctctattgcatctcggcggccgaggaccagcactacatccgcacggccgggacaccgcatgggtgggatgtcatgttctacctgttccagctcgtgaagggtgtcatcttgttcgctgtcattgcgctgattgggaccgggtggtcgttcctgaagccattcctgcaggacaaggagaagaaagtgctcatggtggtgatccctctgcaggttgcagctaacatcgctgctgctgtggtcggcgagactggtcctttcttgcagggatgggtgacatggaaccagatcttcttgtttgttgatgtcgcttgctgctgtgctgtgctcttcccagtggtgtggtcgatgcgcgctctgcgggagtcatccaagacagacggcaaggcagccagaacccttgccaagctcatgctcttccgccagttctatgttgccgttattggatacctctacttcaccaggatcattgtgtatgccctcaagacaattactaactacaagtacagatgggtcagcgttgcagcggaggaggtggccaccatggcattctacatgttcatgttctacatgttcaggccagctgagaggaaccagtacttcgcacttgacgaggatgatgaggaagccgcagagatggcgctccgtgaggaggagtttgagctctag

SEQ ID NO: 112494 - DNA, 3330 bp, Zea Mays
ccgcgcgcggcgggcggccacccgcatcggcggacctgccccgtgagtccgtgaccctcctatcttggcatgcctttctcaatgtttaccgcctcgcctcttctcgtcccggggccctgccggccccgctccaacccccaagctcgtggcaagcgccgcgcaactgcgcaagtagcgatggcagtagtagacacgctaggggaaggtttggacgaatagaagctagaggcgaagggcgaggaggagaagcacgagataaggaaattgacgacggagggagcagaccgcgatgctgcggcgcgtggcgagcaacgcctactcatggtggtgggcgagccacatccgcaacacgcagtccaaatggctcgacaacaatcttcaagagatggaaatgagggtgaagtccatgatcaaactcatagaaataaatgctgacactttcgcaaagaaggcagagctgtacttcaagaacaggcctgagctggcaaaccttgttgaggagacgtatagatcttaccaggcgctcgctgatcgatgtgatcggatatcaggagagctccacaagtcaaatcataccataacaactgtgtttccagaacaagtacaactctcactgcaaaatgacaatggcgacggattcccaaggggtatcacagggatcaatatcatcagaggaactagcccagcttcaaagaggacacagacgcataggaggattacctctcagatgagtaaagaaaaggcacaagaagagattgagaggctccagaaggagattttggtgttacagaccgagaaagagttcttcaagtgctcatatgaatcttcactagataagtacttagatattgaacgaagggcaacagagacacaagaggaggtatggagcttgcaagagacttttaataccaacacagttatcgaagacaatgaagctcgagctttgatggctgcacgtgccctcatttcatgtgaggatacattgattaacttgcaagatcagcaaaatcgatcatgtcaagaggcaacaacagagttccaacgagtcatagacactaaaaagaagctaaaagctttcaagagtgagtgtgggcactctgagaaccaaaaggagctaagtgatcaacaacatatagtgaccagctctgcacatccatctatagagaataatggccccattctgcaagaccataggctccatctacaggaaatatgccagaagatcaaactacaatttaattcatgctcagaggcatctgtagtgcatttagcaggaatggttgatgaattcgtggataaggtgatcgcactagaaattgcagctacaactcagactgctcaaatcaatagaatgagagctgaggcagatgagctgcaaaaatgtatgaatagtttggaggaagagaaggaaggtttagttggggattccaataagttgtctgaaaggttgaggcaagttgaggaggtgctgcaaacaattcaacgaattgagaagtctgtgcacattgaaaatggaaatattcagagacaattaaccgaagcatgcaacaatcttactgattttgtggagaggttggatgtgccactaagcgaagaaacaatagattcatctgaagggtccaaaggaattgcttctgaagaagatgcagataagcctgacactctctctgacccatttcaagctgattcaggcactgtaggtgaatcaatggatggagactcattgtactcattcgatatctctagtgaggcacatgaagaagatgtagatgacaccttagggtggcagcaagtagttttgaatgggttggagggcaaggataaaatcctcttaaaagattatgcatccatccttcggaactacaaagatacaagaaagcaactttcagaaatagagaagaaaaatcaagaatatcatcttgattctatgtcaaaaacggaagagttaaagagtgtcaatgcaacaaaagatgacgaaattcactctcttaggcaaatgttgagctctttacagtccaagatcaacacctatcgaatccaatttgttgaaaagtctgaagaatcatccaaaacaaacaacgatccttgtctagaagacaaagagatttgtgagatagaagaatacctaaagaattgccaaaatgaagaaccacatgtttctttattagaggagaaatttagagaagaaattaacaaagtattagatgaaagcttagacttctggttgaggttcagtacatcgtatcgttatatccagaaattccaaaaagcatttgataaagcaaaagcagaagtggatagacttacagatacaaaagctctggagggcttagacactggttgtactggtcagtttgtgagaaaacaagagccaactatccttgaaaagaaactacgtgacttaagtactgatcttcaagtttggttggaaaaaaatgtgctgttgcagggggagcttgagagaagatttttattgatatgcaacatacaagaggagatatctaaggtcacaacattgaatcgaaccaatgaagctcactttactcctttacaggctgcaaagttccatggtgaggtgagtaatatgaagcaagagaataacaaggtcaccaaagagctacaagctgggctcgagcatgtaaggggcctccaagtggaaattgggaggactgttctgaagctcagagacaatattgaactatcttttgggagaagcagtcgagcacatcagaacttcagatatctatcagggaaggccggggtacctcaacgaacttccttatttggttctaggacgaaaaagacatcattattttcatgtatgcctcccattgccaaagccgatttctgacatgaggccaagtctttttagataacattggttagagggttagctaattttttcttctgtttgatatgggtggttctctatgaacatgcttaaaaaattgatgcaaggtaagacagctccaaacattatacacgtagattgagaaaattcttgagcccttgttctacccattcataacgacactatagcctatagttgagacatgtactttatcgtgggatagatgagacgattcttttacctcagcctgaaaatcattcccatgaaggagtcaaactcaagacatgagaagtgttatttacatcatctaacaatttagctagaggcctttcatgtgaacatgttagttttgattgaatatttaatttttgtaggttttaaactgaaaagtatcatgtaaccaacttgattttttcgctgatttgttcggtgatgtgtaatttgtagtcctgtaaatgtgaattttgtataatgtacaa

SEQ ID NO: 112495 - DNA, 109 bp, Zea Mays
ggataaaactgctcgctcgccgcattgccttttggatcaatataagggcatgtacaacctaattaatgaagtttttcatgaggagttcttaggaagctaagtagaaaat

SEQ ID NO: 112496 - DNA, 1310 bp, Zea Mays
aaccgcagtcggcgcaaaagccccaaggcttttccacgtccaagagccatgttccgccaatcctccccctcctacagcgacgccctcatgcaccaccacgccgcgagcttctccgccgccgcgctgtccgtcaccgtcccggcccagatcccccgcggcggcgcggcggccggcgggtacctcgacggcaatgttggcgccttctcgtcgccgccgtcgtcctgctactcgtcctcgttcccgtcgtcgtactacaacagcatccagaggagcatcagctcgcactcgctcccgatgcgcctccagctggccgacgtgtccctcggcggcagtagcggcttctactcgccgtcttcgccgtccacgcaccagctgcctctgcagccgctctcgtcctccccgtcctcctccgccggcgaactcttcgagttcacctcgtcatgccccgtccgccgcgtcttcagcaccggcgatctccaggggatgaacgggtcgtcgccgccgcgcccggtgccgtcagccgacggctgcggccaagagggtggcgggccgttctcacccaaggtcggccgctacagcgccgaggagaggaaagagaggatcgagcgctaccgtgtcaaacggcaccagagaaacttcaacaagaagatcacttacgcctgcaggaagacgctggcggacagccgcccgcgggtgaagggccggttcgcgaggaacggcgagaccgacacggaggccgaggaacgcgaggcgtccgacaacagctacggctacgactacggctgcggccacaacgagctgagcaacggcaacggcaacaccacctacagcgcgggcagctgctacgacggccacaacagcaataggctcaacggcgacaatggcgagtggtggtggcgggcgccggtcgccgccgcggtcgcggccgcggccgacgacgaggcgcagcggcagcggcagatcgtcggcttcgacgaggacgaggagctctgggcgtcgctcggcgacatgctgtcggtgaacctggcctcgtaggccgatcgcctgctgcctgctggccagtcacccagtcactggccgagcagcgcgccaggggccatgggacgcggacgaacgcgacgtggcgttggtggccggtggggtccggtgcacgcgcgagcactcaggcaggcccgctcgatcggcgggggcgccggtgcgcggcgcagtgcggtgtggtgaagaggtctgcatggtcggcgtcgttgaccttccctcgtgtatgattgattgccttgtaaacttttagccagaaacatgatgaatcaaca

SEQ ID NO: 112497 - DNA, 519 bp, Zea Mays
aaatatgatagtattcctagtctaacgcactcgacctgccttgctgtttcgtctgccgctcacctggcgtgcggccgctggacaacaggacaaccgccgacgccgaaaccctaggccctacgccagttttccaggccttcgacggttcttccctggccttcgtcgcgttcgccaggtatgttcatcctttctctccagttctcgctaggcacccgaaccttaactaagttatttggctattagtattcagatcttatctagtaacaagtgtatacttgcctagcaacggaatgacgagtagaagatagattactccttccttcaactaccgtgaagggatcgtttatctccagacattttcttctcggttcctcccatctgctgcactgacttctgcttgagatctttctgaactgggttttaattgtttccttaccttgctggtaaggaaaccctagtttgcttgagtggattgctccaatgagattgagtttttatttactgtgacttgagcaacta

SEQ ID NO: 112498 - DNA, 1286 bp, Zea Mays
aaatatgatagtattcctagtctaacgcactcgacctgccttgctgtttcgtctgccgctcacctggcgtgcggccgctggacaacaggacaaccgccgacgccgaaaccctaggccctacgccagttttccaggccttcgacggttcttccctggccttcgtcgcgttcgccagaaaaccatggagggggctgatggcaagcaagagtcagaaactacatctataatcaaagttcctaaagagcctgccatcattatcaatggcgttccagattttccttttgattgcacaactggttctcaatctgcagtaaaaaatgacgcagaatctcatgttgatcctcgttttggtgaatggttagaagggaggaaagtgcgtaagctttttggagacacatatttcgtcgggaaagtggccaagtatgacattgaaagcaactggtacaccgtcatttatgatgatggagaccaggaagatcttgaatggcgtgaacttgagaaagttctactgccattggacataactgttccacttaaaacacttgttatcgacaagtgcaaacttaagggatcagtttctgactccaaaccaaaggtgggtagaccaaggaaaatatatgctacagtggatgacagtatggagaaaacatcacatatagttacactatcccagggaaatgatacaaacaataagatggcgatagttagagtggacggcttgcaggctagtaatcaacctaggaagaggggcaggcctcgaaaagatacatctttatctgctgataagcagcctaaaaaaagaggcaggcctccaaagaacaggaatgcacctggaaattctcagggcgctgaagacacaccaggttctgtggcacttgtgccagtgcaagatgatacacaagaatcttctaggaaacagaatagcacccttattcgcaatgcaatgacagctcgggcagaaagactgaaaagagaaaatttgcgtgttcaaagcaggagatctagaactcggttatcctaggaagcaagtggtttcacttatgcaatgcaatatatatagctgcaagcatttcagaatctatgtatgatggtgacatctagctttctacacatattttgtacaaccccgcatacatcaaaacttgtaaaactaaatctgctatgccaatgctatcgtattttttccctatacaattatgtttccagtccatcggatcttcgggtacacgtctcagaagttctctttgtggaaatggaaccgggttgtggttgtctggctgaattct

SEQ ID NO: 112499 - DNA, 2951 bp, Zea Mays
ccactctccagtcctcactcccacacccgtacgcttcgcggcgcgtcacttttgccagccatacgccagcctgagcgcccgacgtcgcgggattcgccgggaacgcccacaccaccggccgcagccgaccaggcagacgagtagggtggtggtggtggtagcggtagcgcgggggcggggcggcgctgcgtgaccgacgccacgggagatgaaggccaaggccctccctttcatcgccttcgagcacaagcgagacgcctatggcttcgccgtgcggccacaacacctgcagcggtacagagagtatgcgaacatctataaggaggaggaagaggagaggtccgacagatggaagaattttctggatcggcaggctgaggatggagaatcatctggagaggatgccaaggttgcgccatccaacgaggaagatggagttgctgccaaggatggcaggacagagccaagaccacataaaatccaaatatggtctgaaatcaggccctctttgggccatattaaggagatgatgaactcacgcgtgaaaaagcaatcttcttctgttaatgacgggtacacgagggatgaaccacaccctggtaattctgaagggagcaagccatcggaggattcagatgatgagttctatgatgtagagaaggttgatcctagccaagaagtgcctgcaactgacatagccaatgctgagtcaggtacaaatagaggtgcagaacaagaacattatccttggaaagaagaattagaatgcttagtccgtgatgggcttccaatggccctgagaggagagctgtggcaagcttttattggtattggagctcgtcgggtcgaagggtactatgagggcctccttgcagcggacagtgaaagtcaagacaacaaatatccgggatctccaacttcggaatgtggtgacggaaaaccaaaaccatctcaaacattttcttctgaaaaatggaaagggcaaatagagaaggatttgcctagaacatttccaggacaccctgcactagatgaggatggcagaaatgccttaaggcgcttgctcacagcttatgctcgacacaatccaccagttggttactgccaggcaatgaacttctttgctggcttgctacttctgctgatgccagaagagaatgcattttgggcattgacaggcattatggatgactattttgatggttacttctctgaagaaatgatcgaatctcaggtggatcagcttgttttagaggagttagtccgagggagattcccaaagttagtaaatcatcttgattaccttggtgtacaagttgcatgggtcactggtccatggttcctatctatttttatgaacatgcttccctgggaaagtgtgcttcgtgtgtgggatgttcttctctttgagggaaaccgtgtgatgctgttccggacagctcttgcactgatggagttgtatggtcctgcacttgtgacaacaaaagatgctggggatgcagtaacccttttgcagtctttagctggttccacttttgacagtagccagcttgttttaacagcttgcatgggatatcaagctgtaggtgaagcaagactgcaagaattgagaaataaacaccgaccatctgttatctcctcaatggaacagagagcaaaaggtcttcgtgtctggagggatacgaacaggcttgcatctaggctatataattttaagcgtgacactgaaccattggtgtcgttatcagaagaacagtcaaatgacttgacagatggcgataagaaccaagaagccaattgtagtaatgtggatgatatgtatcatggcctcactgtcaactctgagattgattctctgcctgatcctaaagaccaggtagtctggctgaagggtgagctgtgccaactgctagaggagagaagatccgctgttctgagggctgatgaattagagacagcacttatggagatggttaagcaagataacagacgcgaattaagtgcaaaggtcgagcaattggaacaagagttatctgagcttaggcaagctctatcagacaagcaggaacaggaacaagcaatgcttcaggttctgatgcgtgtagagcaagaacagaaagtcacagaggacgcccgtatctttgcagagcaagatgctgctgctcagaaatatgctgcacatatacttcaggagaagtacgagggagctatggcttcacttgctcaaatggagaacagagcagttatggcagaaactatgttagaggcaaccattcagtaccaatctagtcagcagaaagcacagcttccatcgccctctccttctccaaggaccccaactcgagatgcatcaccaggccaagggaaccaagattcatcgcaggagttccagcctagaagaataagcttgcttgccccattttcttccctcggatggcgagacaagaacaagggcaagcagaacggctctgatgagtcaacaaacggtaagctcaataatagcaccgatcaaggggttgaaacacccaaaaaggacgacgaaaagaaggccgactcgccaaaagagagtgaacagattgtccgaacaccggaaagagacaatgaactgagactagggacacccaagatggatagtgaggtaccaagtgtggaaatggcggcaaacagtacgaatgggctggaggaccagttggaggagataaaattggattgatatcctttggctggtcgctaagccgcaacataaggtgccattaaattatgtattggtgtatccatcttccacctctattcttttaggtttatagattcttgtataacttgaggagagagaatgaataaactatgtttgccctcttataggtctgttgatcgcctgtaagctatcataagtacacatgaaaaagacgtaccaaatagaagattaccacgaaagcaatttttggaacaga

SEQ ID NO: 112500 - DNA, 2942 bp, Zea Mays
ccactctccagtcctcactcccacacccgtacgcttcgcggcgcgtcacttttgccagccatacgccagcctgagcgcccgacgtcgcgggattcgccgggaacgcccacaccaccggccgcagccgaccaggcagacgagtagggtggtggtggtggtagcggtagcgcgggggcggggcggcgctgcgtgaccgacgccacgggagatgaaggccaaggccctccctttcatcgccttcgagcacaagcgagacgcctatggcttcgccgtgcggccacaacacctgcagcggtacagagagtatgcgaacatctataaggaggaggaagaggagaggtccgacagatggaagaattttctggatcggcaggctgaggatggagaatcatctggagaggatgccaaggttgcgccatccaacgaggaagatggagttgctgccaaggatggcaggacagagccaagaccacataaaatccaaatatggtctgaaatcaggccctctttgggccatattaaggagatgatgaactcacgcgtgaaaaagcaatcttcttctgttaatgacgggtacacgagggatgaaccacaccctggtaattctgaagggagcaagccatcggaggattcagatgatgagttctatgatgtagagaaggttgatcctagccaagaagtgcctgcaactgacatagccaatgctgagtcaggtacaaatagaggtgcagaacaagaacattatccttggaaagaagaattagaatgcttagtccgtgatgggcttccaatggccctgagaggagagctgtggcaagcttttattggtattggagctcgtcgggtcgaagggtactatgagggcctccttgcagcggacagtgaaagtcaagacaacaaatatccgggatctccaacttcggaatgtggtgacggaaaaccaaaaccatctcaaacattttcttctgaaaaatggaaagggcaaatagagaaggatttgcctagaacatttccaggacaccctgcactagatgaggatggcagaaatgccttaaggcgcttgctcacagcttatgctcgacacaatccaccagttggttactgccaggcaatgaacttctttgctggcttgctacttctgctgatgccagaagagaatgcattttgggcattgacaggcattatggatgactattttgatggttacttctctgaagaaatgatcgaatctcaggtggatcagcttgttttagaggagttagtccgagggagattcccaaagttagtaaatcatcttgattaccttggtgtacaagttgcatgggtcactggtccatggttcctatctatttttatgaacatgcttccctgggaaagtgtgcttcgtgtgtgggatgttcttctctttgagggaaaccgtgtgatgctgttccggacagctcttgcactgatggagttgtatggtcctgcacttgtgacaacaaaagatgctggggatgcagtaacccttttgcagtctttagctggttccacttttgacagtagccagcttgttttaacagcttgcatgggatatcaagctgtaggtgaagcaagactgcaagaattgagaaataaacaccgaccatctgttatctcctcaatggaacagagagcaaaaggtcttcgtgtctggagggatacgaacaggcttgcatctaggctatataattttaagcgtgacactgaaccattggtgtcgttatcagaagaacagtcaaatgacttgacagatggcgataagaaccaagaagccaattgtagtaatgtggatgatatgtatcatggcctcactgtcaactctgagattgattctctgcctgatcctaaagaccaggtagtctggctgaagggtgagctgtgccaactgctagaggagagaagatccgctgttctgagggctgatgaattagagacagcacttatggagatggttaagcaagataacagacgcgaattaagtgcaaaggtcgagcaattggaacaagagttatctgagcttaggcaagctctatcagacaagcaggaacaggaacaagcaatgcttcaggttctgatgcgtgtagagcaagaacagaaagtcacagaggacgcccgtatctttgcagagcaagatgctgctgctcagaaatatgctgcacatatacttcaggagaagtacgagggagctatggcttcacttgctcaaatggagaacagagcagttatggcagaaactatgttagaggcaaccattcagtaccaatctagtcagcagaaagcacagcttccatcgccctctccttctccaaggaccccaactcgagatgcatcaccaggccaagggaaccaagattcatcgcaggagttccagcctagaagaataagcttgcttgccccattttcttccctcggatggcgagacaagaacaagaacggctctgatgagtcaacaaacggtaagctcaataatagcaccgatcaaggggttgaaacacccaaaaaggacgacgaaaagaaggccgactcgccaaaagagagtgaacagattgtccgaacaccggaaagagacaatgaactgagactagggacacccaagatggatagtgaggtaccaagtgtggaaatggcggcaaacagtacgaatgggctggaggaccagttggaggagataaaattggattgatatcctttggctggtcgctaagccgcaacataaggtgccattaaattatgtattggtgtatccatcttccacctctattcttttaggtttatagattcttgtataacttgaggagagagaatgaataaactatgtttgccctcttataggtctgttgatcgcctgtaagctatcataagtacacatgaaaaagacgtaccaaatagaagattaccacgaaagcaatttttggaacaga

SEQ ID NO: 112501 - DNA, 1350 bp, Zea Mays
taaaaaggtaaaacaaattttaatttgggacggagggagtatatattttgaaacgagatacctctgcttatattgaaatgagatacctctgcttatattaaaacgagataccatcttaataaattgtattatttattgagtctatgtggctgtatctagggtgcttccagaagatgattctcccaatttatagtactggactactggagctcgctggctatattattaatgtttgggcatgaatatgtcgcagcatgtaatgaagcaagtaaatttttgcttgttcagttttatgatccgctgcttgtgtacttactctattcaggagaagtacgagggagctatggcttcacttgctcaaatggagaacagagcagttatggcagaaactatgttagaggcaaccattcagtaccaatctagtcagcagaaagcacagcttccatcgccctctccttctccaaggtctggtcttgtttaatgctataattgctagatcagtactaacactggcaatgcaatagcactaaaggaccaatttatttagctactccatccttttttttcttgtctggttatctgtcattgcccccagttaggaaaacccttttgctttcccattttcaaatgcaaatagatgcgatttgactagtcttttcattaggcgtattccactcatttgctgttccaacgccaacttgatattgtttccaaacatttttcctcataggaccccaactcgagatgcatcaccaggccaagggaaccaagattcatcgcaggagttccagcctagaagaataagcttgcttgccccattttcttccctcggatggcgagacaagaacaagggcaagcagaacggctctgatgagtcaacaaacggtaagctcaataatagcaccgatcaaggggttgaaacacccaaaaaggacgacgaaaagaaggccgactcgccaaaagagagtgaacagattgtccgaacaccggaaagagacaatgaactgagactagggacacccaagatggatagtgaggtaccaagtgtggaaatggcggcaaacagtacgaatgggctggaggaccagttggaggagataaaattggattgatatcctttggctggtcgctaagccgcaacataaggtgccattaaattatgtattggtgtatccatcttccacctctattcttttaggtttatagattcttgtataacttgaggagagagaatgaataaactatgtttgccctcttataggtctgttgatcgcctgtaagctatcataagtacacatgaaaaagacgtaccaaatagaagattaccacgaaagcaatttttggaacaga

SEQ ID NO: 112502 - DNA, 607 bp, Zea Mays
ccaacgcaacaacatgcccggctataaaaacacacgctgacctgcacggctgcacactcaagctcaaggtagctcgccagacgaccagaagtagctctcgccttcatcagcagcggcagcgcagccgcgcaggccaccggtagctgccagaagctcacgtacagagcgaagcgaagaagctagcaatggagcacgggtacccctgcaacggctgcggcggcaacaaggagaagaggccgccgctcaagagggggcagctcaaggtgcagatagtcaagactctgctgggcagcctcgcggtgcccgccggagccggcgcagccaacagggagcgcagcttcgggagatgagcaagcttctctgcttctgctacctgaccaagccacatccagatgtctggtgtgtggtgcttcacgcagggaatattgtgcagactgatgtgtgtcttcccctttgtttagtttggtagttgtagggtccaagttttgcccctttgtactcccccttttatttgcagcttagagctatgtcgtggagagcctgttgctctatcgtgatttggctggtaatttggcggctaatttatgaacctttcctgattctttcg

SEQ ID NO: 112503 - DNA, 267 bp, Zea Mays
atggcaactggtggctgcgaggctgctccgctcggcagagctcgcctcgtcctcgtcaagacgccgtcggggaacccgctgccccggcggaggggccaggtgaaggagaggatcgtcagggacattgcggatgctctggccacggcggcggtcctcgcctgcggcgacaggacggtagtgggcgcgggcaagaaaggcgaagggggcagggcgcccgcgtcgccgtctcccggtgcgaagaagaaatggtatcctcgtgaatcgtga

SEQ ID NO: 112504 - DNA, 206 bp, Zea Mays
gttctgccttttccgattcccccctccccgcacagtccattctcatgtttggtcattatttcctgtttcctttctcatttcccctccccacaaagcccattcccattccattattctatgtttcctttctcattccccctccccacaaagtccattcccattcccacgtacatcccacgcctagctaaaatttaattaaaaaaaca

SEQ ID NO: 112505 - DNA, 912 bp, Zea Mays
aagcaagcagcaacaccgccaaaccctaaacaccaaagccccgcatataaataccttcccctcccatcttttcccctctcctgccgccgccgccgctcccgctcccagctcgtgttccgcttcttgcagccgtcgccgcgaagcgctccagagaacttccgtcaacatggggaagacacgtggtatgggagccgggcgcaagctcaagacccaccgcaggaaccagcggtgggctgacaaggcatacaagaagagccatttgggcaatgagtggaagaaacccttcgctgggtcatcccatgccaagggcattgtcctggagaagatgtaagcagatgctaaaactttacttttttcttgcacacttcgccttttaactcaattgagcaaataaacactgataataatgcagtggtattgaggccaagcagcccaactccgctatccgtaagtgtgctcgtgttcagcttgttaagaatggcaagaagattgctgccttcgtgccaaatgacggttgtttgaactacattgaggaaaatgtatgatactctttgtcccgaactgttataattcttgtttgcagcctattgtgcaagcccaaacttgacttgtcccatctctgtctaggatgaggtcttgattgctggatttggtcgtaaggggcacgctgtgggagatattcctggtgtccggttcaaggtcgtcaaggtttccggtgtgtctctgcttgcccttttcaaggagaagaaagagaagccaaggtcttagattgctcttgctaccaaaatcagcaagcgtggagttgaaacgggagggcgttagatgattaagaagaatggttgcttgctatgtttgcagtgcattcgtgcaattgttaacctaagattttgttggtgaaaacgatttcttttc

SEQ ID NO: 112506 - DNA, 896 bp, Zea Mays
aagcaagcagcaacaccgccaaaccctaaacaccaaagccccgcatataaataccttcccctcccatcttttcccctctcctgccgccgccgccgctcccgctcccagctcgtgttccgcttcttgcagccgtcgccgcgaagcgctccagagaacttccgtcaacatggggaagacacgtggtatgggagccgggcgcaagctcaagacccaccgcaggaaccagcggtgggctgacaaggcatacaagaagagccatttgggcaatgagtggaagaaacccttcgctgggtcatcccatgccaagggcattgtcctggagaagattggtattgaggccaagcagcccaactccgctatccgtaagtgtgctcgtgttcagcttgttaagaatggcaagaagattgctgccttcgtgccaaatgacggttgtttgaactacattgaggaaaatgatgaggtcttgattgctggatttggtcgtaaggggcacgctgtgggagatattcctggtgtccggttcaaggtcgtcaaggtttccggtgtgtctctgcttgcccttttcaaggagaagaaagagaagccaaggtcttagattgctcttgctaccaaaatcagcaagcgtggagttgaaacgggagggcgttagatgattaagaagaatggttgcttgctatgtttgcagtgcattcgtgcaattgttaacctaagattttgttggtgaaaacgatttcttttcagacttgcttctgttgagtgctatcattccatatcaatgtacttcctcttctagaatttttgttgcccgcaagttcatttatttgttgtccgccagtttattttttaaactaaaacgatacaaataaaaaagaacagagtgtaattgctttgtacaa

SEQ ID NO: 112507 - DNA, 1714 bp, Zea Mays
aacaccgccaaaccctaaacaccaaagccccgcatataaataccttcccctcccatcttttcccctctcctgccgccgccgccgctcccgctcccagctcgtgttccgcttcttgcagccgtcgccgcgaagcgctccagagaacttccgtcaacatggggtatctcactgtcttctgttgaagttttttgatctatcctcgtgtccatctattttctggcttagcgattatgagtgtggttcggtgtgactgcataagtgcatctggttgcttgacgcgcagctttgcttgcgctaatgtgaagtatacatcgtgatctattttgatttcttctcagtatccacgtgaagcttattgacggtccagtgctgatcagatactacaacgtcagcgctaaacatattcataagcgacattaatccgttgctgctgtgtagcaatatctttcttggtccagttacttggatttgggaagctatgcatggtagcatacaccttcattattcttcgcgttttcaaagagtcgcctttttttgtgaaacttcatttgaagttttgcgaaactcccgatttggagccttgaagcgattacagttataatccatttatttaagagtcaacagtttagctgttcaggtactgcaggtgtagtgcacctagtgtttttctcacaaacattttagacgcttattctagtacacagtgaggtgacgaaaacttaattagaactaggaaaactgtatataagtgtgtcaatatatcgactaatatcttgattcagacattcggttacctgttttgttcatgtaatgtcgaattgttgtgtggtattagtccttttctttctagcactgttaaaaagggttttggcatgcattgtcagttgtaatgtggggttttgggatgcattgccagttgtaatgtggtagtctatcacatttggatagaccactacattaaaatgttaaaacgtgatctgctttcttatacaggaagacacgtggtatgggagccgggcgcaagctcaagacccaccgcaggaaccagcggtgggctgacaaggcatacaagaagagccatttgggcaatgagtggaagaaacccttcgctgggtcatcccatgccaagggcattgtcctggagaagattggtattgaggccaagcagcccaactccgctatccgtaagtgtgctcgtgttcagcttgttaagaatggcaagaagattgctgccttcgtgccaaatgacggttgtttgaactacattgaggaaaatgatgaggtcttgattgctggatttggtcgtaaggggcacgctgtgggagatattcctggtgtccggttcaaggtcgtcaaggtttccggtgtgtctctgcttgcccttttcaaggagaagaaagagaagccaaggtcttagattgctcttgctaccaaaatcagcaagcgtggagttgaaacgggagggcgttagatgattaagaagaatggttgcttgctatgtttgcagtgcattcgtgcaattgttaacctaagattttgttggtgaaaacgatttcttttcagacttgcttctgttgagtgctatcattccatatcaatgtacttcctcttctagaatttttgttgcccgcaagttcatttatttgttgtccgccagtttattttttaaactaaaacgatacaaataaaaaagaacagagtgtaattgctttgt

SEQ ID NO: 112508 - DNA, 888 bp, Zea Mays
tattagtccttttctttctagcactgttaaaaagggttttggcatgcattgtcagttgtaatgtggtagtctatcacatttggatagaccactacattaaaatgttaaaacgtgatctgctttcttatacaggaagacaaggcatacaagaagagccatttgggcaatgagtggaagaaacccttcgctgggtcatcccatgccaagggcattgtcctggagaagatgtaagcagatgctaaaactttacttttttcttgcacacttcgccttttaactcaattgagcaaataaacactgataataatgcagtggtattgaggccaagcagcccaactccgctatccgtaagtgtgctcgtgttcagcttgttaagaatggcaagaagattgctgccttcgtgccaaatgacggttgtttgaactacattgaggaaaatgtatgatactctttgtcccgaactgttataattcttgtttgcagcctattgtgcaagcccaaacttgacttgtcccatctctgtctaggatgaggtcttgattgctggatttggtcgtaaggggcacgctgtgggagatattcctggtgtccggttcaaggtcgtcaaggtttccggtgtgtctctgcttgcccttttcaaggagaagaaagagaagccaaggtcttagattgctcttgctaccaaaatcagcaagcgtggagttgaaacgggagggcgttagatgattaagaagaatggttgcttgctatgtttgcagtgcattcgtgcaattgttaacctaagattttgttggtgaaaacgatttcttttcagacttgcttctgttgagtgctatcattccatatcaatgtacttcctcttctagaatttttgttgcccgcaagttc

SEQ ID NO: 112509 - DNA, 1111 bp, Zea Mays
cgcttccaccatcgcacccacccggagcgcctcctcttctccagcgtccgatccccattccccacctctcctccctccgccgccagctcccgcccccttctctcccctcctcgcctccccgcgcgcgcgtttttataagggtttcggcggaggcgcccggtcgctggcgatggccgacgacggcgggagccacgagggcagcggcggcggcggaggcgtccgggagcaggaccggttcctgcccatcgccaacatcagccggatcatgaagaaggccgtcccggccaacggcaagatcgccaaggacgctaaggagaccctgcaggagtgcgtctccgagttcatatcattcgtgaccagcgaggccagcgacaaatgccagaaggagaaacgaaagacaatcaacggggacgatttgctctgggcgatggccactttaggattcgaggagtacgtcgagcctctcaagatttacctacaaaagtacaaagagattttcgtagggtgatagcaagctgtctacaaaggctggcgagggctctgtaaagaaggatgcaattagtccccatggtggcaccagtagctcaagtaatcagttggttcagcatggagtctacaaccaagggatgggctatatgcagccacaggtaatctatcgtactgtcatttgttagtaaaacaatactgcagctattttccgtctcactaaacatggcagaaaatttcgatcattacattattccactaataattttctctctgtacgcactcagtaccacaatggggaaacctaataaagggctaatacagcagcaatttatggtaatattattgctccctgaattttgttaactaaagattctgtatcatgctatatgtatgtttccttttttcttcttctttgttttgacaattgcttctttctctacggtgtttatccatcagctagggaagtctctgcattgcttaccatgtgtattggcagaaaacaggaggcacttacaaagggtgttaatctctgcgatggctgcctctcaggtgtaaattggcttcggtttagcgctgcttttgtccgtatatttaggatgatttgactgttgctacttttggc

SEQ ID NO: 112510 - DNA, 940 bp, Zea Mays
cgcttccaccatcgcacccacccggagcgcctcctcttctccagcgtccgatccccattccccacctctcctccctccgccgccagctcccgcccccttctctcccctcctcgcctccccgcgcgcgcgtttttataagggtttcggcggaggcgcccggtcgctggcgatggccgacgacggcgggagccacgagggcagcggcggcggcggaggcgtccgggagcaggaccggttcctgcccatcgccaacatcagccggatcatgaagaaggccgtcccggccaacggcaagatcgccaaggacgctaaggagaccctgcaggagtgcgtctccgagttcatatcattcgtgaccagcgaggccagcgacaaatgccagaaggagaaacgaaagacaatcaacggggacgatttgctctgggcgatggccactttaggattcgaggagtacgtcgagcctctcaagatttacctacaaaagtacaaagagattttcgtagggtgatagcaagctgtctacaaaggctggcgagggctctgtaaagaaggatgcaattagtccccatggtggcaccagtagctcaagtaatcagttggttcagcatggagtctacaaccaagggatgggctatatgcagccacagtaccacaatggggaaacctaataaagggctaatacagcagcaatttatgaaaacaggaggcacttacaaagggtgttaatctctgcgatggctgcctctcaggtgtaaattggcttcggtttagcgctgcttttgtccgtatatttaggatgatttgactgttgctacttttggcaaccttttacatttacagatatgtattattcagcataaatataatatagtagtcctaggcctaaataatggtgattaacataccaagtcttttatcaggctactcgttttctggaaca

SEQ ID NO: 112511 - DNA, 1031 bp, Zea Mays
gcttccaccatcgcacccacccggagcgcctcctcttctccagcgtccgatccccattccccacctctcctccctccgccgccagctcccgcccccttctctcccctcctcgcctccccgcgcgcgcgtttttataagggtttcggcggaggcgcccggtcgctggcgatggccgacgacggcgggagccacgagggcagcggcggcggcggaggcgtccgggagcaggaccggttcctgcccatcgccaacatcagccggatcatgaagaaggccgtcccggccaacggcaagatcgccaaggacgctaaggagaccctgcaggagtgcgtctccgagttcatatcattcgtgaccagcgaggccagcgacaaatgccagaaggagaaacgaaagacaatcaacggggacgatttgctctgggcgatggccactttaggattcgaggagtacgtcgagcctctcaagatttacctacaaaagtacaaagagggtgatagcaagctgtctacaaaggctggcgagggctctgtaaagaaggatgcaattagtccccatggtggcaccagtagctcaagtaatcagttggttcagcatggagtctacaaccaagggatgggctatatgcagccacagtaccacaatggggaaacctaataaagggctaatacagcagcaatttatgctagggaagtctctgcattgcttaccatgtgtattggcagaaaacaggaggcacttacaaagggtgttaatctctgcgatggctgcctctcaggtgtaaattggcttcggtttagcgctgcttttgtccgtatatttaggatgatttgactgttgctacttttggcaaccttttacatttacagatatgtattattcagcataaatataatatagtagtcctaggcctaaataatggtgattaacataccaagtcttttatcaggctactcgttttctggaacaggattcatgcttagctttccctcctgtctgaatgtgatggttgcctgaatcctaatttgcct

SEQ ID NO: 112512 - DNA, 1095 bp, Zea Mays
atggccgacgacggcgggagccacgagggcagcggcggcggcggaggcgtccgggagcaggaccggttcctgcccatcgccaacatcagccggatcatgaagaaggccgtcccggccaacggcaagatcgccaaggacgctaaggagaccctgcaggagtgcgtctccgagttcatatcattcgtgaccagcgaggccagcgacaaatgccagaaggagaaacgaaagacaatcaacggggacgatttgctctgggcgatggccactttaggattcgaggagtacgtcgagcctctcaagatttacctacaaaagtacaaagagatggagggtgatagcaagctgtctacaaaggctggcgagggctctgtaaagaaggatgcaattagtccccatggtggcaccagtagctcaagtaatcagttggttcagcatggagtctacaaccaagggatgggctatatgcagccacagtaccacaatggggaaacctaataaagggctaatacagcagcaatttatggtaatattattgctccctgaattttgttaactaaagattctgtatcatgctatatgtatgtttccttttttcttcttctttgttttgacaattgcttctttctctacggtgtttatccatcagctagggaagtctctgcattgcttaccatgtgtattggcagaaaacaggaggcacttacaaagggtgttaatctctgcgatggctgcctctcaggtgtaaattggcttcggtttagcgctgcttttgtccgtatatttaggatgatttgactgttgctacttttggcaaccttttacatttacagatatgtattattcagcataaatataatatagtagtcctaggcctaaataatggtgattaacataccaagtcttttatcaggctactcgttttctggaacaggattcatgcttagctttccctcctgtctgaatgtgatggttgcctgaatcctaatttgcctgtctgtggtgtgagaccatctccaaccattcccctcatatttctcctcctatctgtactttctattatattttactactttacctcaaaagatactcctacat

SEQ ID NO: 112513 - DNA, 2149 bp, Zea Mays
gtcaattgtttagaaaccacacggctgtccctgtcgctggctaagtggttggagtgctgactagttagtgccagattagacgggcaagccatcagcagccaatgcctccgtgctgttgttgttgttgttgctgcatgttgttgtccattatttagctgctttgcgcgcgtgcagacagcgcgctacctataggccataggctatagcaagctccgccgtcgccattgctacacaccaatctttcctgccgcggtgccgcctctcgtccatggcaaagggagcgggagctagctgacggccgcgcgctttcgtcttttgtccttcaatttcgcagcattccgcgcgcttggtctctcggaggcgtggcggtagcctgtgccggtgtgcctcggagctccggcctccgggaataaacataggggtatcgccatgcaggcggcggccaagacgaggaatggctccttggaacaccccacccggacgtcctccctgggcggtaacaaggccggccggacggcgaggatggccgagtcgcccaccggcctcagccccaaggtcgaccgccgcacggcggtgagcgccgagagagagaaaaggaggccaccgacgacgaagctatcggagctggagtcccagctgtcgcagctgcaagacgagctcaagaaggccaaggagcagctccattcctccgagctctccaggaagcgggccctgcaggaggtggacgacgccaaggcgcaggccgccgcggcgtccgcgcaggcgcgcgacaccgaggctcagctcgccgagctctcgtcggccgaggagtcccgcctcctggagctgcgtcgtctgtcgcaggagcgcgaccgctcgtggcagtcggagctggaggccatgcagaagcagcacgccgcggactcgaccgcgcttgccgcggcgatgggcgaggtgcaccgcctccgcgtccagctcgccgccacggcgcgcgccgaccgccggcaggacgtggtggaggcgctggccaccatcaacgagctcagggccaagctcaaggcaagcgaggaggccgaggcgcaggcgcgcgcgatgcacgaggagtgcaagcagcagctggaggcgagccgggccaccatcgattcgctgctcaccgacgggtccaagctgatggactcgttcagcctcgtggtgaaggagctcgaggagtcgcgtgccacggtcaaggctcttgaggacgagatcgcggagacgtcgtcgaaggccgcaagcgaccgctgcaactgctcgggctcggagtcggaggccgccgagctgagggcggagctggaggccgcggaggagaggtaccaagaagagaagatccttagcaccgtcgagacgcagtgcgcgtacgagctcatggaccagataaagacagagtccgacctgcggcacggcaagcttgcggcggcgctcgagggcgccaaatccgaggtcatcttcctcaaggcgagcctgttcgacaaggaatccgagctacggagcgccctggacgcgaacaggaagctacaagcggaggcgagaacggacggctcggccgacgcgctgaagcagcagctgcagggcgcgctgcacgagaacgggctgctgaagcaggagctgcatcagtacgagtccgagaagggctccgcgaccgcgaggacggcggaggccgacgcggcggaggcggcgaagaagggcgagatggaaaccgagctgcgtcgcctgcgggtgcaggccgagcagtggcggaaggccgcggagacagccatggcgctgctgaccgttggcaagggcgggaacggcaaggtcgtggagcggagcgagtcgtgggagggcggcaagtacgcgggcctctgcgaggaattggacgacgacgcggccgccaggaagaacggcaacgtgctgaggaggatcagcggcatgtggaagaagtgagggcgatcggacagctaagaggctcgccgcggcaacggttttactgctctctagggagccctgggtttcttaactctctctgctgtaattgtttagttttgcaggttcttgtggtgtaaaaattaaatgaaacgtgctcatagctgtattatacaaggtggtacatggaggaacaattcgtctgagtgcgacagggttgtggtaggttacc

SEQ ID NO: 112514 - DNA, 1776 bp, Zea Mays
gtgaccgtgactgttcgcggatagctccatgcgcaaggggtgtctgtcccgttcttgagctcggagccaaggacgacaggaatggctccttggaacaccccacccggacgtcctccctgggcggtaacaaggccggccggacggcgaggatggccgagtcgcccaccggcctcagccccaaggtcgaccgccgcacggcggtgagcgccgagagagagaaaaggaggccaccgacgacgaagctatcggagctggagtcccagctgtcgcagctgcaagacgagctcaagaaggccaaggagcagctccattcctccgagctctccaggaagcgggccctgcaggaggtggacgacgccaaggcgcaggccgccgcggcgtccgcgcaggcgcgcgacaccgaggctcagctcgccgagctctcgtcggccgaggagtcccgcctcctggagctgcgtcgtctgtcgcaggagcgcgaccgctcgtggcagtcggagctggaggccatgcagaagcagcacgccgcggactcgaccgcgcttgccgcggcgatgggcgaggtgcaccgcctccgcgtccagctcgccgccacggcgcgcgccgaccgccggcaggacgtggtggaggcgctggccaccatcaacgagctcagggccaagctcaaggcaagcgaggaggccgaggcgcaggcgcgcgcgatgcacgaggagtgcaagcagcagctggaggcgagccgggccaccatcgattcgctgctcaccgacgggtccaagctgatggactcgttcagcctcgtggtgaaggagctcgaggagtcgcgtgccacggtcaaggctcttgaggacgagatcgcggagacgtcgtcgaaggccgcaagcgaccgctgcaactgctcgggctcggagtcggaggccgccgagctgagggcggagctggaggccgcggaggagaggtaccaagaagagaagatccttagcaccgtcgagacgcagtgcgcgtacgagctcatggaccagataaagacagagtccgacctgcggcacggcaagcttgcggcggcgctcgagggcgccaaatccgaggtcatcttcctcaaggcgagcctgttcgacaaggaatccgagctacggagcgccctggacgcgaacaggaagctacaagcggaggcgagaacggacggctcggccgacgcgctgaagcagcagctgcagggcgcgctgcacgagaacgggctgctgaagcaggagctgcatcagtacgagtccgagaagggctccgcgaccgcgaggacggcggaggccgacgcggcggaggcggcgaagaagggcgagatggaaaccgagctgcgtcgcctgcgggtgcaggccgagcagtggcggaaggccgcggagacagccatggcgctgctgaccgttggcaagggcgggaacggcaaggtcgtggagcggagcgagtcgtgggagggcggcaagtacgcgggcctctgcgaggaattggacgacgacgcggccgccaggaagaacggcaacgtgctgaggaggatcagcggcatgtggaagaagtgagggcgatcggacagctaagaggctcgccgcggcaacggttttactgctctctagggagccctgggtttcttaactctctctgctgtaattgtttagttttgcaggttcttgtggtgtaaaaattaaatgaaacgtgctcatagctgtattatacaaggtggtacatggaggaacaattcgtctgagtgcgacagggttgtggtaggttacc

SEQ ID NO: 112515 - DNA, 2252 bp, Zea Mays
gcaaagcgcgccccgcgcctccgccccatctcgcactctgcccggccttttgattcccgcccgtgcttgcctgcggtggtggaggaggagaatagtattatgctaagctaatgccgcggcccctttcgtcggctccagtcccggctcggcgttgctcctcccctccattccctgtcggcctcttgcgctttccggcctcggattctttgtcgtgtgcgccccctccgttgcatctcgctgcttctccttcttcttcgctttgcatctgagttgagctggagcatcgatcccgtccgcctcgtcctccccgacgcggcttcggctggactccaccgcgctctttagttcggtttccccgtcagagcttccaacctgttctactcggtttagattttggagctagagtttccaaagcaaaagctttccttttttttccctccctcccctttgcatttggcatgaggggaaacgctgcggtttcgccccttttctgagcatgctgtccttgaacaaaatgcattttctcaagctatattccagcagcaacagctccaggaatggctccttggaacaccccacccggacgtcctccctgggcggtaacaaggccggccggacggcgaggatggccgagtcgcccaccggcctcagccccaaggtcgaccgccgcacggcggtgagcgccgagagagagaaaaggaggccaccgacgacgaagctatcggagctggagtcccagctgtcgcagctgcaagacgagctcaagaaggccaaggagcagctccattcctccgagctctccaggaagcgggccctgcaggaggtggacgacgccaaggcgcaggccgccgcggcgtccgcgcaggcgcgcgacaccgaggctcagctcgccgagctctcgtcggccgaggagtcccgcctcctggagctgcgtcgtctgtcgcaggagcgcgaccgctcgtggcagtcggagctggaggccatgcagaagcagcacgccgcggactcgaccgcgcttgccgcggcgatgggcgaggtgcaccgcctccgcgtccagctcgccgccacggcgcgcgccgaccgccggcaggacgtggtggaggcgctggccaccatcaacgagctcagggccaagctcaaggcaagcgaggaggccgaggcgcaggcgcgcgcgatgcacgaggagtgcaagcagcagctggaggcgagccgggccaccatcgattcgctgctcaccgacgggtccaagctgatggactcgttcagcctcgtggtgaaggagctcgaggagtcgcgtgccacggtcaaggctcttgaggacgagatcgcggagacgtcgtcgaaggccgcaagcgaccgctgcaactgctcgggctcggagtcggaggccgccgagctgagggcggagctggaggccgcggaggagaggtaccaagaagagaagatccttagcaccgtcgagacgcagtgcgcgtacgagctcatggaccagataaagacagagtccgacctgcggcacggcaagcttgcggcggcgctcgagggcgccaaatccgaggtcatcttcctcaaggcgagcctgttcgacaaggaatccgagctacggagcgccctggacgcgaacaggaagctacaagcggaggcgagaacggacggctcggccgacgcgctgaagcagcagctgcagggcgcgctgcacgagaacgggctgctgaagcaggagctgcatcagtacgagtccgagaagggctccgcgaccgcgaggacggcggaggccgacgcggcggaggcggcgaagaagggcgagatggaaaccgagctgcgtcgcctgcgggtgcaggccgagcagtggcggaaggccgcggagacagccatggcgctgctgaccgttggcaagggcgggaacggcaaggtcgtggagcggagcgagtcgtgggagggcggcaagtacgcgggcctctgcgaggaattggacgacgacgcggccgccaggaagaacggcaacgtgctgaggaggatcagcggcatgtggaagaagtgagggcgatcggacagctaagaggctcgccgcggcaacggttttactgctctctagggagccctgggtttcttaactctctctgctgtaattgtttagttttgcaggttcttgtggtgtaaaaattaaatgaaacgtgctcatagctgtattatacaaggtggtacatggaggaacaattcgtctgagtgcgacagggttgtggtaggttacc

SEQ ID NO: 112516 - DNA, 1862 bp, Zea Mays
tttgattcccgcccgtgcttgcctgcggtggtggaggaggagaatagtattatgctaagctaatgccgcggcccctttcgtcggctccagtcccggctcggcgttgctcctcccctccattccctgtcggcctcttgcgctttccggcctcggattctttgtcgtgaatggctccttggaacaccccacccggacgtcctccctgggcggtaacaaggccggccggacggcgaggatggccgagtcgcccaccggcctcagccccaaggtcgaccgccgcacggcggtgagcgccgagagagagaaaaggaggccaccgacgacgaagctatcggagctggagtcccagctgtcgcagctgcaagacgagctcaagaaggccaaggagcagctccattcctccgagctctccaggaagcgggccctgcaggaggtggacgacgccaaggcgcaggccgccgcggcgtccgcgcaggcgcgcgacaccgaggctcagctcgccgagctctcgtcggccgaggagtcccgcctcctggagctgcgtcgtctgtcgcaggagcgcgaccgctcgtggcagtcggagctggaggccatgcagaagcagcacgccgcggactcgaccgcgcttgccgcggcgatgggcgaggtgcaccgcctccgcgtccagctcgccgccacggcgcgcgccgaccgccggcaggacgtggtggaggcgctggccaccatcaacgagctcagggccaagctcaaggcaagcgaggaggccgaggcgcaggcgcgcgcgatgcacgaggagtgcaagcagcagctggaggcgagccgggccaccatcgattcgctgctcaccgacgggtccaagctgatggactcgttcagcctcgtggtgaaggagctcgaggagtcgcgtgccacggtcaaggctcttgaggacgagatcgcggagacgtcgtcgaaggccgcaagcgaccgctgcaactgctcgggctcggagtcggaggccgccgagctgagggcggagctggaggccgcggaggagaggtaccaagaagagaagatccttagcaccgtcgagacgcagtgcgcgtacgagctcatggaccagataaagacagagtccgacctgcggcacggcaagcttgcggcggcgctcgagggcgccaaatccgaggtcatcttcctcaaggcgagcctgttcgacaaggaatccgagctacggagcgccctggacgcgaacaggaagctacaagcggaggcgagaacggacggctcggccgacgcgctgaagcagcagctgcagggcgcgctgcacgagaacgggctgctgaagcaggagctgcatcagtacgagtccgagaagggctccgcgaccgcgaggacggcggaggccgacgcggcggaggcggcgaagaagggcgagatggaaaccgagctgcgtcgcctgcgggtgcaggccgagcagtggcggaaggccgcggagacagccatggcgctgctgaccgttggcaagggcgggaacggcaaggtcgtggagcggagcgagtcgtgggagggcggcaagtacgcgggcctctgcgaggaattggacgacgacgcggccgccaggaagaacggcaacgtgctgaggaggatcagcggcatgtggaagaagtgagggcgatcggacagctaagaggctcgccgcggcaacggttttactgctctctagggagccctgggtttcttaactctctctgctgtaattgtttagttttgcaggttcttgtggtgtaaaaattaaatgaaacgtgctcatagctgtattatacaaggtggtacatggaggaacaattcgtctgagtgcgacagggttgtggtaggttacc

SEQ ID NO: 112517 - DNA, 1993 bp, Zea Mays
tttgattcccgcccgtgcttgcctgcggtggtggaggaggagaatagtattatgctaagctaatgccgcggcccctttcgtcggctccagtcccggctcggcgttgctcctcccctccattccctgtcggcctcttgcgctttccggcctcggattctttgtcgtgtgcgccccctccgttgcatctcgctgcttctccttcttcttcgctttgcatctgagttgagctggagcatcgatcccgtccgcctcgtcctccccgacgcggcttcggctggactccaccgcgctctttagaatggctccttggaacaccccacccggacgtcctccctgggcggtaacaaggccggccggacggcgaggatggccgagtcgcccaccggcctcagccccaaggtcgaccgccgcacggcggtgagcgccgagagagagaaaaggaggccaccgacgacgaagctatcggagctggagtcccagctgtcgcagctgcaagacgagctcaagaaggccaaggagcagctccattcctccgagctctccaggaagcgggccctgcaggaggtggacgacgccaaggcgcaggccgccgcggcgtccgcgcaggcgcgcgacaccgaggctcagctcgccgagctctcgtcggccgaggagtcccgcctcctggagctgcgtcgtctgtcgcaggagcgcgaccgctcgtggcagtcggagctggaggccatgcagaagcagcacgccgcggactcgaccgcgcttgccgcggcgatgggcgaggtgcaccgcctccgcgtccagctcgccgccacggcgcgcgccgaccgccggcaggacgtggtggaggcgctggccaccatcaacgagctcagggccaagctcaaggcaagcgaggaggccgaggcgcaggcgcgcgcgatgcacgaggagtgcaagcagcagctggaggcgagccgggccaccatcgattcgctgctcaccgacgggtccaagctgatggactcgttcagcctcgtggtgaaggagctcgaggagtcgcgtgccacggtcaaggctcttgaggacgagatcgcggagacgtcgtcgaaggccgcaagcgaccgctgcaactgctcgggctcggagtcggaggccgccgagctgagggcggagctggaggccgcggaggagaggtaccaagaagagaagatccttagcaccgtcgagacgcagtgcgcgtacgagctcatggaccagataaagacagagtccgacctgcggcacggcaagcttgcggcggcgctcgagggcgccaaatccgaggtcatcttcctcaaggcgagcctgttcgacaaggaatccgagctacggagcgccctggacgcgaacaggaagctacaagcggaggcgagaacggacggctcggccgacgcgctgaagcagcagctgcagggcgcgctgcacgagaacgggctgctgaagcaggagctgcatcagtacgagtccgagaagggctccgcgaccgcgaggacggcggaggccgacgcggcggaggcggcgaagaagggcgagatggaaaccgagctgcgtcgcctgcgggtgcaggccgagcagtggcggaaggccgcggagacagccatggcgctgctgaccgttggcaagggcgggaacggcaaggtcgtggagcggagcgagtcgtgggagggcggcaagtacgcgggcctctgcgaggaattggacgacgacgcggccgccaggaagaacggcaacgtgctgaggaggatcagcggcatgtggaagaagtgagggcgatcggacagctaagaggctcgccgcggcaacggttttactgctctctagggagccctgggtttcttaactctctctgctgtaattgtttagttttgcaggttcttgtggtgtaaaaattaaatgaaacgtgctcatagctgtattatacaaggtggtacatggaggaacaattcgtctgagtgcgacagggttgtggtaggttacc

SEQ ID NO: 112518 - DNA, 1953 bp, Zea Mays
gcaccgggagcgtgcgtgaccgtcacgaggaaggagatcgggagcgcagccgcaagccggcaagcggaagggaacggctcgtcgccggcggggccacgtacccaggccggggtcaccgtccgggcggctggggtgggcgaatcgattctgcgtgcgcggctgggtcgaggtcgagatagcctttggacggggtgaggaaagcgagagataaaagcgagacattgaaggcgcagaacccaaagaatgggtaagagaggaaagtggtttagtgcggtgaagaaagtcttcagctcctccgatccagatggaaaggaagccaaggcagacaaatcgaaatccaagaggagatggccatttggaaagtccaagcactcggagccttccatatcgacggtgccaggcactgctccagcagtagctccgttgccatcaccaccagcaactcagccccactctctggagatcaaagatgtcaatccagttgaaacagacagtgagcagaacaagcatgcctactccgttgcgcttgcgtctgctgtcgctgctgaagctgcagcagttgctgcccaggctgctgcggaagttgtccgcctcacagcagttaccacggctgcaccaaagatgcctgttagttcgagggaagaacttgccgccaccaagattcagactgccttcaggggttatctggcaaggagagcattgcgtgcactaagagggctagttagattgaagtcgcttgttgatggaaatgctgtcaaacgccaaaccgctcacaccttgcaatgcacacaagcaatgacaagagttcaaactcaaatctactctagaagggtgaagttggaggaggagaaacaggctcttcaaagacaactccaattgaaacatcaaagggaacttgagaaaatgaagattgatgaagattgggatcacagccatcaatccaaagagcaaattgaggccaacctaatgatgaaacaggaagctgcactgaggcgagagagagcacttgcatatgcattttctcaccagtggaggaattctggtcgaactataacccctacttttacggaacctgggaaccccaactggggctggagctggatggagcgctggatgacagcaagaccatgggagagtcggttggcggcggcatcggacaaggaccctaaagaacgtgctgtgacaaagaatgcgagcaccagtgctgttcgagtacctgtatcccgtgccatctcgattcagagaccagcaacaccaaacaagtcgagccgcccaccaagccggcagtcactttcaaccccgccatcgaagaccccgtcagcctcaggaaaggccaggccggcaagtccaaggaacagttggctgtacaaggaggatgacctgaggagcatcacgagcatccgctccgagcgcccaaggaggcagagcacgggtggaggctcggtccgggacgataccagcctgaccagcacaccacctctccccagctacatgcagtcgaccgagtctgcacgggccaagtctcggtaccgcagtctactactgactgagaagcttgaggttcctgagagagcgcctctggcccactccgttgtcaagaagcgcctgtcgttccccgtcgtcgagaagccaagcgttgtgccgacagagaagcccagggaaagagtgaggcgccattccgaccctccgaaggtcgatcctgcgacgctcaaggatgcccctgctgcctgaccagtgaccaggccttatgtgattgttaggtttcgtgctcttttaacaccgtgatgtattatctgagttaggttgctttgttcgtgtcatcgtatgatctgtccgggttgattttgagacagttctaactgtgtttacagacaatgcgtgatgctaaatgtatgtgtggttggttggctttaaatgtactgatatgatagtatttgattttaactttgctaa

SEQ ID NO: 112519 - DNA, 1939 bp, Zea Mays
gcaccgggagcgtgcgtgaccgtcacgaggaaggagatcgggagcgcagccgcaagccggcaagcggaagggaacggctcgtcgccggcggggccacgtacccaggccggggtcaccgtccgggcggctggggtgggcgaatcgattctgcgtgcgcggctgggtcgaggtcgagatagcctttggacgggcgagacattgaaggcgcagaacccaaagaatgggtaagagaggaaagtggtttagtgcggtgaagaaagtcttcagctcctccgatccagatggaaaggaagccaaggcccagaaggcagacaaatcgaaatccaagaggagatggccatttggaaagtccaagcactcggagccttccatatcgacggtgccaggcactgctccagcagtagctccgttgccatcaccaccagcaactcagccccactctctggagatcaaagatgtcaatccagttgaaacagacagtgagcagaacaagcatgcctactccgttgcgcttgcgtctgctgtcgctgctgaagctgcagcagttgctgcccaggctgctgcggaagttgtccgcctcacagcagttaccacggctgcaccaaagatgcctgttagttcgagggaagaacttgccgccaccaagattcagactgccttcaggggttatctggcaaggagagcattgcgtgcactaagagggctagttagattgaagtcgcttgttgatggaaatgctgtcaaacgccaaaccgctcacaccttgcaatgcacacaagcaatgacaagagttcaaactcaaatctactctagaagggtgaagttggaggaggagaaacaggctcttcaaagacaactccaattgaaacatcaaagggaacttgagaaaatgaagattgatgaagattgggatcacagccatcaatccaaagagcaaattgaggccaacctaatgatgaaacaggaagctgcactgaggcgagagagagcacttgcatatgcattttctcaccagtggaggaattctggtcgaactataacccctacttttacggaacctgggaaccccaactggggctggagctggatggagcgctggatgacagcaagaccatgggagagtcggttggcggcggcatcggacaaggaccctaaagaacgtgctgtgacaaagaatgcgagcaccagtgctgttcgagtacctgtatcccgtgccatctcgattcagagaccagcaacaccaaacaagtcgagccgcccaccaagccggcagtcactttcaaccccgccatcgaagaccccgtcagcctcaggaaaggccaggccggcaagtccaaggaacagttggctgtacaaggaggatgacctgaggagcatcacgagcatccgctccgagcgcccaaggaggcagagcacgggtggaggctcggtccgggacgataccagcctgaccagcacaccacctctccccagctacatgcagtcgaccgagtctgcacgggccaagtctcggtaccgcagtctactactgactgagaagcttgaggttcctgagagagcgcctctggcccactccgttgtcaagaagcgcctgtcgttccccgtcgtcgagaagccaagcgttgtgccgacagagaagcccagggaaagagtgaggcgccattccgaccctccgaaggtcgatcctgcgacgctcaaggatgcccctgctgcctgaccagtgaccaggccttatgtgattgttaggtttcgtgctcttttaacaccgtgatgtattatctgagttaggttgctttgttcgtgtcatcgtatgatctgtccgggttgattttgagacagttctaactgtgtttacagacaatgcgtgatgctaaatgtatgtgtggttggttggctttaaatgtactgatatgatagtatttgattttaactttgctaa

SEQ ID NO: 112520 - DNA, 2178 bp, Zea Mays
gcaccgggagcgtgcgtgaccgtcacgaggaaggagatcgggagcgcagccgcaagccggcaagcggaagggaacggctcgtcgccggcggggccacgtacccaggccggggtcaccgtccgggcggctggggtgggcgaatcgattctgcgtgcgcggctgggtcgaggtcgagatagcctttggacggggtgaggaaagcgagagataaaaggttgggccgcttgcttgcccttccacttctatctatccccacctccttctccctttccgcccccggtttattttttcttcgtcctggatgcgtcggtcgcgtgtttgatctgactaagccgcggaggagggtgctagatgtccgtgcggtgggcggtggctcccgagggcgaccggagttaggtccttgccgccttcagtgcggtggggaagcgagacattgaaggcgcagaacccaaagaatgggtaagagaggaaagtggtttagtgcggtgaagaaagtcttcagctcctccgatccagatggaaaggaagccaaggcccagaaggcagacaaatcgaaatccaagaggagatggccatttggaaagtccaagcactcggagccttccatatcgacggtgccaggcactgctccagcagtagctccgttgccatcaccaccagcaactcagccccactctctggagatcaaagatgtcaatccagttgaaacagacagtgagcagaacaagcatgcctactccgttgcgcttgcgtctgctgtcgctgctgaagctgcagcagttgctgcccaggctgctgcggaagttgtccgcctcacagcagttaccacggctgcaccaaagatgcctgttagttcgagggaagaacttgccgccaccaagattcagactgccttcaggggttatctggcaaggagagcattgcgtgcactaagagggctagttagattgaagtcgcttgttgatggaaatgctgtcaaacgccaaaccgctcacaccttgcaatgcacacaagcaatgacaagagttcaaactcaaatctactctagaagggtgaagttggaggaggagaaacaggctcttcaaagacaactccaattgaaacatcaaagggaacttgagaaaatgaagattgatgaagattgggatcacagccatcaatccaaagagcaaattgaggccaacctaatgatgaaacaggaagctgcactgaggcgagagagagcacttgcatatgcattttctcaccagtggaggaattctggtcgaactataacccctacttttacggaacctgggaaccccaactggggctggagctggatggagcgctggatgacagcaagaccatgggagagtcggttggcggcggcatcggacaaggaccctaaagaacgtgctgtgacaaagaatgcgagcaccagtgctgttcgagtacctgtatcccgtgccatctcgattcagagaccagcaacaccaaacaagtcgagccgcccaccaagccggcagtcactttcaaccccgccatcgaagaccccgtcagcctcaggaaaggccaggccggcaagtccaaggaacagttggctgtacaaggaggatgacctgaggagcatcacgagcatccgctccgagcgcccaaggaggcagagcacgggtggaggctcggtccgggacgataccagcctgaccagcacaccacctctccccagctacatgcagtcgaccgagtctgcacgggccaagtctcggtaccgcagtctactactgactgagaagcttgaggttcctgagagagcgcctctggcccactccgttgtcaagaagcgcctgtcgttccccgtcgtcgagaagccaagcgttgtgccgacagagaagcccagggaaagagtgaggcgccattccgaccctccgaaggtcgatcctgcgacgctcaaggatgcccctgctgcctgaccagtgaccaggccttatgtgattgttaggtttcgtgctcttttaacaccgtgatgtattatctgagttaggttgctttgttcgtgtcatcgtatgatctgtccgggttgattttgagacagttctaactgtgtttacagacaatgcgtgatgctaaatgtatgtgtggttggttggctttaaatgtactgatatgatagtatttgattttaactttgctaaggac

SEQ ID NO: 112521 - DNA, 1966 bp, Zea Mays
gcaccgggagcgtgcgtgaccgtcacgaggaaggagatcgggagcgcagccgcaagccggcaagcggaagggaacggctcgtcgccggcggggccacgtacccaggccggggtcaccgtccgggcggctggggtgggcgaatcgattctgcgtgcgcggctgggtcgaggtcgagatagcctttggacggggtgaggaaagcgagagataaaagcgagacattgaaggcgcagaacccaaagaatgggtaagagaggaaagtggtttagtgcggtgaagaaagtcttcagctcctccgatccagatggaaaggaagccaaggcccagaaggcagacaaatcgaaatccaagaggagatggccatttggaaagtccaagcactcggagccttccatatcgacggtgccaggcactgctccagcagtagctccgttgccatcaccaccagcaactcagccccactctctggagatcaaagatgtcaatccagttgaaacagacagtgagcagaacaagcatgcctactccgttgcgcttgcgtctgctgtcgctgctgaagctgcagcagttgctgcccaggctgctgcggaagttgtccgcctcacagcagttaccacggctgcaccaaagatgcctgttagttcgagggaagaacttgccgccaccaagattcagactgccttcaggggttatctggcaaggagagcattgcgtgcactaagagggctagttagattgaagtcgcttgttgatggaaatgctgtcaaacgccaaaccgctcacaccttgcaatgcacacaagcaatgacaagagttcaaactcaaatctactctagaagggtgaagttggaggaggagaaacaggctcttcaaagacaactccaattgaaacatcaaagggaacttgagaaaatgaagattgatgaagattgggatcacagccatcaatccaaagagcaaattgaggccaacctaatgatgaaacaggaagctgcactgaggcgagagagagcacttgcatatgcattttctcaccagtggaggaattctggtcgaactataacccctacttttacggaacctgggaaccccaactggggctggagctggatggagcgctggatgacagcaagaccatgggagagtcggttggcggcggcatcggacaaggaccctaaagaacgtgctgtgacaaagaatgcgagcaccagtgctgttcgagtacctgtatcccgtgccatctcgattcagagaccagcaacaccaaacaagtcgagccgcccaccaagccggcagtcactttcaaccccgccatcgaagaccccgtcagcctcaggaaaggccaggccggcaagtccaaggaacagttggctgtacaaggaggatgacctgaggagcatcacgagcatccgctccgagcgcccaaggaggcagagcacgggtggaggctcggtccgggacgataccagcctgaccagcacaccacctctccccagctacatgcagtcgaccgagtctgcacgggccaagtctcggtaccgcagtctactactgactgagaagcttgaggttcctgagagagcgcctctggcccactccgttgtcaagaagcgcctgtcgttccccgtcgtcgagaagccaagcgttgtgccgacagagaagcccagggaaagagtgaggcgccattccgaccctccgaaggtcgatcctgcgacgctcaaggatgcccctgctgcctgaccagtgaccaggccttatgtgattgttaggtttcgtgctcttttaacaccgtgatgtattatctgagttaggttgctttgttcgtgtcatcgtatgatctgtccgggttgattttgagacagttctaactgtgtttacagacaatgcgtgatgctaaatgtatgtgtggttggttggctttaaatgtactgatatgatagtatttgattttaactttgctaaggac

SEQ ID NO: 112522 - DNA, 2055 bp, Zea Mays
gccgcttgcttgcccttccacttctatctatccccacctccttctccctttccgcccccggtttattttttcttcgtcctggatgcgtcggtcgcgtgtttgatctgactaagccgcggaggagggtgctagatgtccgtgcggtgggcggtggctcccgagggcgaccggagttaggtccttgccgccttcagtgcggtggggaaggttttgttctgggggtccgggtttctggctggttttgcgcagcgactgtggaagaggtgccaggctcagtcttcccgtttgtgtctcggccttccgcgagacattgaaggcgcagaacccaaagaatgggtaagagaggaaagtggtttagtgcggtgaagaaagtcttcagctcctccgatccagatggaaaggaagccaaggcccagaaggcagacaaatcgaaatccaagaggagatggccatttggaaagtccaagcactcggagccttccatatcgacggtgccaggcactgctccagcagtagctccgttgccatcaccaccagcaactcagccccactctctggagatcaaagatgtcaatccagttgaaacagacagtgagcagaacaagcatgcctactccgttgcgcttgcgtctgctgtcgctgctgaagctgcagcagttgctgcccaggctgctgcggaagttgtccgcctcacagcagttaccacggctgcaccaaagatgcctgttagttcgagggaagaacttgccgccaccaagattcagactgccttcaggggttatctggcaaggagagcattgcgtgcactaagagggctagttagattgaagtcgcttgttgatggaaatgctgtcaaacgccaaaccgctcacaccttgcaatgcacacaagcaatgacaagagttcaaactcaaatctactctagaagggtgaagttggaggaggagaaacaggctcttcaaagacaactccaattgaaacatcaaagggaacttgagaaaatgaagattgatgaagattgggatcacagccatcaatccaaagagcaaattgaggccaacctaatgatgaaacaggaagctgcactgaggcgagagagagcacttgcatatgcattttctcaccagtggaggaattctggtcgaactataacccctacttttacggaacctgggaaccccaactggggctggagctggatggagcgctggatgacagcaagaccatgggagagtcggttggcggcggcatcggacaaggaccctaaagaacgtgctgtgacaaagaatgcgagcaccagtgctgttcgagtacctgtatcccgtgccatctcgattcagagaccagcaacaccaaacaagtcgagccgcccaccaagccggcagtcactttcaaccccgccatcgaagaccccgtcagcctcaggaaaggccaggccggcaagtccaaggaacagttggctgtacaaggaggatgacctgaggagcatcacgagcatccgctccgagcgcccaaggaggcagagcacgggtggaggctcggtccgggacgataccagcctgaccagcacaccacctctccccagctacatgcagtcgaccgagtctgcacgggccaagtctcggtaccgcagtctactactgactgagaagcttgaggttcctgagagagcgcctctggcccactccgttgtcaagaagcgcctgtcgttccccgtcgtcgagaagccaagcgttgtgccgacagagaagcccagggaaagagtgaggcgccattccgaccctccgaaggtcgatcctgcgacgctcaaggatgcccctgctgcctgaccagtgaccaggccttatgtgattgttaggtttcgtgctcttttaacaccgtgatgtattatctgagttaggttgctttgttcgtgtcatcgtatgatctgtccgggttgattttgagacagttctaactgtgtttacagacaatgcgtgatgctaaatgtatgtgtggttggttggctttaaatgtactgatatgatagtatttgattttaactttgctaaggac

SEQ ID NO: 112523 - DNA, 2065 bp, Zea Mays
acattcggcttgtacttgcccgcacctaccggccgcgcccgcgcgttgctggtcagagccagcgggcagcggacgaggtcagctgcctccgcggctccctccttcggtcctttgacgcttcaaggagacatcgctccagcgcccctgagctgtccttggtcaatgggagtggctgaggctggcgtgcggacctaaaatccccactgatatcaaggcaactgcgcaagcaatctccctgcccctgctcattggtcagcaccagcagcaacagcagctgctggagtgctgttgcgttctcctcaagcgcaactgtgcaaggactgctggagtgcaagcacagttctgcttccactacttgaagtcgactccctcccactccagtctccaggggagagccgcattggcagcttgcctctgcccatgcccaggcattggagctcgtccccaatggcaatgcgtcaccagttcggggcttcggtgctgctgcatctactggtgttagcgggggcgggggccatggtcactgctgaccaggagagcgaccggatccgcgagctcccgggccagccgccgaacgtggggttctcgcagtactccggctacgtcaccgtcaacccggcgcgggggcgcgcgctcttctactggctcgtggaggcggtgccggcggccgggcccatcgcgccgctcgtcctctggctcaacggcggccctggatgctcgtcagtcggctacggcgcgtccgaggaggtcggcccgttccgcatcaggccggacggccagactctctacctcaaccccaattcttggaacaaggcggccaatttgctcttcctggagtcgccggccggcgtggggttctcgtactcgaactcgtcgctggatctgtacaccgcaggagatgcaaagacagcactggatgcctacgcttttcttgtgaactggttggagagattcccacagtacaagtacagggagttctatattgctggggaaagttacgcgggtcactacgttccacagttagcccagctcatatatgaaaagaacaagggcattcagaatccaacaattaatttcaaaggattcatggtgggcaatgcagtcactgatgactaccatgattaccttggtacctttgagttttggtggactcatggtctgatctctgacaagacttatcacaacttgaaggcgacatgtttgcttgaatcctcacagcacccttcacctgactgtgtcaagaacctgaatctagccagtgctgaagaaggcaatattgatccttatagtctgaatacaaagccatgcaatgacaccgcctctctcaagcttggcttgggtggacgctacccttggttgtccagagcctatgatccttgtactgaaagatatgcaagtatttactacaacaggccagaagtgcagatggcattgcatgcaaatacaactggaattcattacccttggcaaacatgcagcgatattgttggatcctactgggctgattccccaagatctatgcttccaatctaccaagaactgatagcagctggtatcaagatctgggttttcagtggggacacggatgctgtagttcctgtaactgcgacaaggtactcaatagatgctctcaagcttccaacactggtaaattggtacccttggtatgaccatgggaaggttggaggttggagccaagtttacaaaggactaacccttataaccatagcaggtgcaggacatgaagtgccactgcaccggcctcgacaagctttgatcatgttcagacacttcttgcagaacaaaccgatgccagcacaatagccagtcgaagcagaaatatagtgtaaactaccacagtcatgtttaatattttttaaattcttttttacttgatttgattgttattgttacaacatattgttcaattatctcgattgaatgtatgtacgcccagtagcaaatagggatacctgaaatttgtactgctggagctaaagagctccgctgtatatgtaatgatgatctttagcattatcgtccttcgccttcagtgtttggatca

SEQ ID NO: 112524 - DNA, 1118 bp, Zea Mays
ggtcaaaatcactgtacctccgtcgatgtttccgtcacagcgaagagaaatagagggggttaaaccagactgaacatcaagccagtgctagaaatacgaaacaataataataaaagaaacactggaaaattgcacgaaccctgcgtgtgcgcgtacgatagttaccactcgcggcagctctccagtccagctgtactgtccatgacaggtggggacatatgaatctccacctatcacgaataccctattccgctaagctcacccgcccgcaaaaacaccacgggcgcgggcgcggagaccgaccaccacggcaccacctccacctcctccggttgccttcggcctcgcctcccctccgtcctccccgtctccagcctccgggaccggaagctccacgtggcgcggcagctcgtacccggcgtctatggcggcggcagaagtgtactcgccgaccgcggcggcggcggcgcagcagcagcgggagaaggcggcgtcgcaggcgtggcggacggtggtagggtggatcggcttccttgttcaggttctgctccagatccttcgaggcacgccgtcctgcgcccagctcttatccttcgtcggcgtccgctacccgctcctctccgggcccacagcctcgaacccgtcgccggaggtggccttcatgccgctccgctccgagatcccagctgacgcggcacctgccccgacacctgcgcctgagcccctgggccgcctcaaggtacggagcttcgattttttttattcgattcggtggagcttttgagatgtccggggtggggaaatggcgcctttgtgaagtaggagtagaagggtttcaatcaaatagtatttggtcttggacgtgctgatcaaattggattatgcttcggtatttggggatgattgggattagttggagtggctgatttaaggctaacggagatttggtggtttagttcaggtagtattgttgatttttggttatagaataattagtatttggactatatagcagaccttccccgatgatttggttactagcatgggcaattagttgctctgcaattgcaaaataaggccttgatcgttttagtagtacatacttacggctgcattat

SEQ ID NO: 112525 - DNA, 1666 bp, Zea Mays
ggtcaaaatcactgtacctccgtcgatgtttccgtcacagcgaagagaaatagagggggttaaaccagactgaacatcaagccagtgctagaaatacgaaacaataataataaaagaaacactggaaaattgcacgaaccctgcgtgtgcgcgtacgatagttaccactcgcggcagctctccagtccagctgtactgtccatgacaggtggggacatatgaatctccacctatcacgaataccctattccgctaagctcacccgcccgcaaaaacaccacgggcgcgggcgcggagaccgaccaccacggcaccacctccacctcctccggttgccttcggcctcgcctcccctccgtcctccccgtctccagcctccgggaccggaagctccacgtggcgcggcagctcgtacccggcgtctatggcggcggcagaagtgtactcgccgaccgcggcggcggcggcgcagcagcagcgggagaaggcggcgtcgcaggcgtggcggacggtggtagggtggatcggcttccttgttcaggttctgctccagatccttcgaggcacgccgtcctgcgcccagctcttatccttcgtcggcgtccgctacccgctcctctccgggcccacagcctcgaacccgtcgccggaggtggccttcatgccgctccgctccgagatcccagctgacgcggcacctgccccgacacctgcgcctgagcccctgggccgcctcaaggtagtgcttgacttggatgagactttagtttctgcatatgaatcatctagtcttcctactattgtacgtacacaagctgttgaagcaggattacattgctttgatatggaatgcatatcatctgataaggatgctgaaggaaaacagaaggtgaatcatgtgactgttttcgagcgtcctggtttgcatgagttcttgcagaaaactagtgaatttgcagaccttatcctttttacagcaggtttagaaggttatgctagacctttagttgatcgaatagatgttcacaatagattcagacttcgtctctatcgcccatcaactgttaccacggaatacagagaacatgtgaaagatctttcttgcgtgtcaaaagatttcggcaggattgtcattgtcgacaacaatccgttcagtttcattcttcagcctttgaatggaataccttgtgttccattttcagctggacaacattctgatgaccagctcatgatggttatatttccactcctgaagcatctttctctccagaaagatgtcagacctgtattgcatgaaaggtttcatatgccagaatggttccaaaagcatgggatcccccaaactaatcagtctgtgtaagttttgctgcccttgttttgatgaaggctgtgcctattatgctataagccccttaagggagagcacttgtatattattatcaatattcatttagggttcttgataaaaccgagtcactgtttatatggagttgtcacatccaaagatacggaaattgtaatctagcataatgtcagatttgtatctgtgtagtggagcattttatatcaattagtaactgttgtatatcaccatctgctgtaaaactcgattgttgacagttaagatagtctaatgaatagttcgtggcccatcaatgtcaagttt

SEQ ID NO: 112526 - DNA, 1715 bp, Zea Mays
ggtcaaaatcactgtacctccgtcgatgtttccgtcacagcgaagagaaatagagggggttaaaccagactgaacatcaagccagtgctagaaatacgaaacaataataataaaagaaacactggaaaattgcacgaaccctgcgtgtgcgcgtacgatagttaccactcgcggcagctctccagtccagctgtactgtccatgacaggtggggacatatgaatctccacctatcacgaataccctattccgctaagctcacccgcccgcaaaaacaccacgggcgcgggcgcggagaccgaccaccacggcaccacctccacctcctccggttgccttcggcctcgcctcccctccgtcctccccgtctccagcctccgggaccggaagctccacgtggcgcggcagctcgtacccggcgtctatggcggcggcagaagtgtactcgccgaccgcggcggcggcggcgcagcagcagcgggagaaggcggcgtcgcaggcgtggcggacggtggtagggtggatcggcttccttgttcaggttctgctccagatccttcgaggcacgccgtcctgcgcccagctcttatccttcgtcggcgtccgctacccgctcctctccgggcccacagcctcgaacccgtcgccggaggtggccttcatgccgctccgctccgagatcccagctgacgcggcacctgccccgacacctgcgcctgagcccctgggccgcctcaaggtagtgcttgacttggatgagactttagtttctgcatatgaatcatctagtcttcctactattgtacgtacacaagctgttgaagcaggattacattgctttgatatggaatgcatatcatctgataaggatgctgaaggaaaacagaaggtgaatcatgtgactgttttcgagcgtcctggtttgcatgagttcttgcagaaaactagtgaatttgcagaccttatcctttttacagcaggtttagaaggttatgctagacctttagttgatcgaatagatgttcacaatagattcagacttcgtctctatcgcccatcaactgttaccacggaatacagagaacatgtgaaagatctttcttgcgtgtcaaaagatttcggcaggattgtcattgtcgacaacaatccgttcagtttcattcttcagcctttgaatggaataccttgtgttccattttcagctggacaacattctgatgaccagctcatgatggttatatttccactcctgaagcatctttctctccagaaagatgtcagacctgtattgcatgaaaggtttcatatgccagaatggttccaaaagcatgggatcccccaaactaatcagtctgttttaactggcaggatcatcgacgagcggaggaggaggttgaagtctgatgtggttgagatgttgacatgcattaaaaattgggaggatgctgaagcaaggatgcaacacatggtggatgacaaagagcttgaagaaacatttgaaaatgtttatcttgattagtctctttgtgaccatttgtgcaatgggactgtaatattatgcacctgaactttgtttattgtaaggacagtgaactttttaatgagttgggttgtactcttttttcctgtctaaggtttctcacaagggtgagttttacctagacaggtttttaacgaggcagccattgcactacagctcataataaaaatgtttt

SEQ ID NO: 112527 - DNA, 3250 bp, Zea Mays
gctaaacattactacttaagttccttgaaatgaagtcagactaaacatttgtctcttatgtttgcgcatcggatattctcacaacattagagctgtctgttcaggtagtgcttgacttggatgagactttagtttctgcatatgaatcatctagtcttcctactattgtacgtacacaagctgttgaagcaggattacattgctttgatatggaatgcatatcatctgataaggatgctgaaggaaaacagaaggtgaatcatgtgactgttttcgagcgtcctggtttgcatgagttcttgcagaaaactagtgaatttgcagaccttatcctttttacagcaggtttagaaggttatgctagacctttagttgatcgaatagatgttcacaatagattcagacttcgtctctatcgcccatcaactgttaccacggaatacagagaacatgtgaaagatctttcttgcgtgtcaaaagatttcggcaggattgtcattgtcgacaacaatccgttcagtttcattcttcagcctttgaatggaataccttgtgttccattttcagctggacaacattctgatgaccagctcatgatggttatatttccactcctgaagcatctttctctccagaaagatgtcagacctgtattgcatgaaaggtttcatatgccagaatggttccaaaagcatgggatcccccaaactaatcagtctgtgtaagttttgctgcccttgttttgatgaaggctgtgcctattatgctataagccccttaagggagagcacttgtatattattatcaatattcatttagggttcttgataaaaccgagtcactgtttatatggagttgtcacatccaaagatacggaaattgtaatctagcataatgtcagatttgtatctgtgtagtggagcattttatatcaattagtaactgttgtatatcaccatctgctgtaaaactcgattgttgacagttaagatagtctaatgaatagttcgtggcccatcaatgtcaagtttaaaccttgaggactaatgtcctgccttaccggtaaaatggcgcaattaatgtaaccatccggtaggtaatcattaatattagcagtaagcacacttatcagcacagataacatgtttgaatcttactcgccaatcgcaacaaccttaagtcagtgacttttgttattttatctgaaacattgtcgcccattcgccgaataagttactggaacatggagccttttatctgagtttctggacatcgaattcgttggagcttcttatctggcttataatctgggatgccttatcaaacttgtacgctctctcataaacgcctgcagccacaagataaagctccctcttgtcgatgcttgggtcatggcttagctcgccaaccagcacttcgagcgccttgaagtccttctgagcgccaaggaggctaatcatctgaaagtgcacccggtctgagaacacacaacctgcctccctcattgcctggtacagcgccgcggccttgtcgaactccttcagcttgccataagcattcatcgcggtggcaatgatctctgagtctggcaactggcccaacttcctcatttcatcgaacacctcgatcacattacggtgcctccggttcttcgcgtacaagtccatcattgctctgtgcaccgatgagtccttgatctcaccggtgttgaccgcacgacggaacagccatgcggcctcttccagacgaccggcactggccaagattttaatggctgtctccttggggatgccctccgggtctttcagatcgcgcaacaaacgcttggcctgtgagacaagcccggcacgctcataggccactaccattgtctggtacagcactgggtcgatctccgtgccagcttccctcagcttctcaaacagcctggcagcgcggtcgagcttcccggccttcacccatatggacaagatagtggagtaagtgatggcatcaggctggacgccaatggcctgcatctcctgcaccaaccttccagctttctcgtcctccagcgacttgccgtagatggtaatcatggtgttgtacgtcaccacattcggtttgacgctgctaccagcgccaccgttgccatctgaagtgctgcgcatgaggtcaaacaggtgaactgcctcgccgaacagccctgcatcgccgtacacacggagcatggtgttgtaggtcaccacgcttggcggcacgcctgcccggcgcatggaccagaacagccggtccgcctcgcgcgcgaggtccagctgcccgtacgcgttgaggatgatgttgaacaccgagatgtccggcttgacgcgcgccacggcgcgcatgtgcgagaacagcgacacggccgcgaggtgccgcccccttcgcgccagcgccgcgaggatgggggagtatgtctccgcgtcgggcgcgacgccgtcggccggcatgtcgtggagcagcatccgcttggcgtcgcggagaaggtcggacttgcagtaggcggcgacggccgcgttgtatgccttgaggtcgggcctgatccccgcggcacgcagccgggagaacagcgccagcgccttgggcgcgtcgccaccgcggagggcgaggtgaatgaggttggagaagaggatcaggtccggagccacggcgtcatcctccatgagcggcaggaaggtgagcgcgtggtcgaggtggcccgcacgggtgagcgcggcgaggagggtggagtacgagaacgcgtcgggggtcacgcccctctcccgcatctcgaggaggaggccggaggcgaggcggagctcgccagcgcggcaagcagagcggagcagtaggttatatgggatgaggagcgtgggggcggggaggtccggcgcgaggaggtcgagcagcgcgacgccgcggcgggggtcggggaggcgggagaggagcgcaccgaggaggcgcgcggagacgggtcggtgcgtggcgagcacggctgccaggtcgggagccgtccgcgcggccgagagcgcggtgacgagggccgggacgtcgatcgtacggtcatcgtgctgccgttgttggagctcggcggcggacttgtggcgctggtggagggggtgagaagaggggaggttggggttcagccagacggatttcgcggcggggagcctgcggtgagaaggtgatgggagcgccgcggcagcggccggggctgtagtgggcggcattgggtgtcggcgtgtggccgcgt

SEQ ID NO: 112528 - DNA, 1258 bp, Zea Mays
ctggaatttcttgccaacagccctctgcgggctgcggctctgcccttcttcctgcagtagagagccgccgcccctcccaaatccccttctccctcacgtctctctctccccaagccgctcctcaccaagcccatctcagccgctccctccagccctcacctcgccggccctagctgctggtcgccgtcgaccgcgagctctccaacgcaggcggctcgctgcgccttcccctcgccggtcatccctgctccctcggcttccaaaccatggccgcctctcctccatctcctccctccccagcgcctccctctctgctcctgcactcggagcccagtactccagctcgccaacgctccctccctgctcaccggccaccaggaaggtccgagctcgcccatcctctgctcggtttcaacttcggtcgtgcctgcagaccgctcccttgctcctgcagctcgccccatcccctgacttgtcgtgtcttgggccgtcacggcactctcatcttgcgtcgtcgccttattgctgttctggtgaggccatgtcgttcttgtcctactcatttccctaccggcatcaaatccttactgttgtttatacgtatgtttttgtgtgagttgggaggtggagaagaaaggaactctagtgcatcacacaccttgtgcttgacgaaatgtttgaatcagaatttatcatcgcatccgcaatttggtttaatcatgcactacggcatgattaatggagttactgaagaagggcacccaattcaattgcccccggttgctgatcggacatttcatttgctcaaacagaagttggtccaagctcctgttctaggtcttcctaacgacttcagcaagggtttcgtgctagaaacagctgtcttcatgcaatcgaagaatctcgtggcttatttgaataagcacctttgtccaagaaaccaagcttcatcgaggagtgtttggcaatctttatggcaattattgacgaatggcggccatacttgcagcaccgtcaaatcgtgattgtactccatcttactgagcagagggtgaccttacgtttgtagcataaagtcctgctcaagctcattgacttgcattatcaaattcgcacaaacaggcaacggctgtaccgagcgactgatttggcacatatatatataagccgagacagtgggagaggagagctggacaacaggcaacgaattgtaattgaatcttctgaatactaaaggaaagcggtcacatcccattaa

SEQ ID NO: 112529 - DNA, 2089 bp, Zea Mays
atgatgaacccagtggtgacagcggcgctgtacaggctggtgaaggagagcgcggcgatgtactgcgagctcacggaggtgatggtcgtgctcttggaccgcttcgccgacctgggcactcctgcctgcgtgcgcgtccactccatcttcaccagtactgcttggaatttgggtatgctgagttcacgcttcacagacagaactgcttggaatttggatagtgcactaaccacagttgagacattagcatcagcggctatttgtggcatcgtacattcaataataggtggacaaccactattgatcgtgggtgttgcagaaccgacaattatcatgtacacttatatctacaattttgccaaaaatcagccaaacctgggagaaaaaatgtttctgccatgggctacctgggtttacatctggacagctgttatgctgttcctcatggcaattttcaacgttgcagctattctaaacaaatttaccaggtgtactatatactgcattagccagcaggagcgcaaggtcatcgctggcactgcatggcaaaggagcttaattgcggactacggtgttccactaatggtgatactttggacatcattgtcatattcattgccaagcaggatcccttcaggggtccctaggaggctcttcaccccacttccttgggaacccaagtcgctccagcattggacagtagcaaaagatctgttttcagtccctacagtacatatattcctggctattgtgcctgccaccatggtcgcagggctctatttctttgaccacactgtagcttcccagatgagtcagcagaaggaatttaatttgaagaacccatcagcctaccattatgacattttggtcctaagcttgacaaccttgatctgtggtcttcttggcattcctccatctaatggagtactcccccagtctccgatgcatacaagaagcctagcggtcctcaagaggcagttgcttcgcaagaagatggtccaaactgccaaggagggcatgatgaataatgctaccagttccgaagtttatgtcaaaatgcaagatgttttcataaaaatggaccacggaggcgacactgtttctgctcacaaagaaccgaaggacctgaaggatgcaattattccagaagggaatggatcaggaacagtgcctgaagtatttgatcctgaaaagcatgtagatgcttacttgcctgtccgggtgaatgagcagagagtaagcaatctgttgcagtccctgttgattgctggttgtattagagttacaccgctcattcagaagataccaacatcagtcctttggggttacttcgcctatatgtccatcgacagccttcctagaaaccagttctgggagaggatacaacttcttttcatcacgcctcaaagacgctacaaggttcttgaaggagcacatgcatccttcatggagtcagtgcctttcaacacaatatgcaccttcacactcttccagctaatctatctgttgatcgtctttgggatgacatggataccagtagcaggaatcctcttaccactgctcttcttcttcttcctcattatcatcaggcagcacttcatcccgaaatattttgatccgagccacctgagggaattagatgcagccgagtacgaagaactgaaaggttttacacctgatccatcagtgtgtgaggacgagtctgttcgcagcggagatgctcagcctggatatgcttccgaaatactcgaggaattcacgactcaccgtggagagctgaagcgcaggaactctaccttccatgatgggagactacttcagcttaactctgtcaagatgacgagagagctttctcgggttccttcttggcttacatgaatcctagaagaatacgcggtttctgaatccgaactccaattaagcatgggggtgcgaagtctcatggcctcattgcttacaaagtattctctgaagcaagcaactcattttaggtactgactttggggcaaatacacggggatgagcagaggaatgtagcagagctggaaaatgtttgtaaaaaataaatacaaaaagaaatgcatgttaa

SEQ ID NO: 112530 - DNA, 970 bp, Zea Mays
atagctctagggctgaaaccagcaaagccaacagaactgcacagtgtagtagttgcacataggcgtccgcgcgtcgtcctagctatggatccatatcactaccaaaccatgtatgacccacgcggcttccccatcatccacccgcagccttacctccagcacccggtggccggcgccctcggtgacagcagggtgcgcggcggcggcagtggcgcgcggcggcgtcctggcgccaagctctccacggacccgcagagcgttgcggcgcgcgagcggcggcaccgcatcagcgaccgcttccgcgtgctccgcagcctcgtccccggcggcagcaagatggacactgtgtccatgctcgagcaggccatccactacgtcaagttcctcaagacgcagatcagcctgcatcaggccgcgctgatgcagcacgaggaaggatgccatgctgagctcgccgcctattccgcggtggcggtggttggtgacaacgaggtgacactcgcgtcccatggtcgtaccggcgcatgcgacgagatgatgcagctccaggtggcggcggaggaagctttgagttatggtgttgatgcccatcagccgtacgggctcgatcccaggcagctgagtggtgggcacgagctgccaccgctgcctgcttcttgcatcttcctcgaggagcctgcagacgcatgctactctgtgtgtgacctcgacgacggggacaccggtctgcccggctcttactagagtagtagtagaagtttcttaaggtagcatcccgtgtgtgttggtgtctgctagacgctagtacgtctaattagcaaagtttagctagtactcgatcaattgtctgtctagttcgctcagagttaaagtatatgatgatgcatctgcatatatgggctctgtaattctgttatccgctgatcgcagatgatacaccgtatgtaatcacatgtatgtatgttgccta

SEQ ID NO: 112531 - DNA, 110 bp, Zea Mays
gaactaagaagtcggatgggggtcggcatctacggcccgcaacacttcccggtaaacaacattccgagtctgcgatccgcaggaaccatcaggatttcaatcaaaattct

SEQ ID NO: 112532 - DNA, 1512 bp, Zea Mays
ccggataaaggccgccctcctcgcagtacagcaaacggcggccaacaacaaccaccccggtacacgcttcccaccaaaagcaaccctgaccctgacctgcgctgcctgtgaccccgccgatccgagcgtctccatggccgcttcgtcctccgaggctgccacagccacgcccacgaccaccgtcggactcggagggagcgggaccccaggccctccgccgccaacgccatcgaaccaccacgcggcgccgtcctccgcggctggtggggccacggacgcctcgctctctgctttcctgcaccgcctcctcctctcgtccccggctccacagctacggtctccactcgcagctcggtcgcaggcgtcgccgccctcgcttccgcctctcgtctcgctcgagtcccccgaccagcgcgccctccgcaacgccgccgacgtgggctacttccacctcgccggccacggcatcccttcggggctaccgtcgtccgcgctcgccgagctgtcccggatcgacgcgtccacgcgcctggagtctaatcttcgcacgctcggcttctccgtggaggaaggggaagagcaggatgtggacggcggcgccgacgatcccgcggtagtgttcgacgcctgcgagggggacttggacgcgctcccggctgcggcggagtacgcgcgtcggatgaaggacgtgggcatgcgggttgtcgcgcttctctccgggtgccccgacacgggcttccgggagaagcccttcgcggaggggaggaggaagccgcggtgcctgctgtgggcctcccgggtctccaccgccgatacggcacctccggccgtcgggaaggcgaaggcgtacccgtacgtcgtggcgcttcattgccagtgggaggcatcagggcaggaagaggcgccgccaagctgggttatgaaccacggcggcgagtggacggcagtggccgcccgcgacgacgcgatgcttgtcaccgtcggcgacattgcccaggtgtggagcaatggcaagttgaagaaagtgagagggatggctcgccccacatccgcaccacccatggcggcgcagcatggcgagaccgaccgtctgtcgctgacggtccttatcactctgcctttggacaatatcgtctcgcccttggtcccgctctccaatgcggccggagaaggccgcgaggccgaggcaaacggtgccggagccgacgacgaggatggatggaggtttcactctttcctactggaggactatgcgtggagggtgtacaaccagcggcttcagttcaaggatccattggtccggtatcggatatgatatttgccgcgatgatctatagcgcttctttttttccttttggtgtgccaatatgcaactcatgtcatgtgtgacttcgtgttgtgatctactatttgccttcggagtggtttgagtacatcccgccttgggtttcaatgtatgttgctgacgttttgacctttgctcaaatacctgagccgctgagggattcggac

SEQ ID NO: 112533 - DNA, 815 bp, Zea Mays
cctcccgaacggcaacatttcttttctccaaaccatataccctagcccgtgcacaggtgggcgcccgccgccacctgcggctcggtggactccggcatcgacacccctggcccccagcgccgcagatcgcaagctctcagcaacgcgtgcttggtaggaacccgtgccgaccgactcttcctctgcgggacggtctcgagtttggtcgggagatgggtgacgggagctgctgcgtctgcaaggaggcgccgcccaagtacaagtgcccttcttgtcgcacgccctattgctctgtcacatgctttaaaaagcacaaaggtactgtcccaaccttgcagtttgtcaactttaaatttgtcaatgatttaatgtattctgacaggactaaagaatagattggaatgctttttgtactgtgatctccgacttagattgtttctcttgtcctgggagcagtggccacatgcttacaagctgtataacaatcaagtataggagttccagctgccttacatgaatgtgttgttatttggtgctaaatattgctttctttgcagaggaatcttgtcaaaagatattgcatcaggaagaaattagcaagtcagcattgcaggaggaagttagtgagtcctctagcttttgggaataaaattattaaaatgtaactgctttattaacatagttggcaatagggacttactccagttagaacagggtatgaggcgtaaattgcgactgttgtttgcatatgtttgtccctaatcgttacatactttggtagtttccttgggtgaagatatcaactttgttagttc

SEQ ID NO: 112534 - DNA, 1082 bp, Zea Mays
cctcccgaacggcaacatttcttttctccaaaccatataccctagcccgtgcacaggtgggcgcccgccgccacctgcggctcggtggactccggcatcgacacccctggcccccagcgccgcagatcgcaagctctcagcaacgcgtgcttggtaggaacccgtgccgaccgactcttcctctgcgggacggtctcgagtttggtcgggagatgggtgacgggagctgctgcgtctgcaaggaggcgccgcccaagtacaagtgcccttcttgtcgcacgccctattgctctgtcacatgctttaaaaagcacaaagaggaatcttgtcaaaagatattgcatcaggaagaaattagcaagtcagcattgcaggaggaagttacactgcacaccacatgcactgcagaatctccaaatacagcgtgccctacaaaagctcttgaagttgaggacctaagctggcttgttgacaacaatagactaaggtccttagcggaactgaaagggatccaagacgctctcagggatcctgaactgcagagaatgatacttcaaattgatgggtcttccgaatcagaaaaagaattggagaaagtgatggaaggtcaagcttttcgcgagttcactgataagattcttgacattgtcaacccacaagaataaccgtctaccctgtttggtgggattctgacgctagagtaaacagaagcatccgggcaaacaaagcaaaagtggagctcatctctgttttcctttttccaggatggtataattcataacatatcttgagtcgcctgtttttccatgatggggtagactttagaacacatactgtgtcgcctggtgaaaggaaattacgtctgctgaaaaatctctcttgccaaatatagtttttcttctgtattctagtgttgtattctagtgtggtagacagcgactctacactgactactgagggtgtgtttggtttggttttgacttttgctctctaaaaacgaaaagcaaacggcccgagccagaaagcagcttttttcaaaagcatgctttcttgcaatgcaaattgaaagcacatttgaatct

SEQ ID NO: 112535 - DNA, 778 bp, Zea Mays
acaaaatgctcttgttgcttaattatgtgtttatgaatgcctataaattgtttaactgtaatctccctgtttttcggcagcactgcacaccacatgcactgcagaatctccaaatacagcgtgccctacaaaagctcttgaagttgaggacctaagctggcttgttgacaacaatagactaaggtccttagcggaactgaaagggatccaagacgctctcagggatcctgaactgcagagaatgatacttcaaattgatgggtcttccgaatcagaaaaagaattggagaaagtgatggaaggtcaagcttttcgcgagttcactgataagattcttgacattgtcaacccacaagaataaccgtctaccctgtttggtgggattctgacgctagagtaaacagaagcatccgggcaaacaaagcaaaagtggagctcatctctgttttcctttttccaggatggtataattcataacatatcttgagtcgcctgtttttccatgatggggtagactttagaacacatactgtgtcgcctggtgaaaggaaattacgtctgctgaaaaatctctcttgccaaatatagtttttcttctgtattctagtgttgtattctagtgtggtagacagcgactctacactgactactgagggtgtgtttggtttggttttgacttttgctctctaaaaacgaaaagcaaacggcccgagccagaaagcagcttttttcaaaagcatgctttcttgcaatgcaaattgaaagcacatttgaatct

SEQ ID NO: 112536 - DNA, 928 bp, Zea Mays
aagacggacgcgctgcagaagcttctgaagagagagtataaatacgggtttgtgtccgacttcgagtcctttctccatccccaaggggctgtcggaggccaccgtccgccgcatctcggagctcaaggcggagccggcgtggatgctggacttccgcctcgccgcctaccgccgcttcctcaccatggtcgagcccacctggagcgacaacgagtacgcgcccgtggacctgcagtctatctgctactactccgcgcccaaaaccaagcccaagctcaatagcctcgacgaggtcgacccggagctgctcaataccttcgaccgcctcggcatcccgctcagcgagcagaagcgcctcgccaacgtcgctgtcgacgccgtcatcgactccacttccatcgccaccacccaccgcgaggcgctcatggccaagggcgtcatcttctgctccatctccgaggccatccgtgagtacccggaccttgtcaggcgctacctcggcagcatcgtaccgccgggcgacaactactatgccgccctcaattcagcggtgttcagcgacggatccttctgctacgtgcccaaggacacggtctgccccatggaaatttcgacttacttcaggatcaacgacaaggagacaggccagtttgagaggactctgattgtagccgatgagagaagcactgttagctatttggaaggctgcactgcaccagcatatgactcaaatcagctccatgctgcggttgtggagcttgtgtgtgagaatggggcagagattaagtactccacggtgcagaattggtactccggtgatgaggaggggagaggaggcatttataactttgtgacaaagaggggaaggtgcaaagggcggggttcgaagatctccttccaggttgagacaggatctgctattacatgg

SEQ ID NO: 112537 - DNA, 741 bp, Zea Mays
acaaggggaaaaattcacgcagccggattatatccaagggcatctctgcagggaagtcaaggaattgctaccgtggcttggtcctgatgaactctagtgcagagaatgcttataattcttcacagtgtgactcattgttgatcggggataatgcggctgcgaacacctatcccaccattcaggtggggtgcactagtggccgggttgagcatgaggcaagcacttccaaaattggagaggatcagctattttatttccagcaaagaggggtagatcatgaaaaggcagttgccgccatgattggtggattctgcagatctgttttcgagcaccttccctatgaattcgcacaggaggtggacgcactcatgaacctgaaactcgagggatcagttggctaatttgttggctcagcgatttcgtgtaatactccatgacagccagttagctagaaaatccatgtgtacagcagtacgagaagaataaattacaggataagtatacatttcctggctggttgtaatactgaatgttgatgatgtctatggcaattggcaacgaactatgaagatgtagcagttgagcctgtttgtcttctgttgcccagtttttgctattgctgtaagcgagctcacatggctcacctatacaagaacggaaatcaacgtgttggcgttacagaactgtataggtcagtccttggtatgtcgtcaatgataacaagttgtcctacttgttttc

SEQ ID NO: 112538 - DNA, 1137 bp, Zea Mays
atggatcataccatctccaagcgcgccacggagagccagtgcaacaatgccgacgggcagccgccaccgctgctcgactcgccgctccccacgcctcgccggtcgtgcacctctgtcgacgcgttacgaattcgctgccgccgcgacgcatcgccgctgcggacgcatgtgccgttctcctgggagagctccccgggcgtgccaaagaacagcgggtgcggcagggacacgcacaagaaggcgcaagcgatgccgccgccgaggccgccgcccgggcgcctacgacagccgtacctcgccaggaacttgtactacggaaacacgagcgaggcgagcagcgacgacgacgacgacaacaggtccttctccgacacactggacaggatctcctcgcccgagcggaccgggtcgttcgaccgggtcacgtcgaagcgcttcgaggacatcttcgtcggccgcgccacgagctttgccaaggaccggacccaacaccccggcgtggaagccaccgacttggcggcctcgggcgggcatccgaggcaaccgcgtcgggacagcacgcgccgcagccacgatgaggaccgtcggtgggtgcctaggctcctcaacgacagcgtccccatgcagctgatgcagcggatcaaaatggatgcggacgccgaggagatgaccccaagagcctgtggcctcatgatgttcttcccctggagcgcaaagccggtggtctacggcttcaggaacccggcggcgcagcacgcaacaacgacgacgacgactcacgccggagccgatgtgccttcaccttcgcacagtcgcagggtcaccaccaccaccctacgcgatgtcattaagcaagatagccaagccgttagcagcgacatgccgcagccgcgcggagaaaagaagaggggccgcaacgacttgccgagccgtcgatggggcgtgtcgtcgttgcttgacacgagcaagaagtactgcactgacgcccggaaggctctgagcaagctctccatcggactaggagcggacggcggcagccccagggtgaacaggagtggcaagctgcatgatggtttctcgtcaacgccggcgacgcccgcaaagttgacgcagctgaaggctaacagaaactgaggt

SEQ ID NO: 112539 - DNA, 633 bp, Zea Mays
ctagaaacagagcagcattacgaggccaaaagtaagctgctgctgttcttcgacccgtcccgttcgttcgattcgttctttccgccatggaggctcggaggaagcccgcggtgtgctgtgcccttcttgtgctgctcatcgtcgcctccagcgcaacggtgtcgactgctcatgacgagagctgctggaaggacgacgaccaccaccctatctgctttcccgaagactgcgtggcgacctgccaggatcacggccacgcggacggccgctgcaactgggcatggtcgtggaggccgtattgccagtgcctgttggcggactgccaataggcgcgaacagctgcgtcgcatggcgtcctggctgcctcgccggccgatgaaggatgaacggttgcggccgatgatcgatgtgtccgtcggcatgtcgatcactcattgaaaccccctctaatcctgtgcggtattattttcatggcacctgtggccattaaagatccatggacacgtacagtaccaatacatgattcttcacagttcaactatcgatgatactgttcatggattttcattccgatacaaactcatttcgtggttatttggatgtcttaaattaaatacagttttagcaaaaaaa

SEQ ID NO: 112540 - DNA, 157 bp, Zea Mays
cttttatgtgtttccccgtttcgttgttttcggttctcctttgcctttgtttcccttttctgttctttgggggttgagctctgaggttttcatacagggtttcatctctagcctaccccaacgtgcttgggacaaaaaggctttgttgttgttgttg

SEQ ID NO: 112541 - DNA, 111 bp, Zea Mays
tacgcgttcaacctacaccaaaatatattttcctctcactataagagggaaccgaaataagttttgctccatgacaaagtttgcagtcaactttgaaatcatctaatatag

SEQ ID NO: 112542 - DNA, 1219 bp, Zea Mays
ctttccaacgtcacatcccgatccgcccgtcgcggcccccagatctctctctgctttagcgcaactcgcgctccggtgcgcgtccactcatcgcgatcgcctgctcgaccgatcgatagctcaagcacgacgagaggagagctacctatcgcagttgcgcgtcttccttcttgctcactctcagtctcttgctcgctcgccagctctttcccacttgcatggatccctccgggcctggcccgtcgtcggtcgtgggggcaggaggcggcgaggcaccggccgtggcgccgcagcggccggcgcagctgagtaggtacgagtcgcagaagcggagggactggaacacgttcctgcagtacctgcggaaccaccggccgccgctgacgctggcgcggtgcagcggcgcgcacgtgatcgagttcctgaggtacctggaccagttcggcaagaccaaggtgcacgccgccgggtgcgcctactacggccagcccgcgcctccggggccctgcccgtgcccgctgcggcaggcgtgggggtcgctcgacgcgctcatcggccgcctgcgcgcggcgtacgaggagagcggcgggacgcccgagtccaaccccttcgccgcgcgcgctgtgcggatctacctgcgcgaagtgcgcgactcgcaggccaaggcgcgcggcatcccctacgagaagaagaagcgcaaacgcacgcagcaggcggccgcggaggcttcgacgagctcgtcagctgctgctgctgccggcgggagcgggagcgggagcggcagggctgctgctgcttcgtccgccgctcaggctggagggagtagcgctgcaccgagcaccacttgagatcgagtacagtagacctgcagatcttgtttaattatcgtctccgcatcgcaagatttgagctttcattctacttttgctccacatatgctgcttgcttctttctttctctcggcagtttcatcctttttttgtaacgtgtttctgaatcttttttcctttccgatttattagctaggtcagtatatgactagctagagagttcgtagtagcagccgaaggggggtgaatgggctgattaatcagtgtgactatgtgttcatgatctgatacgcatatgtgtatatatatatccttggtaaagcaagctaggacgatttgaggcatggtaatggcttcctaacttgctaataataacatctcagctcaaa

SEQ ID NO: 112543 - DNA, 104 bp, Zea Mays
gccaaacaatggcgggatattctcgacgacgatcaacaaatggcggggcactcaaaccaacaagaaaccaagcacaacaccgaaagcctccatgaactgattga

SEQ ID NO: 112544 - DNA, 162 bp, Zea Mays
tgagcttgggaaacaagtgagttctggtaaaatggtaattgatgccctctcctcaccggttggcaccaatatagctacacacattcctccagcctattcacattgccaacctgtcacgtgcctcacatatcagtgtactataaaagggagacagtagctccc

SEQ ID NO: 112545 - DNA, 2422 bp, Zea Mays
agggagtatgaaatactaagatagctaattaagtaaaaagtacacagcacccctaattactcatagctaaaggagaaatctagccaataagaaacaaacgatactgacacaataggttaaaattaccagttgatacttgatacagaaacacctacagattttacacagctggagacaatagcatttcctcatctgagacaaagtccagcctttttgcaacacatcattgagtccaaaatgtcaccataactaaggttgtgatatccactaaaatagctagactaatcacttggccaccccttcaaatagatgttggatgcgttcctgaacatcctctggggtgtatttgatgaacaagtctcgggcagcttcaggagatgatctcaatctcccaattaagcctctatatgcaggcataacagaatccactatcgctgacttaacatctgctcgtagctgctcatctgcaatcacccaatctgactgcaccgcgcaaatctcctccaggtagctgttgaacatctgcatcttctgaagcatggattttgcagtgatactgccaacgccaggacctccggtctgcagcactgatatgacttttgcccaggccccacgctggtactccacactccacctgcgcaccctgctcattatctgcttcatccattcatcaccaagcaaaaccccaagctcactgtcattgaccttgtgaataatgtatttcccattattcatcaagaatatggaagcaagtggtggatccctgtatatctttgatttggtctccaaatttttgtgaagcacatccatgatccaagctatgtgcacagctagcgacgaagtagggcgatcagggtcgacagcaatagccgctgtgccaacagcacccaagtcaccttccatcacctcttccaatgtttgccgtgaaccacaagcagcacggagatagttcatgacataccgagtgataggatgtataccaccaccaggcacagcaacacgggctgggtcacggcggatgagattttccagctccatgaatatacccttgattgaggagccaagagtgttgcatacagctgatacctcagcacgtagagctgcagagtagggatcagagaagacaggatcgaggtcagaaaggaggtctcgtactgcttcatacatgtcaataacacggaagagccgttctggcgcgcggctggcagcagcaactgcatctccgaatgaaataagctgaagcgcctgggtgcgcacggcagcaacaaaggcaaggtcgccgtacggagcaaggccttcgaagacacgatcacagaggcggcgctcgctggggattaggatgcgaaacaccatcttgaaggctgggatccagcgagcaatgtcaaactcgagctcctcccatggtaaggagtggacctcgtcgaccgtacgggaacggatgccaaggcgagcgacgctctcgtcgatgaaaccgcggcgtgcggccgcgtatgcctcggcgcactcgcggccaaagccagcgtccaccatccgccgggcaatctggtgaacatcagagaccgagcccggcggaagagcatctataacgatgtcgaagtccgagaccggcctcgcgattgggattggctcgtcgccaaagccgtcatccgcgtcgtactcatcctcctcgctttcatcggacccgaacccaccggtaacctgaggcgccgcgtcgtcggggcgctcgatgagagcccgaaattcgtcctccagccgggccatgcaccggctcagcagctcgtcggcgcggtcgagcagcccgcggttggtcccggcggcatccagctcctgcacggttccgatgaggtcgtccaccgcctctaggaacgcgtccgcgtccgctgagtccgcccatatgagcctatccatggcgacgaactgcgagatctgccggtccagcgtgcgcacggtccgctccagcgacgtcaccgggggcatggccgcggcagccgacggcgccactggagggggcggcatgggcggcgaggctggcacggagcgctccccagcccctccgaccgcggccgccgcagcagcggcgcgcgtggcgtatagcttgtcaagcgagaggcggccgtcatagttggagaagaccttgagtatatcctccgtcatggtgtcggtgcggccaagggtctggacgatgtgctgcaccgtggcgagcagcttctcctcgccgttctccgccatcgggcgccgagcgtggtcgccggacgcttctcccctcccgtcaatcagcgtcaggttcggactagggtttgagtatgcggcggagagggccgtggtggggtgcgattgtgttgccgtgggggtttatcaggagttatttgaatttgtaacattttcgtcacgcggcttcgccactttattactacgcagccgt

SEQ ID NO: 112546 - DNA, 874 bp, Zea Mays
taatctaccggcctctttaacctttccttagctacggtaaaaatcaattttgcccctcgctgtaaccacgatgctctggagggcggcggcggcggagggcgaggaccacttcgaccgggtgcccgactccctcgtgctgctcatcttcaacaagctggccgacgcgcggtcgctggggcgctgctccgcggtgtcgcgccgcttcagcgcgctggtcccgctcgtggacgacgcctgcctgcgcatcgaccgcgtcatccccgccgacgccgccgacgcgggggcgccgcgcccgcgcgccgcgctctcgcacctcctcgagtccgtgctgctcgccgtgctcaagcccttcgcgcactgcgacgccaagtccgcgtcgccgcaaaagcacgcgcagcagcagcagcagcaccactcgcccgcccaggtgctgaggaacttcagcagcatccgcagcctccggatggagctcccggtctccgacgtgggcaccgacgacggcgtcgtgctcaggtggaaggccgtgttcggcagcacgctgcagagctgcgtcatcctcgacggcaccagggtggaccgcgccgcggccgcgggaccgccgcacgccccctcctccgctccccccgcgggcgacgacgacggcggcagcatcccggagtccctgtacaccaacggcggcctcaagctgcgcgccgtctggaccatcagctccctcatcgccgcggccaccaggcactacctcctccgcgagatcgtcaaggagcaccccaccctggagcgggtggcgctgacggacgccgacgggcccatgaaggaggccgtggccacgctcggcaagcgccacgcctacctgctcgagatgaacggcttctag

SEQ ID NO: 112547 - DNA, 1395 bp, Zea Mays
gggttcgtactcgtcgtggaagaggtcgacccagtcccagttcagattccgcaaaacaggcagtcaggctcaggcaccaacaccaaccatggcctccgctgcgacacctgcgcctttgctccccgtgaccagcacggctgccggcggcggctccgcgccgtcctccgccacgggcctctccgacgcggcgctcgccacgccggccttccgcctcttcgtgagccggctggccgagacggcgcggcgctcgctcgcggaccggcgcccatggacggagctgctggaccgatcggctttctcccgccccgactccctctccgaggccacctcgcgcctgcgccgcaacctcggctacttccgcgtcaactacgccgccgtcgtcgccttctccctcgcggcctcgctcctggcgcaccctttctccctcctcgtcctcctcagcatcctcggcgcctggtgcttcctctacgtcttccgcgcccccgaccagctcgtcgtgctcttcggccgcaccttcaccgaccgcgagacgctgcttggccttaccgtcgcttctgtgctcgccttcttcctcacctccgtggcttcgctcatcatctccgggctgcttgtcgggggcgccattgtcgcagcgcacggcgcctgccgcattccagaggacctcttccttgatgatccgagcgctgcgtccagtggaaacaccaccagcaggctgatctccttccttgcgtcgcccggatctggggtttgatgcatcaaggaccggtaggaaattcttgtgctcggcgaattcagttgaagtcaaatagagatctgatccagaagctgtataaaccagctccttgctcatgtggtacctcacctgcgagtagcattgtataagtggatccgatttttctgttctactttgtgtggaattacgcaaggatctgcaattgctgtacttctcttgcacttcaccagatctggtgacaatgaccattaagcattgtcaaatgccaacatgtatcggtgtgatctttacattcatcattcatgtgtacaactctacatcatgacaaattttatggatctctggttatttttgcctcattagaaattttggtcctcgtgtacaaaatccattgtcaactctggatgcttaggggctgtgatcagtttttaatgttgtatgcaatatttgtgggtttgatgttctgagcaatattatactgtggtaaatcatatgacaatgctaggtttataagattatataagttctttttttttggagagaacataactagtacagtacgttctaaaatgatgaagttgtacattagttaggatctcaggtagattgcatccttatattagccttttcaccctacaactgtgcctgagtgtacagaaatt

SEQ ID NO: 112548 - DNA, 2027 bp, Zea Mays
atagcacgaaatggttttgccttcgcttttgcttatgcgtacgcgcggcgaatcacggcgcccaccttccaaccggacttgagtcacttgactccgccgcgggattccccgccagatctcattctcgccccaaccctaaccgccgacggtggccatgatggccaccgagcccttgtccccggggaatctcgtcgaggacgtcgaaacactacccctggactcctcctccactctcgcggctacgacggacccgctgctccgcccacctcccccctcgtccaccttctctcccaccgccggtgagaaccatggcgcgtttctggacgaggaggatgaggacgtggtggatgacttcacgcctccgctggctccccatgccgctacggccgcgacgaagtcccgcgaggcgtcaccgtggttcgctgagatcactgtctccgagcctaggaagcacgcggagcccgcgaccggagccgtgggcgtcattcccggctcggccagctacgtctcctacctcatcgccactcaggtgcccgacggaggcgagttccgcgtgcgtcggcgattccgtgacgtcgtggcgctcgccgaccgcctcgcggagacccaccgcggcctctttgtaccggcgcggcccgacaagagcatcgtcgagggccaggtcatgcagcggcacgacttcgtgaaccagcggtgcgtcaccctccagcgctacctccgccgcctcgccgcgcaccccgtcgtcggccgcaaccccattctccacgccttcctcaccgagcccagcggcatccccacttccgacggtgagtctcccaggtggagccctgcgatgagtgctgctacgtccatggctgcttccgctccagtgacgcctaccaagagtgggagagacttttttggggtgttcaagggcctgaagcagacagtgacgaatgggtgggtggcggtaaggccgcctctagtggaggaggagattgacacaaagtaccttgtgcacaaggccaagcttgaggacttggagaaacatctggtgacagcatctcagcaggcagaggcatttgttaaagcttttgacgatctaagatcaacgacaggtctcttgggaatgtcattcatcaaactggctatgtttgaaaaggagcaggctgcgtgtagttctcagaaaagacgagctgctgacatcagtaattttgccagtgctgttattagagttagcagatcacagacaaaactaaacactgaaattgtaaaacatctgggtattatccatgagtacatggagacaatggcttctgttcataatgcttttactgatcgttccaatgctttgcttcgtgtgcaaaatttgtcagcagatctatatttcttgcatacccgggcaggaaaacttgaatctgtatcagcgagaggaatggatcaggagagatcaaggtatcaaaagatagaagaattgaaagaaacagtaagagccacggaagatgcaaaaacacgtgcacttaaagaattggaacttatcaaggaaaataacatgaatgaaattaaaagatttaacaaggaaaggcgccaggatttggtggagatgctaaaaggctttgtattggatcaggccacatactcggatcattttgctaccatatggacaaaggtagcagaagaaacaaaaggatatgcaaacagcagcagttgaagtaggatgtacatattcaggtgaatttgagctgttactgtgcagcgtgaatagctacactcattgagaatcatgcgactggcttatacacaaacaggaccacactcttcattcccgaaggatacatttctatggatttttctggggattggtatctcaagttgtgtacctgaattttttcagaaaatatagcaataccattttccacggcttcgtttccgcagccttggcttcatacagggtttacattttcgttttgtactttcaaaaaacttttttgttgaccaaagtttgaattttatattttcaaatttgaaatcgaatacactacaaatcg

SEQ ID NO: 112549 - DNA, 2228 bp, Zea Mays
cacgaaatggttttgccttcgcttttgcttatgcgtacgcgcggcgaatcacggcgcccaccttccaaccggacttgagtcacttgactccgccgcgggattccccgccagatctcattctcgccccaaccctaaccgccgacggtggccatgatggccaccgagcccttgtccccggggaatctcgtcgaggacgtcgaaacactacccctggactcctcctccactctcgcggctacgacggacccgctgctccgcccacctcccccctcgtccaccttctctcccaccgccggtgagaaccatggcgcgtttctggacgaggaggatgaggacgtggtggatgacttcacgcctccgctggctccccatgccgctacggccgcgacgaagtcccgcgaggcgtcaccgtggttcgctgagatcactgtctccgagcctaggaagcacgcggagcccgcgaccggagccgtgggcgtcattcccggctcggccagctacgtctcctacctcatcgccactcaggtgcccgacggaggcgagttccgcgtgcgtcggcgattccgtgacgtcgtggcgctcgccgaccgcctcgcggagacccaccgcggcctctttgtaccggcgcggcccgacaagagcatcgtcgagggccaggtcatgcagcggcacgacttcgtgaaccagcggtgcgtcaccctccagcgctacctccgccgcctcgccgcgcaccccgtcgtcggccgcaaccccattctccacgccttcctcaccgagcccagcggcatccccacttccgacggtgagtctcccaggtggagccctgcgatgagtgctgctacgtccatggctgcttccgctccagtgacgcctaccaagagtgggagagacttttttggggtgttcaagggcctgaagcagacagtgacgaatgggtgggtggcggtaaggccgcctctagtggaggaggagattgacacaaagtaccttgtgcacaaggccaagcttgaggacttggagaaacatctggtgacagcatctcagcaggcagaggcatttgttaaagcttttgacgatctaagatcaacgacaggtctcttgggaatgtcattcatcaaactggctatgtttgaaaaggagcaggctgcgtgtagttctcagaaaagacgagctgctgacatcagtaattttgccagtgctgttattagagttagcagatcacagacaaaactaaacactgaaattgtaaaacatctgggtattatccatgagtacatggagacaatggcttctgttcataatgcttttactgatcgttccaatgctttgcttcgtgtgcaaaatttgtcagcagatctatatttcttgcatacccgggcaggaaaacttgaatctgtatcagcgagaggaatggatcaggagagatcaaggtatcaaaagatagaagaattgaaagaaacagtaagagccacggaagatgcaaaaacacgtgcacttaaagaattggaacttatcaaggtgaatacaaaaatattggtatgctgtatgcattacaccatcaggaagggcaggtctggtgtaatggtgagagctgagagctgtctcattgagtcaccaggtcgtgggttcgaagcagcctctcctcatttgtggggggactgggggaggcttgcctcggtttatccctttcccaaaccctactcatgtgggagtctctggcactgggtctacccttttttattgccccatcagcatttatgtttcaactcactgtcaaacactgttttgtccagagttttgaaccataggaaaataacatgaatgaaattaaaagatttaacaaggaaaggcgccaggatttggtggagatgctaaaaggctttgtattggatcaggccacatactcggatcattttgctaccatatggacaaaggtagcagaagaaacaaaaggatatgcaaacagcagcagttgaagtaggatgtacatattcaggtgaatttgagctgttactgtgcagcgtgaatagctacactcattgagaatcatgcgactggcttatacacaaacaggaccacactcttcattcccgaaggatacatttctatggatttttctggggattggtatctcaagttgtgtacctgaattttttcagaaaatatagcaataccattttccacggcttcgtttccgcagccttggcttcatacagggtttacatttt

SEQ ID NO: 112550 - DNA, 2805 bp, Zea Mays
cgttcaagagtctatttccaactgcttcgtgctttcccaggtcctccatttcacccccatcgccgtgcaccggcaccagcgcgggcgcgcctcgccgcccccaccgccgtatcaacgcacgaggatgctgccgcacgcgccatcccgaacctcgggggccctcaggttcaaaccgcacctccccaccaagccgccgctcctcacctcttcctccaccgccacccccgcctctgcctccgcctccacgcgcggccgcctctgcgccgccgccgccgccgccgccacacgccgggacctcctcgtcctcgtcccctcgctagtcgcagcgtccaccgtcctccagtcccttcccctcgccgcctccgccgcggcaggcgatgacaagccggccccaccgacgccggctcaggcgcaggcgcccgcctctccggcctcgcctccgcctccgcctccagcggacgagcctgctctgtcgagggtatacgacgccacggtcattggggagccccaggccgtcgggaaggaagcgcggcggagggtgtgggagaagctgattgcggcccgggtggtgtacctcggtgagtccgagctcgtgcccgaccgcgacgacagggtgctcgagctcgagatcgtcaggaagctcgcggccggctgcgccgaggccgggaggagcatctccctcgcgctcgaggcctttccctgcgacctccaggagcagctcaatcggttcatggatggcagaattgatggcaataccttaaggctttatacatctcactgggcaccagagcgatggcaggagtatgaaccacttctgaattactgccgtgataatggaataaagcttgttgcatgtgggactccacttgaggtggtaagaactgtgcaagcagaaggaattagaagcctttcaaaagctcaaagaaagctttatgctcctccagctggctcaggcttcgtttctggctttacatccatctcaggtcgatcattgatagacaaaatttcatcaactcgtggttccccttttggcccaagctcatatttatcagcacaggcaagagtagtcgatgattataccatgtcccagacaataatgaaagaaattagtaatggagatccttcaggaatgctcgttgttgtaactggtgcgagtcatgtaatgtatgggccacgaggaattggcgttcctgctaggatatctaaaaagatgcaaaagaaaaatcaagttgtgatacttcttgatcctgagaggcaaagtataaggagagaaggtgaaatccctgtagctgatttcttatggtactctgctgccaagccatgcagtcggaattgctttgatcgtgctgaaattgctagagttatgaatgctgctggcaggaggcgtgaagctttacctcaggatcttcagaaaggaatagatcttggtgtagtttctcctgagatattgcagaacttctttgacctcgagaaataccctgtcatggctgaactgattcaccgtttccaaggttttcgtgaaaggttgctagcagaccccaagtttctgaatagattagctattgaagaggccatatcaataactaccactcttctagcacaatatgaaaaacgaaaaggacgtttttttgaagagatcgactatgttctcactgatacaattaggggttctgttgttgacttctttacagtgtggcttcctgcacctacaatttcactcttatcttttgccgacgatggctctggtgagagtgtggagcttctgaaaggaattttaggatcactgccagataatgcatttcaaaagggtattgttgggcagaactggaacattaaccagaggtttgcatcggtgcttatgggtggtctaaaacttgctggagttggattcatttctagtattggagctggagttgcttcagatgtcttatatggtgcccgtcggattcttaaaccttctgcaaatatggaagtggggcgcaaaagatctccgatctggaaatcagcagctgtttatagttgcttccttggaacatcagcaaacctgcgatatcaggtcatagctggtctgattgagcatcggctaggagagaatctgatggcctactatgaccagccacttattgctaacctgttgtcctttgtttcaaggacagttaactcatactggggaacacagcaatggatcgatcttgcacgagttacaggcgtgcaaagaactaacaaagagctgccttctcctgaggtttcgagcgcatctgaaatgccactgctagaatgtggcacggcagaggtacagaatgcggacgacagcagtaaccagtcaaatgacttgacataagttatcgcgcagtggccatacaaaacacagagcagcttccttccatggcacaccgtatactagacaaaccgtacatgcatataaatgggactgtcttcttagagccaggctgtgaagcttagccatcgcgtcatgtggagagacgaatctgaaatcctgaagagtaaagcttttgaagactttcgacttgttatgatcacagccatttttacacaccatcatggggtgaataccgtttgtacattcatagaggagacggccgaagaattctttggagcacgtacagcattttacacgtgaaatttgttcagaaaacattactggagattgtcacatggcaaaaaggatcaggatcgttgcttgtgaattgtgatgcaccttgtatgcaatgcacttgaatccagagtgcacgtgtgattttattgtctgaacgaaccgtgcgacggcctgatgtttcctgtggt

SEQ ID NO: 112551 - DNA, 968 bp, Zea Mays
atcacaaggcgtgtcatctcatcccaagttcgggacaccaccggcagcaaaccaatcaagaaggcagaagcctagctgtgccgcgtgcccccacgtccagcggtcgagcaccaaccaccaccaccacctccgacgacgacgacgacgacatcgtcatgggcaacagcttgcggtgctgcctggcctgcatggtcccgtgcggcgccctcgacgtggtccgcatcgtgcacctcagcgggcacgtcgaggagttcagctgcccggtggccgcggccgccgtgctcgccgcgaaccccaaccacacgctcaccacggcgtggtccccctccggcgcgccggggtgcggctccaggaagctcgtcatcgtgtcgcgcgactccgacctcaggcgcggccgcatctacttcctcatcccgtccgcgacgctgccggccgaccggaggggcaagaagcagagcagcagcagcaagcggccggcccgccgccacctgcgcggcaggaagagcgccggcgaagacacggcggagcaggacgcctacctgggggacctgctgctctccgagaaggccgcgtcgagcggcggcggccaccggcggcgccggagcggcgcccgcgtcggcgtgtggcggccccagctcgacagcatcgtggaggaggcctcggactagatccaccgctccaattaatacctccatctctcctctttgggctccgcttacttattatattctttggttttctttctcatctgccgatgcgaataccgcgatcgaccgaggacgaggcgccggccggctctcgcctctcgatccccctcgacgctgtattgcgtgatgtccagggttgagcggcgttttagttcgggagatgaggggggaaattgtgacaaaataactgcacgcgatgtagcagccccaacctgtacagaaacatttggttgagttcatctagctaaaattccaaacaca

SEQ ID NO: 112552 - DNA, 2739 bp, Zea Mays
cgctcctcccccaacgcgactatgctcgttgaggacggagaccggtaatattcgccgcggagtgttcgagaatcggaggcttggacttcgagtgcctcctcggtggcctcgcgtaaagcacggcggcgcgaagacggctgcggaattcaggtgctttccctgctttcaacgccggctggtttcgtctgacccgggaacattgcttggtaagcgcacccagctccaacacacctcgccgcccaagattgacctgcttgccaccacatctagcgcgcttaccttggccacacgcccaatggaacgaaccatttcatcgcgttggcgttgctttggagtgacgtcaggtgtgtgaagctgcccaactgctttcttcgcgaggtacttgcacgggacaattgacaaagcctgtatggtccaaggaactgaagttgcagacttcctccgaaggaatagtttttcttcctttcaccggactacaattcggtgccattcgtcaggaattgagggtcaactgactactctgctcgcttctttccccaagctcagggttcctccacaactgtccagtgttcatcgcaagctccttgcaggtttacgatggatctaggaaactccttgcaggttcacggtggatctaggtgaaggtgccgttagtcgagtgtgtggctctacggatcctgatcagtctagcgcagctttccctctgaccatttcgaggggactcctttctctggtttagctccattcaatagagatgctgtaatttctataataaagtggtccgagtgaatcatcctgtgcccttgcacaagcctcagtcactccataaatggctcggaccactgaagatgatatagaagatgtgccgtgctcagatccaggttcaccgtttctggctgaatatcatatcgcagttcctgctcttcatgatggaccaacgcaaggtgcagctcgtcatgagcgacggcttcttgatttcctggaagccactccctcggtgcagtggctaaagaagatcaacctttgctccccgttgataaaactccggcttccatccactggcgcccatggcagccttcatgctcagttcatcagaacgatccactggagttcagttttcactgtatgcaagaaatggctcaagcatcctatgaacatagctctcctaatatggctgctctgtgttggtgcctctggtggcatgctagtcttactaatgttgggactgctgaacgacgcattcccttccaagcccttaaggaaccagtggatagagatcgacaatcaaatacttaacgccctcttcaccctcatgagcttatacgagcacccaaatttcatccaccacactgttctcctctgccggtggctgccagaggacgctgctaagctcaggaaagtttactgcaagaatgagatgccccgtcgaaatgagcgagcacacatatcctttgtggttgccctcctccacatcacttgcttatgccagtatgctgattgtgggctgtactggggctaccccagcacatcacgctctgattttgccgacaacttcttcttcatcctaggcatagctgcaccagtctttgctgggctatacgcagtgtacagtcctcttggcagaggcaacgatgctctgtctgatgaagaaaccaatgaatcaggcacggttcgggtcgtcgagtcgcctgaaacaggaactgtggtgagcaatcccgcatgggctggcgggctgtttgactgcagcgaggaccccactgcatgctacctctctttcctctgcacgttctgcgtgtttgggtggaacatggagcggcttggattcggcaacatgtatgtgcacacggtcatcttcctgcttctgtgtgttgcgccgttctgggtgttcaatgtcacggcaatgaacatccacaactacgtcctcggtgatttcatcggcgctgcagggatcgtgctgtgtttctttggtctgctgtacggtggtttctggaggatccagatgaggaagacatttgggctgcccagaagcaggtggtgcttcggatcggcgtcactaacagactacacgcagtggctattctgctggccttgcgtgcttgcacaggaggtgcgcacggggaatctatacgacgcgaagaacggcagcttctatgagaaagttatggacggcgatggtgtggagactgatgcgggatcagtggatacggccgaattgccggtctcttgtggagtagaagaggcgaacggtatcgatgtcaaactcacggtggatggtgaaatgatcccacccacccaaccagtaatagaatgtggggagagggaagggatcgattcagaagtcgtggcaaatgaaggacccgcaactgaaggatggtttgagttatggtatttagctgttcagttgcttagtgatttagcttgttttatattaaaaggacgatggaacgaataggcgataatgccagagatatctaaactgatgttttagaggtgcaggctaacaggaaaaaaatttcatacactttattacaccgattgatttcaacagcaggcttgagcctcttatagagcaattgtgcaagtcggctaatgtaatcagtaactttatattattggttggtgacagttgaaaaggatattcttatcttctctagtcctgtagtggcctttggctgttttccagtgctccttttagagtgtgaagtgctgtccgattttgtgttttcaccttatcattaa

SEQ ID NO: 112553 - DNA, 297 bp, Zea Mays
agaaaagaggaaggcacggatgcagctatataagctccaggatgtagagaggcaggtgtctttactcgaaggctgtttgagtttggcacaattcctctccggcttcactccccaggaaccatggctgtggtggagctgaaggttggaatgcactgtgaaaggtgcgtcaaggccatcaagaaggcgatcagaacgatcgacgatatggagagctatcacctcgagacggagataaacaaggccacggtgacagggaaggttaccccggaggaagccgtcagcagggcactccgcaag

SEQ ID NO: 112554 - DNA, 2227 bp, Zea Mays
aaacgcagccggtgggcggagccggtaattatcactcgcccctcttcaatcctcctccggtcggaaccctagcccttcctgccagcggtgggcggcgcttggccatgtacccgtcaggggccatggtgggggcggcgcccgcggcgcgcccgagcgcgtcgtcgcgggtggagaaggccacgagccacctgctcatggggcccgactgggccgtcaacctcgaaatctgcgacatcctcaacgccgacgtatggcaaacaaaggatgtggtgaaggcagtgaaaaagagattgcagaacaaggacccaaaggttcagttttttgctttaacgcttttggagacaatgatgaagaactgtggtgaatatgttcagtttgaagttgctgaacaacatgttctgcaagaaatggttaaaattatccagaagaagaatgatatgcaggtaagggacaaaatattattgcttttggactcctggcaagaggcatttggaggacctggaagtaaatacccacaatatcattgggcataccttgaagtaaagacgacaggtgtggtgttcccaaaacgtcctatggatgccccaccaatatttactcctccagctacacataattctgagacctatggttcacccagatattctgcgggaagtctaagtgacagaatgtcctcagatgttgagactctgagtttaggagatttgaataagattcgaaatgtgacagacctactgaatgatatggtgtatgctttaaacccatctgatcgaatggctattaacgatgaaattatcacagatcttgtgacccagtgtcgctcaaatcaacaaaagcttctgcagtttgtcagttcatcagggaacgaacagttactaaagcaaggactggagacaaatgatctcttacaaagcgtactttcaaagtatgatgctgtggcctctggtgctcctttggcggttgaagcatctgtgagagaggcaatcgaggctcctgcagtaaagtcatatgcaccccctgaacataatgataatgttaacgaagaggaagatgagtttgcccagctagctcaaaggaaaaacaaatccgtcgtaagtagtagcgacgatgcatcatccagcactttgggggaccttgcccttgtacccattgatcaagcagtttcagaatcgccatcttctgttgcaagcaatgcgctggttcttcttgatcctgctcccagtactagcactgaatcaaaagagctggacatgatcgaccttctaagcctcaccttgtgcagccctactcctgaaacttcaacagattcttcagcacaggatcaaaatggaccccagcaacctgcagttacacataatcaaaaagggcttcaggaacctacagttacaaatgggcaacaatatccttctagtgtgccacagtatccttcaaactaccagcctcacactgcaaaccaggcatatgctccacagaccagcaactatgtggcaccttgggcccagaccggagcatatccacctcagcctccggcatatgcatctggctatgcctaccctgcaccgccatgggtggcgcctacacatcctgttgattctaacccttttctttcggtcaattaccaagatccacgccctgctgccacttctgttgctcaaacagcaacatatgcacctcccccagcttcatatcccccttcaatatcttatgcacagtttgcaaccccccagtcaattcagcatagcaattctgtggcttcaccgagcaatggtcagattgcaaatcaagcacaaatgaatgtgaatcaacaaccaaaagattcttcggcagcatctagcagaccatactacatacctgataatctattcagtgatttgatcgatgcaaaaagttttggcggtggaaacaagatgggcgggcccactacaatgggtagctcaaatggtggccagcctatgattggtggaaagaaatagggttatttgtctatatatatacagctgatggtgatcggtagctgccttgttatttattatgattactttgtctggtgtacatttgtacttgtatatcgccattcccccttttgacagatttggctgcattggttgattcgtgggtgcaactgttaagtttaacagagatatggacaattgctcatgtacataaatgattagcatttgctccactgaggtggatggttgtgatgaaatctgttggtattgaattc

SEQ ID NO: 112555 - DNA, 2049 bp, Zea Mays
gaagtggcagcagcaagcaccacggagagggacacgactcctctccctccctccctcaccatgccttccccttcctcggcccactggctgagcctcgtcgggagcatctggctgcagaccatcaacgggcccaacgcggacttccccgtctactcgtcgcagctcaaggacctgaagcacatcacgcaggtgcagctcaacttcctggccttcgcgtccgacgcgggcaagctcttcggctggttctccggggtggcggcgctgcacctgccgctgtggctcgtggccttggtcggcgcatccttcggcctcgtcggctacggggtccagtacctcttcctcgacagcgccgccctccgctactggcacctgttcctgctcacctccctggccgggaacggcatctgctggatcaacaccgtctgctacctcctctgcatccgcaacttcggcagcagccgcagccgcgtcgccgtgagcctcgccgccagctacctcggcctcagcgccaaggtctacaccagcctggcggactccatacccggccaccaggccacctccaaggccaagacctacctcctcctcaatgccgtcgtgcccatgctcgtcaccgtcgcggtggcgccgtcgctcagggcggtggacctcacggtcacgggcgagggccaggcgggggccagcacggacgcggcattcctcgtcatgttcgccatcacgctcgccacgggggcctgcgccgtggttggcagcatcggctcctccacgtccggcggcgggctgtcgtcgagggagcacgtggtcagcctcgccgtgctgctggccacccccgtgctcatcccgctggcgctcagggtccgggagagcctggacaggatacgggagaccaagcgggagaacaggatctacgacctcggcaccgacgacgatggcgtcgtcgtcgacgtggccgccaccgccgagagcaaggacggagacggcggcgtcacggagaaaccgcaggaggaggtcgacggcctccggctgctgaggaagctcgacttctggctctacttcttcagctacatgttcagtggcaccctgggcctggtgttcttgaacaacctgggacagatagccgagtcgcggcggctcggccagacttccacgctcgtctcgctgtcgtcttcgtttggattcttcggccgcctgctcccgtccttcttggactactactccgcgaagagcggctactccatctcaaggacgggatccatggcgtcgctgatggcgcccatgtccggcgccttcctcctgctcctcaaccggagccacttcatcctgtacctgagcacggccgtgatcggcacgtgcacgggcgccatcacgtcggtggccgtgtcggcgacgagcgagctgttcggggccaagaacttcggcgtgaaccacaacgtggtggtgagcaacatccccgtgggctccctctgcttcggctactccgccgcctacctctaccagcgcggggcgcggggcggcggccaccactgcgtcggcgccgcctgctaccgggagacgttcgtcgtgtggggcgccacgtgcgccgtcggcacgctgctctgcgccgtcctctacgcgcggtcgcgccgggaggctaccgggaccggcggcggatgatggacaagtaaggacgtcacgtctcgcccgcttagctaattgcctgccgtcatcgaggtacggtaggtggtactagctagcttagcacgcaggctagctccagaagtttgtcatctgagggccggcctgcgattaatcggtcatacacccatgacccatcaatcggccaagcatcatctgcctgtaggcgatgtgtaacttttgatccttgtttttttttttcactcttcgagtttctcttgactgatcccggtggaagggggtacagaaaaaaaaaatccttggtggaggctcatcatgacatgagtagatattgtgcagcaggttagccacctttttaatttgttattagtgcatatatatgcaatatatatgggtggtacatgcacttaaactcag

SEQ ID NO: 112556 - DNA, 137 bp, Zea Mays
attaaatttgtcaaccacgtattttttttgtatcacccctactgaaaacgtacaatgccaaactatagcttatgtatggatggagttttggcaagtgtgctatagatgaccaccgttattataaattttaatgtgaa

SEQ ID NO: 112557 - DNA, 1160 bp, Zea Mays
tgatctaaacgcggtctcatcggtacgtgctcagtagatagaggagaagaagaggtagcagagagagatggataccaacctgattaccgcaagatgctgccgctcgtcctcgtctcaaggactctgaagagcaaaaaaaagggaaaaaagaggtcaatgaacttactttgagagcgtaaatggcagtgaaacgaagctcaatccggtgctagacgacgactgcagactgctgcgtgcgtaaagaacacggcatgacgaagcaagcaactagcgaatgaaccttgacaaacatgaactacggatgagaaacgtgtcacaccaataactaactatgcaagagcaggtcactcgagagaacccacccagaaaaagtttccgaaatgcggcaaacatctgcataggagtgagaacacctttcttgattcgttacctgaacggagcaacacagtactccccctgcagccgctgccgctgccactgcaagcccaggaccgaacgccgcacaggcagatggcaacggcgacgcacaaccccgccagctttagcatggatctgccacaccacctccacctctgcatctgcctctgcctcccccgggagcactccatggtctgcagggaaactcctctttttcaagccgccgcagcaaactgtgtagaggcggacgtcggcaggcaaccaaatctaggaaaccgagaggcacgggggagggcgtgcgctcgcgctgcgcaccttcactgctgcattgtaatatagagccccccgcctctagctgcgtccctctcccgctcaaacctcagcgcggctacctcaggcaacctgatcgtcaagtttaatggatcagcgagaagccgagaaggaggcactgtgcacggccatactacaggaggctagtacagaagaggccggagagcacgcaggcagaggggcagtagccagtagctgcgtacactgactcaagtagtgcacgtgctagcagcctcgcatcctccacctctcggctctcgcctcctcacccgtcacttcaggtagacttctaggagtagttgtgtgtgtctggggtggggtgactgctcggtgccggctactgctagagatccatgtcaatcggcgtcaccaaatgctactactgccgctgccggaccggatggatactcatc

SEQ ID NO: 112558 - DNA, 2456 bp, Zea Mays
gggattccacccggctctcaactaacaataacacgcctaccgcccttattaagccccctctcttcttcgccgctccgccatcgtacgccatccccactaaaaaccagccgtttctgtaggtgttagtttactaccgtttactatactgcgctgttccaatggccatgcccaatccaagatcggtgttgacctccgcgccgtcaccgcccggctgctcctcctcctcgtggtcggcggcggagtccatggcaccggcgcctgcgtcgccgtccgacggggagctgctgcgctcgctgcaccgcctcgcgcgggacctgtccgcggccgccgagacgccggccccgttcctgcgcggcgcgctcgcgtccatcaccaggcgttccaagctcctggccgccgcgttcgacgacctggtcctgtgcgccgccaccggcgatctgccgcggtccgcgtcgctgtgcctgcgcgaggtgctcttcgtgctgcagcgcttcaatgccctggccaccgactgcgccgcgcggagccggatgcggctgctgcttcactcggacgagatcgaggaggaggtgcgggagcttcaccaggacctggcaaccctgctcgacctcctccccgtcgtcgagctgggccttgccgaggacgtcatggacctgctggacctcgcgtcgcgccagtgcaggcggttcgcgccgtctgcccaggcggagcaggccctcaaggccagagtgctctcgctgatacaggaaattgagcgcgagatcgtgccggatcgggagaggctgcaggagatcctggaggaggcgggcatcaacgacccgcccagctgcagcaaagagatcgagagcctcgagcgggagatcggtgaccgcgcctcggagaggtggacggacgccatgatcgcgctcgtcggtctgctacggtacgccaagtgcgtcctgttcagcgccacgccccggccttcggattccaggccggaccccgaggtcgacgaagaaggggagcccccggcgccgccgccggacttccgctgccccatcaccctcgacatcatgcgcgaccccgttgtcgtcgccagcggccagacatacgaccgggactccatctcccggtggttcgactccggcaagtcaacgtgccccaagacagggcaggtccttaccgttttggagcttgtgcccaacaaggcgctcaagaacctcatcgctaagtggtgccgggagaacggcgtcgccatggaaagcagcgcggcgagcaggagcgagccggcccaggcggtggccgcgaacaaggcggcgttggaggcggcgcgcatgacggcgtcgttcctcgtgaagaagctctccatctctttctcccctgacgcggccaaccgcgtcgtgcacgacatcaggctgctgtccaagtccggcgccgacagccgcgcgttcgtcggggaggccggagccgttccgctgctggtgcccctgctctactccgaggacgccgggctccagctgaacgccgtcacagcgctgctcaacctctccatcctcgaggccaacaagaagcgcatcatgcacgccgagggcgccgtggaggcggtcgcccacattatgagcgccggcgcgacgtggcgcgcaaaggagaatgcggcggccgccgttctcagcctggcgtccgtccatacctaccgccgccgtctcggccggaacctatccatcgtggagaagctggtgcatctggtccgcaccggcccgacaagcaccaagaaagacgcgctggccgcgctgctgtcgctggccggcgagagggagaacgtcggaaagctcgtgagcgccggcgtcgcgcaggtagccctgtctgcgatcagcgaagaggagaccgccgcggcagtgctggccgcattggcgaagcgcggcggcgcggaggcgatcgtgggcatcgatggcgccgtggcgcgtctggtggccgagatgcggcgcggcacggagtgggccagggagaacgcgacggcggcgctggtgctcctgtgccggcggctgggcgcgcgggtggtaatgcaggtgatggccgtgcccggcgtggagtgggccatctgggagctgatgggcaccggaacggagcgggcgcgtcgcaaggccgcgtcgctcggcaggatatgccgccggtgggccgccgcctcggccgctgacggtgagcggggcagcgtgtgcccggccgccagcgtcgtgcctccggctatgatggcgtcataatcaagtccagccatgggcaatgccagataggataaaagctcagattaaacgattttccccctcttctcctcatgtacaaactttgcttaggctgtcacgattctttgatcagagagtgataatggtgagcggttgatcaactgtaccatcgtagtttcatctggctccttattcttcatctgcggctctaaatatacaatgaaagtgggctttagtatt

SEQ ID NO: 112559 - DNA, 1350 bp, Zea Mays
cggctgactacggaatcttaagagatggagccggcgaaggggaagccgaggagggcgtcatccagcctgcttctgcgaatcacggacatctgcaaggtgcattccgtcgctgtggcggagaacgtcggcgagaagcccaacgccggcagcacaaccggcgggggcagcagcgaagacggcgcgcacctgaaagtatatccacaccaagtctctgaccacgagagctgttccggaacttccaccgcccgctacgaggaagcggttgtcgagaggcttcttggcgcggtctctggtctgaagctggcctatgtgaaggttcagcaggcacatgtgccgtatgatcctgaaagggttgcggtcgccggtgagcgttttgcgtcggagcttgaagagacggctgggcttaaagatctctacttcggtgccgataagtggagcaatccaatgcaccagtctcgtgtcagctcacggatccatgagcgtcaaaggctcgccctggagctgcaggccgacatatgcaagaaagactctgagcttgttctgctgcgagcagagctcgaagaactggaaaggagaaatctggagctgaaggaggaggctgaccagagagcgtcgcagatgaataaagaaataagtttcggcattggcaaagtgggatcggttgatacgttcatcgagttgtttgagaactcgtcgaagtgtatacatgatttcacaaagctcgtcgtcagctggatgaaggtttcagctggatgggacctcgactgctcaaagtttccagccgatagatcccttgtgtttgagaaaagggctcacaggaagtattgcgttgaggcctactttgctcgggcgatgctggcggcgaccaaagaggagtatttctccatggattccttctaccgtgttatgagttcaaaggacccattcgacgctcttgtggagtcaccaaattccgcctttgggagattctgccgggagaagtatctggttgctgtgccaagtactatggaggtatccttcctgggaactctggaccacagagcatttgtcgaggcgggcggccatccaaggacgcagttttaccagacatttgcgaggatggctagatctgtctgggcattgctcacggttgctcgcctcttgaaaccaagggccgagatgttcttcgtcaagagcggcgttcggttccaaaggaagcacatggaaagcgtaccagctaggctgaccgcggaggaagcaaagatcggtgttgggtttacagtgatgccgggctttaagatcggatgcactatcgtcaggtgcagggtgtacctgtctatgctcaacgcaagaggcatctagacacattat

SEQ ID NO: 112560 - DNA, 1379 bp, Zea Mays
ccacactagtgcagtgcgcgccattttccgcgttcctgctctgcctcctcgcctcgtcctcatctcccgccccgcgcctctgctctgctcctcgtacagagcaagcttaactaaagctcgagccaccaaagagaaagcacagcagcgcacgcattcctcccgcaggagccatggggccgcgccacaagttccggctgtcagacatgatcccgaacgcgtggttcttcaagctccgggacatgcgcgcgcggggcgggggcggcgccgcggccagcccccgcgtggccgcgcacgccgcgtcgcgcacgcccccgaccacgccgaggcacggccacggagcgcccgccgccgccgccgccgctccgtggctcccgcacagggcgtcccactactacacgccgcgggcgggggacctcgtcctgggctcgccgctgcgccccaaggcctccgacacgcgcttcccgccgctgcagctgtcgccgccgcgccggtccaggcgccgccaccggaggcggtccgccgtcaagctgccgccaccaccctcggccagcagcagcggcggcgtggcgtcctcgccggcctccaccgcctgccgctgcggccgccggcccgagctcgtggtggccgaggcgcccgataccccgccgtgccgccgtgacgtctttgtcggttacagcagcgacgacgacgaatacgtgaagaaaccgacggctgccgtccgcgcccacgacaagctctacgcccaagtgatcacctccgccacggacatcgtcatcgacctgcggaccaaaaggaggcccgaaaagacgctcccgccgatcatgaccaagaccagaccggcgaagcccgacgtattccggctcgaggacaagcacgtcgacgtcctcgcacacgcggcccgacgagcctcacctgtccccgaacagggcaagctcagaccgaggcggtccgtgtcgtcggcgcgccgcctgaaaacgcgcgcgaacactccgcgcttagcatcgtccatgaagtgcaagtcgcccacgacggccacgccgccgaccaagccgccgcctctggctgagagcttcgcggtggtcaagtcgtcgcgggacccgaggcgggacttccgggagtccatggaggagatgatcgtcgagaacgggatccgcaccgccaccgacctcgaggacctcctcgcgtgctacctggccctcaacgccgccgagtaccacgacctcatcgtcgaggtgttcgagcatatctgggtcacactctctgacgccaagctgtagcagagctcatgcaaaatgcaaccgcactcttgcgtggtcaagtaaacgaaaccaagcgtggtggttgtaactcgtagttacattcctgttaatggtccaaaa

SEQ ID NO: 112561 - DNA, 122 bp, Zea Mays
ttcttttttcccttttaatttgggacttggttctgtattcctatcttttattccctcttaatataatgatgataggcagctctcctgccggtttgtgaaaaacagagaagggacaaggcgac

SEQ ID NO: 112562 - DNA, 923 bp, Zea Mays
acccccacttgtgaaaccctcgtatccccacaacaccagaatccgcgaatcacagacgcgtctatctcagcttgctgcactgcactaccctgccctgccatcatatcgtacgtgagcccggccgagcgagagcgagggagaggcatggctgctccgaagctcgcgacgctggcgctggccgtgctcctggcggcgaccgtggtggctcccccggccgcggtgcgcgcggcgatgtcgtgctccaccgtgtacagcacgctgatgccgtgcctgccgttcgtccagatgggcggggccatgccgccccagccgtgctgcggcggcatccgcagcctgctgcagcaggccaacaacacccccgaccgccgcaccatctgcggctgcctcaagaacgtcgccaacggcgccaacgggagcggcacctacatcagccgcgccgccgcgctgcccagcaagtgcggcgtcgccctgccgtacaagatcagcaccaacgttaactgcaacacgattaattaagtgatgaggcgtcctgtgcgcgtccgggcgaggaatgcatgcatggcgctggcggagagtaataaaataatgctactggtattttaagctatatcgaggtgtgcctgtctctagtcatttattatggtgtttaggaatggtctacacagttcgtaacggtgtatcgtggatgcatgttgccgcgagcagagtacgtaggcatgaaccgatgtgtgcgcttctgtctgtttactctctctatgtagtaatgtgtgggtgctttgatccagatgtattcgctcgtgagtcgtggaagtagatcgtttcagtatcattaccgtgtgttctttcttaattttacattcgattctgaaaatgaacatgcacgaagctggactggtccagtatacgttgccgcatgcacttcg

SEQ ID NO: 112563 - DNA, 1362 bp, Zea Mays
gagcggcgctgcgcctgagtctgagctccccgagatcttgcctccccgctataaaatctccatctccggacgcttgcgcagggggaggggagctttccacttcacggctgatgagtgatgaccctaccagaaatcgacccgatacggctcctgcgccagatcgtccatcaatagcccgaatcacactcatcacaagcctcaaacttttccaaaccaatttagatgcggcgtgagtgctaaagcgctctctggactctgtttcgcagtggccgcagctgcagcgtcctcttccctttttgccatccagcatcacctgtgccgccggcgcgtaattgcaccgcggtcactggttaataggaagaagggaaggaggaggggggagcggtgtgccggggtatcgtcgtgcccatgggcgtgcacgccaggtcgatgagctggtatatggggtcgccggcgccggggagcgccgccgagggcgaggggcagcgcgcgctgagaagcagctccggtggcagcgacggcagcttcgacaccaacatggtcatcatcctcgccgcgctgctgttcgcgctcctcttcgcgatgggcctcaactcgctcgcgcgctgcctcatccgctgggcacgccgcgcgccggccggggaggacggcggcgccggcgggctaaagaagcgcgcgctccggagcatccccgtcgaggtgtacggcgcgtgcggcgccgacggggcggcggctgtcgccgccgacgtctgcgccatctgcctcggcgagttcgcggacggcgagaaggtgcgcgtgctgccgcgctgcgcccacggcttccacgtccgctgcgtcgacacctggctcctgtcgcacgactcctgccccacgtgccggggctccgtgctcgacggcgcaaaggccgccgcctctgctcccgccgccgggggcaaccggcggcagggaagcgaggctgctgccatcgcaattgtcattggatgacgtggacgtgtgggggcccgcgtgcccactggtggtggagccacacggtatgcgagactagcttcgttccgtggtagtgagatattttgctgtgatgagaagccgacgagtcgcggcggcccatctctcagtcaagacacagcatggccttcaggatattatcccttcggtctgtacttgtgcatggtcgtcgcagctgatcctgtttgtgtatactaggagtggatgatgaggtatgccgctataggcttgcaataatacagttttgtttgtacatgttcgatttgacacaattttagagcactgagcagagcacacatggactagtattctaagatgtacggtggacgtctattttgcactgacaaatttagaatt

SEQ ID NO: 112564 - DNA, 676 bp, Zea Mays
gagcccgcgactgccctttcctcttatttccattaccccgagcgtacattctctcctctctctcttggcggcgactcggcgaccggcgctgctgccccacgtttggtgcccaggtcttcgtgggccccttagccggcgacgagcatcaccagctgaaagatggcgaggataccgtctttgaagagcctcaatgcgtttccacatgcggaggaacacttgttgaagaagacttactctggtgctgttgtgacaattcttgggctacttataatgattacactgtttgtacatgagctgcagttttatctcaccacatacacagtgcatcagatgtctgtagatctaaaacgaggagagactctgccaattcatgtcaacatgtcatttccttctttgccatgtgaagtattgagtgtggatgcaattgacatgtctgggaaacatgaagttgatttgcatacaaatatttggaagcttcgcttggacaagcatggccatatcatcggtacagagtacttgtctgacctagttgaaaaggagcatggggcacatcatgatcatgaccacgaacaggagcatcatgatgaacaaaagaagcatgaacaaaccttcaacgaagaagcacagaaaatgatcaagagtgtcaaacaagcactgggaaatggtgaagggtgtc

SEQ ID NO: 112565 - DNA, 635 bp, Zea Mays
cttcccattcgcccaactgagagggcctggccagcggtgtacttcctgtatgatctctcaccaattacagtcaccatcaaagaggaaagaaggaacttccttcattttataactcgcctttgtgcagttcttggtggcacatttgccatgacaggaatgcttgaccgatggatgtaccggcttgtcgagtcagtcaccaactcgaagaccagaagtgtactgcggtaactgcacaattcatgataggcggaaaacagctggacgactttcgtcgcatgtgacatgtgttgcgagctgcattcgctcctgtcctcaggtagatgcatgccctgcgatgcttcaaggctgtccgggggagtagcagtatttgaggaaaggtcgatgaaatgaagtagtagcgaggaaagatgtcatgcttcaactgccaaggatcagaagagttcgtgagtcgttactgttgtgaagcacgtcgctgttgtagtgctgtatgatttatttctccgtcacgagtcatgattaacacaaacgaggtacagagactttttttaattcctctgaacattgatcattgtgatatagagcttctccatatatatagagagctattatatatatagtgctgtcaaggacgaaca

SEQ ID NO: 112566 - DNA, 2073 bp, Zea Mays
ctcccatccgttccattcctgcttgttcttccaatcccccctcccccggcgtgcgctccctcctgtctctcttggcgacgactgggcaacggtcgcagctgtatgttcgagcccttcgccgacgacgttcaccaccaggaattttctcagctgtgccaatgatgggttgcttcactgttctcagatccaagaagaagaaaagccattttgataatcctcttgtcccaagcaagaaatcagttgatgcaagggaaagtacgtcctctagacttccggagccagaagttcatgtgccatctttgcaatcagctcctcctagttttaggaacagggtcaagatatccgagtcatcaaatgaagtttcaaacagaaacagcagggctcgcgtgctgtctgctccatcagcccttattgtggttgatcagtttggctttccatattcggaataccgagatcaagatgactccagggataaggaaggtttgacaaaggggcatcgcttttcaaatcctttgccccttcctcttccttcacgcgaaggacattcttttaggaactctggtagcttcaaagccagcaacgtaagcgggccattggagatgtctggccctctcccattgcctctaaagaaatgtgatggacttagaatcttctcttatgaggagatttcatctgcctgccaacgattttctagtgatcagtgtgtttcagaaacacttggttcaacatcatacaaggcaacatttagagatgaatttattgatacgaggaccactgaagcaacagtagctcgattactcccctccactcagagtttgaaggagtttaaaacgcaagcgaccacattggcatcgcttcagcatcccaatttatgtaaactgattggctattatgcaaaagaagattctaatgaaaggatgttggtctatgaacggctttatcatggaagcttagataagctactctttggaagatcagatggtcgtttcatggactggtctaaacgtttgaaggttgccctgggtgctgccagaggtctagctttcttgcatgatgaaggaccctttcaggccatgtacagcgagttctcaactttgaacatccaaatagataaaggtttcactgctaagctttcaggatatggttgtgttggcttcaataccgaggagatatctaatgcacctgtgtctgcagcaaacctttcggtggagaccttggagaagggtttactcactcccaagagcaacgtctggagctttggagtcgtgttactggagctaataactggaaggaagaaccttgatcccaattattccaaagaagaacgcaatattgtcaactggagtaggcctttccttactgatgacagtcgcttgtctcttatcatggactcccgtataaaagggcgctttcccactaaggctgctcggatagtagcagacatcattttgaaatgcctgcgtaaggatccatcggagaggcctaccatgagggatgttgtggaggccctagcaagagtccaggaaataaaggttccgtgcagatatcctctgcaagaaccttctgctgcaccaagaaaagtgatgttgaaatctacatccctcaatgggattgtgcctcaccatcctgtcataaccttctctccatcgccgccttcacataaccagcacttgatttcaccaaggtcgtcgacatctgccttgtttcatccaagggcatgctcttctaccctggacgatccgagtgtaagttctataaagaaaacaccacctattatgcgaaggtctagcgtcgaaggcttttgattgtccatattgttcctttatttccttttcttggatttatttgtttctttgttagtagtgtagcggtttttagctgtgttctgtattgtaagacaagtggcctcatatgtagtgcccttgggtctggagtaaagcagaacaggatgaattgtaaataggaccaggttgtagataccttttttttgtgctcgaattgggtggaagcagcgtgccgagtgggccttgtaacctcataatgcaataaactccgtttcccagtttctgttca

SEQ ID NO: 112567 - DNA, 3375 bp, Zea Mays
ctactcgcttctcccctctccccactggtgactggctgactgctccacgccgcgaccacgcccaccaccgcgctgcactggccactactcccccttccccgcactgcactgcaccagaactgccccgcgcaaatggaaagagcaccgctgtgatccctccaccctcctcgtccccctagccgtgtcgcgatggccaccgccgccgccgtctgccctctcctgctcctcgccgcgctactcctcgcggtgtccgccaccacgagcgcgctcaccgacgacgtgctcgcactggtggtcttcaagatggacatctcggacccgtcgggccgcctcgcgacgtggaccgaggacgatgatcgtccctgctcctggccggccgttggctgcgacgcgcgcacgggccgcgtcacctcgctctctctcccggcggcgtcgctctcgggccgcttgccgcacgcgctgctccgcctcgacgcgctcctctccctcgcactcccgcgcaacaacctctccggccccgtgccccccaacctcctaaccgcgctcccgcggctccgcgccctcgacctctcctccaaccgcctcgccgcgcccgtccccgcgcagctcttcgcccaatgccgtgccgtccgcgccatctccctcgcgcacaaccagctctcgggctacatcccgcccgccgtcgcgtcctgcgcatcgctcgtgtccctcaacctctcgtccaatcgcctcgccggtcccatcccggacgggctctggtcgctgccttcgctccggtccctcgacctctccggcaacgagctctccgggagtgtgcccggtggattcccccggaccagctcgctacgggaggtggatttgagccgaaacctcctcgccggggagataccggcagatgttggagaggcggcgctgctgaagtcactgggtttggggcataacttgttcactggcagccttccggactcgctccggaggctggccggtctgcagttcctcggcgccggcggcaatgcgcttgcaggggagctgccagcatggatcggggaaataagggcgctggagcgccttgatttatcgggcaaccgatttgccggcaacattccctacactatcgcgaactgcaagaaccttgtggagatcgacctaagctgcaatgcgctcaccggcgatcttccctggtgggtgttcggcctaccgctgcagcgcgtctcggtggcaggcaaccagctgaatgggtgggtgaaggtggccgacgacgcagcaatggcgcttcgtgtgctggacctgtcgtgcaacgcgttctccggcgagatcccgctgcggatcactgccttcgcgggtttgcagtctcttaacctgtcctcgaattccttctcggggcagctgccggccggcattggtggattgaggctcctcgaggttctggacgtgagcgctaaccgacttgaaggaaccgtgccgccggagatcggcggtgcggtggcgctccgggacctgaggatgggaaggaattcgcttacgggacgcatcccggcacagattgggaactgcagctccctcgttgcactggatttctcacacaataacctgacgtggccgattcctagcaccatgggaaacctgaccagcctccaagtggtcaatctatctcagaacaagctgaacgggaccctaccagtggagctatccaatctgcctagcctccacatctttgacgtctcccacaacatgctgacaggggatctgccacacagccgcttcttcaacaacatccccgagtccttcctcgtggacaattctggtctgtgtagctcacggaagaatgattcgtgcagcgcagttatgccaaagcctattgtgctcaacccaaactcctcatcaaatccctcatggcaggctacacccagtgcccctagcaacatgcatcacaagaaaatcatactgagtatctccaccctcgttgccattgcgggcggcgcggccattgctatcggagtgatcaccatatccgtgctcaatcgccgcgtccgggcccgtgcggctgccccacgctcagcacctgctactgcattgtccgatgactacctcagtcagtccccagagaatgacgctagctccgggaagcttgtcatgtttggcaagggcagccctgagttcagcgccggtgggcacgcgttgttgaacaaagactgtgagcttgggcgtggaggctttggggcagtctacaagacggtgctcagagacggacagccggtagccatcaagaagcttacagtctctagcttggtcaagtcaaaggatgacttcgagcgacaagtgaagacgctcagcaaggtgcggcaccacaatatcgtcgcgctcagaggcttctactggacttcgtcactgcagctcctcatctatgattacctacctggaggaaacctgcacaaacacctgcacgagtgcaacgaagacagcttactttcctggatggagagattcgacatcatcctcggcattgcccggggcctgacctacctgcaccagcacggcatcatccactacaatctcaagtcaagcaacgtgctgctggacagcaacggcgagccaaaggtgggtgactacggcctcgccaagctgctgccgatgctggaccggtacgtcctgagcagtaaggtccagagcgcgctcgggtacatggcgccagagtttgcgtgcaagacggtgaagatcaccgagaaatgcgacgtctatggcttcggggtgcttctgctggaggccttgacgggcaggaggcccgtggagtacttggaagacgacgtggttgtcctgtgtgacctggtcagaggcgcgctggaggaaggcaggccagaggactgcgtcgaccctcggctgcgcggcgagttccccatggacgaggccctgccggtcatcaagctgggccttgtgtgcacctctcaggtgccgtcgaaccggcctggcatgggtgaggtcgtgagcatgctcgagctggtgaggaatcctcgagatatcgccgaggatgagctggtttgagccccggccgtcgggagattctgttctagttcaccttgagagccttctcttttgtgttttttttttcttctctcggatgcatatatggttgcccgatggggaagaaaggagagggagaggggggtggttcagacttgggagagtgggaagtttgtattattgtgttgaaagctgaagggatgcaatggaaggctgtttgttgcttctctgaaattctttgatgattccttggttggatgagcttgtagatcatgtaggtatgactcgatgcaacgcaggccaggtttgctgattacctcggcataactggaggaatgttctgctgatagtgcgact

SEQ ID NO: 112568 - DNA, 1838 bp, Zea Mays
gccgagcccccacgcaacaaaccacccgctcacacagaccgccccaccaaaactggccaaaagccccccaaagagaccccacaaaactccccgttatcccccacccggacaatcttccttcaggcttcagctgtccgcccgcggcccacccctccgccgtctccaccattccgccgttcccaccacgccactcgccagttcggcactccctcctgtctcccccccttgccgagacggcgcggacgccccgtcgcccaccccgatggctgccactctcctccacgccgccaccgcctcgctccagagctcctcccagcccgcacgcgcgggcgccgccaccgcctttcaccccctcgcgtccaccccatccatacgcctcgcgcgctcctcgttctcgtccaatcgccgcctcgaggtttcactccgggcggtttcggccggtcactgtttcgcggggaggggagcaccccggggccgccgcgtcgtcgccgccctagcaggggagcaaactgagggttcagaggtgggcgatgacaaggataacagcaacgaggagataaagcccgaggaggctcaggaagcttggaaggtaatgctggagcagttcaaggctgaggccctgcggatgcaggccctgtcaatgcaggcatatgatgtctactccaagagggcgagggaggtcttgctggaagcctctgagaagctgaagatacaggcagacaaagcacaaaaggacctcagcgtgatcgctaccgaggttagtcaggagggacaggaatatctggtgatggcagctcggaactccccagactcgatcaaggatattacaacaacgttcagggctcttgggagattgaattggccatcagagtatgaggattatcatgttggcattccgtttggtacctttcttacagtagggggtttcctcaacttcatgttgactggaagtacctctgctcttcgttttggtattgttcttggccttgcactgttgactctaggtatctcaagtttgagatcacatagagaaggcgaccgtcggcctcgtcttttggtgaaagggcaagctgcaatagctcttgtcatcttcttcagggagttttcagttctactccagaatggttggttcccaaaaatcttcattgttcttctcagtggagtggtggcagcattttacttctatcgcattgcaactggtaaccccaaagatctgagcagcaagaatgattcagcgaattaatgcactgggacgagtcagatggtcagtgggacgtagacccagaagattatggtctcttcctttccattttcttcatcggccttcaattgaggcaaagctcggtcctagcgtctaagatgtctgcgtgatgatacatggattcaaaagaattgtttgcttatctggcccacttcccgcactcctttgttcctttactcgtgtaatatactccgatgtcaggcccgcttaaacaacagtaataaacgaccttcgaaggtcatgtagttatcagttcagtttgtctggtgtttattgcatggggatagaagtgattaagtgaagcgttcaatgtttagtgaaatggctgaaaacaatcagggttagtattatgtaccttctcgtttgctcgtaaacaaacagatgataagttgtaaagggtacctgcagtggtacgatctagttgtttcctctaactctaagttaacctcttcgatggcacaaacttttagcccatacggccataccaggccatatgctacatttgttcttaaatattggtcgctcgctagttagttaattttttactaaaactcaacaaacaaaaaagaacgaaggg

SEQ ID NO: 112569 - DNA, 1858 bp, Zea Mays
ccgagcccccacgcaacaaaccacccgctcacacagaccgccccaccaaaactggccaaaagccccccaaagagaccccacaaaactccccgttatcccccacccggacaatcttccttcaggcttcagctgtccgcccgcggcccacccctccgccgtctccaccattccgccgttcccaccacgccactcgccagttcggcactccctcctgtctcccccccttgccgagacggcgcggacgccccgtcgcccaccccgatggctgccactctcctccacgccgccaccgcctcgctccagagctcctcccagcccgcacgcgcgggcgccgccaccgcctttcaccccctcgcgtccaccccatccatacgcctcgcgcgctcctcgttctcgtccaatcgccgcctcgaggtttcactccgggcggtttcggccggtcactgtttcgcggggaggggagcaccccggggccgccgcgtcgtcgccgccctagcaggggagcaaactgagggttcagaggtgggcgatgacaaggataacagcaacgaggagataaagcccgaggaggctcaggaagcttggaaggtaatgctggagcagttcaaggctgaggccctgcggatgcaggccctgtcaatgcaggcatatgatgtctactccaagagggcgagggaggtcttgctggaagcctctgagaagctgaagatacaggcagacaaagcacaaaaggacctcagcgtgatcgctaccgaggttagtcaggagggacaggaatatctggtgatggcagctcggaactccccagactcgatcaaggatattacaacaacgttcagggctcttgggagattgaattggccatcagagtatgaggattatcatgttggcattccgtttggtacctttcttacagtagggggtttcctcaacttcatgttgactggaagtacctctgctcttcgttttggtattgttcttggccttgcactgttgactctaggtatctcaagtttgagatcacatagagaaggcgaccgtcggcctcgtcttttggtgaaagggcaagctgcaatagctcttgtcatcttcttcagggagttttcagttctactccagaatggttggttcccaaaaatcttcattgttcttctcagtggagtggtggcagcattttacttctatcgcattgcaactggtaaccccaaagatctgagcagcaagaatgattcagcgaattaatgcttaaatcgtatctcatgcagcactgggacgagtcagatggtcagtgggacgtagacccagaagattatggtctcttcctttccattttcttcatcggccttcaattgaggcaaagctcggtcctagcgtctaagatgtctgcgtgatgatacatggattcaaaagaattgtttgcttatctggcccacttcccgcactcctttgttcctttactcgtgtaatatactccgatgtcaggcccgcttaaacaacagtaataaacgaccttcgaaggtcatgtagttatcagttcagtttgtctggtgtttattgcatggggatagaagtgattaagtgaagcgttcaatgtttagtgaaatggctgaaaacaatcagggttagtattatgtaccttctcgtttgctcgtaaacaaacagatgataagttgtaaagggtacctgcagtggtacgatctagttgtttcctctaactctaagttaacctcttcgatggcacaaacttttagcccatacggccataccaggccatatgctacatttgttcttaaatattggtcgctcgctagttagttaattttttactaaaactcaacaaacaaaaaagaacgaaggg

SEQ ID NO: 112570 - DNA, 1589 bp, Zea Mays
acttctgttctgcccaaccccactccatccatccaaatcagctttgcctagcttattattccttaccgacaaacaaaactgacacggatccgcacagagcaacgaactcgcccagtccggctgctgctgctgcacaacggactcgatctcacggccccgccggctcgcagccatgcagacgcagtcccgcctggccatgagcggcggcggcggcagcggcggcagcagcagcagctcggcctcggaggacgagcacgaggcggtgatccgcgagctgacgcgggggcacgagctgacggcgcagctgcgggccgaggccctacgcgcgctgcgcgggcagggccaggccgaggccaccgcggcattcatcctgcaggaggtgtcccgcgccttcaccgtctgcctctccatcatgagctcgcccgcccgcgccccgccgccgacgatggaaatgcccgcgcctgccctggccccgcgacggggccgggacgacagcatcccaagagagcaacggaggacgtcctcgccgcacagcgacgggtaccagtggaggaagtacggccagaagaggatcactaagtcgccgtttccgaggtgctactacaagtgcagcttccaccgcgagcgcagctgccgggccaccaagcaggtgcagcagtgcagcgacggcgacggccacccgccccagtacgtcgtcatgtacttcaacgagcacacgtgcgacacggcggcctgggagcccgcggcggcggcggcggcttcctcgggggtgccgctggacgacctgtccaggtccaggctgcaggcggtactaggccagggccagcagggcgctcgcgcgctgctgctggacgaacgcggcgtccaggaggagcacgagcgccggcttctcgtctcgtcgctcgcctgcgtgctcgggggccagcagcagcagtctcctgcgggcagcggaacaaccacggccgtcgaccccgccgttaacgtggggcaggagcaggagccgccgccgccgcgggcccgcacgcctgcggccgttgacgcggccggtgagatgccgcgtatcattggcgtggacgtggcggggctggatgtcatggactacgatgtgacggacgcgctgtgtctcgcccattcctacgacgacctacctgacgacgggtttccgttttgctgagtgcgcagccgcaccacatgcatcttctcgcgaaacatacgtacggtacatgtgccaggcccgagatagttcatgtcgggcgcgacgggtcactgagcctttggtcatagaacaattaatactgtgatatatagtactgtctctactacggagtacttatctagcagtagtagtaactacacacttgcccagcttattacagccaggctttgcgtatctccagataagtttaggtcaggctggcgtgattaatttgcaagttctttttttttgtgtgtgtgttaatcagcgtgcatgccatgtactactagttcccttgttttcgttccactattacaagtgtgcaatgttttacatatattactgtggataaaaaacaaaaaaaacgcatacattgtcagtaatttcagccgtc

SEQ ID NO: 112571 - DNA, 102 bp, Zea Mays
gtatttttttccttttattattattttagttctgcaatatcacatatgcttcaatccggggttcctaactaattttatggttacttgtattatagcgtgtat

SEQ ID NO: 112572 - DNA, 357 bp, Zea Mays
atgggagggcctccggcggactgcaccgacgggagggccgagggcctccgcacggcgatgcgggaggaccttaggaggtggtggcctctcggacactcgctgcgacggaacggagaggatcgtgcaaggaggtttcagtccggcttcatgatgaatcctggctgccttatctcctggtgctgggccaatcccgcaggcgaaaggattgctaagcttattttcagcttcttcacaaatttaagcagaagttctgccaaacaggcagcttctgcagcagcttatcagttcagccgcttctcagaatacactaaaaacagccaacaagcagaagctgcttttcaccagcttctcagataa

SEQ ID NO: 112573 - DNA, 723 bp, Zea Mays
atggctaagagggatggctacatggacagctcttgtggctactctaatggaacccctaaaaggctggtgcaggatagtagcagtcatgtgcaggcgcatgctaagaagaaagttcacattagcacaagaactcagcacacatacgcaccgtatcatgatggctaccagtggagaaaatacgggcaaaagctgatccgaggcagtacctacccaaggtgctactataggtgcacataccaccaggatcatggctgcccagcaaccaagcatgtggagcaaaccaattcccaggacccgccattgttccgggtaacctacacgaatgagcacacatgttgcagcgcccatgtctcagattacatggcttcatctgtacacatccagcagatcgccgatgcttctttgagaaagctagcagatgtggaaataccgagcctgacccactgttttagtggccatgaattgataaaagaagagaatgatgccgtcatctcctcattgctcacggccgtcagtggttgtgatgtggcaacatccgatggcgtgcatgcagccattcaagagaacacacctgctcggatgtcccgaagcagcaatgaggctagctcttcgatttcaccacctgtactgttgccggcatccgataacccgaaaacagacttcatcgagccactggagacccaatggttcgagcctttggatttaggttggttcatagaataa

SEQ ID NO: 112574 - DNA, 393 bp, Zea Mays
cctggtgggccgaatagggtgatgtaggcccggttaggttcttttccattttctgattttccttttctctaccccttatttagatttgtaaatttttcaaattcaaccatgaattgggtttctaaattcaaattaaatgcataattcaagatctagtatgatatgcaatatattttatttttatttatttattatttaagccattgccttttaaatgtgtaaatcccacctatttaatataaggaacatagttttatattgtataatctctataaagaaatttctcttacacatatccttatggacacttatataagtgataatttatttcatataagaactattttgttaatccttttattagaaaacttttatttttggagatgtgacttt

SEQ ID NO: 112575 - DNA, 2273 bp, Zea Mays
aaatatttgtgcgctctcttccaggtgggccctttctctccccttctcccctcaccggctcaccctctcccctcgacgatacatttcacctccccggatctatctcgccgcgtcggcgcgctggtcacccgacgaagctaggaggcagtcaaggcggacgaagcgctgcaccaaatttgacgggggatcgagcacaggaggcgtagtggaaaatgtttaagtttctcaaggaggtggtcgcgggatccggatcggggctcaaggacttcccctacaccattggtgagacatacgcatccgcctggggttcatggacacaccaccgcggtacctccaaggatgatgggtcacctgtgtcaattttttctctgtcagggagcaaccctcaggacagacacatggttgctggccgtaatggtgttaagagattacgaacggtgcggcatccaaatatcttatcctttttacacagtactgaagcagaagttgcggatggacctgccatcaaacacacgatttatattgtaacagagcctgttatgccactttctgaaaagctcaaggaactgaatcttggtggtacacagagagatgagtactttgcatgggggcttcatcagatatccaaagctgtgagctttctcaataatgattgcaaacttgttcatgggaatgtatgcttagccagtgttgttgttacacaaaccctggattggaagcttcatgccttcgatgttctgtcagaatttgatgctaacaatgaagcctctggtagccccatgctgcaatttgagtggttagttgggatgcaatacaagccaatggagctgtcaaagtcagattgggcttcaattagaaaatcacctccgtgggccattgattcttggggactggggtgtttaatatatgaactcttttctggtgcaaagctggctagaacagaggaccttcgaaatactgcttcaatcccaaagtctctacttccagattaccagaggctcttgaattccacacctactcgtagactaaatccttcaaaacttattgacaacagcgagtttttccagaataagttagtagagactatccagttcatggaaattcttaatttgaaagacacctttgagaaagacagctttttccggaagcttcccaatatagctgaacagcttccccgtgagatagtcctgaaaaagctgctccctgtcttggcttcttctcttgagtttggctcagctgctgctccagccttaactgttttgttaaagatgggttcctggcttcctacggaccaatttagtatcaaggtcttgccaactattgtcaagctttttgcctccaatgaccgagctatccgagcatgtcttttgcaccacatagatcagtttggggaatcaatgtctgctcaaactgttgatgaacaagtttttcctcatgtagcaactggattttccgatactgatggtactatccgtgaactgacattaaagtcaatgctcatattagcaccaaaactatctcagcgtacaatctcaggatctctcttgaaatatctctctaagctacaggtggatgaagaacctggaatcaggacgaacactacaattcttcttggcaatattgcaagctacatgaatgatgggactaggaagagagtactgatcaatgcattcacagttcgtgcactacgtgataccttccctccggccagagcagctggaatcatggcactgagtgtcactggttcatactacgaaatgacagagattgcaactcgcatcctgcctaacattgttgtcctcacatttgacccagatagggatctgaaatagatgatcgcgtgtaaggtttttatggcgctagaccaggcgtaccatcttgggcacatggaaggatgtgttttgatgaagattgcacaagtgtaatcagcatatttttgacacatatattgtagacagaagaaggaagggaaattaaagacatattgtagagtgtagacagaagaagcaagggaaattaaagataggaggcactagtctatcttgggttttggctcatcaccaaactcaagcccaacaggtctctgatcaccaatctgctgtataccctgtgctactgcatacctactactaggtcattgtgcaatgcctgaaagaaacacaacactaggatattaaattgattgtcttgacctctagggttaatggtgctgtatatttatacgggcagaaactgattattacaagaggaatactactcggttacaacatccc

SEQ ID NO: 112576 - DNA, 165 bp, Zea Mays
gtgagcaaatgtgaatgctttgtaccatacctgacatttatttactcttgcttcatggtaggaatcatggcactgagtgtcactggttcatactacgaaatgacagagattgcaactcgcatcctgcctaacattgttgtcctcacatttgacccagataggtaa

SEQ ID NO: 112577 - DNA, 120 bp, Zea Mays
aaagaaatttctcttacacatatccttatggacacttatataagtgataatttatttcatataagaactattttgttaatccttttattagaaaacttttatttttagagatgtgacttt

SEQ ID NO: 112578 - DNA, 1263 bp, Zea Mays
atggtgcctggggtagtggacatgagggtgtcagacatggttgactcgaccgtggaatccacggacatgagcaccatagacatggaggaagaggttggcgtcgcctgggagagttgcgacgcttggagaagtgatgtccggaccaaggctttccaggctactgatcagttcttgcaaatagcaaagcaacaccatgaaaagcttaatacgggagacaacagggtggctgaaagtactggtgttaagttaaagcctggaaatgcaggtttacttgggtgggccatgagttctgttacacaaaagggtaaaccttctgaccacgccccaatatctactgcaaatgctaataattctcaagcatcaacagctttgactgccgctccagagactcaggcttccacaccagcgtatgcacaatccacatccagctcccttgatcaagctgcaccagcatcagcaaggtcttcagaagatgggtggggtgagcttgaggatgacaatatccatgaggagaatagtgataaagatggatgggatgatgtagacccgtttgaggacaagccatcaccatctcttctatccaacatacaggctgcacagaaacgtccagtggcgcaaccaaagcaagctgttgcaaactcatctaaatccaacccactaaaagcgccaaaatcagaagacgatcctctatggggtcctatagctgctgcaccacccaaaagcgcagcaaaacctgcagacatcaagccatcaacatcacataacgatgaggatgacctgtggggttcaatagcggcacctcctccaaaatcatctggaaagcctttgaagccagctgcagcgaatagtgacgacctatggggtgccattgcagcacctccaccaggaaccaaagccaggcccttagcctcatcaggtaagggccgaggaacaaagcctgcgcaaccaaaacttggtgctcaaagaataggaagaacatcctcaactggaatgtgatggcttatgatatcaaatgttgtacaagagtgcgaagttttcctttttgtcccccatgctttgagtctgaccaggatgtcattctttgtaaactagcaaaaggtatcaatatatggacacaattttgacaaatgtattaatattgtttcaccattgtgtattaaaatagacacatacgtttttttttgtttttgtattttttgtacatcacagctgtttcgagtaaatattattaatatatttgcccctgccttattttggcttgat

SEQ ID NO: 112579 - DNA, 422 bp, Zea Mays
atgcaagctctggccggaaccatgcgaaggagaggccgattcgagaaccgtgatgcaactcaggccgaaccgcccagggggaaagccagcattgcgccgaggcgccgcggagaacttcggagggagcccgcgccaccagtcgccactctctcctcgctggagacccgggaggccgggactcgccgcgactgagctgttctcgtgcctgcgcttcctctgtccgcggagtgttcggggtgtgtggggcactggggcgtggtggagcggacgcgaacagggcggtgagagctgtactgagtgtgaaccagtgtgatgccgcctgcacgtcgcctctgttgtgtgtggccgtgtggggtattttgttttggaaattagactatccggttacctctaaatttctcctattttttcatctcactatc

SEQ ID NO: 112580 - DNA, 91 bp, Zea Mays
caaagaactgttcattaagtcaatatttgacatgtaatggttgtacgcatctcatgcgaaaagcgggaactcttgtttccataataaaaaa

SEQ ID NO: 112581 - DNA, 2516 bp, Zea Mays
cgccatctttcctcagccgctgcctctccgccccaccggaagatggcggcggcgctgcgcgtcccgctccaggctatcttctcccgctcgtcccctccgtccgcgggcctcctcctcccgctccacgcgcatctcgtcgtgtcgggccgcctcgccgcgtcccccgccgcaatcacgtccctcgtttccctctacgctcgcggcccggccgcgctgaactcctccatcccgcttctcctccccgcctccgcgccgcctccgctcccctgcttcaacgccgcgctctccctgccgcacgcgttcgcgctcccgctcttccgccgcctcctcgtcgcgcactcccccgacgccttctccttccctcccctcttctcctcggcccccagctcgccgcacctgctcgcgctccatgccctcgccctccgcttcggcctcgcacacgacctgttctgtgccagcgctctgctccgcgggtgcctgaggttcggcctcgccgaccacgcgcaccgcctgttcgacgaattgaggcaccgggatgtcgtcgtgtggaactccatggtcaatgggttcgtcaaactcggttgctttgaccgcgctacggagtgcttcagaaagatgagggaggagggcgaggtggagatcagcagcttcacagtcaccggaatcttgtccgtgtgtacagcaacagccgatttggggagcggggctgcagtacatgggttgtcggtgaggtcagggtttgacaaggaggcatctgtgtgcaatgcattgatagatctttacgggaagtgccaccaggtgcacgatgcaaccatggtgtttgaggggctgccagatactgataaggatctgttcagctggaactccatgctgtcagcacatcagtactcggctgatcacgcggggacgatgtgtctctttgcaaggatgagacgtaccacacttttgcctgattcagtgactgttgccgctgttctccccgcatgtgcacagactgcagccctgaaggttgggagggtggtgcatggatacatcgtaacgagtggactggcctgtgatggagcactggacgtgtttgcttgcaatgcgctggcggacatgtacacgaagagcggtgggctggatgaggctcgttgtgtgtttgattggacacgcctacgggatgtggcatcatggaacattatgatcgatgggtatgcgtcgcatgggcgtggccgggaggcactgatgttgttccaccagatgatagaagaaggcctggttccagatgagataacgctgctgggagcattgtcagcttgtagccactctgggcttgtcgaggaagggaagggttttctaatgaggatgaaagaggagtttggattggagccacagctagagcactatgcttgtgtcaccgacatgcttggacgagcagggaggttggatgaagcaagaaaggtaatagaagaggctggtgatgttggtgctggtgcatggaggacataccttgcggcgtgccggatgcatggtgataaggagagagcacaacaagcagctaggatgttgatgatggcagaggaatcaggcagcgggggatgggttctgctcgccaacacttatggttcggatggaaactttgaggaactcgaagaggtgagagaggagatgaaacgccaaggggtgcagaaggcagttggttgcagctgggtcgaggtcggatgagagaataatggaagtgaaacaattatgcatacttttgttaatggggatggggacaccctgaggctgacatgatttatgaaatgatgcacacgttaataggttggatgaagggatgcagccatctgagcaatttaaatccaatatatctggcagaattctcataagttttcaaattgtgctacacaattggttacacaagcacatggattggcagtagcccataagttagaatggtgcatctgaagataaagttaagctcacaccatcatgaccagcaataaaatttggtcctggcaacaaattttcgccaaatatcagagttcctgcggccagtgctccagctccgagccccattccaagatacaaatggatatgtcgacaaacccatgagctttgtctgacttcttcctccttagctggaagcttgcagtctcctcaacgactccaggttgctccccgccgtgctgaaatttgtcgaaatactccttcatctggacaacagcagctccctggaggtgctccctgaggaagatgggctctctcctgtacacttccaccgtcagcaccatctgctgcaggttgctcagaccatgctcgtcaaccgagaccgagaacttcatgccccagcttgggtcggagctccctgacgcatccaccttggtgcagtacttgctgttgggatcgacccatgcgacggagaaccactgcggcttgagcagcgacgatccgcggcccaggccgcgggcagagatcacacagaactccaccgacgttttcgccatttgcatgaagaggaaaggtgagcaggt

SEQ ID NO: 112582 - DNA, 720 bp, Zea Mays
atggacatgcgcagtaagcatatcacacataaaaaaggtgccagagtagagcattgtgagagtgaacatcacctttgctttggggatgaccttgatggcgacagactcccgcttgcgtgtacccttcttaactgtggcagcacaggtgtagccaaagtgaccccatctgacctcatcccccaagtcatacttggccacaaaccccttgttgaacccaaaccccttgccgaggctcctgctctcgcccccttccccctcgttgccgccttccttggggatagacagccgcggcgggccgtggcgccttgtgagtgccgccggatgttcttagcgggcgacgacggcaggaagggcagcctcaggagccgcctggccgaggtggtgggccgtgggccatgggcgcaaaggccggcagagaggtggtgcacggggctcgggctcggcgtggagaatgggaaggacagggacaccgcccagtgcttctttgtgggcccaagagagctttggggagtgattggaggccgcagaacacctctgttcctcgaggacagtgtcgacggcggagcggctctccgttccctcgcgaagcagatacggcgcctccatcttggcgtccctggcctccgcctcgagcgcaaggaaggcaacgtcgagcgtcgagcgggagcgcttcctggccgcggcggtgtcggtgacgcggcgctccgcctcctccgatga

SEQ ID NO: 112583 - DNA, 416 bp, Zea Mays
ttttttgtttgatttgtcatataacctcgagcagtttgactgacacaaagtttgcagtctcagatacattatatagctaagtaaagatagccatcaaactgctaaaagccagaagagacgattgtcaacggtataaatagagcatctaaatgcaagtcaaaaggcgtttctcaatgttttggtgagtttgagcaacgtgcttgcaaacagaaattattgaatggcatggccatatcccttctcaaaactatagaaccaaaattggacatagctggccagtatttagttgtcagccacttcaattagggtttgctcgtagtcagcaggggcctcaaatccatggaggttcatcacagttgcggctacattggcgagcccagggatttgaatgtcgttccggaatttcactccggggt

SEQ ID NO: 112584 - DNA, 1233 bp, Zea Mays
cagcgagaaactcacgaaaagagaggagccgggaagcaaagcgccgacgactacgccgcaagtcccaacccaacccaccctatccagaatccagggactggactgggaacgcaaggttctgggaaggcgtatgtaggcgttgccgtcttggtgcctcatcccggagctgctacttctcccctggtcgttggtcgattggagccggtagcgcgggggggatatgcacgggaatttcgggccccaggagcagattctgtggccggcgtcggttctcgccggcatcgtcatgtgcggcgccgtatatcagatgactcgacatgtcagttctcgatgtttcaaatgctacagtatgttaaataacaggcaaaaggttgagtggaacaataggggtttctctacactccatgcattggtagctgctgccgtttctttctacctggtcatgatctctgacctcttcaatgaagatgcgcacaatagcataataattgacagaaaatcatggctatccgattgcatgtttggggtctcgatcggttactttttgacagacttgacgatgatcatgctgtattttccttctttaggtggaaatgagtatctcttgcatcacggactttctatgtatgcaattggtcttgctttattgagtggcaaagcacacatgtacatcctcatggtcctcttcaccgaaatcacgactccctttgtgaacctcagatggtatttggacgttgctggtcagaagacttgcaatctttacttatacaatggtgtggctctatttgttggatggctggtatgggtatttgaattttccaccccgagaggtactaccagttagcctgggcatctgtggaaatccattgacttctgacaatgcgagatccatcttcagcttagggttctacagcttggtggcagtgccgtcggtggttgcggtgatgaacgtattttggttctggaagatactcaaggggatggtgaaaaccctttctaggaggaagcacagcgaaaatgggagaacagattagaaggaatgaaggaaggatgctactgaactgtacacatgttcatctcaacgcacttacggcactcgcattcatttctcacacagatgtaattatcttgtcttgccgtcaaagattcaaagtcggaatcccgcaactcttaaattgttgcaacagtgccacatgcaccgttactgaatatatattggccactgtcagtgtc

SEQ ID NO: 112585 - DNA, 1211 bp, Zea Mays
cagcgagaaactcacgaaaagagaggagccgggaagcaaagcgccgacgactacgccgcaagtcccaacccaacccaccctatccagaatccagggactggactgggaacgcaaggttctgggaaggcgtatgtaggcgttgccgtcttggtgcctcatcccggagctgctacttctcccctggtcgttggtcgattggagccggtagcgcgggggggatatgcacgggaatttcgggccccaggagcagattctgtggccggcgtcggttctcgccggcatcgtcatgtgcggcgccgtatatcagatgactcgacatgtcagttctcgatgtttcaaatgctacagtatgttaaataacaggcaaaaggttgagtggaacaataggggtttctctacactccatgcattggtagctgctgccgtttctttctacctggtcatgatctctgacctcttcaatgaagatgcgcacaatagcataataattgacagaaaatcatggctatccgattgcatgtttggggtctcgatcggttactttttgacagacttgacgatgatcatgctgtattttccttctttaggtggaaatgagtatctcttgcatcacggactttctatgtatgcaattggtcttgctttattgagtggcaaagcacacatgtacatcctcatggtcctcttcaccgaaatcacgactccctttgtgaacctcagatggtatttggacgttgctggtcagaagacttgcaatctttacttatacaatggtgtggctctatttgttggatggctgattgctcggataatcttattcatatatatgttcacccatatgtattttcatcttgatcaggcgagatccatcttcagcttagggttctacagcttggtggcagtgccgtcggtggttgcggtgatgaacgtattttggttctggaagatactcaaggggatggtgaaaaccctttctaggaggaagcacagcgaaaatgggagaacagattagaaggaatgaaggaaggatgctactgaactgtacacatgttcatctcaacgcacttacggcactcgcattcatttctcacacagatgtaattatcttgtcttgccgtcaaagattcaaagtcggaatcccgcaactcttaaattgttgcaacagtgccacatgcaccgttactgaatatatattggccactgtcagtgtc

SEQ ID NO: 112586 - DNA, 2145 bp, Zea Mays
cagcgagaaactcacgaaaagagaggagccgggaagcaaagcgccgacgactacgccgcaagtcccaacccaacccaccctatccagaatccagggactggactgggaacgcaaggttctgggaaggcgtatgtaggcgttgccgtcttggtgcctcatcccggagctgctacttctcccctggtcgttggtcgattggagccggtagcgcgggggggatatgcacgggaatttcgggccccaggagcagattctgtggccggcgtcggttctcgccggcatcgtcatgtgcggcgccgtatatcagatgactcgacatgtcagttctcgatgtttcaaatgctacagtatgttaaataacaggcaaaaggttgagtggaacaataggggtttctctacactccatgcattggtagctgctgccgtttctttctacctggtcatgatctctgacctcttcaatgaagatgcgcacaatagcataataattgacagaaaatcatggctatccgattgcatgtttggggtctcgatcggttactttttgacagacttgacgatgatcatgctgtattttccttctttaggtggaaatgagtatctcttgcatcacggactttctatgtatgcaattggtcttgctttattgagtggcaaagcacacatgtacatcctcatggtcctcttcaccgaaatcacgactccctttgtgaacctcagatggtatttggacgttgctggtcagaagacttgcaatctttacttatacaatggtgtggctctatttgttggatggctggtacaacaactgctctcacgagtcatcaatttcttttaaagaacaaatttctatacagtcataatgcacatggttcaggaaagttgtctctaaatgctagaacattgcatagttaggttacctggcagctgtagttgctacttttactatttctgctgcttactcacaccagactgcacacagaaatatcccacactgtcaactgcaggattatccttttttaggtttttgaccagattaagtgaaaaatgtaccaattttttatatattttttcatttacaaatcaaatggaaatctaaaacttctgatggaggagcagcttccttgatatgatttgttttgaagatgtgatagctgggggtaatgattagtgatggcttcactatacaaattggtaaggatcattttggatttcttttttttatggaacacaagaagagtcattttgaattttggaatacgggtttttgtcgtaaaaaacttttatgatcttgtttgaattaaccataagcgaacagatgtgtagtctagttggtagtaccttaggtcttaaggttctaatccctacggtagcaaatttaaattaaaaaacatccctcatcggttgtgttccctgatgagccgctttcagcgaaatgcacatggtccgatggccgcagacatgtctcgtaggcacttggtggcgtctagcgcagccgacttttgaggtgtttcttgatatatgtgggagaagtttcttcctgatgcaatgccgtggggacagtttcccctggtattcgagttctttttttgaattaaccataagtatttggatgccgcttctcagttttcaaatataccctaaacattctctttaagtgacccgtttgctctgatggatagttttgattaacttgtctttcgtctgatacagattgctcggataatcttattcatatatatgttcacccatatgtattttcatcttgatcaggcgagatccatcttcagcttagggttctacagcttggtggcagtgccgtcggtggttgcggtgatgaacgtattttggttctggaagatactcaaggggatggtgaaaaccctttctaggaggaagcacagcgaaaatgggagaacagattagaaggaatgaaggaaggatgctactgaactgtacacatgttcatctcaacgcacttacggcactcgcattcatttctcacacagatgtaattatcttgtcttgccgtcaaagattcaaagtcggaatcccgcaactcttaaattgttgcaacagtgccacatgcaccgttactgaatatatattggccactgtcagtgtcagcgtgctcgcttgggagct

SEQ ID NO: 112587 - DNA, 98 bp, Zea Mays
gcgtcgcatgagccatcaggttggtttgttcgtggtgcgcgcccaccgcgttcacggcgtgttgataaaacttgatatcgacatcgggcgcggtgggc

SEQ ID NO: 112588 - DNA, 1309 bp, Zea Mays
acgtcctccctgtcccgggttctcctcccgtcttcgccgcccttgcctcccctcaaggcccaagctctctccatagttcccgccccctccctcctcctttgatcacctcctcccccatatccctccttccacccactgacccaccaggctaccacacgcagcatcagaaaaagaaaaatagcagggagaggtcgacaggcaccgacacgacccatgtcgtcaatgtggcgcgtttcccgccgcctcctccgcgccgccgcctcggcctctacctcggcgatcgggcgcggcgccgagccccgccggtgggtcccgccgccgttcgcgctgcagcgctgcggccacgcgtcgcttccggacgcggcgaggagggacggggaggaggaggtgacggcggcggaggcgaggcggctgatgcggctgaccaacgtggatgcgctcaagcggcggctcggggacggggaggtgatcccgtacgcggacctgctgcgcgcgtgccaggactccggcgcggcccggacgcgcgccgaggccgcggcgctcgcgggcgcgctcgacgaggccggcgtcgtcctgctcttccgcgacagggtctacctccagcccgacaagattgttgatcttgtacggaaagctatgccccttgcactgacacctgagaatgatgtggggaaggaggagctcaagcagctccaggtgcagctggaagacatcaacaagctggcacacaagcaggtccggcgcatcctctggtctggtctgggtttcttgatcacccaggtgggcctcttcttcaggctcacgttctgggagttctcgtgggacgtgatggagcccatcacgttcttcacgaccacgacaggcctgatcgtgggatacgcatacttcctcatcacgtcaagggacccaacctaccgagacttcatggaaaggatgttcgaatctcggcagaggaagctgatcgagaggcagaacttcaacctggacaagtaccttgagctccagaggcgctgcaaggaccccctggagaaggcgtgcggcacgaccaacactgacatggctcatctccatgagctatccattcacaaatgacaaacaatttcaccattgcttcgttactaattttattctatgggggaaatgatccctagtagaaaaagtaaccggtgtttcttgcacttgtgagataccttttccacggtcttctctgcaaatgtgtaggtcagtataatcctttttttagcgatgttgtagcacaagcacctgatagttgaaaaggcaagctcatctgcatggccggaagcttact

SEQ ID NO: 112589 - DNA, 1295 bp, Zea Mays
atggaaggaaggggaaaccgagcgagatgcgtgcatgctctagacggagaggtaggacggcggcattggcagtccgacgaccttgccgcagcggaggctagtctccggcatgttgtactcgtccctgagcgaccgctccggcgagatgacgctcacgtacagctgctcgccgaggtactgcctctcccagatgttggaccggatgctccacatgcccgcgttgtcgaacgtcatcatcaccgccgtccacgacctagggtacacctggatcgtgtgccggctcaccgtgtccaggaggttgtacgtgctccgggacgctggcgtccatttgcccgggcccatgctgacggcgaagaaggcgtagccgtcgatgtggatggtgtcgatgctcttctcggggttctcgaagaccacctcgatgaaggtgcggaactcggcgcggatgacgttgggggccatcttggtgggcgcggacttggagggcggcacgtcgccgatgatgtcgtactggaacaccccgtcggtggtgttgaagtactcggcgagcttgacgggggtctcggggtcgacgtgcgacacgccgttgaagccgaaccgctccttgccgtccaccttgccgcggcccatggcgagcttgatggtgcgggtgatgttgatctggccgtagtggtacgacccctgcgggttgggccgcgccgcgctcgccgtcaggttccagcggaaggacctgcactggttgatggaccacgcccatccgctggggctctccggcaccttggccggcggcggggcgttggagcccttgtagcggatcacggccgtgatgctgttcacctccttgatgaaccgggcactggccgatgtggaggtccagcgagtcgtagtcgttctgcatggtgtgggagccctccatctccaccagcttcatgatgtggttctggatgcggatgttgaaggacgccttgatgcccacgttgcagacgcggaagcggtacgtcttgccggcctccacgttgtacatgggcgggttcgacgcgtccttctcgttcttgccgttgatcacgagccccgcgggccgcccgatccccttgccggcgtccaggttcttggccaggacggtgtggtccttggtgtaccagtcgccgacgaggaccgggaagtcgtcggccggcgtgtcgaaggggaccgggatcaggtcacggctgtggacgctgatgagcccgtaggcgcccgccgcccgctgcatgccggtgctggggtaatagaagaagctgccgatctggtccttgggctgc

SEQ ID NO: 112590 - DNA, 678 bp, Zea Mays
gaaccagcagaagcgcgagcgagcgtgtgggtaacggctcacggcttctctgcaccaccgccgacccgaggagcacacttaggtctacctgcaacctgcatttcctctccctctccctctccctctcggctcctctgcagcaccgccggccacgtcctcgaggaccacactggaggtggatcggcgagctcatgaagatatgctagtcctcttgctgatcctagagcaatcctgagcctcttcttccaatccagttcatcaaaagaaaagaaccttgctcctttcagctgtggagcacctccactatcttttttagcgattccccatgaagctaaaaattgaatatgcatgagaatagtgcacgaagactggccaaaatcatgaatatcagcagaagaatggacagtgccttcattttgagagctacaaacactctgaacctcagggttccacaaagctgttgtgaatgtgaatacttcaaggagtggagctttctaaggtttacaactgatcaccaaagccttggtcttttattgaatgttcccttgagtaggaacaggtaataggtctttggtgccttggtggctcggtgcaagtcacaaactcacaatgctgtcaacacattcctttaaacttttgaacgtggacgtattcgtgacaactggtgtctgttttgtt

SEQ ID NO: 112591 - DNA, 1505 bp, Zea Mays
ataaactttgatgtaagtgaatcagtttaaatggtttttatctggtggtaactaatgttcattgtaatcaaaacattctcacaatatcgtcctggtagaactaatctagctgaacattttttcaggtcaacaggcactctggataattctaccctaaacagatggcagcatgcatcctatatcctcgtcaaatgcaatatatcaaggcttaccatcttgggggttcgtctgaccgaaacttggccggaggtataccaagagcaagaacaggagtagcaactgctgcatcgccgccatgccgagctaggcctccaaacaagttgcagcagaccactgctaacttcgatgggacgatggttatccttggagaagtctatgcaatgaggtagctaatggacgagtcagctgctaccaaatggcgccgctcttcttcctgaggttggaaccaggcaaagcaaatagcgtttcaagcaaaacaaccttgcatcaccagattcagaagaatctctcgtcaattattgcctggtctgcttaccgggtccaagcaatggatatgctcataggaacgcacgtatgcaagggtatgggaggccttaaacaaggctacagagagctcagttgaactgatcaaaacacggaaatggttgaagaaaaaatgtttctgtattcctcgttgatagtggggcagttgcttcttgtcatcttgtggctggggcctcatcggagtatcccttctaagctttgacccggtcatggctattaattaattagattagtacggccacaggtcggacttttgtgccataggcccacagttcagaaacgtgttatgctgcgctactgctgctagcagttatgatgtggatttggcatcatgacaaggatattacgtaaatatacttcggtccccttgaacgcaccacccatcgtgttaccatgaatcggtttgttcttaggagacctgatggttcatgttcagtaaatttgatttgatgatgaggcagggtttctctcacctgcacagacacaaagcttcaaatcgcaagtcagaaagcatgtgcagacgattatactgctctccttgatccttggaagttcgcagatggttcggaaaggcctggccgttctttttttttcccccttttcgcagatgctattcgttcaccaacacgaatgggtccggaaggccaggttttggatgcacctgctcaactggttcctttgtcgggaagcttgccgtgcagataaattttttatgcatgatgttccagaaaatgcagataaaggacggcttccacacagaaggttcgttctgcacggagacaaagtgtggccggcaggctgatgtttgcattggccgatgaaatgaactgttcgcttcaacttaaagtcagttgttgtatctacaatctatagagacaaaacactataagaatagtagaagccggtacgaattaaagcagactgaaagatttctatatagtaattgtccgtcttttctctcc

SEQ ID NO: 112592 - DNA, 4403 bp, Zea Mays
tgtttttatcagcttattagaataactcacaattccgacacttggttgagaccgcaaaaaaggaaaactaatcggtgacagttttatttgtttgctaaacgtcactcctattttctgttgtaaagctttaagaacttaagaagaaacatctacattgagaatataacaatactctttgtggcagctattggcatactcaagcaagaggtggaaagtcttacggaacttgataagtctgctgaacttctgattcgtttgttgtgtgctgtgcctggatggagcgaaaagaatgttcaggtacaacaacaagttatagaggtcatcacctatgtcgcctcgactgtaaacaaatttccaaagcgatgtgtggttctatgccttcttggtgtaagtgaaagggttgctgatattaaaacacggacctatgcaatgaaatgtctcactgccttttgtgaggcagtaggtcctggatttgtgtttgacaggctttacaaaataatgaaggagcacaagaatcccaaggttcttagtgatggtattctttggatggtctctgctgtggaagactttgggatctccaatttaaagctaaaggacatgattgatttttgcaaagacatcggtcttcagtctagtgctgctgtaacaagaaatgctactataaaactaattgggatgctacataagtttgtgggcccagatattaaaggctttttaagtgatgttaaaccagcacttctaagtgccctggatactgaatatgagaaaaatccttttgagggtgctgctgctgctccaaagagaacagttcgagttctggatactgcatcttctgtatctgccggcttgtctgatgggctgccacgggaagacattagttctaagataacacctactttactaaaaaatcttggcagtccagactggaaggtagtggtcttttttaaaaatatttgatttattctggaagtattagattttatttgtgatatttgatagtatgcttatatgtgaactgacaggtacgactggagtctatagacacagtcacaaaaattatggaggaggctaataaacgtatccagcctacaggaacagctgagctgttcagtgcacttagaggccgtctttacgacagcaacaaaaatttagtaatggcaaccttgtccaccattggtggtcttgcatctgctatgggaccttctgttgaaaagtcaagcaagggtattttggcagatgtgctgaagtgtcttggtgacaataagaagcacatgcgagaatgcacattgactgctctagattcgtgggttgctgcagcccaacttgaaaagatggttccatatattatagtgtctttgggtgatcagaaaacaggttcagaagggcgaaaagatctctttgattggttgtctaagcatgtttcaaaaatgggtgattcatctgaggctttgccattgttgaagccatctgcatcttctttgatggataaatcttctgaagtccgcaaagctgctgaatcctttatgaatgaaattctcaggatctgtggccaagaagtggtgggaaggaacttgaaagatttgccatcacctactttggccattgtatcagaaaggctgaaactgtctactgtacatgaaggattttctgaatctgttaaggtggtgtcaacaagcatgagtttgccatcaaaagctggtttaaagaacaataaacatggtcctaacgatcgtggttctaatgtgggcaaacctgtgtcccaaagaggacttccacagagagcatctgttactatggtttctactcaagattcttctcaatcccaggcattatttaacataaaggactcaaacaaggaagagcgggagaggcgtgttttggttagaaaattcaaattcgaagaacctcgtcgagagcagattgatgaactaaagattgatttgtttaagcatttccgagaagatgtaagcttgcgattatggaactcagattttaagaggcaaatagatggtattgaattgctacaaaaggcacttctttcgagtgggaaagaagcgattgaacttcttgacatactattaaggtggattgtcttacgcttttgtgaatctaacacaacatgtttgttgaaggttcttgactttctacctgagctttttgatattttaaaagaccagtcttacatgttgacagaagctgaagctgcaatttttcttccttgcctcatagagaagtctggtcataacattgaaaaagtcagggaaaaaatgggggatctgataaagcaaatggtcaacatttattctcttcccaaattacttccctatattcttgaggggctccgctcaaagaataaccggacaaggatagaatgtgttgatattattggatacttcattgaccatcatgggactgaggttggtgggttgatgaaaaacttgccatttgttgcagcactgacagcagagcgtgatggtgagattaggaaagctgcccttaatacgcttgcaacagcctacaagagccttggggatgatgtatggcgatatgttggaaaactctcagatgcccaaagaagcatgctcgatgataggtttaaatggaaggcaagagaaatggataaaaggagagaaggaaggcctggtgacgctcgagcagctttgaggcgttcggttagggagaatgggtctgatatagcagaacaaagtggagaagtagtctcccgttcagtgacaggatcaatgatctcaagggacctcggatatgcagatgctcatatggataggcacatggtacctaggcagattccagctgcaactggtcctgcggactggcatgaagctcttgacatagttgcattaggtttgcctgagcagtccgttgaaggtatgaaagttatatgccatgagctaacacaggcagctgatcctgaaagcacggtgcttgaagatcttattaaggaagctgacagattagtgtcatgcttggctgttatggttccaaaaaccttcaattttagcttatctggggcttcttcaaggtcttgcaaatatgtcttaaacacactcatgcagacatttcagatcaaacgtcttgctcatgctgtgaaggagggtacccttgacaaccttattacggagttacttctttggctcttagatgaaagggttcctcttatggatgatggcagccaattactcaaagcactaaatgttttgatgcttaaaatcctggataatgctgagagaacatcctcgtttgttgtgctgattaatttgctgaggcctttggacccttcaagatggccatcgcctacaccaatggagtctcttgctgtaaaaaatcagaagttttcagacttagttgtcaaatgtttaattaagttgacaaaggttcttcagagtacaatatatgaagttgaccttgatcgaattcttcagagcatccatatttatttacaagaactgggaatggaagaaatacggagaagggctggtgctgatgataagccattaagaatggtcaaaaccgtcttgcatgaacttgtgaagcttcggggaacggcaataaagggtcacctttcgatggttcctatagatgctgaacctcagccaataattctagcatacattgatcttaatctccagacccttgctgctgctagaatgttgacgccatcgggacctatgggtcaaactcactggggtgatgctgcttcaaacaatccaaatccatctactcactcagcagacgcgcaattgaagcaagagcttgctgctgtcttcaagaaaatcggcgacaagcaaacatgtactattggcttctacgaactgtatcggataactcagctctacccaaaggttgatatatttgctcagcttcagaatgctagtgaagcatttagaacctatatcagggatgggctagctcaggtggagaagaatgcagcagctggaagaacgccttctagtcttccactgtccacgccacccccaatagcagcaataccttctccaaaattggcaccgtccccagttcacacaaaatcaattggtagcaaaacagattataacgaagataatgccagtggtgagacacaacctttcagaggtcaaggtgacgccactgaccaacaaactgatagataccagacctcagcaggtacattggatgctcttagggaaaggatgaaaagcattcaagctgcagctataggtcattttgacggagctcaggctcggccgttggcaagtatgaacggaagtaatatgctgcatgggggaacacgattggacggtgagccccagcaacaaagtaatattccacccatggatgagcgagctctctctgggctacaagcacgaatggagaggctaaagagcgggtctatggaatcactatag

SEQ ID NO: 112593 - DNA, 4977 bp, Zea Mays
tgtttttatcagcttattagaataactcacaattccgacacttggttgagaccgcaaaaaaggaaaactaatcggtgacagttttatttgtttgctaaacgtcactcctattttctgttgtaaagctttaagaacttaagaagaaacatctacattgagaatataacaatactctttgtggcagctattggcatactcaagcaagaggtggaaagtcttacggaacttgataagtctgctgaacttctgattcgtttgttgtgtgctgtgcctggatggagcgaaaagaatgttcaggtacaacaacaagttatagaggtcatcacctatgtcgcctcgactgtaaacaaatttccaaagcgatgtgtggttctatgccttcttggtgtaagtgaaagggttgctgatattaaaacacggacctatgcaatgaaatgtctcactgccttttgtgaggcagtaggtcctggatttgtgtttgacaggctttacaaaataatgaaggagcacaagaatcccaaggttcttagtgatggtattctttggatggtctctgctgtggaagactttgggatctccaatttaaagctaaaggacatgattgatttttgcaaagacatcggtcttcagtctagtgctgctgtaacaagaaatgctactataaaactaattgggatgctacataagtttgtgggcccagatattaaaggctttttaagtgatgttaaaccagcacttctaagtgccctggatactgaatatgagaaaaatccttttgagggtgctgctgctgctccaaagagaacagttcgagttctggatactgcatcttctgtatctgccggcttgtctgatgggctgccacgggaagacattagttctaagataacacctactttactaaaaaatcttggcagtccagactggaaggtacgactggagtctatagacacagtcacaaaaattatggaggaggctaataaacgtatccagcctacaggaacagctgagctgttcagtgcacttagaggccgtctttacgacagcaacaaaaatttagtaatggcaaccttgtccaccattggtggtcttgcatctgctatgggaccttctgttgaaaagtcaagcaagggtattttggcagatgtgctgaagtgtcttggtgacaataagaagcacatgcgagaatgcacattgactgctctagattcgtgggttgctgcagcccaacttgaaaagatggttccatatattatagtgtctttgggtgatcagaaaacaggttcagaagggcgaaaagatctctttgattggttgtctaagcatgtttcaaaaatgggtgattcatctgaggctttgccattgttgaagccatctgcatcttctttgatggataaatcttctgaagtccgcaaagctgctgaatcctttatgaatgaaattctcaggatctgtggccaagaagtggtgggaaggaacttgaaagatttgccatcacctactttggccattgtatcagaaaggctgaaactgtctactgtacatgaaggattttctgaatctgttaaggtggtgtcaacaagcatgagtttgccatcaaaagctggtttaaagaacaataaacatggtcctaacgatcgtggttctaatgtgggcaaacctgtgtcccaaagaggacttccacagagagcatctgttactatggtttctactcaagattcttctcaatcccaggcattatttaacataaaggactcaaacaaggaagagcgggagaggcgtgttttggttagaaaattcaaattcgaagaacctcgtcgagagcagattgatgaactaaagattgatttgtttaagcatttccgagaagatgtaagcttgcgattatggaactcagattttaagaggcaaatagatggtattgaattgctacaaaaggcacttctttcgagtgggaaagaagcgattgaacttcttgacatactattaaggtggattgtcttacgcttttgtgaatctaacacaacatgtttgttgaaggttcttgactttctacctgagctttttgatattttaaaagaccagtcttacatgttgacagaagctgaagctgcaatttttcttccttgcctcatagagaagtctggtcataacattgaaaaagtcagggaaaaaatgggggatctgataaagcaaatggtcaacatttattctcttcccaaattacttccctatattcttgaggggctccgctcaaagaataaccggacaaggatagaatgtgttgatattattggatacttcattgaccatcatgggactgaggttggtgggttgatgaaaaacttgccatttgttgcagcactgacagcagagcgtgatggtgagattaggaaagctgcccttaatacgcttgcaacagcctacaagagccttggggatgatgtatggcgatatgttggaaaactctcagatgcccaaagaagcatgctcgatgataggtttaaatggaaggcaagagaaatggataaaaggagagaaggaaggcctggtgacgctcgagcagctttgaggcgttcggttagggagaatgggtctgatatagcagaacaaagtggagaagtagtctcccgttcagtgacaggatcaatgatctcaagggacctcggatatgcagatgctcatatggataggcacatggtacctaggcagattccagctgcaactggtcctgcggactggcatgaagctcttgacatagttgcattaggtttgcctgagcagtccgttgaaggtatgaaagttatatgccatgagctaacacaggcagctgatcctgaaagcacggtgcttgaagatcttattaaggaagctgacagattagtgtcatgcttggctgttatggttccaaaaaccttcaattttagcttatctggggcttcttcaaggtcttgcaaatatgtcttaaacacactcatgcagacatttcagatcaaacgtcttgctcatgctgtgaaggagggtacccttgacaaccttattacggagttacttctttggctcttagatgaaagggttcctcttatggatgatggcagccaattactcaaagcactaaatgttttgatgcttaaaatcctggataatgctgagagaacatcctcgtttgttgtgctgattaatttgctgaggcctttggacccttcaagatggccatcgcctacaccaatggagtctcttgctgtaaaaaatcagaagttttcagacttagttgtcaaatgtttaattaagttgacaaaggttcttcagagtacaatatatgaagttgaccttgatcgaattcttcagagcatccatatttatttacaagaactgggaatggaagaaatacggagaagggctggtgctgatgataagccattaagaatggtcaaaaccgtcttgcatgaacttgtgaagcttcggggaacggcaataaagggtcacctttcgatggttcctatagatgctgaacctcagccaataattctagcatacattgatcttaatctccagacccttgctgctgctagaatgttgacgccatcgggacctatgggtcaaactcactggggtgatgctgcttcaaacaatccaaatccatctactcactcagcagacgcgcaattgaagcaagagcttgctgctgtcttcaagaaaatcggcgacaagcaaacatgtactattggcttctacgaactgtatcggataactcagctctacccaaaggttgatatatttgctcagcttcagaatgctagtgaagcatttagaacctatatcagggatgggctagctcaggtggagaagaatgcagcagctggaagaacgccttctagtcttccactgtccacgccacccccaatagcagcaataccttctccaaaattggcaccgtccccagttcacacaaaatcaattggtagcaaaacagattataacgaagataatgccagtggtgagacacaacctttcagaggtcaaggtgacgccactgaccaacaaactgatagataccagacctcaggtacattggatgctcttagggaaaggatgaaaagcattcaagctgcagctataggtcattttgacggagctcaggctcggccgttggcaagtatgaacggaagtaatatgctgcatgggggaacacgattggacggtgagccccagcaacaaagtaatattccacccatggatgagcgagctctctctgggctacaagcacgaatggagaggctaaagagcgggtctatggaatcactatagattgataacagtactgagaaataccatccgttgtaattcattgtaaatttgaggcatagtgatgctgtttgtagataggtatttgaatgtcggaagaagtacgtctcacggggccgacatttcgtaacccctgtgccaggtcaatccattcttgcggagcctttgattgcagttttagacaagagctagccagatgttttctttgtagctactctctgaagggctaattagggttgacaaatttcgccgtactgtattagttttcctgtggtgtacagcaatagacttttaagttctaaattaactgaaaatgttagttgtgaaatatatgttttttatagaatgtatattcgtacggcttagtggtcggtgtggaaaattgttagtgttggaatgtcaaatgaaatggttagaccaacttccagccgtccgtgtacgcgtcgatcgaaactattcatcctttcagcacactattatgctgctgcttgtcagtggttcgaagtcctgataccatctacttcgttgttcattatgcggcaactgattattattagcttcctatcagcaacttattatttttttattaaactgcaactgaacatgcttaaatttgtatcagtgatgcggccattgctcgcaaaggtcaagctcaccagcatatgtagttgg

SEQ ID NO: 112594 - DNA, 96 bp, Zea Mays
cgtacttgcgatgcaaactgggacttcgttgatcagcatgcacccaaatacctaactgagacaacttgctgcgtcacagttggttcgcaacgcaca

SEQ ID NO: 112595 - DNA, 1287 bp, Zea Mays
cagccacagcccacagttcccccatttcatttgtgtggtagccgaggactgggagggacctactcaaccttttttttttgtgtgtgtgaaagatcgagagcgccgctcaacgaatagagcggtttctctgccttgtgtctttcctctgtcctgtggtctgcggtggccgcagctgcggcgcgcggtgatggagttcacatctaaaaagacggcttcgcttgccctcctctgcctcaagctctcctgcctcctcctccttcttcttcttccccggtcttcctctgctgcgcctctgtccagtaagcacacaccagtcatccgtcgtccttgcgttcttcttcttcgttggctagcctatgtatctgtctgtctatctataccatgctttctctcactagctacctgctgtcctgttgtgtttcgcaggaagcctgtcgctgacgaggaaccgcctgcagcccgcggatgaccctgctccggaggttcccgctcccgcccagcaggtcggtcgcgctcgctcgctcgctcgatctctttctcgtcctgcggcttggtagatttcgtcgcgtatccacaccacaacaactgcgcacaaaaagcttgtgcttgggggcaggggcactccactcacatgcactgttagctgggcatgcagggctgcaggccggccatagtgcaggtcacatgcatggccactcgcacacacagttgcaaacttgcaattcgcgtgccccaccccactcacgacacctttcccgccacaaaggcaaaaataaaggtttgtgcgtgcaacaacacaatcgtgtcaactttactacttgcacgctagctgtccgtcagttgactgctcgtcgatgtcatcatcaagtctttttgtaaatatctgacgcacacgcacgcactactaccaataacgaacccagctaatctttaaatttgtctgtgtacgtcgtcgtctctgtgtactatacagggtgcgggtgctggtgctggtgcggtgggagctcgagaccccggcggcgaggtggcggtgaggatggacatcgaggtcaacgactaccctgggtccggtgccaacaaccgccatgaaccgagaagccctgggaggccatgaccatgaggtttgaaggcttgaagctagcgtacgtctcagacaggaatcaggaatgaagaccatggcatggagctgctgctgctgtcttgagagttttataagtagcgaagcgaaggagagtacattgcttgttgttagctatagaggtcaagggagagccttatcgtgtattt

SEQ ID NO: 112596 - DNA, 801 bp, Zea Mays
gtgtgtgtgaaagatcgagagcgccgctcaacgaatagagcggtttctctgccttgtgtctttcctctgtcctgtggtctgcggtggccgcagctgcggcgcgcggtgatggagttcacatctaaaaagacggcttcgcttgccctcctctgcctcaagctctcctgcctcctcctccttcttcttcttccccggtcttcctctgctgcgcctctgtccagaagcctgtcgctgacgaggaaccgcctgcagcccgcggatgaccctgctccggaggttcccgctcccgcccagcagggtgcgggtgctggtgctggtgcggtgggagctcgagaccccggcggcgaggtggcggtgaggatggacatcgaggtcaacgactaccctgggtccggtgccaacaaccgccatgaaccgagaagccctgggaggccatgaccatgaggtttgaaggcttgaagctagcgtacgtctcagacaggaatcaggaatgaagaccatggcatggagctgctgctgctgtcttgagagttttataagtagcgaagcgaaggagagtacattgcttgttgttagctatagaggtcaagggagagccttatcgtgtatttaattagcttgttaattattgctgcgtactccttgttaagagtcttcaacttaacggcggatcggatctgcttgagctagctactagcttttgctatctctgatctagaacaaaagcatcagttagtaacgtagcatcgtcaacagctatagtactcttgagatatttacttgagtcacattcgcctgcag

SEQ ID NO: 112597 - DNA, 1534 bp, Zea Mays
gcctctgccttccagttccagccgcgtcgctgcctatcacacacgtcatcggacgtgacctcctcacccgcagccgcggtggggcccgtctaggacgtgctcctttccctccacggctttgacatcgcgtcacgccggccggcctctgcctgacctgcctcggcgcagccccacgcgacgtacgccacggaacgacgcgccgaccgagccaagccagtactaccacgtccccccagccaaaccaaacgcaggcacggcacggcacggcgcggtgctcattcgcattccccagccccaccgatcggatcggcaaaatccctcccaccagctccccacagatcccggcgtccccaccgcacatccctccctgcttccttcccccatcgccccggccgcggaggcggagcttccccccacgccacgatggcggagtgccgcagcctcatcgagttcctccgcgcgttcgagcaccaccgcagggcggccgacatctccgcctccgcgtgctcccgatccaggcgggccggggcctcctccgccgcaggcggctccttctgcgacagcgccccgatggccgtggtcgacgcggtcatgctcctcgccgtcgtcaccgcgctcggcttcctcctgatcccctacctcaagctgctgctcctcgagatgggcgcgctgctccaccccgccgcgtcctgcctcccggccgccgccttcttcggggccgccgtcgccgtcgccgcggccgtcgtcgcctgggagctgctgggccaccacgcgcgcaagtgcggcaagcccaggtgcaggggcctcaagaaggccgtcgagttcgacatccagctggagaccgaggagtgcgtgcgcggccgccccggccccgcggcgcgatcggcgctgctggccgcggcgggggcgcgccccgtcgacctaggcgacgaccagcgggagctggaggccgagctgcgcaagatggcgccgcccaacggccgtaccgtcctcatcttccgcgccccctgcggctgccccaagggccgcatggaggtctggggcgccaagaaggtgcgccggatcaagaagtgaaggggggaacaaggatcggatggttacttgttagtgcaatagtactagcgcactcttgttcctacctcgatcctcgtaagtagctactgctaggaaaaaaaatcctcagtaataataagtataagtatagggagacgaaataaacggaacacagaaccagttattatcacagatagcttatatagacaataatatactccttgtattatgaaccagtggcgaatttggacagaaatacatgctgtttacttgttcattctctaattttcatgggatcctggataattgatacagtagcaacatagacaatatcttagtcagtagctgcttgctcctttggctgtcttttgggtccttcatttttatccatattgtggtacaggtttagttgctacttacctgtcttatatgacatgttttttgctgttgattcaatgatattggggtgaagttttagctc

SEQ ID NO: 112598 - DNA, 1427 bp, Zea Mays
ttcgaacctaacagtaaaaccttgtgatctccgcatccaggcacgtacaacgctgctgctgacaccgagctacctacctcccccgtgccaccacctctaaaatcccccagcggcccaaccgaacccgcctagggattcctaccgagggaggccgcacgcagccatggatttcctgcaggagcaaagcgtcgagaccacagtggccgtcgccgtcgctgtcgccgccgtcgccgcaggcggcgccttcctcctccttcgatccaggaagcccaagggctgcttggatcctgagaacttcaggaagttcaaacttgttgaaaagaagcaaataagtcataatgttgccaggttcaagttcgctcttccaactccaacttctgtattgggccttccaatcggtcaacatatcagctgcagaggacaagacgctacaggtgaagaagtaatcaagccttatacccctactacattggattctgatcttggatattttgagcttgtcataaagatgtatccccaagggagaatgtcccatcatttccgcgagatgaaagttggtgattatttgtctgtgaagggacctaagggccgattcaagtaccacgttggccaagtgagggcatttggaatgctggctggtggatcaggcattactccaatgtttcaagttgccagagcaattcttgagaaccctaatgacaacaccaaggttcacttaatttatgctaatgtcacatatgaagacattcttctgaaggatgagctggacgacatggccaaaacctatcctggccgctttaagatctactatgtgttgaatcagcctcctgagaactggaacggtggtgttgggtttgtgtctaaggaaatgatccaatctcattgtccagcgcctgctgaggacattcagatcctgagatgtggtcctcctccgatgaacaaggccatggctgcacaccttgacgagctcaactacacaaaggagatgcagttccagttctaagcaatgttaagtttgcaaataataattagtgaccgacatggttcttcggtcacaggaatagtacctgactctgctcgttagctgatatcaggaggaattcaggatcacatgatgattagtagtgcgccagcattttttgcaatctctatttttgaggtcaaatgatatctacctccacataaatccacattggcagagacaacattttgttactatcattattgattttaaatgtggaccattggatgcgataagaaatgtctcactatcatcagttaaccatagcaatgcaaagaaccttacttttggttcatatatacaaccaaaaagcaaacattttggttatgctgtttccttaaaccgtgacatggattgggaatctctcttcttatctggagtaagcattttggttatgcagtcacct

SEQ ID NO: 112599 - DNA, 255 bp, Zea Mays
atggacgccttgtcccgccctactgtcgtcatcgacaacggcaccgggtacacgaagatggggttcgcggggaacgtggagccctgcttcatcacccccactgtcgtcactgtcaacgattccttctccggctccgcccagccggcggcgaggggcacccccgccaggggaactggttcgctcagcacagcgccgacgtcatggctgacctcgaagcgctggcccgatcccgtgccagcagctcgcatagtttga

SEQ ID NO: 112600 - DNA, 115 bp, Zea Mays
aatcgtattgcactgttccatgtgctattgttgcactgggatgccttgtttcatcaccatcctatgcttgtttaggcatgcttgtgcagacgcatgaagggtccttttgtgatat

SEQ ID NO: 112601 - DNA, 952 bp, Zea Mays
agtgttcctagaaaacagctgcgaaaagtatttgaggcattagatatccttgggagtgctaaatgaagggtgaatagaagagttcatgatgttgttgagactatctggagtcaaggtggaggcattgcagggctggtggacaaggcaaatattcctttgcctgaacgaccagaatcagaggaccctgatgaaatgcagaaatggaagtaccagcataaagaaggcaaagaaaactaaccgtgagctgcatgctgagagatgtgacactaagctcaaactctcggttgctcgtaaaatgagagaggaggatgaattttattaccctcacaatttagatttctgtgggcgtgcataccctatgcatcctcatttgagtcacctaggttcagatctttgtcggggtgttctagagtatgctgaagggcggccactaggaaagtctgggttgtgctggttgaagatacacttggctaacaaatatggtggtggcattgaaaagctttctcacgagggcaagctagcttttgtggagaaccaactgtttgatatatttgattcaacagcaaatcctgttgatgggaactactggtggacgaatgctgaggatccctttcagtgtttagctgcatgcatggacctttctgatgccttaagaagtccatcaccttaccatgctgtctgtcacctgcctattcatcaggctactgtagacttgcccccgcctccctaccccgcccgcctgcccgcgaacgctaggattttcgcatcgcgcctccgcctcttaggattgtcgcgccgcgccttcgccattttcgccgtcgcgccctcgacaccacctcccaaggatcctcgtgcgtcacatggaagattggaggaggcaaaggaggtgcggaggtggatgatgtttcgggagttaaggaaggaaaaggaatgcagtttaatcaacaattga

SEQ ID NO: 112602 - DNA, 1814 bp, Zea Mays
aggaactgggctggaggatccgtttccgcaaccgcaacccagtccccttatcctgaaaactactcctcctctctcgtctctaaacccccgggcagcggacaaacaagcacacagcacgagcgaagagacgcagccatggcgatggctccaccgcctgcctgctcgctcttcccccgggtcgccgctgctgcgcccagttccgtcacctccaactccgttttgacctcgcgtggccccggtatccttccttccccgcgtctcgctttcgcccgccgccacctctccgcggcatggtcatcgaaggcagcagcctccgcttctgtcgaaatccaggatgactacacggatgagatggacgcggtgaacattgcgcaggatgtcacccagctcattggaaaaacaccaatggtgtatctcaatagagttgctgacggatgtgtggctaatatcgctgcaaagctcgagtacatgggaccttgccgaagtgtcaaagataggattggattaagcatgattaatgatgctgaagagaagggattaatttctccagacaagaccattttggtagaaccaacaactggaaatactggtgtagccattgcttctgtggctgcagcaagaggatacaagttgatagcaacaatgccttcatcgttagatgtcgagagacgcattcttctgcgtgcattcggagcagagattgtgttaactgatcctaccaaaggactaaaaggagcttttgataaagctgaggaaatagtcctgagaacaccaaatgcgtatatgtttcagcagttcaacaatgaggcaaatagtgaggttgacattcaagctttatctttcactcatatgatttatgttgcagtaaatgtgtaattcatttgctttctttttctttaaagatctattgagaaaccacttgggtaaattacagatccactttcaaaccacaggcccagaaatatgggaagacacgttgggttctgttgatatacttgttgcaagcataggaacaggcggtaccattagtggcactgggcgttacttgaaaaggatgaacaaagatattaaggttattggggtagaacctgctgaaactagtgtgatttctggtgatagccctggttacattccaagtatattagatgtgcagttgattgatgaggttgtgaaggttagcacagcagaagccgttgattctgcaagggaacttgctctaaaagagggcctgctggttggtatttcctctggtgctgcagcgattgctgctatcaatgttggcaaaagacctgaaaatgctggaaagttgattgcggtcattttccccagctttggagagagatacatctccaccattctgttccgtccgatatatgactctgttcgaagaatgaggaagagatagcgagccttgtactacttcaagcgcgttgccagtccccttctctagacctgacaggcttccatgacatgattgataaacgtgaagcagtgaagaccctgtttgattgcaacttcagggtccgaagttttgaagctgcacagagtttctatcaggtgagctgcaggcctgcagcttggttctagcaagactggaggagtgcctcatgtttagaccagctcatacaatcctggtgcaacatgcagaattgcgtgccgcagttagcttgggcctttcgtttagtagtctaggaccgggtacaaaccgcttgttacctggtacgcacttgagctgattttagcgaccaactatctgcaaattctttttgccttccgaattttgattgtttcatcttttatctggcgtctgcttt

SEQ ID NO: 112603 - DNA, 1771 bp, Zea Mays
aggaactgggctggaggatccgtttccgcaaccgcaacccagtccccttatcctgaaaactactcctcctctctcgtctctaaacccccgggcagcggacaaacaagcacacagcacgagcgaagagacgcagccatggcgatggctccaccgcctgcctgctcgctcttcccccgggtcgccgctgctgcgcccagttccgtcacctccaactccgttttgacctcgcgtggccccggtatccttccttccccgcgtctcgctttcgcccgccgccacctctccgcggcatggtcatcgaaggcagcagcctccgcttctgtcgaaatccaggatgactacacggatgagatggacgcggtgaacattgcgcaggatgtcacccagctcattggaaaaacaccaatggtgtatctcaatagagttgctgacggatgtgtggctaatatcgctgcaaagctcgagtacatgggaccttgccgaagtgtcaaagataggattggattaagcatgattaatgatgctgaagagaagggattaatttctccagacaagaccattttggtagaaccaacaactggaaatactggtgtagccattgcttctgtggctgcagcaagaggatacaagttgatagcaacaatgccttcatcgttagatgtcgagagacgcattcttctgcgtgcattcggagcagagattgtgttaactgatcctaccaaaggactaaaaggagcttttgataaagctgaggaaatagtcctgagaacaccaaatgcgtatatgtttcagcagttcaacaatgaggcaaatagtgaggttattggggtagaacctgctgaaactagtgtgatttctggtgatagccctggttacattccaagtatattagatgtgcagttgattgatgaggttgtgaaggttagcacagcagaagccgttgattctgcaagggaacttgctctaaaagagggcctgctggttggtatttcctctggtgctgcagcgattgctgctatcaatgttggcaaaagacctgaaaatgctggaaagttgattgcggtcattttccccagctttggagagagatacatctccaccattctgttccgtccgatatatgactctgttcgaagaatgaggaagagatagcgagccttgtactacttcaagcgcgttgccagtccccttctctagacctgacaggcttccatgacatgattgataaacgtgaagcagtgaagaccctgtttgattgcaacttcagggtccgaagttttgaagctgcacagagtttctatcaggtgagctgcaggcctgcagcttggttctagcaagactggaggagtgcctcatgtttagaccagctcatacaatcctggtgcaacatgcagaattgcgtgccgcagttagcttgggcctttcgtttagtagtctaggaccgggtacaaaccgcttgttacctggtacgcacttgagctgattttagcgaccaactatctgcaaattctttttgccttccgaattttgattgtttcatcttttatctggcgtctgctttactaactagttttttgcggaactacaattttcttttctctttttcttgtctgcaaaagatcgaaggtcgagcttgcaattgcaagatcaaaggtcaagctgaaaggagcctgtcgaacaaaatgcagcgtcttcactcaggtcgaagcgggaagctctaaaccgtcagagcgtctccaaaactggctgacactgacagacaaaaaaaaaa

SEQ ID NO: 112604 - DNA, 1512 bp, Zea Mays
ctggattcctccacatccaaacgaccaaacgcggcggccgggctcctgtgcagcggcttagctctcttctcgccctcccgccgtccgccgccttggcgtcgctgtactcgcgcccgtgccgtgcgctaccgaccaagcctaagagtgacatgtcggcgtcggatcttcccgacgagctgtgggcgcgtgtcctggagctgggagccgcgtcgtccgcgctggggttccgcgacctctgctccattgccatcgcgtcccgccgcctcggacgcctctccgtctaccccgccctctggtcgaaactcctctctcgcgatttcccctcccaatccgaaccctccacgtcctcggcctccacctcccagccgccgccgcagcggctccaccccaaatccctttacaagaccaagtttgagaggcacaaggtgaggatggctgaggcgaggcggcgggcggtgttcgaagcggaggcgcgggtgctagcttccaggaggcgactggtggagctggaggagtccattcgggaagagggggagaggatgaagacggctgcgcaggagctcgacaacctcgagagggtcaggagagcttctgtggcattaaacgtatggcaaccacaagttgttcgtggtcgtcagaagcagttggttcagcaatgcacagttcctgttgattcccgtcttagtgatctaaacatggagctgaaagtttgtaagcaacaaatagcaacttataagaatgcctatgtatgtgatcacgggtttaactacaattggcagagaagaaaaaggctggctttactatagttgtgcttttgttattgtcatcagagcaaggagaagcacaagctgaatgattgtgaggaagcattgaaacgagcaaagtatcacccactgcaggatagtcatacaagtggaactatcaatgagccacgtgcaaagaggaagaaactgaaatgagccatacgatttgcctccggactcaagattggacagcgcagcgaaccggcttcatccttggtctctctgtccatgcgcgcacatgaagtcacgaaaggtgctatattatgatataggaccaggaggcacctcggctgtgcaattctttgccatttttccaggcacgaaggtgctattatgaggaagcacctcgggtgtttccatatattgctgaaagtgtccacgactccacggatgttgtacaccgtccaccgaccagataattccgcagcagaaaggcgccgactattcctatcgtggaattgtttatcctccacgaagctgtgggctagagcccagtgctgaagcttaccagatttgactttgaaaaccactactagtagcttctagcttgtacacaactaggtatcgtgtatatcatcatcgtcgtcatcatcatcattcttataaagacactaatctattttcgttccttgaaatcaaaagaaacttacccatgttctcgcttgatatgcccttcggcttattatacgtgagcacgtacctttcatgc

SEQ ID NO: 112605 - DNA, 1372 bp, Zea Mays
cgaccaaacgcggcggccgggctcctgtgcagcggcttagctctcttctcgccctcccgccgtccgccgccttggcgtcgctgtactcgcgcccgtgccgtgcgctaccgaccaagcctaagagtgacatgtcggcgtcggatcttcccgacgagctgtgggcgcgtgtcctggagctgggagccgcgtcgtccgcgctggggttccgcgacctctgctccattgccatcgcgtcccgccgcctcggacgcctctccgtctaccccgccctctggtcgaaactcctctctcgcgatttcccctcccaatccgaaccctccacgtcctcggcctccacctcccagccgccgccgcagcggctccaccccaaatccctttacaagaccaagtttgagaggcacaaggtgaggatggctgaggcgaggcggcgggcggtgttcgaagcggaggcgcgggtgctagcttccaggaggcgactggtggagctggaggagtccattcgggaagagggggagaggatgaagacggctgcgcaggagctcgacaacctcgagagggtcaggagagcttctgtggcattaaacgtatggcaaccacaagttgttcgtggtcgtcagaagcagttggttcagcaatgcacagttcctgttgattcccgtcttagtgatctaaacatggagctgaaagtttagcaaggagaagcacaagctgaatgattgtgaggaagcattgaaacgagcaaagtatcacccactgcaggatagtcatacaagtggaactatcaatgagccacgtgcaaagaggaagaaactgaaatgagccatacgatttgcctccggactcaagattggacagcgcagcgaaccggcttcatccttggtctctctgtccatgcgcgcacatgaagtcacgaaaggtgctatattatgatataggaccaggaggcacctcggctgtgcaattctttgccatttttccaggcacgaaggtgctattatgaggaagcacctcgggtgtttccatatattgctgaaagtgtccacgactccacggatgttgtacaccgtccaccgaccagataattccgcagcagaaaggcgccgactattcctatcgtggaattgtttatcctccacgaagctgtgggctagagcccagtgctgaagcttaccagatttgactttgaaaaccactactagtagcttctagcttgtacacaactaggtatcgtgtatatcatcatcgtcgtcatcatcatcattcttataaagacactaatctattttcgttccttgaaatcaaaagaaacttacccatgttctcgcttgatatgcccttcggcttattatacgtgagcacgtacctttcatgc

SEQ ID NO: 112606 - DNA, 1370 bp, Zea Mays
tagctctcttctcgccctcccgccgtccgccgccttggcgtcgctgtactcgcgcccgtgccgtgcgctaccgaccaagcctaagagtgacatgtcggcgtcggatcttcccgacgagctgtgggcgcgtgtcctggagctgggagccgcgtcgtccgcgctggggttccgcgacctctgctccattgccatcgcgtcccgccgcctcggacgcctctccgtctaccccgccctctggtcgaaactcctctctcgcgatttcccctcccaatccgaaccctccacgtcctcggcctccacctcccagccgccgccgcagcggctccaccccaaatccctttacaagaccaagtttgagaggcacaaggtgaggatggctgaggcgaggcggcgggcggtgttcgaagcggaggcgcgggtgctagcttccaggaggcgactggtggagctggaggagtccattcgggaagagggggagaggatgaagacggctgcgcaggagctcgacaacctcgagagggtcaggagagcttctgtggcattaaacgtatggcaaccacaagttgttcgtggtcgtcagaagcagttggttcagcaatgcacagttcctgttgattcccgtcttagtgatctaaacatggagctgaaagtttgtaagcaacaaatagcaacttataagaatgcctatagcaaggagaagcacaagctgaatgattgtgaggaagcattgaaacgagcaaagtatcacccactgcaggatagtcatacaagtggaactatcaatgagccacgtgcaaagaggaagaaactgaaatgagccatacgatttgcctccggactcaagattggacagcgcagcgaaccggcttcatccttggtctctctgtccatgcgcgcacatgaagtcacgaaaggtgctatattatgatataggaccaggaggcacctcggctgtgcaattctttgccatttttccaggcacgaaggtgctattatgaggaagcacctcgggtgtttccatatattgctgaaagtgtccacgactccacggatgttgtacaccgtccaccgaccagataattccgcagcagaaaggcgccgactattcctatcgtggaattgtttatcctccacgaagctgtgggctagagcccagtgctgaagcttaccagatttgactttgaaaaccactactagtagcttctagcttgtacacaactaggtatcgtgtatatcatcatcgtcgtcatcatcatcattcttataaagacactaatctattttcgttccttgaaatcaaaagaaacttacccatgttctcgcttgatatgcccttcggcttattatacgtgagcacgtacctttcatgc

SEQ ID NO: 112607 - DNA, 913 bp, Zea Mays
ttaaatataaataaaaaagctaaaatctattttgggacggagggactattataaagacacatcccaaagcggcctctcgccgcaccaacagccaatccacacctcgcttgcgttgtcctcgccgcggcctcgccctgattcggttcccccgttcctcgcctctgtcatcgtctcctctgacccaaattgagccaagcgaagccgtggccgtgatccggtccatgcgcggagcgtggtagccggattctatcgccgtcgcctccccttcgccgctattttccagtcgccgggatcagccgagttggatctcgaggcataaagcgttgcgggcgcccggcgaggatacgatgcctgcggtgctcgccgcattcgctacccttcgagccgccgctgccatcgcctccggggactcctccttcccctgttcccatcgtctcaagcatcgttttagtagtagtaattttagtagtagtaattgtcattaacctttgcgttccctccgtcgcgcacgctcctcggctcggtcctcaccttcgcatttcggttttggtctggttgtgctcgatccgaggcttactttggttttgcggcttctctccttgtcgaagcttggtgtctggattcgacctgcagatcggaaggaaacaaggtggtcattatcacctacaagataagaggtatcaaaatcactctgctgttgccatggaaccatttattaggttacaatcgtgaatcgtgggaactggttccgaattctgatgtttagatcattgtataggtgacatttctgtgtgatcctgtcagtacgtaaattggtatatgcaatttcctagatctttcatcaaacaaaataagaaatagttgtctgaaaccagcctatttttctgtgtccatgattgtccctctgatcaac

SEQ ID NO: 112608 - DNA, 2270 bp, Zea Mays
ttaaatataaataaaaaagctaaaatctattttgggacggagggactattataaagacacatcccaaagcggcctctcgccgcaccaacagccaatccacacctcgcttgcgttgtcctcgccgcggcctcgccctgattcggttcccccgttcctcgcctctgtcatcgtctcctctgacccaaattgagccaagcgaagccgtggccgtgatccggtccatgcgcggagcgtggtagccggattctatcgccgtcgcctccccttcgccgctattttccagtcgccgggatcagccgagttggatctcgaggcataaagcgttgcgggcgcccggcgaggatacgatgcctgcggtgctcgccgcattcgctacccttcgagccgccgctgccatcgcctccggggactcctccttcccctgttcccatcgtctcaagcatcgttttagtagtagtaattttagtagtagtaattgtcattaacctttgcgttccctccgtcgcgcacgctcctcggctcggtcctcaccttcgcatttcggttttggtctggttgtgctcgatccgaggcttactttggttttgcggcttctctccttgtcgaagcttggtgtctggattcgacctgcagatcggaaggaaacaaggtggtcattatcacctacaagataagagaaatttctctttgtaatttgggatcaagcctgtggatggacgaaccctcggtggacttcagtgctgaaggtgttagtagcagatcaggtctctgccaaagcacctgtttaaatcctggttgtaagcatgaccgtgcttgctgggaagatgattatgtcaaggctgtaatatctcatgggcaagatgatttggcggtcgatgaaattggattggctcttactgaagtgatgcatgcatatgatgatgacaaatggtcaagtctgtatgaagattttgacgacggtgtcggcgatgaaccaattcttcctctggaatcagattcaactggtgattttgtggacattgactccgcatcacctacctttcctagtgacgatgcaatggaatcatcaattaccaattcatttgctcggaattgttcaattaatggcactccaagtttagtttctgcaatgaaaggaacacgtgtgaagaagggaatcacgacaaagttgagcgtttcttgggcccctgatgtatacgaccctcctattacttctgactcgcacacggtgaaagggcaccatacgagttcaactaagggtaactacaaatacaagacctccaagagcagcagtaccactagaaggaaaaaggacaagaagcattctaggcacagtagtagcaatggaggtggcagcaaaagagacaagaagcattcttaccgcagtagtgccagcagcagcagagctattaccagtggttctcaatattgtgacgcatacagtggtggtggcatcaacagcagaactgttcctgaatctgccaagatatctccattggtggtagctgaaaatgtcacaccgcaagagatggttcctgtactgaagacactggaaccaatcaaatgtactaccagctgcggcaaagagaagccatttgccttgctgtcgcgccagttttcccctgcaaggtacaaggggatgttcaccttttggaaccaaaaccaactggcttcttgacaatttgctatgcggaagctcacctgaaagtttccttgccaagggctgttcggatcccctccaaactttagagcttcaaaaattttagagcattttagctcacttttgaactctaaagctctaatctaaggttgaccaaagtttagatctaactgagctttacctctaaagtttagagaaggaaatctaaacatgctctaatttgattgtatcaaagattgttgctattgttctcttcgttaccatgtttgtttcgcctgtctgaaacttcagagatcatgttttggaaaattgcttggcaaagtgcttgtgttgtattatttgcacacctacattgtaggggctgattcagtcttctgtgcttttgttatgttgtatcacgacataggttgatttattaggagatttgtttggaactatggaaaacacgcatggaacaacatgtcagtatttgtaaaaaaagagtcgctcattgcggtgaagttgaagaagttatcaagaggcaatagcgcagttagtcaaacatgaaaatagcagcagcagaagaaaattattcttcttatggcaaaaggtgtcctaagaaagaacaaaa

SEQ ID NO: 112609 - DNA, 224 bp, Zea Mays
gcagcgagtggtgtgatggcaactcttcttgtattcctgtccgttggtttagttggtgctactgatggtacaggcttccatttaactgggaaggtagtaaactggagtggcatgccctttaccattggtatttatggatttttctactctgggcattcagtatttccaaacatctaccagtcaatgtctgatcactctaagttccctgtggcactattcatatg

SEQ ID NO: 112610 - DNA, 1025 bp, Zea Mays
aagcgtgggcctaccaaccacacatgtcaattctcggaatttctcagaagattggagacgggcgttctcttttcatttggagttttggactagtcgaactgacgaactggcagagcgttcaggatagacatggctgccacctttgccttcatccctctcctgctactggtctgcgtccagagcgcggctcctgttctcggcttcacaaggagcgagttccctgaagatttcgtcttcggatccgctacctcggcttatcagtatgagggtgctgttggtgaggatggtaggagcccaagcatctgggacaccttcactcacgcagggagaatgccggacaaaagcaatggtgatgtagccgccgacgggtacaacaagtacaagatggaagaggtgctattaatccaaaagggatagagtactataacaatctcatagacgagctagttacacatggtgtccaagtccatgttatgatttaccagctggatctccctcagatcctggaagacgagtatggtggatggttaagtccaatggttgtgtaagatccagtaactttagatgttagggatattttcccaaaatgaacatatcttgatcatccatgctaccacaaaacgcagggaggatttcacggcatatgcagatgtgtgcttcagggagttcggtgacagggtttcacactggaccactctggatgaagtcaatgtggctgcaattgggtcctatgataatggacaaattgcaccgggaagatgttctgatccatttggaacaaaaaaatgtacagtggggaactcaagtgtggagccatatatagcagctcataacatgctactggcacatgcatcagctaccagactgtacagagaaaaataccaagtgagtaatcttgtacctgaaaacatcacatgtatcttaacattagtgttgtattgtttctttttttcttgaatacacaggagagctgagcatcgttgcattagaagaagaaatgtacatagtgtgcaaacacacacacc

SEQ ID NO: 112611 - DNA, 1743 bp, Zea Mays
aagcgtgggcctaccaaccacacatgtcaattctcggaatttctcagaagattggagacgggcgttctcttttcatttggagttttggactagtcgaactgacgaactggcagagcgttcaggatagacatggctgccacctttgccttcatccctctcctgctactggtctgcgtccagagcgcggctcctgttctcggcttcacaaggagcgagttccctgaagatttcgtcttcggatccgctacctcggcttatcagtatgagggtgctgttggtgaggatggtaggagcccaagcatctgggacaccttcactcacgcagggagaatgccggacaaaagcaatggtgatgtagccgccgacgggtacaacaagtacaaggtgaaataaattagctgcgaatcagtttttctgctggtatcgaggtgctggtttcttactatgcctgtcaactaaccttttgtctgatctctattttttttattgaaaaaccctggcatctaaatatgaaagttgctgtcttaattttaacatgtagtttgttgggctgacgtactgtcacttctgagatcagcatgctgaatttttcagcatatggaaaggagcattcttgatctgtttcttgctttgatcttaaccatctaatgttttaggacgatgttaagctcataattgacaataacctggaggcatataggttctctatctcctggtccagacttataccaagtataaccattttttgtgccaaaactctatcatgtaccaagcaataaatttctagggtcgtcgattaaactttcttaattaaatacacagatggaagaggtgctattaatccaaaagggatagagtactataacaatctcatagacgagctagttacacatggtgtccaagtccatgttatgatttaccagctggatctccctcagatcctggaagacgagtatggtggatggttaagtccaatggttgtggaggatttcacggcatatgcagatgtgtgcttcagggagttcggtgacagggtttcacactggaccactctggatgaagtcaatgtggctgcaattgggtcctatgataatggacaaattgcaccgggaagatgttctgatccatttggaacaaaaaaatgtacagtggggaactcaagtgtggagccatatatagcagctcataacatgctactggcacatgcatcagctaccagactgtacagagaaaaataccaacatgccccaacatctattcccgctgatcccagaggattgcaacttttggtagagtacctgagtgaagcctatgggaaccttcccatctatatccaagagacaggttatgcaaccacaaacggcagcctccatgatactgacagggttgattacatgaagacccacataagcagcacattggctgctctaaggaatggggctaatgtgaaaggctacttcgcgtggtgcttcctggacgtcttcgagtacctgtcagggttcatgtcgcaatacggcctgtaccgtgttgatttcgaggacgaggcgctaccaaggcaagcaaggctatctgctcgctggtattctaaattcctagagaacaaggggatccatgtagaggacgagcttgatgatgcgggatcacacgttgagcaataagttttctacagcgacacattgatctgtacatcctctagcgagactattgaatactactgtgcgttgcaataagaacacttatatt

SEQ ID NO: 112612 - DNA, 1407 bp, Zea Mays
aagcgtgggcctaccaaccacacatgtcaattctcggaatttctcagaagattggagacgggcgttctcttttcatttggagttttggactagtcgaactgacgaactggcagagcgttcaggatagacatggctgccacctttgccttcatccctctcctgctactggtctgcgtccagagcgcggctcctgttctcggcttcacaaggagcgagttccctgaagatttcgtcttcggatccgctacctcggcttatcagtatgagggtgctgttggtgaggatggtaggagcccaagcatctgggacaccttcactcacgcagggagaatgccggacaaaagcaatggtgatgtagccgccgacgggtacaacaagtacaaggacgatgttaagctcataattgacaataacctggaggcatataggttctctatctcctggtccagacttataccaaatggaagaggtgctattaatccaaaagggatagagtactataacaatctcatagacgagctagttacacatggtgtccaagtccatgttatgatttaccagctggatctccctcagatcctggaagacgagtatggtggatggttaagtccaatggttgtggaggatttcacggcatatgcagatgtgtgcttcagggagttcggtgacagggtttcacactggaccactctggatgaagtcaatgtggctgcaattgggtcctatgataatggacaaattgcaccgggaagatgttctgatccatttggaacaaaaaaatgtacagtggggaactcaagtgtggagccatatatagcagctcataacatgctactggcacatgcatcagctaccagactgtacagagaaaaataccaacatgccccaacatctattcccgctgatcccagaggattgcaacttttggtagagtacctgagtgaagcctatgggaaccttcccatctatatccaagagacaggttatgcaaccacaaacggcagcctccatgatactgacagggttgattacatgaagacccacataagcagcacattggctgctctaaggaatggggctaatgtgaaaggctacttcgcgtggtgcttcctggacgtcttcgagtacctgtcagggttcatgtcgcaatacggcctgtaccgtgttgatttcgaggacgaggcgctaccaaggcaagcaaggctatctgctcgctggtattctaaattcctagagaacaaggggatccatgtagaggacgagcttgatgatgcgggatcacacgttgagcaataagttttctacagcgacacattgatctgtacatcctctagcgagactattgaatactactgtgcgttgcaataagaacacttatattaaaaaaacaaattccatcaaaacctc

SEQ ID NO: 112613 - DNA, 1697 bp, Zea Mays
aagcgtgggcctaccaaccacacatgtcaattctcggaatttctcagaagattggagacgggcgttctcttttcatttggagttttggactagtcgaactgacgaactggcagagcgttcaggatagacatggctgccacctttgccttcatccctctcctgctactggtctgcgtccagagcgcggctcctgttctcggcttcacaaggagcgagttccctgaagatttcgtcttcggatccgctacctcggcttatcagtatgagggtgctgttggtgaggatggtaggagcccaagcatctgggacaccttcactcacgcagggagaatgccggacaaaagcaatggtgatgtagccgccgacgggtacaacaagtacaaggtgtccaagtccatgttatgatttaccagctggatctccctcagatcctggaagacgagtatggtggatggttaagtccaatggttgtggaggatttcacggcatatgcagatgtgtgcttcagggagttcggtgacagggtttcacactggaccactctggatgaagtcaatgtggctgcaattgggtcctatgataatggacaaattgcaccgggaagatgttctgatccatttggaacaaaaaaatgtacagtggggaactcaagtgtggagccatatatagcagctcataacatgctactggcacatgcatcagctaccagactgtacagagaaaaataccaagctgtgcaaaaaggagttgttggtataaatatatatacaatgtggtcatacccactaacaaactccactgccgatttagaagcaactcaaagatttctggacttctattccggctggtatcttcttgactcttgttgcatcacaaatgtggaacatttatagagataatcgaaaacaatatgtatcgattgtaggatactagaaccattggtgtttggagattatccaagcgtaatgaagaagaatgttggttctcgccttccgtcattcagtaaagttcaatctgaagccattcgtggcactctagatttcattggaataaaccactattattctttctatgtgaacgaccgccctttagaaaaaggcatccgtgacttctcactggacattgctgctgactatagaggttcgagaactgatccgccaataggtcagcatgccccaacatctattcccgctgatcccagaggattgcaacttttggtagagtacctgagtgaagcctatgggaaccttcccatctatatccaagagacaggttatgcaaccacaaacggcagcctccatgatactgacagggttgattacatgaagacccacataagcagcacattggctgctctaaggaatggggctaatgtgaaaggctacttcgcgtggtgcttcctggacgtcttcgagtacctgtcagggttcatgtcgcaatacggcctgtaccgtgttgatttcgaggacgaggcgctaccaaggcaagcaaggctatctgctcgctggtattctaaattcctagagaacaaggggatccatgtagaggacgagcttgatgatgcgggatcacacgttgagcaataagttttctacagcgacacattgatctgtacatcctctagcgagactattgaatactactgtgcgttgcaataagaacacttatattaaaaaaacaaattccatcaaaacctc

SEQ ID NO: 112614 - DNA, 1727 bp, Zea Mays
caaccacacatgtcaattctcggaatttctcagaagattggagacgggcgttctcttttcatttggagttttggactagtcgaactgacgaactggcagagcgttcaggatagacatggctgccacctttgccttcatccctctcctgctactggtctgcgtccagagcgcggctcctgttctcggcttcacaaggagcgagttccctgaagatttcgtcttcggatccgctacctcggcttatcagtatgagggtgctgttggtgaggatggtaggagcccaagcatctgggacaccttcactcacgcagggagaatgccggacaaaagcaatggtgatgtagccgccgacgggtacaacaagtacaaggacgatgttaagctcataattgacaataacctggaggcatataggttctctatctcctggtccagacttataccaaatggaagaggtgctattaatccaaaagggatagagtactataacaatctcatagacgagctagttacacatggtgtccaagtccatgttatgatttaccagctggatctccctcagatcctggaagacgagtatggtggatggttaagtccaatggttgtggaggatttcacggcatatgcagatgtgtgcttcagggagttcggtgacagggtttcacactggaccactctggatgaagtcaatgtggctgcaattgggtcctatgataatggacaaattgcaccgggaagatgttctgatccatttggaacaaaaaaatgtacagtggggaactcaagtgtggagccatatatagcagctcataacatgctactggcacatgcatcagctaccagactgtacagagaaaaataccaagctgtgcaaaaaggagttgttggtataaatatatatacaatgtggtcatacccactaacaaactccactgccgatttagaagcaactcaaagatttctggacttctattccggctggatactagaaccattggtgtttggagattatccaagcgtaatgaagaagaatgttggttctcgccttccgtcattcagtaaagttcaatctgaagccattcgtggcactctagatttcattggaataaaccactattattctttctatgtgaacgaccgccctttagaaaaaggcatccgtgacttctcactggacattgctgctgactatagaggttcgagaactgatccgccaataggtcagcatgccccaacatctattcccgctgatcccagaggattgcaacttttggtagagtacctgagtgaagcctatgggaaccttcccatctatatccaagagacaggttatgcaaccacaaacggcagcctccatgatactgacagggttgattacatgaagacccacataagcagcacattggctgctctaaggaatggggctaatgtgaaaggctacttcgcgtggtgcttcctggacgtcttcgagtacctgtcagggttcatgtcgcaatacggcctgtaccgtgttgatttcgaggacgaggcgctaccaaggcaagcaaggctatctgctcgctggtattctaaattcctagagaacaaggggatccatgtagaggacgagcttgatgatgcgggatcacacgttgagcaataagttttctacagcgacacattgatctgtacatcctctagcgagactattgaatactactgtgcgttgcaataagaacacttatatt

SEQ ID NO: 112615 - DNA, 1917 bp, Zea Mays
ctagtcgaactgacgaactggcagagcgttcaggatagacatggctgccacctttgccttcatccctctcctgctactggtctgcgtccagagcgcggctcctgttctcggcttcacaaggagcgagttccctgaagatttcgtcttcggatccgctacctcggcttatcagtatgagggtgctgttggtgaggatggtaggagcccaagcatctgggacaccttcactcacgcagggagaatgccggacaaaagcaatggtgatgtagccgccgacgggtacaacaagtacaaggtgaaataaattagctgcgaatcagtttttctgctggtatcgaggtgctggtttcttactatgcctgtcaactaaccttttgtctgatctctattttttttattgaaaaaccctggcatctaaatatgaaagttgctgtcttaattttaacatgtagtttgttgggctgacgtactgtcacttctgagatcagcatgctgaatttttcagcatatggaaaggagcattcttgatctgtttcttgctttgatcttaaccatctaatgttttaggacgatgttaagctcataattgacaataacctggaggcatataggttctctatctcctggtccagacttataccaaatggaagaggtgctattaatccaaaagggatagagtactataacaatctcatagacgagctagttacacatggtgtccaagtccatgttatgatttaccagctggatctccctcagatcctggaagacgagtatggtggatggttaagtccaatggttgtggaggatttcacggcatatgcagatgtgtgcttcagggagttcggtgacagggtttcacactggaccactctggatgaagtcaatgtggctgcaattgggtcctatgataatggacaaattgcaccgggaagatgttctgatccatttggaacaaaaaaatgtacagtggggaactcaagtgtggagccatatatagcagctcataacatgctactggcacatgcatcagctaccagactgtacagagaaaaataccaagctgtgcaaaaaggagttgttggtataaatatatatacaatgtggtcatacccactaacaaactccactgccgatttagaagcaactcaaagatttctggacttctattccggctggatactagaaccattggtgtttggagattatccaagcgtaatgaagaagaatgttggttctcgccttccgtcattcagtaaagttcaatctgaagccattcgtggcactctagatttcattggaataaaccactattattctttctatgtgaacgaccgccctttagaaaaaggcatccgtgacttctcactggacattgctgctgactatagagcatgccccaacatctattcccgctgatcccagaggattgcaacttttggtagagtacctgagtgaagcctatgggaaccttcccatctatatccaagagacaggttatgcaaccacaaacggcagcctccatgatactgacagggttgattacatgaagacccacataagcagcacattggctgctctaaggaatggggctaatgtgaaaggctacttcgcgtggtgcttcctggacgtcttcgagtacctgtcagggttcatgtcgcaatacggcctgtaccgtgttgatttcgaggacgaggcgctaccaaggcaagcaaggctatctgctcgctggtattctaaattcctagagaacaaggggatccatgtagaggacgagcttgatgatgcgggatcacacgttgagcaataagttttctacagcgacacattgatctgtacatcctctagcgagactattgaatactactgtgcgttgcaataagaacacttatattaaaaaaacaaattccatcaaaa

SEQ ID NO: 112616 - DNA, 718 bp, Zea Mays
caaataatttgatgatacttctgaaacatattcgcaattttatgaaacctacaagctaaatgctgtatataacaaaacaattatctgaaacaggttcgagaactgatccgccaataggtcaggtaaggtttttcatcaacaatcttcagaaattcgacatgatagatacatcccttttattttactgcagcatgccccaacatctattcccgctgatcccagaggattgcaacttttggtagagtacctgagtgaagcctatgggaaccttcccatctatatccaagagacaggttatgcaaccacaaacggcagcctccatgatactgacagggttgattacatgaagacccacataagcagcacattggctgctctaaggaatggggctaatgtgaaaggctacttcgcgtggtgcttcctggacgtcttcgagtacctgtcagggttcatgtcgcaatacggcctgtaccgtgttgatttcgaggacgaggcgctaccaaggcaagcaaggctatctgctcgctggtattctaaattcctagagaacaaggggatccatgtagaggacgagcttgatgatgcgggatcacacgttgagcaataagttttctacagcgacacattgatctgtacatcctctagcgagactattgaatactactgtgcgttgcaataagaacacttatattaaaaaaacaaattccatcaaaacctc

SEQ ID NO: 112617 - DNA, 229 bp, Zea Mays
ggtggcggcgcccctcccccctccgtttcccctcctcgacggcgcccctttctccctccccggcggcggcggcggtggccggcggtggcgcccgcgtcccgtgctcccgcgcccgcgcgcacccctccccggcggctgtggccgcgccccgcgcgcccggtgcggccgcgcccaccccggccggcccaaccccgacctcccctgcgcagccccctccccttcctctcct

SEQ ID NO: 112618 - DNA, 1432 bp, Zea Mays
gcacaggaaaacccaaacaaaccacagaacccgagcaccgccgccatgtccgccgccgcagccgactggctcccgtcagcgtccgtgacggcgtccggccgcccggtgctttccgcaggcgaggtggagcggaatctcgtcccgcttgtcgatctcgagcccgaggagaacccacacctcgcgcccctccgcgcctgcctcctcgcgctcacttcccaccgcctcatcttcctccacgagccgtcccgctccgcacgcggcctcccgctcgccaccgttgtccatgcctaccctccccaccgcaggcacaaccataacccccttcgctccctcttctcctcgtcctcatcttcctcgtcgcagcatcaccgcatccgcctccagatctccatgccatccgtgcgatcggaggtcattgccatcgtcgtgacctgtaaggctgacgttgatgtgttcttcgggaggctgctcgaggcgatccgtgcaagggcttgggaggtggcccccgcagctgctccgtcgagcagcacgcccgtcgcagatgtgcctgcggagaacgtcgggatccggatgcccgttgttggggtctctgggatactgcggatggagcaggagtcatgggagagcgccggccagaacttacaagatgcgttccaggatctcaatgccctcatgggcaaagctaaggaaatgatgcagttagcagagaaaatgaggctcaagctattaatgaactcatctactgaatcaaattccaatgatgaagagatgggctctaagcaagacatgcaggatttgctacttagtgttggcattgtgtctcctgtgacgaaagaaactgctggtgcgttgtatcatcagcagttgtcactacagctcgcggactttgtaagaataccgcttgagaaagcaggtggtatgatggcactggtcgatgtttactgtctcttcaaccgtgctaggggaacagagttaatctcaccagaggaccttttgcaagcttgttcgctatgggagaaagttgatgtccaagtcatgctcaggaaatttgatagtggagtgaaggtgatccagacaaagacacatagtgatgaagaggtatttgcgagaatctcatcacttgcacagaagcaggatgctcttcagaaagggattagcccaagtgatgctgcattcacactgggaattgctccagctttagcaaaggagcatcttctaaatgcagaaaacaaaggactgttgtgcagagatgttagtccagatggattccgcttctttatcaatttatttaatgacattgatgcccaaaatatttactcgcaaaaaccttatggaccgtacaacgtgtggatctccgttgcgatgacatctcactgacactggttgatcaagctggacatcggtgcagttattgtatattcttcttttgggg

SEQ ID NO: 112619 - DNA, 138 bp, Zea Mays
gggggggacagacatagattttgtgcagtaataatgtatcctttgagaacgtttgatccaaatctgaatattctgccattatgtactgtaccatataacgcctacagatgtgatataacaaatccatttgttctgttg

SEQ ID NO: 112620 - DNA, 762 bp, Zea Mays
aaactgcaaatgacagcatattatgaaattctaacgagtgaacaacacatgccttacgaagtcattgcttgagtcttagggtctgtttggttcgtggctaactgcgccacactttgtctaaggttaggcgttcgaattgaagaactaaccttaggcagaaaagttaggtaaagtgtggcaagttaggcagtgaaccaaacagacctttacaacaccaactcaccccggtggccaattcatctgccgtcccccgagaagatgaacgtgtaggtgccggtggtagaccgattgagctacgtgccaacagaagacagaaaaatcagtcgaaaccccattcccccaccagggcaccaacaagatgggtcctgttagaatcagtgaactgtactcacatcctctgggcccatcgtccatgacaattctgaagccatcagcaagcccttcctgctctgctacaacctttgcagcatacagaagattgcccagaagctcgacatgcccttcctctgcctgggaacaagcacatcaatgtattaaagttactgtggatgatctgtccgtcagtacatgcaccaagaacctcgaatccttaaataagttcctaaaccaaggtgtgaggcttgctgtttcccactatactgctattctgtccttcatattcagtgttatgacgtgcagggtgctgagaggcaaggtcttacctgtttggttcctttagtttcggaactaaagtttagtctctaccctgtttggtttattgac

SEQ ID NO: 112621 - DNA, 263 bp, Zea Mays
caccgcatgccgtgaacagcacgcccggcgtcccgagaacgggcaattctcggcgggtccgggcagaattgggacgtagaaggacgaggaggccaaaattcagcactccccccacgcctcagaccgtcacgtggacgccgaaagggaatcggaattcagcgagagggcaggatctacctggcggagtctcgcaggcagcggccggtgccgatcgagccaccagggtgggagtctagctgagctcctccggtggactcctctgg

SEQ ID NO: 112622 - DNA, 1807 bp, Zea Mays
gaccagcgatcacctctggtgggtctccagtgagtcactgctcaccagtcaccgccatggccgggaagcagttcccctccccggcgcactcgcgctccgcctcagcctcctcccgccgactcctcgccgccgtcgccgcctccctcatactcctcacagcttcctacttcctcctcctctccccatcctcgcaccgatccgccccagccatcctcgcgaaccctagcgccaccacatccttcctcgcctccctcgaccgcttcctctccgatccgcatccctctgcctccgccgccgctcccgtagaacttgacgccgcgatccgggtccaggaggatgcccgtctctacggggaccccacatggcccgcgccggccgcggggctgctcagggtctacgtttacgagatgccgagcaagttcacgtacgatcttctgaggttgttcagggattcctaccgggacaccgacaacctcacgtccaatgggagccccgtgcaccgcctcatcgagcagcattctattgactactggctatgggcggatctcatcgcacttgattcacagagacttttgaagagtgttattagggttcagcagcaagaagaagccgacattttctatgtgccattcttcacgacaatcagttatttcttgctggagaaacaagaatgcaaggcactttatagggaagctttgaaatgggtcacagatcagcctgcttggcaacgttcagaaggcagggatcatgtcattcctgttcatcatccatggtcatttaagtcagtccggagatctgtcaagaaagcaatatggcttctacctgatatggactccaccgggaactggtataaacctggacaagtatatctagaaaaggatgtcatccttccatatgttccaaacgttgatctttgtgatcacaagtgtgtattagaaactcaatccaaaaggagtatattgctgttctttcgaggaagactgaagagaaatgctggaggaaagatccgcagtaaacttgtagaggaacttaaaagtgcaaaagacatagttatagaagaaggttctactggagctcagggaaaagcagcagctcaggatggcatgcgcaagtctttcttttgcttgagtccggctggggataccccatcttctgctcgcctgtttgatgcaatcgttagtggttgtatcccagttataattagtgatgaactggagcttccatttgaaggaatacttgactatagggagatagcattgtttgtttcagcaagtgatgctgtgcaaccgggctggctcttgaaatacctaagaggaatcaatgccaaaagaataagagaaattcagtctaatcttgtgaagtattcaagacattttctgtattcaagtcctgcccaacctctcggaccagaagaccttacatggagaatgattgctggtaagctggtaaatatcaagttgcagattcggcgttctcaacgtttggtcaaagagtcaaggagcatatgtacatgtgaatgtagagttgggaacaccacgagaatgctttgaccaatattttcatttgtgcctttaaacttttgtagcatagccgttttttgttaccaatgaggcgagctttgagtttggcaaaatttgccgatgtatttgtaaatgcaactgagctggaaagagttgtgatactgtactaatcccgatgcttgtgtttgctttactgcccgttaggaacaaaaggaatgtaaaacagagaaatgtaaaaaaaaatcaagagcttgaagtagatatttatttcctccatttcatgaatg

SEQ ID NO: 112623 - DNA, 1827 bp, Zea Mays
gaccagcgatcacctctggtgggtctccagtgagtcactgctcaccagtcaccgccatggccgggaagcagttcccctccccggcgcactcgcgctccgcctcagcctcctcccgccgactcctcgccgccgtcgccgcctccctcatactcctcacagcttcctacttcctcctcctctccccatcctcgcaccgatccgccccagccatcctcgcgaaccctagcgccaccacatccttcctcgcctccctcgaccgcttcctctccgatccgcatccctctgcctccgccgccgctcccgtagaacttgacgccgcgatccgggtccaggaggatgcccgtctctacggggaccccacatggcccgcgccggccgcggggctgctcagggtctacgtttacgagatgccgagcaagttcacgtacgatcttctgaggttgttcagggattcctaccgggacaccgacaacctcacgtccaatgggagccccgtgcaccgcctcatcgagcagcattctattgactactggctatgggcggatctcatcgcacttgattcacagagacttttgaagagtgttattagggttcagcagcaagaagaagccgacattttctatgtgccattcttcacgacaatcagttatttcttgctggagaaacaagaatgcaaggcactttatagggtctgggagcatctcttaaggaagctttgaaatgggtcacagatcagcctgcttggcaacgttcagaaggcagggatcatgtcattcctgttcatcatccatggtcatttaagtcagtccggagatctgtcaagaaagcaatatggcttctacctgatatggactccaccgggaactggtataaacctggacaagtatatctagaaaaggatgtcatccttccatatgttccaaacgttgatctttgtgatcacaagtgtgtattagaaactcaatccaaaaggagtatattgctgttctttcgaggaagactgaagagaaatgctggaggaaagatccgcagtaaacttgtagaggaacttaaaagtgcaaaagacatagttatagaagaaggttctactggagctcagggaaaagcagcagctcaggatggcatgcgcaagtctttcttttgcttgagtccggctggggataccccatcttctgctcgcctgtttgatgcaatcgttagtggttgtatcccagttataattagtgatgaactggagcttccatttgaaggaatacttgactatagggagatagcattgtttgtttcagcaagtgatgctgtgcaaccgggctggctcttgaaatacctaagaggaatcaatgccaaaagaataagagaaattcagtctaatcttgtgaagtattcaagacattttctgtattcaagtcctgcccaacctctcggaccagaagaccttacatggagaatgattgctggtaagctggtaaatatcaagttgcagattcggcgttctcaacgtttggtcaaagagtcaaggagcatatgtacatgtgaatgtagagttgggaacaccacgagaatgctttgaccaatattttcatttgtgcctttaaacttttgtagcatagccgttttttgttaccaatgaggcgagctttgagtttggcaaaatttgccgatgtatttgtaaatgcaactgagctggaaagagttgtgatactgtactaatcccgatgcttgtgtttgctttactgcccgttaggaacaaaaggaatgtaaaacagagaaatgtaaaaaaaaatcaagagcttgaagtagatatttatttcctccatttcatgaatg

SEQ ID NO: 112624 - DNA, 111 bp, Zea Mays
gctcgctcgcctcgcctcgcctggcctggcctggccgggccggggcggggcgaagggcgcgggcgcacgacatgcgcgtgaatggtctgccgaaatccggcctctcgcctt

SEQ ID NO: 112625 - DNA, 1637 bp, Zea Mays
aacccttcgtcttctagatcctgcaccgggagagggcgaataaggtttttgggaagcgtcttcacgcgactgctcgtgatctgctgacctcgtcgaccctgctgatttcgctacttcgacatcgtcgaccctgctgattccggcgcgtgccatcgatcagtaagtctaatcagtacgcatcatctgatttggcttgttatctcagttattctgatttggtcatgatttatagtcggaatttagattggaatttgtctaattattcaacagcggctccccgcgaagaccttcggcggaggctacggcgctaggcgcaccagtagcgcgaagcgaagggcgccgaggagagctgcggtggtgcggtgcgggctgctgtccgtggacccgtgggtgccgacgatggactcccagagtgtggcatcacaactctttgccgtctcgctcttcccctacctgggcttacgctctcccaaagcgagacagagaaggtccaagaccgcgcccgggctcacgctcttcggtttctacttcctcctcgtcttcgtcagcgccaccacaaaagttcattatggtaccttgctgtccaacgttgactggctgcacgggggcgctgaatcgctgctgactctcaccaacctgtttatcgttttggggctgaggagagccctgaggaagctggaggaagagggcacagacgagagcgtttctgaagcttctcaagacagtgcagaaaaaagttatgtctagatgggttcatcatcagtacccctgatggtgcactcagtattctaggagtgcgtggttttttttcttctgaagctcaactagcttgtagtgatgctttgggtgtaaggaaatctggcagatctactctgtgcatattatgctgataagaaaacaatgtacaagcatctcctgcaattctgatgagacaccgtccctctcgccatgcgcccccacgcccaccactctcgctcatcaccgctcgatctgaggaaggcggagcgcgtgatagatgcgggttctggcagattcgcgaggaggctgtagtggttaggttctggtgtcccctggcccggccgatcgtgggagatgagctcctcgtccgtggccagcatcgggcagcgtcgtctgcgccgtcgtcggaggaagattatgaagaagacctgtcctaatgacttgtggatctatgtcgagggccaagatgttgttgacatggagaatgtgtcaagtgagaagctcaggtcaggtggcagttcgtgtacacaagcaagctccctccggttgacttcatcttcatttattttgattacaacataaaatgactgtgatgcctcctctccgaagaccttcagccagtgttgggtgcctagctccagttaatctaatgcctccgtgttctccattttcatgttttactcaagctttataaacttatttagcgaccacatgaattatgtccatcttttattaggtgaacacccaagctgctgcagattgattgcatcaatccaaagaatttaaaatactatgtcgttattgtttaggtaagctttaacatatcaatgtaccatttaaaatttatatatatcatgtttatattgatgtaatatatattcttgcagtatatggcatgg

SEQ ID NO: 112626 - DNA, 874 bp, Zea Mays
aatgcacatgctttttctgagaggttatatgaaactacgagagcaattagctacagagaaaaatcacacgcagagattctctttgcattgttaactacggagggatgtatacttagctctaaagttctgtagaagcaacatgaagctgaattagttgagtgattggagctttcccaccatttttctttccaaggtcgcagtgacccttgcaaggcgtctggcatttcaaattcctacagtgtagctgtaattccaacgccgcatagccctcttgcgtttagtattgtttagttgctgaccatttagctgtctagcagaatattatgccagtgccattaatcgtttccatcttgtttcatgcaccggtttttatccctggagcagtacctgctgggatttatggtaatggtgccgtagatttttttgtcatccttattatattcttgctcatacacaccgtgtgcacttaattgatacaatgataatccgttgcagcaaaagttcattatggtaccttgctgtccaacgttgactggctgcacgggggcgctgaatcgctgctgactctcaccaacctgtttatcgttttggggctgaggagagccctgaggaagctggaggaagagggcacagacgagagcgtttctgaagcttctcaagacagtgcagaaaaaagttatgtctagatgggttcatcatcagtacccctgatggtgcactcagtattctaggagtgcgtggttttttttcttctgaagctcaactagcttgtagtgatgctttgggtgtaaggaaatctggcagatctactctgtgcatattatgctgataagaaaacaatgtacaagcatctcctgcaattctgatgagacac

SEQ ID NO: 112627 - DNA, 672 bp, Zea Mays
tatattgcaacagaaggaaacaagggtacaaaaaaataggcacgacaaataaaaatgagtaaccagctgctagtgttcccaaaactatgcacatatatctgaccgtagaatgatagaaacaactatctacgttaagaacataattttgaaggcgtcatgcatttctactatcttcttggcctgtcaattgctcacccttagataaaggaacaatgcagcaattctcgtaggtcttgacgtgatgcatttccaatatcttcttggcctgtcaattgcccaccctcagatacaggaatggtgcagcaattctcataggtctttccagaccttgtagtcagtatttgagctgttgggatttattggtgtatcctgacatcctaagaaaaaggttggtcgcacatccatattgatcaaggcatgtgcagtggatcttgcactagcaacaatagcgacctcgtcagcagcaatcatggcttcgccatatccttcatcttttatgccagcattttccaactgtcaattaagtgaaacaaacagtcaccactagaagcatccaactcttaacaaaaactgtgacgattattattaccctgaattttgtctttgcgccccagatgacgaatgtttcattgcaagtgtgatgacgatggttgccacgtaaaccacctggtt

SEQ ID NO: 112628 - DNA, 2164 bp, Zea Mays
gaaaggtagatattttttcccgtctcgctcaatgattcaccccatcgcagccatcgatcagaaaatttacggctcataattctcgtctgcttatccgctcccttctctccctcaacttcagcaagttccccgcaaaaccgcagccggaggtcgccggtcgccaccaccaatggggccacccgccatggcgttccaagccctcaccctcacgccactccccttctcactccacagctcgagccgccgcgtccgcgtgcttgccgttgcggccgaccagactcctccgcccgcccccccttcggagccggcgaacagccctagccgcctccttcgcgagctcgcgcagcggaagaaggccgtatcccctaagaagaagcatccgccgcgtcgcttcatcctgaagccacctctcgatgacgagcgccttacccggcggttcctcagcagcccgcagctgtcgctcaaggcgctcccgctgctctcttcctgcctcccctccgcgccgctctccaccgccgacaggacctggatggacgagtacctcctcgaggccaagcaggcgctcgggtacccgctcgcgccctcggagacgctcggcgaaggcgatgactgccccgcgcgtcatttcgatgtgctgttctacctcgcgttccagcatctggacccctctagcgagcgcacgcggatgcggcacgtacggaacggccactccaggctctggttcctgggtcagtacgttctggagctcgcgttctgcgagttcttcttgcagaggtaccccagggagtcacctgggccgatgagggagcgggtgttcgctctaattgggaagaaagtgttgccccgatggctcaaggcggccagcctgcacaatttggtcttcccctatgatgatttggataagatgatacgaaaggaccgggagccaccgtccaaggctgtattctgggcaatatttggagctatatatttgtgctttggaatgcctgaagtctatcgtgtcctttttgaggcatttgggatggatccagatgatgagagctgtcagccaaaattgcgtcgtcaactagaggatgttgattatgtttcagtggagttcgaaaagaggcagctcacttggcaggatgttgctgcctacaggccgccaccggatgctctttttgctcatcctaggcttttccgagcttgtgtgccaccaggcatgcatcggttcagaggaaatatttgggattttgacagtagacccaaggtcatgactaccctaggatatcccttgcccatgaatgacagaattccagaaatcacagaagcaaggaatatagagcttggacttggtcttcagctgtgttttttgcacccatcaaaacataagtttgagcatccaagattttgttatgagcggcttgaatacgtcggccagaaaattcaggatctagtaatggcagagaggctactcatgaaacacctcgatgcaccaggcaggtggctggcggagaagcatcggaggacgttgatgaacaagtattgtggacggtacctgcgggacaagcacctgcagcactacattatctacggggagacagtgcaagacagattcgaacacaatcgacgtctaaggaatccttcaacgacctctgtccagcaagcgctacatgggcttgcatactgtgtgtatggcaaacctgacgtgcggcgtttgatgttcgaggtgtttgacttcgaacaggtccagcctaaagcagtctgaggatcttctccattggtaccgatgctagagttgctgaatgctgaccaacaagaccccaatggcagtggtacaaatgctgtagattcttgaagtcgtccattcgacaggagatctttcgattctgaagcctgaagccctgaaccctgagctgggacagctgattagccactgggtcctgtctctcctgaaaccgtcactgttccaaccttcttgtccgtcggaaatggtagactagtgatgatgtggatcggaggctgctgttgtttgaacttacaattttgataattcgttgtaaattcctgtttgggcagaaacgcaaatagcagcagcatggcagattcatttcctatcagaattgtagtccgtaatcgagaagcagtaagatgaataatataaagatattcattcgtccgccac

SEQ ID NO: 112629 - DNA, 1100 bp, Zea Mays
tcatggcaagggaaataacatcatcatttcactcataataagcagtttcaagtttactttcacgggcagaaagcattctgctaaaacatccaccaactttcgtgcagacagcaagttacaaataagagctatgcaggggggattacagagtggcagcagaaccagacctaataatctatgtcgcccactttttggtaaccttgttcgcccatttcttcctagcgattcttttgttcgtggtgccccctctagcagttggtgtcatatatggccaggccttgtagctctggaccttccaagcgtgggttcttctcaaagctgcaggggtaacatgaacaagttactacttctttagggaagcacatggccaagtaaaacatgcatttgtgttacataaaacatgcatgctggagaatacaaagttctgactgcacttaacatgatccaggataaagagcactcctgtcctactgttcttatgaccagaaaagaaaatgtacgacagccccgggcatttttagttttttacccacagaaaatgtggtttataaaaaggtgtcctcataacactacacacaattgacacaaggtgcttggaacttggatcgacctactcaattattcctcgaattccaggaagctactaggacgagtgcaggacactaggactaatccaattaaaaagatactgaataacatttttgtggacctggatgcccactcagatgataagataagattataggcatatcatttcaaatcattgacctaaaagtaatagaaaaaagtaaatggcctctatgttttctttaaaaaaattatccagaaatgccagcaacaatacaagatggggtaaaccttgaactagttatttaaggatcaatcacatatacatacaaatgagtgcaaaatacaaataagtgtcataatgatgctgaactgacaggagcagacatgcagatgaacttactgcacttgtctggcagaggaagactaaatgttttgaggtgtaatttatctttataaagtatgcaagaagatgcaaagtaggaatgtaacttacttgctcagaggaatgtgctcaaatggtccagatgtgg

SEQ ID NO: 112630 - DNA, 988 bp, Zea Mays
atggctggtagccctatgactgacacatctacagatccagacactgatgagaggaaccagatgtttgaacaaggacttgttgctgtccccacagcttctgattctagtgacaaatcaagggacaaactagatcagaagacacttcggcgtcttgcccaaaatcgtgaagctgcccggaaaagccgtttacgaaagaaggcatacatccaaaaccttgagagtagcagattgaaacttactcagttagagcaagagcttcaccagactcgtcaacagggtatttttatttctacatcaggagatcaacctcaatcaacaagcggaaatggagctttggcatttgacatggagtatgcacgctggttggaagagcacaacaaacatgtaaatgagttgaggcttgcagtcaatgcacatgccggtgataatgatctccgtggtattgttggtagtgttatggcacactacgatgaatttttcaggctcaagggtgtggcagctagatcagatgtttttcatgtgctgtctgggatgtggaagacccctgctgagagatgtttcatgtggttaggtggcttccgatcatctgaggttcttaagttactggcaggtcacctagagcctcttactgatcagcagcttgttggtatatccaacctgcagcagtcctcccaacaagctgaagatgctctttctcaagggatggaagcattacaacagtcgcttgcagaaactctagcatctggatccctgggccctgctggaccttctggcaatgttgcaaattacatgggacaaatggcgatggctatgggaaaacttggcaccctagagaactttctacgacaggctgataatctacggctgcaaacacttcaacaaatgcaacgcatctttaaccacccgacaatccgcacgagccctacttgcaataagcgactacttctctcggctgcgtgctttgagttctctttggcttgcccgtcca

SEQ ID NO: 112631 - DNA, 1130 bp, Zea Mays
atggctggtagccctatgactgacacatctacagatccagacactgatgagaggaaccagatgtttgaacaaggacttgttgctgtccccacagcttctgattctagtgacaaatcaagggacaaactagatcagaagacacttcggcgtcttgcccaaaatcgtgaagctgcccggaaaagccgtttacgaaagaaggcatacatccaaaaccttgagagtagcagattgaaacttactcagttagagcaagagcttcaccagactcgtcaacagggtatttttatttctacatcaggagatcaacctcaatcaacaagcggaaatggagctttggcatttgacatggagtatgcacgctggttggaagagcacaacaaacatgtaaatgagttgaggcttgcagtcaatgcacatgccggtgataatgatctccgtggtattgttggtagtgttatggcacactacgatgaatttttcaggctcaagggtgtggcagctagatcagatgtttttcatgtgctgtctgggatgtggaagacccctgctgagagatgtttcatgtggttaggtggcttccgatcatctgaggttcttaagttactggcaggtcacctagagcctcttactgatcagcagcttgttggtatatccaacctgcagcagtcctcccaacaagctgaagatgctctttctcaagggatggaagcattacaacagtcgcttgcagaaactctagcatctggatccctgggccctgctggaccttctggcaatgttgcaaattacatgggacaaatggcgatggctatgggaaaacttggcaccctagagaactttctacgacaggctgataatctacggctgcaaacacttcaacaaatgcaacgcatctttaaccacccgacaatccgcacgagccctacttgcaataagcgactacttctctcggctgcgtgctttgagttctctttggcttgcccgtccagggaataaattcaatttaactcataaataggatttttttttgtactgtctctagtatgtcaattagtttcttcacattgctcatgtgttgatgggatatttggatctaagatcttatgaatggatgacatgtatgtgttcaa

SEQ ID NO: 112632 - DNA, 1310 bp, Zea Mays
gatcagcatatagtaaggctatgtttggaagcaacccagtttttaagaaaccattttttatcttttagctaggagagatcaagattcttggtttttaagaaactgataatctaatttctataaactgagtcataaactggtatgtttggaaccatcacaatttctataaaccagtttcttaaaaaccggatgcttccaaacagggcctaaagtatcccagtttactaattatatgcctatcagtttgaacaaggacttgttgctgtccccacagcttctgattctagtgacaaatcaagggacaaactagatcagaagacacttcggcgtcttgcccaaaatcgtgaagctgcccggaaaagccgtttacgaaagaaggcatacatccaaaaccttgagagtagcagattgaaacttactcagttagagcaagagcttcaccagactcgtcaacagggtatttttatttctacatcaggagatcaacctcaatcaacaagcggaaatggagctttggcatttgacatggagtatgcacgctggttggaagagcacaacaaacatgtaaatgagttgaggcttgcagtcaatgcacatgccggtgataatgatctccgtggtattgttggtagtgttatggcacactacgatgaatttttcaggctcaagggtgtggcagctagatcagatgtttttcatgtgctgtctgggatgtggaagacccctgctgagagatgtttcatgtggttaggtggcttccgatcatctgaggttcttaagttactggcaggtcacctagagcctcttactgatcagcagcttgttggtatatccaacctgcagcagtcctcccaacaagctgaagatgctctttctcaagggatggaagcattacaacagtcgcttgcagaaactctagcatctggatccctgggccctgctggaccttctggcaatgttgcaaattacatgggacaaatggcgatggctatgggaaaacttggcaccctagagaactttctacgacaggctgataatctacggctgcaaacacttcaacaaatgcaacgcatctttaaccacccgacaatccgcacgagccctacttgcaataagcgactacttctctcggctgcgtgctttgagttctctttggcttgcccgtccagggaataaattcaatttaactcataaataggatttttttttgtactgtctctagtatgtcaattagtttcttcacattgctcatgtgttgatgggatatttggatctaagatcttatgaatggatgacatgtatgtgttcaa

SEQ ID NO: 112633 - DNA, 2248 bp, Zea Mays
cgggtttagtagggttcggagtccggactcccgcctggctaggcttaacatggcggcgccggcggtggaggcgcctgaggcgagcgacttcaatggcggcggcggaggcctctccactggccggaagctggtgccgtggtcgagctggacagagtggcgcttcgtgcgtgacggcctcttctcccccttccccgccgccgctcttcgcaggattgcggcgtggcggagcaggggttccctcccgatccccgtggacgtcaccgccgccttcgtcgatatacggctgcgggatcccttcttccggaacggattggctggtgatgatgcactggactcagaggagatgcttgcgatgctgtacagcatggcaatcatgaggcttgtaaatggttttgtggagaatccgtataagaaaactggcctttcaatatctgaactagctgatgctgttggaataccacgagttctggttgacattcgtcatgagagttcccatcgtagtcttccctctctacgactgttacgcttggcaagcattaaggcatttgattggttgaagtgtatttactgggatcgccagaccaattcaattcctgatgttcaagcagaactgaggttgagactgcatgaaattgctcgctttctgaaggagaataattcacaagaatcaaaaccagggtctaaaaggaaacgttctgagaaactggtatcgaaagccatgaagtatgtcagacggctttactacgcttgtccctctgaggtggtctctgttctattggatcttatggaactggatgctgcaggctttgaaagcagtgacatgcaagaaactgatagtttgtctgttaaccactcatctgacactcaattatcaatcagtgacatgaaaactatcatactgaaactttcagagaaggaaccaagactgctgcttagtgtactaaagtctgtaattgaaatgattgacgccaaggaagatctcgcatataaagatgaatctcgttcgtgtctgccagctgggccatccaaagcgaaaggattatgtcccttggttctatggcttgtcacaaacattaaagagcataaggattcaggctacattggacttgttcacgagaaaggggtactttcttcagacaagaatgcaatccctcatttttgccttgcaaaacttctgcagaagttattgaatctatccactacaagtgaaagatatctcatagacgcagcatggttgttgattgaaatggtcaacgatagtaatacgaaggagaaattgaggaaacttcctgtgttgtctctgggaaggatggctaaatcttcttccctcccagattcaagaaccatatgcaacgaacagggatcagttgaaaacgcaacagagacactcgaattattcaaagtgcagttgaagaggcagaagaatggtggcactgaaggatcattcagtacgagcaccccaaagaaacatgacaggtggtccatagcaaaatcatggactccctgtccaataggaacagcaccctgttcatttagttcatgtgctgttcttcctgcctttgacagcatcggtcatgaacaaaattctacattagaacatgggacctttgaggaggttgatcattctgaaaggtttgagcctcagcccgaggagttggaggatgaaagcattctggaaatgccaaggtcatcaccagaaaatgaaatttcagacgttaaagaattgatgtgtcctttgaagggtagattgttggtcggtggcttttggaaaatggtagacgaagaggagctgctcttgataaaatcgaagatgaaaattttgttgtaatataatcttcaatggttgaggaccgggcgtagtccgggtggtgaaggcggcgaggtccccttgaccaggttggggggttcgacccccctgattgctcaccaaaaaatcccctcgtcctcacccacacctgggtgggcctttgcagtgtgggcagcctgtgagtcgacacgttagtgacaggagttgttggattcgggggtttctcgtcgggaccgttcgctgcgaccttctacccatgaaaagccacgagggtggtcttattaccctcccggtcgagttttaatcttcaatggttgtgaccaaacaatgttgtgggtcttgagtttcttcactatttgttctggttctcaaatttttgtttgttacttaggggtgtttgaatgcactaaaactaatagttagcagctaaaattagttgag

SEQ ID NO: 112634 - DNA, 2408 bp, Zea Mays
tccgctctactagtatctatcttcactgcatgcgttggtggttcgtttatgttaacccaccacccaccagcagcgcaacgcaagagcttcccattcccgtatcccgtccaccaaagccaaatctactacgccgcaccaaccgaatcggaagagtaaacaaaaaggcagcgtctgatccgacatgccgccggcacgttagaagacatgggcggaagccggatcggagcccccctcccctggcactggcagtgacacacgcacacgcgcatccgtccagatccaagtgcgtgccttttgggcctcaaaagcggagggggaggccactgcggcatcttgcaccatcagcgcagcgcagcgcggcacggcgaggagtctggacgaaggagcagccgagcaggaatcattccgctgcaaggctgccgtccgcgctactgcccccgctttccggggccgggcggacccgcgcccgcctgtcgtctcctatccagcctgcccgtgctcgggcgtgttcaccaccaccgccacaagggccggggagccctgccgcctttgctgattcggctgtacaacagcgcgctagccttttttttttttttactactgagagagatgcttcccctgctgcttatatccaccctcccggccttcacgctgctcctcgccgcgcccgccaccaaggcctgctgcaagctcgcgcgcgagctggccctcctcgcgctgctgctggcgacggagctgctgcgccacgccaccgccgccgccgccgccgcggggagcagggagcgggagcgaggcgccaggatgccgtccgcttcgtccaagccggcgcccgcattggcgtcggccccctcggccgaggcggagacgacggccgccgccgcagccgccgccgcggggctcccgctgctcgacctgccggagctcgcgctggaccgcgtcctggaggagctctcgccgtcgtcgctcgcggcgatggcgtgcgtgtgctccgcgctcagggaccgctgctccgcggacgcgctgtgggggcgtcacctgcggatcaagtgggggcgcgtgctcggcgccgcggcgcgcagggagtgggatgcggagctgggcggcaccgccagcggcagcggcgcccgcgcaggcgcgccgcgcccgacgacgcggcgcaggagctgggtcgactcgctggcctgcgcgtggcccttctcctcctggatcggctgccgctggctgctcgagggggatcacaacctcccctcgccagctgccgagtccacgcccgcccccgcccccgccgcgccgcgtacggacacggtggccgcgtggtaccgggcgctcgagtgcggcgagttctggttccccgcgcaggtgtacaaccgcgaggacgggcatgtcgggttcgtgctctcgtgctacgacgcgcacctccgctaccaccagcgaactgacaccttcaccgccaggtatccaccgcacggccggaaggcggccaaggaggaggacggcgtaaagtggaacagggtccgcgcgccgccgctggccacgccggcgcacgacctgcacgcgtcggactgcctggaggagctgcgcccgggcgaccatttcgagatccagtggcgcaagaacaaggacttcccttatggctggtggtatggcgtcgtgggtcaccaggagtcgtgcaacgggaacgagcatttgtgtcgctgccaccaagacgacacggtcgtcctggagttccagcactacgcccccggctcccgatggaggcagaccactgtgggcaggaaagatcacagggagaagggggacgagacggacggcttctacggaggcatcaggaagctgcacaccaaagacgagatatcaacgtggcgacggttctggcccgtcgatgtcctcaactgaagtgaagatcgtattcgttatgcatctgcagactgcagccggtctgagcgcctccgttccaaatcccccgccccgtgtacagttacggagagctctctgcacacgcgtctgaaataactccggaacccttgtggttgtggggggtctgaaggatctattttttgctaggattcatggtgcacaagttttgctctgtccaagtttggtttagaagaacaggctgctacggatgatgtacaggtctatccagttttcgatctgaatttatgctgttgccatatcctggtttatgtgcatcataaatttcggaatccatcgcaatccgcccaatttcaagtttttgtctgatgctgccatttcctttgtcgtagccaatgtcctcaatggagtgtccgctggcgatgtcagctgcacggatagcgtgcgcgtgctgaatcttctccttgaatgatctcatcaggtgcctaaaatgttcaggaagtgagaagatttgtcaagtcttcagtctttgc

SEQ ID NO: 112635 - DNA, 2391 bp, Zea Mays
cttcactgcatgcgttggtggttcgtttatgttaacccaccacccaccagcagcgcaacgcaagagcttcccattcccgtatcccgtccaccaaagccaaatctactacgccgcaccaaccgaatcggaagagtaaacaaaaaggcagcgtctgatccgacatgccgccggcacgttagaagacatgggcggaagccggatcggagcccccctcccctggcactggcagtgacacacgcacacgcgcatccgtccagatccaagtgcgtgccttttgggcctcaaaagcggagggggaggccactgcggcatcttgcaccatcagcgcagcgcagcgcggcacggcgaggagtctggacgaaggagcagccgagcaggaatcattccgctgcaaggctgccgtccgcgctactgcccccgctttccggggccgggcggacccgcgcccgcctgtcgtctcctatccagcctgcccgtgctcgggcgtgttcaccaccaccgccacaagggccggggagccctgccgcctttgctgattcggctgtacaacagcgcgctagccttttttttttttttactactgagagagatgcttcccctgctgcttatatccaccctcccggccttcacgctgctcctcgccgcgcccgccaccaaggcctgctgcaagctcgcgcgcgagctggccctcctcgcgctgctgctggcgacggagctgctgcgccacgccaccgccgccgccgccgccgcggggagcagggagcgggagcgaggcgccaggatgccgtccgcttcgtccaagccggcgcccgcattggcgtcggccccctcggccgaggcggagacgacggccgccgccgcagccgccgccgcggggctcccgctgctcgacctgccggagctcgcgctggaccgcgtcctggaggagctctcgccgtcgtcgctcgcggcgatggcgtgcgtgtgctccgcgctcagggaccgctgctccgcggacgcgctgtgggggcgtcacctgcggatcaagtgggggcgcgtgctcggcgccgcggcgcgcagggagtgggatgcggagctgggcggcaccgccagcggcagcggcgcccgcgcaggcgcgccgcgcccgacgacgcggcgcaggagctgggtcgactcgctggcctgcgcgtggcccttctcctcctggatcggctgccgctggctgctcgagggggatcacaacctcccctcgccagctgccgagtccacgcccgcccccgcccccgccgcgccgcgtacggacacggtggccgcgtggtaccgggcgctcgagtgcggcgagttctggttccccgcgcaggtgtacaaccgcgagcaggacgggcatgtcgggttcgtgctctcgtgctacgacgcgcacctccgctaccaccagcgaactgacaccttcaccgccaggtatccaccgcacggccggaaggcggccaaggaggaggacggcgtaaagtggaacagggtccgcgcgccgccgctggccacgccggcgcacgacctgcacgcgtcggactgcctggaggagctgcgcccgggcgaccatttcgagatccagtggcgcaagaacaaggacttcccttatggctggtggtatggcgtcgtgggtcaccaggagtcgtgcaacgggaacgagcatttgtgtcgctgccaccaagacgacacggtcgtcctggagttccagcactacgcccccggctcccgatggaggcagaccactgtgggcaggaaagatcacagggagaagggggacgagacggacggcttctacggaggcatcaggaagctgcacaccaaagacgagatatcaacgtggcgacggttctggcccgtcgatgtcctcaactgaagtgaagatcgtattcgttatgcatctgcagactgcagccggtctgagcgcctccgttccaaatcccccgccccgtgtacagttacggagagctctctgcacacgcgtctgaaataactccggaacccttgtggttgtggggggtctgaaggatctattttttgctaggattcatggtgcacaagttttgctctgtccaagtttggtttagaagaacaggctgctacggatgatgtacaggtctatccagttttcgatctgaatttatgctgttgccatatcctggtttatgtgcatcataaatttcggaatccatcgcaatccgcccaatttcaagtttttgtctgatgctgccatttcctttgtcgtagccaatgtcctcaatggagtgtccgctggcgatgtcagctgcacggatagcgtgcgcgtgctgaatcttctccttgaatgatctcatcaggtgcctaaaatgttcaggaagtgagaagatttgtcaagtcttcagtctttgc

SEQ ID NO: 112636 - DNA, 1221 bp, Zea Mays
acattcgtatgttctccgcaagtccgcagcaagtgacttggtctagggatctctcgagcgcttcgagaaagtttcaggccctccgcccctgcaagcgtccactgaccagacctggccagcccaggcgtggaggtgctcgtctcctccgccgcgccgggaccggcgatgaacggcgggctccctggattccacaatgcgccggcgtcaaaggccgtggtcgtcgccgcaggtctcttctccgtcgcctttggcttccgcggccactccctcaacctcggccttgcctaccagagtgtttatgaaaagctgagtgtatggagactgatcacctcattgtttgctttttcgtcaacccccgagctgatctttggagcagccctgctgtactactttagagtgttcgaacgccaaataggttctaacaagtatgctgtcttcattatcttctcaaccatggtgtcagtactgcttcagatcctttctttaggttacatgaaagatccttctctaaatcctttgacatcaggaccatatggcctcatctttgcatcttatgtgccattcttctttgacattccaatctcaatgaagtttcgcatatttggactgagcttcagtgataagtcattcgtatatttggcaggactccagcttcttttctcatctggaagacgttccattgtgcctggactttctggcatactggctgggcttctgtatcgcctgaatacatttggcgtccgtaggttgaagttcccagagttggcaacatctctcttctcgcagttgtcattgcccttttcaagcaatccatatcaagggttaccgatcacagaaaatgatggaagcatcccttctcatcaggcacatcaaattgaggatgcacgcgcagctacccaagatcctacggagtcttctattgccgcactggtgactatgggctttgatcgcagtgcagcaattcaggcgcttgcattgaccaactacgatgtcaatttggcgtcgaacattctgcttgaagcacaagctctacagcaatgataccctggcatcgagtcacaaaagacgggcagatgcactgtacattaatgagcgttaagtgtttgatactccgattcattcttctgttctagattttatcacaggtttccttgaaacaagccactgtatatgaacgtgaactatgggaacgaaagacaattgatgcaggagctttctcaa

SEQ ID NO: 112637 - DNA, 427 bp, Zea Mays
cttctcttccaatcctaatttttgtcactgagctttgctttttgtcactgagctttgcttctggtcatatcgtattatcttattcaggatgcacgcgcagctacccaagatcctacggagtcttctattgccgcactggtgactatgggctttgatcgcagtgcagcaattcaggcgcttgcattgaccaactacgatgtcaatttggcgtcgaacattctgcttgaagcacaagctctacagcaatgataccctggcatcgagtcacaaaagacgggcagatgcactgtacattaatgagcgttaagtgtttgatactccgattcattcttctgttctagattttatcacaggtttccttgaaacaagccactgtatatgaacgtgaactatgggaacgaaagacaattgatgcaggagctttctc

SEQ ID NO: 112638 - DNA, 243 bp, Zea Mays
atgggccacgagggtgggtacgctagcagtagaaagatggcaacaacacgaaagggaacaccgaactcatcgaggtccgcttgccctagggaccacaaggcttcacacgataacagccctcccctcacatgtcatcggcctgcacctcctcctcgtcctcgtactcctcctcgtcggcagtcgcgtcctggtactgctggtactccgacacgaggtcgttcatgttgctctcggcctcggtga

SEQ ID NO: 112639 - DNA, 1432 bp, Zea Mays
ccgcgatgttacgcccccctctcccgcggcgccgtgatgcccgctgccgcgcgtgtcttcctccttcctccccgcatcccgcattccgcccgcgaactgctccctcccccgcgaactgctcctcgcgaactgctccctcccccgcggcgcgtcttcctccccggatccgacatccccacaccaaacgcgtgccccctgccctcgccctcgacggcgctgccctctctgatggcgggatccgcggacgcgcccccaccaaccccgaccccgagccagcccgccacaaccgcgcccgctccatgcgcgatggccactcatccagtcactgtccccggcgcgactcggaccgaatcttaggcccgcctgccgccgccgccggctccagatggaaacgataaaacctccctcctcctcctcctcctcctggtccatgtcgctgggttcgggtcccaaggggccgcacggtttcgctgccggcgccgatcttagcaccagcggcgttgaccccgcccgattcaccccagactgctgctggccgcgcgacctgctccttcgtgactgattactcggaatttctatccgcttgtgggattctcgagcggatcagctgagcacatcaacttcagcgccatttgtttggccacgaagcaaatcgtagagcttttcttccgagggtccttctcagatgtggagttcctcgacccccagagtataccgcagctgggttcgtatccaaaacaagttcagaggatggaaaggaagaaaagagcggcagaaaattgtgaagatacaggcccatgtacgtggacatcaggtaaggaaaagctatcggaaggtagcctggtctgttggcatcgtggagaaagtcatactgaggtggaggagaaagggaaggggtctgcgaggtttccaatctgagaaacaacttgaaggtccatcatggcagatccaacctgcaaaggctgaggctgaggatgaatatgacttcttgaaggatggcaggaaacaggctacaggcaggttggatagagcactggctcgtgtgcgttccatgaatcagtatcctgaagcaagagaccagtaccgcaggctgcaagcctgtgttaacagcctacgagagtcccaggcgatgcaggacaggatgctggctgattcaactggcaccgatgggggtgatttcatgactgaattggaggagctatgccgggatgatggcgatgccccgatgtcgactatttcttgacatggagcttactatagatcagttaggcagtgacatgttctttaccagactagatgtaatttgttgttactaaatggtctctactcaccgttgaacaccataatataatgatatagcagctaatacatggacttctacagattatgataattgatcagtataatttgtggaattattatattttaaagc

SEQ ID NO: 112640 - DNA, 1470 bp, Zea Mays
atgacaagggtcatccatgactccggagatggcatgcagaaggaggcacttgatttggtctcatctgatgttaactttcccaagggctgtttcccagactataggattggaccaaacaaccaaatcattgatccagaggaaacgcatgaggccgtacctctcaaggaggttgttgcaaaggaaacagcgcagctgctagagcagcacaggcgcctttctgtgcgtgatctcaaggagaagtttgagaagggtctatctagcgcttccaagctttctgaagaggctaagcgtcgagaagctgcttcattagacaggcaggttcttttgaagaagctcagagatgttttagacacactgaaaggtcgtgtggctggtcgaaataaagacgatgctgaggaagctatctcactggtggaggcactagctgtccagctgacacaacgagaaggggagttaatttatgagaaggctgaagtaaaaaaattggctaacttccttaagcaggctactgtagatgcacgcaaagtagctgaagaggaaagggctcttgcacttgctgaaattgaaaaggctagagctgcaatcgaaaaagtcgagaaagcatttcatgtgcatgattctacgaaaagcagcagagaggaggaaatagaagaacttaggaaagaggtccgagaggctaggaggataaaaatgctacaccagccaatcaaggtcatggacatggagtttgagcttcaggcactgcggactctcatctcacagaagactcagctatgcaatcagctaaataaagagcttgccacgatcaagaggttagaagtagatagttctgacctctttgagcttgaaggttctaatacccttggatcgcagttttgtattattcctcgagttgatggtgctccaaacattgcgaactgtccaattcagtggtatcgtgtaatttctggtggcagtagaggactcatatcgggagcaacaaaatttacgtatgccccagaaccgtttgatgttggtcgattattacaagcagagattattttgaatgcagataaaatcatagttcagacggatggccctatagataatgctgcaggacttgaacattatgtggactcactcatgaaacggacggatattgagttcaacgtagtagtaacccaaatgaatgggaaggattactcgtcgaattctgtccatgtttttcatattggaaagctgagaataaaacttcaaaaaggatggtctacaaaagcaagagagttatattccaccacgatgaagttatgtgggagccgtggtggtggtaatgctgcagctagggcagttttctggcaagctaggaaaggcctgtcctacactctagcattcgaaacagacagggacaggaatgctgcaattatgattgctcgcaaatttgcttcgaattgcaatatcgctctcgctggcccaggtgaccaagacacctga

SEQ ID NO: 112641 - DNA, 2158 bp, Zea Mays
aacgcacgcgccgcgcctcggccaagaaaggaaggaggagctcccaactcaggaagtccagctgcctcggaggcgaatcccactcccactcgccgcaacggctagtttcccggtggatcgatcccagccgttggagccgctcccgaccgttgcgatacggacccttcccgaccgttggagccgctcctctcccctctcgccgccccgctgccctcacaagtcacaacgccggcaccggcacaggcaggcacgctcgtttatatctgcgcctcctccactcgccgagacaatagcctctcctcgcaccccctcaagaactgtacccatcacgcgccgccatcgattgaccttgaccgacccgaccacccatcacgcttcttgttgccgccgctgttgcttgccgatacgcggtggctgcgctcgccggcggggaagaggggtcgcgggctgcgcgcctccagtctttcttcgcctccgtgctctcgggcctcttcggccaggccgaccaggacgaggaccaagagatggcctcgcgcaaccacaacgccgccgctccgcagcttcaccatcacaaccgagccggtgttcccgctcttggaaagaccaaggccgtgcccgcccgacctgacgctctgaaccggcgaccccctctcggcgatatcggcaacctcgtcagcgtccgcccagccacagggaacccgcaggagcaggtcaaccgccccatcactagaagcttcggcgctcaactcgtcaagaaagcgcaggcgaaggccgcaatcaagaatgccgcaatcctgcctgcgaggcatgcgccgaggcaggagaggaaggctcctgtcaagcagcacccgccgccggaggatatcatagtactcagctccgattctgaacagagcagggcgcagtccgagagcagcgctagctccgtccgctccaggaggaaggccatcaacaccctttcttccgtgctctcggctcgctcaaaggctgcctgtggaatcgctggtaagcctagacaagtggtcgatgacatcgacaagctggacgtcaacaatgagctcgcggtggtggaatacattgaggacatctacacgttctacaagattgctcagcacgagagacggccatgtgactacatcgacgcccaactcgagatcaactctaagatgagggctatcctggctgattggataatcgaagtacaccacaagtttgaactgatgcccgaaactctctacctgaccatgtacatcatcgatcagtacctctcgctgcaaccagtcctgcgtaaggagctgcagcttgtcggcgtttcatctatgctgatcgcctgcaagtacgaggagatttgggccccagaggtgaacgacttcatcctcatatcagacagtgcatacagtagagaacagattctttcgatggagaagggaattctgaataggctggagtggaacctgactgtccctacagtgtatatgttccttgtccgttttctgaaggccgcaacattgggcggcaaagttgagaaagagatggagaatatggtgttcttcttcgctgaattggcgctgatgcaatacgatttggtgacgcgcctgccatcgctggtcgctgcttctgctgtctacgcagccagactcactctcaagagggctcccctttggaccgacaccctcaagcaccacacgggcttcagggagtcagaggcagagctcatgtaagattcttccattgccaatcgccatctttttctctgcctaaatccacatttgacctttgtgatctgtgactgtttcagtgaatgcacgaagatgctggtgatcgcgcactcgactgcccctgagagcaagctgagggttgtatacaagaagtattccagcgagcagttcggaggggtcgcgctgcgtccacccgcagaggagatctgcaagtgaacgaaggctactttatccgtgtttgcctattgcttgctttaggggaagtggcgatggaaggcgagtctgacattcgctaggcttttttatgtttgcttgtttcagacagccgtttgtttgctaggctgttctcagagtcggttgttatctgacttgtgatggcaactataattctatctagtacaacatttttattcataaatgtgaatggtgttttacaaggt

SEQ ID NO: 112642 - DNA, 1879 bp, Zea Mays
aatagcctctcctcgcaccccctcaagaactgtacccatcacgcgccgccatcgattgaccttgaccgacccgaccacccatcacgcttcttgttgccgccgctgttgcttgccgatacgcggtggctgcgctcgccggcggggaagaggggtcgcgggctgcgcgcctccagtctttcttcgcctccgtgctctcgggcctcttcggccaggccgaccaggacgaggaccaagagatggcctcgcgcaaccacaacgccgccgctccgcagcttcaccatcacaaccgagccggtgttcccgctcttggaaagaccaaggccgtgcccgcccgacctgacgctctgaaccggcgaccccctctcggcgatatcggcaacctcgtcagcgtccgcccagccacagggaacccgcaggagcaggtcaaccgccccatcactagaagcttcggcgctcaactcgtcaagaaagcgcaggcgaaggccgcaatcaagaatgccgcaatcctgcctgcgaggcatgcgccgaggcaggagaggaaggctcctgtcaagcagcacccgccgccggaggatatcatagtactcagctccgattctgaacagagcagggcgcagtccgagagcagcgctagctccgtccgctccaggaggaaggccatcaacaccctttcttccgtgctctcggctcgctcaaaggtgcgtcgatctgtcaaaaggctgtttgggccgcaattgcctgttacataaaaaaacagtttttttttctgattgtttccatctgaatgtcaggctgcctgtggaatcgctggtaagcctagacaagtggtcgatgacatcgacaagctggacgtcaacaatgagctcgcggtggtggaatacattgaggacatctacacgttctacaagattgctcagcacgagagacggccatgtgactacatcgacgcccaactcgagatcaactctaagatgagggctatcctggctgattggataatcgaagtacaccacaagtttgaactgatgcccgaaactctctacctgaccatgtacatcatcgatcagtacctctcgctgcaaccagtcctgcgtaaggagctgcagcttgtcggcgtttcatctatgctgatcgcctgcaagtacgaggagatttgggccccagaggtgaacgacttcatcctcatatcagacagtgcatacagtagagaacagattctttcgatggagaagggaattctgaataggctggagtggaacctgactgtccctacagtgtatatgttccttgtccgttttctgaaggccgcaacattgggcggcaaagttgagaaagagatggagaatatggtgttcttcttcgctgaattggcgctgatgcaatacgatttggtgacgcgcctgccatcgctggtcgctgcttctgctgtctacgcagccagactcactctcaagagggctcccctttggaccgacaccctcaagcaccacacgggcttcagggagtcagaggcagagctcattgaatgcacgaagatgctggtgatcgcgcactcgactgcccctgagagcaagctgagggttgtatacaagaagtattccagcgagcagttcggaggggtcgcgctgcgtccacccgcagaggagatctgcaagtgaacgaaggctactttatccgtgtttgcctattgcttgctttaggggaagtggcgatggaaggcgagtctgacattcgctaggcttttttatgtttgcttgtttcagacagccgtttgtttgctaggctgttctcagagtcggttgttatctgacttgtgatggcaactataattctatctagtacaacatttttattcataaatgtgaatggtgttttacaa

SEQ ID NO: 112643 - DNA, 470 bp, Zea Mays
gccaccagcagagatctgctcaagggtggcggtgctagctctgtcccgggccacccagaagaacctaaccgtgctttcatgcaaccccagggcgacctcttccagctgagacgaaggcatcgagacatgggtgccaaatgagacgtacagtaccgagcttcttggctgggcatccagccaaccgaagtagtcttcttcatggtgaaactcgcccgaatcaccttccagtggcatatatggaattgaagggccaactgcatatatagggcatggaaccacttgcgatgttccatcgatggcgccggtttcgagctcgtagaaggaggtgaagaggacacactgtgccttgcgcaggttggagaacacctgcgctagccgtttcattggcagcaccatggagcggagggtcttcatatcagaacattttaccggcgcgagggctgggaacgggagatattgatccagggacc

SEQ ID NO: 112644 - DNA, 2189 bp, Zea Mays
gtaacgcatcacccaaaccagtcatatttgaaacgagtccactatggctttcagaaccttctgcgacgccggccactgcttgtcgttggcgcttgcgacgaacagcaccaccgtgctccccttggcggtggccttggccaggttgtgcgaacctgttagcgccaatggagtctccagcacgtagctgtagtactgcatgacaggaacagtgacccgcataagcagctcgctctctctctaaaatagtccgagagaaaagatttgcaggtgatgctcgaggtcagtaagttacagtctgtccatcgacgttctcgacgttggtgtcgacgagctcgtcggagtcgaaggtgttgccggtgacgaaaggccccagcgaggcgatcagcctctcggggctgccgatgtcctcgatcgtggcgttgggcttgttggtgaggcggatgagcggcgaggccaccacctgcaccttgccctgcttctcgtcctcgaacttcacctccacccacggctcggcgcacttgggctggcagtagttcccggacaggatgttggcgacgcgcgtctgcttccaggtcggcggcaggatgaactcgtacggctccacattgcctggtcgagattggctatccggattggactgacaatgcaggtacagagaaagtatggcaaatcactgagacgtgagacctcaccggcgcggagcgcgggggtgtccttgggggtggcgcggaagaagacgaagcccgggttggacggcgccggtggcaggtacgtgccgaccgcgacctcgcgcgcctgggccggcagcggcgccctcggcaacagcaccgcggtcagcgccgcccctaccaccagctccctcctgtggctagcggccgccacgagaggcgccggccgagggacggcgtcgtccgccgagggcacgccgtgcggcggagaagcacagcgcggtatgatggtgggcacgggcagccggagcgaggtgaagagcggggacgaggccattttcggggggacacaggcacagccgagccgagcaactggtttaacgcgcgcggcaggaacgccttatccaccacaccacacgacacgacgcgagcgcccgcgatattttggagctccacttcactggactcaatcaaagcacaggaggacgtggtgcgcacgcgcggctcggcagcgtcctctcgtcagccgcgtccaggataagataaagagctgcccgggtacttactggcgtgcggccgagccgagcgggagtagcgcgtcaggcaatggctccggcaccggtggccgctcccgtggcttcggtctcccgcgcggcagctgcgctcgcccccgccggcgccgtccgctccgccagggtagcctccctgcaccctttccactcttccaccaaaatcgtgctgctgccaccacggaccggcctgctcagatccgccaggcagaggcggcgcttggcggcacggagcagcacctcggagagcagcacggatgactcccaatccccgaaacaagagaaggcgccgttcgggtacacgaggaaagacgtgctgctgatcggcctcggcgtcaccgccttcggcgtcggcctcaagtacgggctcgagctcctgggagttgaccccttgcaggccggcaacgtcgtgcagctgctggtggtgctcgggatgacggtggggtggatctccacctacatgttccgggtggccaacaaggacatgacctacgcgcaccagctcagggactacgagaagcaagtcatggagaaacggctggagagcttgtcggaggctgagctgcaagctctgctcgagcaagtggaggaggagaagcagcgcgtgcctcaggtcccggaagagcctaacgctattaccttcaggaagaaatgatgatcgttctattatctgccaaatggacaccgacctagcttgtttatagcatagcttcgccttcaatagctagctccatcgatattttaagatctgtacaatacgccccgctaagccactagtgctgtcaaacatgaaattatccattttctgccgcgcgccgttatgggacaataccgtagcaccaagaaccaaatccgttctttgagatatcattgtcgttgtaactatatcatccgcaaagctacagtttgggaggtcttcagcattgcctgtttgatcttccattggttcgtt

SEQ ID NO: 112645 - DNA, 867 bp, Zea Mays
ggataagataaaataaaacaagcaccagggacagggagtggctagaccgcagcaattgcgattgcgagtcctccaaaccatggcgctcgccctggcctctccaatggcgtctctctccttccactccgggaggatctcggcggcgtctatcggaggcgtcggccgcactcgcagggcggccccggtgggcgtatccgcctcgccgttcctccggagctccttcgtctcgtcctcctccacgtcgtccgcctccgcctccgcctcccccgcttcgctcgcggcggctgtctcggcgtctctggcatttacgtcctcctccgcgtttgcgggttcatctttgggaatcgagttcagctacagtataatgacaacacggagatcccgtggtatgcagattagggctggaaaggctgccctctgcatgaccaagaggtcaaggtctaggaagtcacttgcccgtacacatggtttccgcaggcggatgcggactacttctggaaggaaggtactgaagcgcaggcgcgccaaaggcaggaaggttctttgcacaaggacaaactcaaacagtgggaagaaaagaatgttctaattacactgcaatttgatgtgctcgcaactgtaagtgtaatgtctacttgcaatcttctaagccgccatctatgtgtaacaatcatgtagcatcctattcctgtttaattggttaaaaatatctggatcaccttctgcttccaaggttttatttggtgtatgaatgatattttcttatgaatatttactcttccctagtgggcctgaacctgcgtgcagtatgaaggaacacttgagagtagataccgtcgctgttatgaagtaggatctccttttacc

SEQ ID NO: 112646 - DNA, 375 bp, Zea Mays
ctcttcagctcgaggccttgtcttgagttctctagctcgtccacaggcctggccagctagctagctagcactgacactgaccgagaccctgcagctagcagctgatcgatccatccatggccatgggctgctgctacggtgatttcttcgacaaggccaagccttacctcgccatgatctccctgcagttcggctatgccggcatgaacgtcatcaccaaggtctccctcaaccacggcatgagccactacgtgctcgtcgtctaccgccacgcctttgccaccgtctctattgcaccgtttgctctcatccttgagaggtactactcactacagtactcagtttctcttgctcgatctgtataccagctagcca

SEQ ID NO: 112647 - DNA, 1720 bp, Zea Mays
ctcttcagctcgaggccttgtcttgagttctctagctcgtccacaggcctggccagctagctagctagcactgacactgaccgagaccctgcagctagcagctgatcgatccatccatggccatgggctgctgctacggtgatttcttcgacaaggccaagccttacctcgccatgatctccctgcagttcggctatgccggcatgaacgtcatcaccaaggtctccctcaaccacggcatgagccactacgtgctcgtcgtctaccgccacgcctttgccaccgtctctattgcaccgtttgctctcatccttgagaggaaggtgaggcccaacatgacgtggtccgtcttcctccagatcttcgtgttggcactgctcgggcctgtgatagaccagaacttctactacgccggcctcaagttcaccgggccgaccttcgcgtgcgccatgagcaacatccttcctgccatgaccttcgtcatggccgtgattttcaggatggagaaggtggacctgaagaaggtgcggtgccaggcgaaggtggccgggacgctggtgaccgtggccggcgcgatgatgatgacgctgtacaagggcccgctgatgaagatggcgtggaccagcagcggccacgcgcacggcggcggcggcggcgccgaggcggccgtcatcgaccccagcggcagggagtggttcctgggctcgctcttcgtcatcgtcgccaccctcgcctgggcctcgctcttcatcctccaggcgcacaccctgaagcagtacgcggcgccgctctccctcaccaccctcatctgcttcgtcggcaccctacaggccatcgtcgtcaccttcgccatggagcaccgcccctccgtctggaccatcggcttcgacatgaacctcctcgccgccgcatacgccggcattgtcacgtcgagcatagcgtactacgtgcaaggcctggtgatccagaagaccgggcccgtgttcgcgtcggcgttcagcccgctgatgatgatcatcgtggccgtcatgggctccttcatcctcgccgagaagatattcctcggcggcgtcctcggcgccgtcctcatcgtcatcgggctctactcggtgctctggggcaagcacaaggagacgcaggacaaggaggacgatgagacgacagagctgcccgtcgtggcaataatggcatccaaaaccaatggagtcgtctacgacgacgacgatgacgtcgtcttcgtcaaggagatcgccgccgccggcgctggcgctgttggaggagatgactcggagtgcaggaaggcgactggggtggtgaagtcatcctcccgtggacacggagctgctggtgcagtttgatggaacatgcatggaagaggcggtgtccaactgctaacttcctttccttgcattgccatgtgtgtcccctagtatctactgacgttgcatgcatcacagggtcgggtgattgagagaggcagctgcgatgcagagtggaaggactggaataattttgttctgtgcccttttgaattttgctacctttttgtaccgtaagatgtatctactagtatatttaacttgtattttcttatgctttaatttctgtggagaaaaaagtgatgttccgggacttaagcgaaggacatatatatatgtatgtatcacatcggcttttgccatgtaatatattattgcttttctcatcgaataaaaaaaca

SEQ ID NO: 112648 - DNA, 1822 bp, Zea Mays
ctcttcagctcgaggccttgtcttgagttctctagctcgtccacaggcctggccagctagctagctagcactgacactgaccgagaccctgcagctagcagctgatcgatccatccatggccatgggctgctgctacggtgatttcttcgacaaggccaagccttacctcgccatgatctccctgcagttcggctatgccggcatgaacgtcatcaccaaggtctccctcaaccacggcatgagccactacgtgctcgtcgtctaccgccacgcctttgccaccgtctctattgcaccgtttgctctcatccttgagaggaaggtgaggcccaacatgacgtggtccgtcttcctccagatcttcgtgttggcactgctcgggcctgtgatagaccagaacttctactacgccggcctcaagttcaccgggccgaccttcgcgtgcgccatgagcaacatccttcctgccatgaccttcgtcatggccgtgattttcaggatggagaaggtggacctgaagaaggtgcggtgccaggcgaaggtggccgggacgctggtgaccgtggccggcgcgatgatgatgacgctgtacaagggcccgctgatgaagatggcgtggaccagcagcggccacgcgcacggcggcggcggcggcgccgaggcggccgtcatcgaccccagcggcagggagtggttcctgggctcgctcttcgtcatcgtcgccaccctcgcctgggcctcgctcttcatcctccaggcgcacaccctgaagcagtacgcggcgccgctctccctcaccaccctcatctgcttcgtcggcaccctacaggccatcgtcgtcaccttcgccatggagcaccgcccctccgtctggaccatcggcttcgacatgaacctcctcgccgccgcatacgccgtgagtgtgtcagctagctgccagatgcgatcaaagtacgtgcctgcatgatgcgtatgtatatatactaacaatgccgtccgttcagggcattgtcacgtcgagcatagcgtactacgtgcaaggcctggtgatccagaagaccgggcccgtgttcgcgtcggcgttcagcccgctgatgatgatcatcgtggccgtcatgggctccttcatcctcgccgagaagatattcctcggcggcgtcctcggcgccgtcctcatcgtcatcgggctctactcggtgctctggggcaagcacaaggagacgcaggacaaggaggacgatgagacgacagagctgcccgtcgtggcaataatggcatccaaaaccaatggagtcgtctacgacgacgacgatgacgtcgtcttcgtcaaggagatcgccgccgccggcgctggcgctgttggaggagatgactcggagtgcaggaaggcgactggggtggtgaagtcatcctcccgtggacacggagctgctggtgcagtttgatggaacatgcatggaagaggcggtgtccaactgctaacttcctttccttgcattgccatgtgtgtcccctagtatctactgacgttgcatgcatcacagggtcgggtgattgagagaggcagctgcgatgcagagtggaaggactggaataattttgttctgtgcccttttgaattttgctacctttttgtaccgtaagatgtatctactagtatatttaacttgtattttcttatgctttaatttctgtggagaaaaaagtgatgttccgggacttaagcgaaggacatatatatatgtatgtatcacatcggcttttgccatgtaatatattattgcttttctcatcgaataaaaaaacatcgcccttgccaac

SEQ ID NO: 112649 - DNA, 2233 bp, Zea Mays
ggttttctaatgaaaccgaacacatctcggttttaaacaaaactatgattttactacggtaaggcactataatatttgtgtcatgcataattataaattttgacattttaaaattatagtattttaaaactgcattattaaacaggccctaatccctggcagccagcgtttcaggttttcaggacaccagcttcctagtttctattggctacggcatcttgaatcactgtccagtcgtgtcgatgacccctccgctgcgccaaccaacccaccctggtccacgggcgtcacggcactgctacagtgctacaaaccaactacctaccaccactccggcagtccggctagctccataaaggcgcagccggccggctggccggtagcagtcagccagccagccagccatggagacggcctccttcctctcagtggcgctggccctggcggccctcgtccccgtctcgctgctccttgtgaaccggctcctctacggcaaactgcccccggggccgcggcggcgtcccgtggtgggtaacctgttcgacgtgcagcccgtgcggtgccggtgctaccaggagtgggcgcgccggtacgggcccatcatgacggtgtggctgggcacgtcgcccacggtggtggtgtccacgtcggagctggccaaggaggtgctcaagacccacgaccagcagctcgccgaccgctgccgggaccgctccaccgagagcttcagccgaggcggccaggacctcatctgggccgactacggcccccactacatcaaggtgcgcaagctctgcaacctcgagctcttcacgcagcgccgcctcgaggcgctcaggcccatccgcgaggacgaggtcaccgccatggtcgagtccgtctacaaagccgtcaccgcgcctggcagtgcagggaagccgttggttgtaaagaaccacctctcgatggtggccttcaacaacatcacgcggctggccttcgggaagcggttcgtggacgcggccggcgagctggacgagcaagggcgcgagttcaaggggatcgtccacaacggcatcaagatcggtgcgtccctctccatcgcgcagcacatcccgtggctacgctggctggccccggtcgacgagcaggccttcaaagcccacggcgaacggcgcgaccgcctcaccgtgaagatcatggaggagcacgccagggccctcaagcagcgcggcgcccagcagcacttcgtcgacgcgctcttcactctcagggacaagtacgacctcagcgatgacaccgtcataggcctcctctgggacatgatcaccgccggcacggacacgacggtgatctcggtggagtgggcgatggcggagctgctgaggaaccccagagtgcaggagaagctgcaggaggagctggaccgtgtcgtcggccgcgaccgggtcctgtcggagacggacttcccgaacctgccttacctgcaggccgtcgtcaaggagtccctgcgcctgcacccgccgacgccgctgatgctcccccacagggccagcgccagcgtcaagatcgccggctacgacatccccaagggcgccaacgtcgtcgtcaacgtgtgggcggtggcgcgcgaccccgaggtgtgggacagcccgctcgagttccggccggagcggttcctccgggagaacatcgacatcaagggcgccgacttccgcgtgctgccgttcggcgccggccgccgggtgtgccccggcgcgcagctcgggatcaacctcgtggcgtccatgatcggccacatgctgcaccacttcacgtggacgctgccgagcgggacctgtcccgaggacgtgagcatgatggagtcccccgggctcgtcaccttcatggccacgccgctgcaggccgtcgccacgccgcgcctggacaaggaggaactgtacaggcgtgtcccttcggacgtgtgagccgtcggcgtcctggcatctgctgcgttccctgttttgaaacctgctgctgctgttgcgaatttgtgtaccattaactattcgctggtgatgtacgtgtcatagtcgtgtacgagcattttgtgtactgcagaacttgatcgctgagcatacacttttgcccggtagtaatttacaatttcagcattgcaaattactattagtacgtcgcagaaaacagtgtaaagctcgaaattgagacctcgcgaatatgcaccagcctcctcgaaattgagacctcacgaata

SEQ ID NO: 112650 - DNA, 2224 bp, Zea Mays
ggttttctaatgaaaccgaacacatctcggttttaaacaaaactatgattttactacggtaaggcactataatatttgtgtcatgcataattataaattttgacattttaaaattatagtattttaaaactgcattattaaacaggccctaatccctggcagccagcgtttcaggttttcaggacaccagcttcctagtttctattggctacggcatcttgaatcactgtccagtcgtgtcgatgacccctccgctgcgccaaccaacccaccctggtccacgggcgtcacggcactgctacagtgctacaaaccaactacctaccaccactccggcagtccggctagctccataaaggcgcagccggccggctggccggtagcagtcagccagccagccagccatggagacggcctccttcctctcagtggcgctggccctggcggccctcgtccccgtctcgctgctccttgtgaaccggctcctctacggcaaactgcccccggggccgcggcggcgtcccgtggtgggtaacctgttcgacgtgcagcccgtgcggtgccggtgctaccaggagtgggcgcgccggtacgggcccatcatgacggtgtggctgggcacgtcgcccacggtggtggtgtccacgtcggagctggccaaggaggtgctcaagacccacgaccagcagctcgccgaccgctgccgggaccgctccaccgagagcttcagccgaggcggccaggacctcatctgggccgactacggcccccactacatcaaggtgcgcaagctctgcaacctcgagctcttcacgcagcgccgcctcgaggcgctcaggcccatccgcgaggacgaggtcaccgccatggtcgagtccgtctacaaagccgtcaccgcgcctgggaagccgttggttgtaaagaaccacctctcgatggtggccttcaacaacatcacgcggctggccttcgggaagcggttcgtggacgcggccggcgagctggacgagcaagggcgcgagttcaaggggatcgtccacaacggcatcaagatcggtgcgtccctctccatcgcgcagcacatcccgtggctacgctggctggccccggtcgacgagcaggccttcaaagcccacggcgaacggcgcgaccgcctcaccgtgaagatcatggaggagcacgccagggccctcaagcagcgcggcgcccagcagcacttcgtcgacgcgctcttcactctcagggacaagtacgacctcagcgatgacaccgtcataggcctcctctgggacatgatcaccgccggcacggacacgacggtgatctcggtggagtgggcgatggcggagctgctgaggaaccccagagtgcaggagaagctgcaggaggagctggaccgtgtcgtcggccgcgaccgggtcctgtcggagacggacttcccgaacctgccttacctgcaggccgtcgtcaaggagtccctgcgcctgcacccgccgacgccgctgatgctcccccacagggccagcgccagcgtcaagatcgccggctacgacatccccaagggcgccaacgtcgtcgtcaacgtgtgggcggtggcgcgcgaccccgaggtgtgggacagcccgctcgagttccggccggagcggttcctccgggagaacatcgacatcaagggcgccgacttccgcgtgctgccgttcggcgccggccgccgggtgtgccccggcgcgcagctcgggatcaacctcgtggcgtccatgatcggccacatgctgcaccacttcacgtggacgctgccgagcgggacctgtcccgaggacgtgagcatgatggagtcccccgggctcgtcaccttcatggccacgccgctgcaggccgtcgccacgccgcgcctggacaaggaggaactgtacaggcgtgtcccttcggacgtgtgagccgtcggcgtcctggcatctgctgcgttccctgttttgaaacctgctgctgctgttgcgaatttgtgtaccattaactattcgctggtgatgtacgtgtcatagtcgtgtacgagcattttgtgtactgcagaacttgatcgctgagcatacacttttgcccggtagtaatttacaatttcagcattgcaaattactattagtacgtcgcagaaaacagtgtaaagctcgaaattgagacctcgcgaatatgcaccagcctcctcgaaattgagacctcacgaata

SEQ ID NO: 112651 - DNA, 2018 bp, Zea Mays
gaatcactgtccagtcgtgtcgatgacccctccgctgcgccaaccaacccaccctggtccacgggcgtcacggcactgctacagtgctacaaaccaactacctaccaccactccggcagtccggctagctccataaaggcgcagccggccggctggccggtagcagtcagccagccagccagccatggagacggcctccttcctctcagtggcgctggccctggcggccctcgtccccgtctcgctgctccttgtgaaccggctcctctacggcaaactgcccccggggccgcggcggcgtcccgtggtgggtaacctgttcgacgtgcagcccgtgcggtgccggtgctaccaggagtgggcgcgccggtacgggcccatcatgacggtgtggctgggcacgtcgcccacggtggtggtgtccacgtcggagctggccaaggaggtgctcaagacccacgaccagcagctcgccgaccgctgccgggaccgctccaccgagagcttcagccgaggcggccaggacctcatctgggccgactacggcccccactacatcaaggtgcgcaagctctgcaacctcgagctcttcacgcagcgccgcctcgaggcgctcaggcccatccgcgaggacgaggtcaccgccatggtcgagtccgtctacaaagccgtcaccgcgcctggtacggcagtgcagggaagccgttggttgtaaagaaccacctctcgatggtggccttcaacaacatcacgcggctggccttcgggaagcggttcgtggacgcggccggcgagctggacgagcaagggcgcgagttcaaggggatcgtccacaacggcatcaagatcggtgcgtccctctccatcgcgcagcacatcccgtggctacgctggctggccccggtcgacgagcaggccttcaaagcccacggcgaacggcgcgaccgcctcaccgtgaagatcatggaggagcacgccagggccctcaagcagcgcggcgcccagcagcacttcgtcgacgcgctcttcactctcagggacaagtacgacctcagcgatgacaccgtcataggcctcctctgggacatgatcaccgccggcacggacacgacggtgatctcggtggagtgggcgatggcggagctgctgaggaaccccagagtgcaggagaagctgcaggaggagctggaccgtgtcgtcggccgcgaccgggtcctgtcggagacggacttcccgaacctgccttacctgcaggccgtcgtcaaggagtccctgcgcctgcacccgccgacgccgctgatgctcccccacagggccagcgccagcgtcaagatcgccggctacgacatccccaagggcgccaacgtcgtcgtcaacgtgtgggcggtggcgcgcgaccccgaggtgtgggacagcccgctcgagttccggccggagcggttcctccgggagaacatcgacatcaagggcgccgacttccgcgtgctgccgttcggcgccggccgccgggtgtgccccggcgcgcagctcgggatcaacctcgtggcgtccatgatcggccacatgctgcaccacttcacgtggacgctgccgagcgggacctgtcccgaggacgtgagcatgatggagtcccccgggctcgtcaccttcatggccacgccgctgcaggccgtcgccacgccgcgcctggacaaggaggaactgtacaggcgtgtcccttcggacgtgtgagccgtcggcgtcctggcatctgctgcgttccctgttttgaaacctgctgctgctgttgcgaatttgtgtaccattaactattcgctggtgatgtacgtgtcatagtcgtgtacgagcattttgtgtactgcagaacttgatcgctgagcatacacttttgcccggtagtaatttacaatttcagcattgcaaattactattagtacgtcgcagaaaacagtgtaaagctcgaaattgagacctcgcgaatatgcaccagcctcctcgaaattgagacctcacgaata

SEQ ID NO: 112652 - DNA, 1023 bp, Zea Mays
ccgatctgtttgtgtgcttgattgtattcactgactgatgagactggccatcgaccggcttgctgcgtacgtgggttgtgttgtccaggacatgatcaccgccggcacggacacgacggtgatctcggtggagtgggcgatggcggagctgctgaggaaccccagagtgcaggagaagctgcaggaggagctggaccgtgtcgtcggccgcgaccgggtcctgtcggagacggacttcccgaacctgccttacctgcaggccgtcgtcaaggagtccctgcgcctgcacccgccgacgccgctgatgctcccccacagggccagcgccagcgtcaagatcgccggctacgacatccccaagggcgccaacgtcgtcgtcaacgtgtgggcggtggcgcgcgaccccgaggtgtgggacagcccgctcgagttccggccggagcggttcctccgggagaacatcgacatcaagggcgccgacttccgcgtgctgccgttcggcgccggccgccgggtgtgccccggcgcgcagctcgggatcaacctcgtggcgtccatgatcggccacatgctgcaccacttcacgtggacgctgccgagcgggacctgtcccgaggacgtgagcatgatggagtcccccgggctcgtcaccttcatggccacgccgctgcaggccgtcgccacgccgcgcctggacaaggaggaactgtacaggcgtgtcccttcggacgtgtgagccgtcggcgtcctggcatctgctgcgttccctgttttgaaacctgctgctgctgttgcgaatttgtgtaccattaactattcgctggtgatgtacgtgtcatagtcgtgtacgagcattttgtgtactgcagaacttgatcgctgagcatacacttttgcccggtagtaatttacaatttcagcattgcaaattactattagtacgtcgcagaaaacagtgtaaagctcgaaattgagacctcgcgaatatgcaccagcctcctcgaaattgagacctcacgaata

SEQ ID NO: 112653 - DNA, 606 bp, Zea Mays
atgagaactctgccatggatggctgttaatacacatttagaacccataatagcaactgttattcatgatattacttattacacatggcacggcaattcaagatattacattaagagcactgattttatgaaaatacgcgagggtgcatgctctggcatgttccgaagcagctccttattctgcaacttagttttgcgcttcaggcagcaaattgcacagggagacgacagatccttaggcgctagcaccctcttcaacaggcttgaattcctgcagctgcttgaagttctcccatggcttctcccagaccttagcttcatagagcttattgacttcgccatccttcacttcaatagtgagatagtacatcgtgccagcaaccacttgtgtcttggccttcacaagcttctcgaaccccagaagagcattggccttttggttgtgctcattgacggcgaagcgcgcgagctcctggagctggaggtcgttctcgttcgccggcacgtccttgatgccgcctgccaacatcccggcgttgtcagccgcggactccttttgtgcgctgcgcgtggaggaaacggcggcgagggcaagcagcacgagtag

SEQ ID NO: 112654 - DNA, 1888 bp, Zea Mays
cagcacactttgcatcaatctgtcacacacgaccgagagagagagcaagcactagctagcgcttcgttctggctagctagcctcctctagggacgaggagggtttagcgagggttcattgttgtttcacgtacacagtcgttgctagattgcttgtttgcagctatagctggttcgaagctacaagggccgcgcgccgccgagaaaaaaaagaaccgacggcaccatgatcccaggatccgccgtgtaccacgtggtggaggcgatggcgccgctgtacacgtcggcggtgctgggctacgcgtccgtgcggtggctcaaagccttctccgacgagcagtgcgcggggatcaaccacttcgtggcgctgtacgccgtgccggtgctcatcttccacatggtgtccaccaacgacccgtaccacatgaacgagcgcctcatcgccgccgacacgctgcagaaggccgtcgtgctgctggcgctcacggcctgggcgttctggtcccacctcagcaggcgccgcggaggccgagggaagcggcaggtggttcagggagcggagtcgccgatcaagtgggtggtgaccaacttctcggtggcgtcgctgcccaacaccatcatcatgggcgtgccgctcctggacggcatgtacgggcccgtgtcgggcgggctcatgaagcagatcgtcgtcatgcagttctgcatctggtacaacgtcgtcatcttcctctacgagttcatggcggcgcgggacggcagcgccaggatcagcccagccgtgccggcgacggcgggcgagcgcgtcgtcgacgacgaaaacggcggaagcagtagtgtccatcgtcatgccgccgccgaccgtagccaccaccaccaccaggtggtcgtcaacattgagatcacggaggtggcgccggcgccggcggcggaggcggtcgttgcgtcgtcgttgatgcccgcggcggccacgaaggagatgagcccagaggacgatggagatgctaacaagcaggtggtggtggccgtggatgtccagccgccggtgatgcacgtcgtctggatggccacgaagaagcttctccagattccgaacacctatgccagtttccttggcctcatctggtctctcatggcattcaagattggattctcgatgccgaagattgttagcgactctctgttcatcatctacacaaccgcagttgggctgagcatgttcgcttcagggacgttcatagcgcggcagtcacggttcgtgccgtgcgggtacaccgtcgcctcgctctccatgctcctcaagttcctgataggcccggtcatcatgctgatcgcctcgctggccattggaatgcacggcacccttctgcacattgctgttgtacaggcggctctccccctggccgtgacctcattcgtgtacgcggaggagtacaaggtccacgccgacatcatgagcactggggttattctcgggatatttatctcgctgcccgtcacgattgtctactacatactgttgggcctttgaaattctcatgctgattaggagaaggtgcatgccccggcccgtcgtcatgtgcaaaatctgaagcggccacgtgaattggtgcctacacagctcagatcgatacgcacgtacgcaaccatgcaaggaagaattaaatgttgctgatgctaccaaaaattgtttcaataagattacaatgtgctagcagtagaaagtagtcaataccttatatacaatccaaaacatctcaatgtatatagcaggcatgtaattaatatgtagaagcaaaccgtgctgcacagctttaagtttatgttcaaatattccattgtacaacaagagatacaaaataagaaaatcgaaggaatgtatcattattgac

SEQ ID NO: 112655 - DNA, 543 bp, Zea Mays
atggcggcggaggctcaggccgaaggtcctgcgctggcccctccgcccctggcgcacgggagctcttccgcttccccggagaagcgtgggcttccgatcccgggggacgacgacggcgcggcggcggcggcggaggaggaggaggagcagctgcccgagccgaagcggcgccgcccgtgtgtcgccacgctcgacaacgtccccggcgcggcggtgtccttggtgctggtgaccgaggagacggaggactcgcctggctcgggcagcggcggggacggcgcgtcgttctcgttccagcacgcgcggggcggcttcgtggcgttggagaccacgcccaagttcgggtccttcaacccgccgggggaagccgagctagcggccctggatctgaagcatgcgcggcacgaagccgacgcggagggctcgacggaggcggacgacgaggtccccgcggcgtcggctcctggggcgggggcggaggccaagggcgagagctcgcaattacctggcggcgaggttgatggtcaggtccagacattttga

SEQ ID NO: 112656 - DNA, 1448 bp, Zea Mays
atgttcgtcctccgcaaaaccctcctccatgcgccgccggccgccgccgcggcggtcccctctcggatctcttccctcctccgcctcatcccctctgcatctttttctgaggtaagcggaggtggggaagaatggggcgcctcctcacccggaggcggcggcggcaggggtgggggtgggaacgaatggagctccacctggtctaccggcctcaccaaggaccatttcgacggatcctcgccctccgtcggccgttctgtcccttccgagtcagcgcccgtctctcgtgagcgggcggccattcgcgctatggatgagtgggacgagagggtccgggaactggagcgtaacaatgtcgaggcgaaggcgtatgtggattcatgggacgaccggatgcgggagacctgtgcgctgctgaagcaggtgcgggagccgggcgctcggggctcgtatctcaaggactcggagaagcaggagatgtaccggctgcacaaggaggaccccgcgacttacaccgtggagcggctcgccaaggacttccgtgtcatgcgacagcgcgtgcacgccatcctctggctcaaggagatggaagaggaagaggagaggaagaggggccagccgctcgacgactccatcgaaatcctgctcgacagctgcccagagttcttcaattctcatgacagggaatttcatgtagcatctcttccatataaacctgacttcaaagtaatgcctgaggactgggatggcacaacacgagatcctgatgaggttctatatgaaatttcaatgaaggaagataaaatgttgtatgaggaattcgttcaacgcttggaattcaacaagaagaaggtggcaggagaggttaagtgccacaagtacagccggcgcaagccagacaatggatggagctacatggtcgaaaagcttggtcctcagggaaagcgtggtggaggagggggctggaagttcatcagcttgcctgatggatcaagccgtccactaaatgatatggagaagatgtatgttaagcgggagactccaaaacggcggcggaggataattgcaccatacaagtgacatggacaacttcagtttgctgaaatgcaaattttctcaactgtcttttgacattgtccagcgaggctgaagcaagaaactgtgaagtagtttggaaccgccagaacagctcctgtttttttcacagcacagtagatggtttgatgtgttttgtaacaaggattatttccccacattttggcagccgaataattatcttttaaacttttcggtgttcctcccgtctctatgcactgccgagcaacaattccaagccacgcgcgtcgttacccgtgctgcaaggaaaaacgcctgttgtactttttgcacatataaacattttgcacatataaacatttctcttaagcaaactcaaatttcattttctg

SEQ ID NO: 112657 - DNA, 1032 bp, Zea Mays
ttggccgctaacatattctagaatgtgttctcaaaatcctccgaatttatgagattctgcaagtgttttctcgtacaaatctacacatatatcattcatatctccaaactaaaaagaaattgaagttattggtgtttgttgtttttatgttttgactaaatatttgttctaaacaacatgtctttttgcctgcggaagtaataatttctctgaatgttaagagtatgcaacatctgaaccttcttttattttctctttcaggttcttcaattctcatgacagggaatttcatgtagcatctcttccatataaacctgacttcaaagtaatgcctgaggactgggatggcacaacacgagatcctgatgaggttctatatgaaatttcaatgaaggaagataaaatgttgtatgaggaattcgttcaacgcttggaattcaacaagaagaaggtggcaggagaggttaagtgccacaagtacagccggcgcaagccagacaatggatggagctacatggtcgaaaagcttggtcctcagggaaagcgtggtggaggagggggctggaagttcatcagcttgcctgatggatcaagccgtccactaaatgatatggagaagatgtatgttaagcgggagactccaaaacggcggcggaggataattgcaccatacaagtgacatggacaacttcagtttgctgaaatgcaaattttctcaactgtcttttgacattgtccagcgaggctgaagcaagaaactgtgaagtagtttggaaccgccagaacagctcctgtttttttcacagcacagtagatggtttgatgtgttttgtaacaaggattatttccccacattttggcagccgaataattatcttttaaacttttcggtgttcctcccgtctctatgcactgccgagcaacaattccaagccacgcgcgtcgttacccgtgctgcaaggaaaaacgcctgttgtactttttgcacatataaacattttgcacatataaacatttctcttaagcaaactc

SEQ ID NO: 112658 - DNA, 1290 bp, Zea Mays
tatttttgtgttttattaaaataaaattataaaactatatcaatgtacgagcatttgactattaactactttttctgtttttttatttatcgcgttctagtatttcagaacggaggtagtaataattattagtaccagctaatggatgtaaaattgtaaattgtaaacatgattttaaagaagacgtcagaactgagaagagaacactcaaacggaggcggacggaagaagcacatgggaaaaatcctagcgccagagctaccggcggcggtacatgcccacctgtaccggcaaaaacgtgcggacgcacgataaagatcacagcttttcctactctttgcagacacccccgcccctcggcggcggccgcgagcgaaaccaacgacgccacccaaaccggcaaatccgcctcctcccccacgcctttcgccgctcggctgactcgttcgcgttcccaccccactccgacttaaccgggcgcaccgtttccggtgggcggcatcctgcgcctttcgggtcgcgtccgcacgcgctggggtggtggagggagtccgggcgccttttctcgcgtgtcccgagggttgggctgagggagaagaggtccgcagcggccatccatggcggagatgcgaccgatctacagggagcccggcaagccccggcggccgccacgctctcacggcagtggaagtttctcagttccgttgtgggaaaagaaattttgcactgatgcttgtgctatcccctgggctaaactgtgtgagaccaagagattgatgtctctgtataaaagcgtggttgattgggacgactcagctgcattagaagccttcaatgacgcaaaggcgcgcttctgtgctgtatatcatggtcaatgctacgatatccctttgcccgacccaaacatgtttattgatattatcaacccagatgaatatgttgatcctgaattggtggctgatctggagaagtcacgtcgtagtgttcccagaaaagataatggtgttcctgatgtctgggactcttttattttctctgacaagccagttccagttacaggatggggtgacacggagaccagcttcacccatggccagcagctctctgtaaactgggacaatcagttagaacactcagttgaagcaaatcataagcaaatgtcggcaagttgggactattctgtcaagcaaccttctcaaagaattggtcagcaaaactcagggaactgggaagtgtacaaggaacagcaggatcaagccagcaactggggggagcagacgaatccttgca

SEQ ID NO: 112659 - DNA, 2199 bp, Zea Mays
tatttttgtgttttattaaaataaaattataaaactatatcaatgtacgagcatttgactattaactactttttctgtttttttatttatcgcgttctagtatttcagaacggaggtagtaataattattagtaccagctaatggatgtaaaattgtaaattgtaaacatgattttaaagaagacgtcagaactgagaagagaacactcaaacggaggcggacggaagaagcacatgggaaaaatcctagcgccagagctaccggcggcggtacatgcccacctgtaccggcaaaaacgtgcggacgcacgataaagatcacagcttttcctactctttgcagacacccccgcccctcggcggcggccgcgagcgaaaccaacgacgccacccaaaccggcaaatccgcctcctcccccacgcctttcgccgctcggctgactcgttcgcgttcccaccccactccgacttaaccgggcgcaccgtttccggtgggcggcatcctgcgcctttcgggtcgcgtccgcacgcgctggggtggtggagggagtccgggcgccttttctcgcgtgtcccgagggttgggctgagggagaagaggtccgcagcggccatccatggcggagatgcgaccgatctacagggagcccggcaagccccggcggccgccacgctctcacggcagtggaagtttctcagttccgttgtgggaaaagaaattttgcactgatgcttgtgctatcccctgggctaaactgtgtgagaccaagagattgatgtctctgtataaaagcgtggttgattgggacgactcagctgcattagaagccttcaatgacgcaaaggcgcgcttctgtgctgtatatcatggtcaatgctacgatatccctttgcccgacccaaacatgtttattgatattatcaacccagatgaatatgttgatcctgaattggtggctgatctggagaagtcacgtcgtagtgttcccagaaaagataatggtgttcctgatgtctgggactcttttattttctctgacaagccagttccagttacaggatggggtgacacggagaccagcttcacccatggccagcagctctctgtaaactgggacaatcagttagaacactcagttgaagcaaatcataagcaaatgtcggcaagttgggactattctgtcaagcaaccttctcaaagaattggtcagcaaaactcagggaactgggaagtgtacaaggaacagcaggatcaagccagcaactggggggagcagacgaatccttgcagtaccaactgggtcatggatggctcccaggatgcttggaagcatggctatggttggggtcctgcagctattcagaccgatccatgggacaactgtcaatatagctatcaggtgcctgacagccagggcacatatggacactggactcactggagaaggcgaaacaatgacttgggtagaagaaacaccaggaatagaggagatcccatcagctcaaagccaatgaaatcaaagtaccaaacggatgaacacagtggtgcaaacaatggttggaggaactgtcgagtgaagaatgatatgtattattactcatatgagcaggctgattataccaagcagtcactggctatgtgagtaagagctaaggggcttacgccatcgagagaagatgacaagttcctctctgccgttcactacgctttagaggtgtcagtagttttacaccagcaatagtaatggtggacatcttgagatgaggtacagtagagttagtagcaggttatgttcacctacccccccccccccccccccccctaagctgctgtatatagtagtaattatcgtcctaatgattgtttcgtttagccatttgcggccgttgtttgtttatatatatctgtctcgatatctgtagttttggtttactggctacttcttagcttcagtgttgcagcagttagaattatgatggttcttctttaatttacatcttcggtggtggtaagaacaaatgctttgactgatttgtatgttggtgtcgaaatggcacgagcagaagcttatatcctgtacatagctgcattgctctctggtaattgtgattttctcattgtacccgtttcatgtggccgtgttcaacgcctgcagattgtgtagttcgatttagaagaagctgctagtcgtatttaag

SEQ ID NO: 112660 - DNA, 300 bp, Zea Mays
gctaggcttggtggccagctcagcctcaactcattcatacaaacacgacaggtgtacacgtatgaaatacctatgggtaatcgggttcggattattgcttcccaaacccatacccgtttacccaatgggtggagattttgtcccatatccatacccatggggacaattttcatcccatacccgtaccctaataggggaattccccacgggttggcgggtatcgggtccccattgacatctctactcccaggtagcttcctcttctccttctctgctccactgaactttacagagcttcac

SEQ ID NO: 112661 - DNA, 2412 bp, Zea Mays
attcctttgcatgggaggaaatttacttggtacaaccatcaagagacacttgttctagtcaagctagaccgtgttctttgttcagttgactgggaactgctcttccccaatgttttacttcaaagtgctgcttcccaggattctgaccattgccccttgcttttggggcttagggataataaatctggaaaacgaaggtttcacttcgaatccttttggaccaagttggatggttttcaggaggttgttcattctggatggaatgcagtgataccggtcccttgcccctttaaaactgtagaattgaagctcaaagaaaccgccaaaaggttgcaggcttggagcgaaaagaaggttggtcacgtgcattctcaacttgctttgaccaaagaagttctccacagacttgaaatggctcaggattttagagtgctcattcaggctgagatttggctcaaaaaccggctgaagaagcaagctttactgctttcctctctcaagcgcaccatggctaggctcagatctagaatctcctggttaaaggagggagatgctaatacaaaactgtttcaccttcatgctcgtcatcgcaagaggaagaattttgtggctaggctggtggatggggactataccctaacaagtcatgttgaaaaggctgcttgtgtggatcgcttctataccaaccttattggaaaatgtgttgatcgtgatagggtgattgatctcgaagccctgggattgccttcttttgagctgtctgagcttgatgcccccttttctgagcaagaagtggaggatatcattaaaaggatccctgctgacgaggcccctgggcctgatggttctactggtcgcttttacaaggtatgctggcctattataaaagttgatatgatggctgcaatctccgctatttggggtaggaagtttgataattttgggcgccttaattctgcatatataaccatgatcccaaagaatgatggagctgaaatggtgaaggatttcaggcctatcagccttgtgcatagcttcgctaagctgatcacaaagatcctagccaataggttggctaaaaggcttaatgagatggtgtcacctaaccagagtgcgttcattaaaggtagattcatccaggacaattttatgttggttcaacaaacctcaagactgcttcaccaacagcataaggcttctttgctctacaagttggatattactaaggctttcgactcgatttcttggcctttcctagttgaagtattgaagcagcttggttttggtcagatttggagggatattatttgtggtttgttgacctcttcctctactcaagtgatgctgaatgggtttccaggacagcacatcatccaccggagaggacttcggcaaggggatcccctatctcctttattgtttattcttgccatggacgtcctagtatatatgttttccaaggcagaggaggagggtttactccagcagttatccaacaggaaaaagctccatcggatctcctgatatgctgatgatgttgccctttttgttcacccatcagcagcagatttatctatcactcttggcattcttcagctttttggggatacctctgggctgcacaataatgcccagaaatctaatgtcattcctatcagatgctcaatggaggatatggtggaaacccaaggtctgctgccttgtggaatatcttcgttcccctgccgttatttgggtcttcctttatccttgcacaagctgtctaggcagcacctccaaccttttattgatagaattgctgaccagctatcaaattggaaggcagacttattgacgaaggcagggagaagaaccctagttcagcatgttcttaccagcatgacggtttatatggcaatggcagtggatatcccacaatggggtttagatgccattgacagattaaggaaaggtttcctttggcgaggtcgaaaaaaggtaaatggggggcactgccttgtggcttggagaaaggtttgccgccctcctcagcttggtgggctgggtatctccagtttaaaagaactctgttgggctcttcgaatgagatggttatggctgtctaaaacagacccctccaggccctggattggtctcccaatgaaaatcccaaaaaaggccacttccttctttaatgaggtagtgctcactgaagttggtgacggggccagcaccaaattctggaaagacaagtggttacacggtaaaaaaattgcagacctggcacctagacttctagctacaattcctaagcggattgtgaacagcagaactgtgattgaagctttgactaacagaaaatggattgccgatataaaaggggctctctcagtgggtgtgttgattgattaccttcagctatgggagatgctc

SEQ ID NO: 112662 - DNA, 1208 bp, Zea Mays
cccccctttcccatctcctcctctctcaaaccttgcagccacaccaccataccctagcccccccccaatctcctcctcccaaggtgccaatctttgccgctcggatcgtcgtcacgtggtgcgaaccttcaatcgttttggtggagggaagaaaggaggaaggaaagggggagaatccaaggtggtggacttctggatcgttcttagggatttgcccaaacttccggtgaaggcaagtaaaactgtgatggttattccgtctggcaaatgaggagtcttattcttgaatatgttgtgctattgtgttcatattcatagttttttgtttattgagtaccatcatttgagaatgttcatgtttcatggatttcatatgttgagtttgaggtttgatcatgttactcaagtggttattatgtgcagtgggtggaagtatatgtctagcacatttttatttgggaagaactcatgatgttgtcatgcataatgcactcatcatccattgcattgaagtttcgtcgcgatcttatggtccgaccgtaccggtacattgagcaccatatgttgcccgagaaggggtatggtgcagcttcatatccttagagatatggaggcagaagtcattattgcatctgtagccatgtgcattcatgggagaggtgtggaatctattatgtggatgtggataatctggacttgtgcatggtgattcttcttggcattaagtatttagttacttgtttacttgctgcaatttactgttcaaaaaaaagaagttctgaaccacgtggttgtgtaagcacagttgatttacaatgtcctatttgttgttgttatgtttacttgctgagatgtgttatctcacatcttgcattgtttgatgcaggcacctaatttctgctttgggaatagagggatgtagcagcacggccactacacctttaataaaggaaccaccacttaaaaatgttgttaatcagagttggtcaagtctagtgaattactttgttcttggttgagcgtttgttttggggtgggttgagttccttatcccatttgttttgcttcagttgggtcataaatgagttttaccacttttgcatttagtttcgactatgtgaattatatgtctttatatcctgtatgaacttcatgtttcccctccttgtatgctagtttcaaaggaggtgctgccggattttgctata

SEQ ID NO: 112663 - DNA, 1688 bp, Zea Mays
ataccgacgagaatcccgcgtgacgcacgcgcacccggtagtggtactgatctgtggccaccgctgcctgccagcccgccggctggccgcacgcaacactcgacacgcgatccgccacgggcccacggccattccacgccggatctcccaccgctcaggcgcatgctgcgcgcggttccgcagcaccccttacctttcgccgattccaccggccaccgtgccttcctccaccaccagccgcggcacacccgcggaaccgccgctcgagctcgcgcctgaaccccccaaactctgccaaatttcgccaaacccagccggtcggaccccgcaacacatcgccaaaccaaccgggccggccgacacaagccgcagcccgtggcgatggacctggcgtcgagcgaccttgcggcgctgggcgcggcggagctggtccgcgtctcggcgtcgatcccgcgcgcggctccccgcaccttcgcgctgctcaccgcctgcctcgtcttcccgctctccttcgccgtgctcgcgcactccctcttcacccaccccatcctgctccgcatccagggcgccacccactccgagctagcgcagtggctcaggctcttcgcctaccagttcctctacctcatcgtcctcttcaccttctccctcctctccaccgccgccgccgtcttcaccgtcgcctcgctctacgccaacaagcccgcgtccatctcctcctcgctcaccgcgctgccccccatcctgccccgcctcctccgcaccttcctctgggtctcccttctcatgctcgcctaccacctcgtcttcgcgctcaccgtcctcctgctcatcgtcgtcttcatccccaacgcgtccgagtccgagtccgcgccgccctccctcgccttcgtactcttcctcgtcgtcgtcgtcttcgtcttcctcgggatccacgtctacatctccgcgctgtggcacctcgccagcgtcatctccgtgctcgagccgctctgcggactcgccgccatggccaagagcaaggatctgctccagggccgcaccggcaccgcagccacgcttgtcgtctcctacttcgcggtctgcggcgtcacctccgtgctgttccgtgccgccgtcgttaaggggcgcgccgaggaggggagcttcggtctggccttgcccgggcggctgcttgtcggcgccgtgctgctgtgcgttcttgtctgtgtcaatttgctgggactgctcgtgcagagcgtcttctactacgcctgcaaggccttccacaaccagcagattgaccggactgcgttgtatgagcaccttggagggtaccttggggagtacgtgccactcaagagcaatatccagatggagaacctttgagattggagcataggacaagggtaagttacacacctcattgcttcatactagcagtttcatgtggatctttatcagaatatgagtatggcttacaaggggctatctggtcttgttgattctagtaccatgtagtagttcgtaatctgtataagtggtaatgcacagtatggaaccaatctgtggaatggaagtatggaacagagatgcatgaacaaggttgtctttcatctcgcaaactgcgttcttgtatatccttgctttcatgtgagttgtgttattgttcgtgactatggttcatggtttagagattgggggttaac

SEQ ID NO: 112664 - DNA, 1293 bp, Zea Mays
agtgtcgccaaatgcggtgaactcgctaccgttcactattgtctcttacctcccgcgccgccgccttctgattcactcccacgctgctcggaagtcagaaccctcttgtgttgtcgcgtcgaccgagcatcaccgctccggcaattgttcctcgaggtatgatgtggggttcgatggtggcagcgactctgattagacggcgagggtgcggtcggaagcggtgagagggcgaggggcacaggatgggacgacttcgtgatgaatcgggcaagggtttcagcggtcgttgacctgcccccaggtttcttcaagctaatccagccaccagcccaccatcgctgccggtgccgttatcagcttatgcgacgaagcaattctggaaggccgagactacaacggaaagccgctctttgatggggtggctagcagacacgtactgatacgaaaacccttctccattctctttctgtttcagtaatatatttttattgaagaattagatggtaatttagttctttaatttggaaacttatgcaatttgttgtggtcaatttatctgcatccatttttgctttcttatctggcttctgaaaatatttcttaaaaaacttatgctggttcttgtggctactaatttatctaatattgaatttacacgttgaaatgaaatgcaatactctctctgatccaaattatattccaaatattgcctcacaaatgagtcatccaacaatgaacactgtaattggccaggagactgagaatgttatgaaaccatgttgcagttcatcacaactacctaagtcctttggttcatgtgacttgcggattaaacagacttatatatcttcaaggcaacataattcttcagttcacttgaataatatggcaatgtaattcattgagtttgcattgttaggtgaataaacgttttgctcaatctactccatgtcccaggctgttgcaagagcagcatcagttaattgatcagaatgacagtgacccaatttccatgtgtgctctgcctacggcgccctcagcaaaaccaaaacctgatgttgtgctgttctcttcaattattttgttaaatttttacgttgacatgccagttatatataaagacagaagatgtataccagtcttggtatggcaacgttccttcttttaaaaaatccttgcattcttatttagtagtatgtattgttttgaaggttgtaaattatagtggatgaattcattgtgcatgcattgagcagaagccatcaccatactaaatgcagattgttctctcaa

SEQ ID NO: 112665 - DNA, 1411 bp, Zea Mays
agcttggtcatcctaagcttcgtccagtgcagctactcctgggagctccttcccttccagcaactccaaacttgcaccacccccagttgaaatgtggctcagagagtcggcgacacccaccttctcaacagctgcaatggagtctcccccaccaactattgtagtgacgcccttgccactaagctcggctaacttctttgcaattgcctgaagaagagaattcatggtcaagtttctttacacaatttcctcaaaagtgtcaatagcagaaacaatgatatcacatagcatttttttctcgataagcgcaagagaactgcgcgccattatattaagcagaggagacatcacatagcattaccttggttccaactgcaaacttgtcaaattcaaaaactcccatgggtccattccagatgactgtctgagtagtttccagggcagaactgaacgccgaaatcgaatctggacctatgtccagacccatccatgcatcaggaattgcagatgcaggaacaacctggagagcaatctcacgttcagaccatcactacaagcatacaagagcagctagtttttttctcttaagtgtcatgcatgccgtgataacaatactagaaataaaaatgtaaccaacctgactgctagcatcaggagcaaacttatcagcgacgaccagatcgaatggcaacataagggagacacccttctcctttgcttttctaaggagagaggtcgcaagctcaagcttgtcatcttcaaccaaggaagaacctattgagtgcccttgtgccttgtaaaacgtgaagatcataccaccacccagaagaaggatgtcacatttctccaatagtgattcaataactccgatcttagatgacactttggagccaccaataacagcagcaaatggtcgtttggggtttgaaacagctcctacaaggtaatcaagctcctgctatttttattttgtctagtctgagggcttcaagaacttggtaactccctcagttgacgcatgtgctctgtgagcagttccaaaggcatcgttcacataaagatctgctaaagaggcaagcttctttgcaaactctgggtcattcttctcttcctccttgtagaatctaacattttcaaggagcacaacattaccatttggcaatgcagacaccaatttctcaacttctggtccaacaacatcatctgcctttatcacctatttgtgcatgtgcacacgatatactcaacataaataaagcaatagatgagctctaattttgatatttgtatcattgtgaaagcaaaaggtacctgtatacctagaaattcagacaaccttggtacaaggggagccaagctaaacttgggagtaacacccttagggcgaccctgcacatccacagtggggaaa

SEQ ID NO: 112666 - DNA, 652 bp, Zea Mays
gtcgggccactatccctctggcctcgtctcgtcttctcttctcgcgaatggcggcgctgtgcgatctccgtcgctgccccctccgccagtgatttctgggacgcgcgacgaacacgagttggaaggaggtggtcgtgctttgggcggcgaaggacctgggcgctagcagcctcagaccctgacagatcacaacctgacagatcacagttgcagttggagtgacgggcgctaccaaaagcgatcacaggcgctaccaaaagcgacgggcggccgacggcggcattgcagttggagcgagcgagcgcggtgcctttcggacgacactgagcacaggtcgcacattgtcacatggagctagactagaggtcgtcgccatcctgtcagtgtctgctcgtgatcaaactgcctgctgcctgcccgccccaatacacccaaccagatttcaattcacttcttggaagctgctgcttcgagcttttgagtagcacccctgcttacagacatttcatatccatatatatgctcctcgtcctggatctccttgccggcattatattgccccccacaccacccccgactccccacgaccattaatctgaagtctatatttcacattgtcacgactatattttgttccaatttgtttccttaa

SEQ ID NO: 112667 - DNA, 670 bp, Zea Mays
gtcgggccactatccctctggcctcgtctcgtcttctcttctcgcgaatggcggcgctgtgcgatctccgtcgctgccccctccgccagtgatttctgggacgcgcgacgaacacgagttggaaggaggtggtcgtgctttgggcggcgaaggacctgggcgctagcagcctcagaccctgacagatcacaacctgacagatcacagttgcagttggagtgacgggcgctaccaaaagcgatcacaggcgctaccaaaagcgacgggcggccgacggcggcattgcagttggagcgagcgagcgcggtgcctttcggacgacactgagcacagagtgctgagtggaagcaacatatgaagctgacacggaaaaggaaaatggatgatctccttggttatgtttccctgtcttgtgcatgctgcatttcctgctaccgtgaagaccggggtccaggagagtaggagactgaaagcactgtcgagaagactgaaattatcacattgacatgaagaccaaagccatctcttacctacttatctttgtagcttacgtttctattttattctgtcatgaaaactaaagtcttatgtatggtcattatgtactattttggttctgaaaatatttgtttatgttatgaaaactattggttgaaagaatggtgattac

SEQ ID NO: 112668 - DNA, 1791 bp, Zea Mays
gtcgggccactatccctctggcctcgtctcgtcttctcttctcgcgaatggcggcgctgtgcgatctccgtcgctgccccctccgccagtgatttctgggacgcgcgacgaacacgagttggaaggaggtggtcgtgctttgggcggcgaaggacctgggcgctagcagcctcagaccctgacagatcacaacctgacagatcacagttgcagttggagtgacgggcgctaccaaaagcgatcacaggcgctaccaaaagcgacgggcggccgacggcggcattgcagttggagcgagcgagcgcggtgcctttcggacgacactgagcacagataatgggttcttgggaggagaatgttaggcaatttttgttggaggaggaggaagatgatgatgaactattctttgttattctccctgctataatcccatacctctcggaagagaaaagacccatccacacatcctccctcaccggtgctaaaaaggttaaagaaattcttgaagggcatgagagctggtgcaaatctgagtttagaatggaaaaggaaatattcaaagccacgtcaaattttcttagaagggagaatttactacgtgacacacgaggagttagtgttgagaagcaacttgggatgttcatgtatatgatctcccacaacgccagtaaccaaatgctacaaaaggcttttcaacacagtggagagactatccatcgaaaaatatctgaagtttttgagatagttcccatactaactcaacgatttgtgaagcttcctagctcagttcaaactcatgctaggattgcaacagattctaggttcatgcccttttttcagaattgccttggtgccattgacggcacacatgtatccatcactatcgcagaagatagggcccctccatatagaaatagaaaaggaactctttcacacaatgttatggtagtctgcgactttgatctcaattttacatttgtctcgtgtggatgggaagggtcggcatcagacgcaggggtgcttcgatctgctattagcaaaagatttagtgtgccagaaggaaagttttatcttgtagatggtgggtatgcaaatacaccatcatacattgcaccatacagaggtgttcgataccatctcagtcaatttaggaggagtcgttcatcacaaagtggttatgcaaactacaaagagttattcaatcatcgccatgcaattctccgcaaccatatagagagggccattggtgttcttaagaaaaggttcccaattctaaaagtagacacattccatcccatagaaaatcaaatcaagatcgcagctgcagccattacatttcacaacataattagagggcaaaatggtgatgaaggatggctggacaaccaactagattatatatctccaagccattacattggtgttacttggtacttgcagagtgctgagtggaagcaacatatgaagctgacacggaaaaggaaaatggatgatctccttggttatgtttccctgtcttgtgcatgctgcatttcctgctaccgtgaagaccggggtccaggagagtaggagactgaaagcactgtcgagaagactgaaattatcacattgacatgaagaccaaagccatctcttacctacttatctttgtagcttacgtttctattttattctgtcatgaaaactaaagtcttatgtatggtcattatgtactattttggttctgaaaatatttgtttatgttatgaaaactattggttgaaagaatggtgattacggttttggcttgaa

SEQ ID NO: 112669 - DNA, 1751 bp, Zea Mays
gtcgggccactatccctctggcctcgtctcgtcttctcttctcgcgaatggcggcgctgtgcgatctccgtcgctgccccctccgccagtgatttctgggacgcgcgacgaacacgagttggaaggaggtggtcgtgctttgggcggcgaaggacctgggcgctagcagcctcagaccctgacagatcacaacctgacagatcacaggcgctaccaaaagcgacgggcggccgacggcggcattgcagttggagcgagcgagcgcggtgcctttcggacgacactgagcacagataatgggttcttgggaggagaatgttaggcaatttttgttggaggaggaggaagatgatgatgaactattctttgttattctccctgctataatcccatacctctcggaagagaaaagacccatccacacatcctccctcaccggtgctaaaaaggttaaagaaattcttgaagggcatgagagctggtgcaaatctgagtttagaatggaaaaggaaatattcaaagccacgtcaaattttcttagaagggagaatttactacgtgacacacgaggagttagtgttgagaagcaacttgggatgttcatgtatatgatctcccacaacgccagtaaccaaatgctacaaaaggcttttcaacacagtggagagactatccatcgaaaaatatctgaagtttttgagatagttcccatactaactcaacgatttgtgaagcttcctagctcagttcaaactcatgctaggattgcaacagattctaggttcatgcccttttttcagaattgccttggtgccattgacggcacacatgtatccatcactatcgcagaagatagggcccctccatatagaaatagaaaaggaactctttcacacaatgttatggtagtctgcgactttgatctcaattttacatttgtctcgtgtggatgggaagggtcggcatcagacgcaggggtgcttcgatctgctattagcaaaagatttagtgtgccagaaggaaagttttatcttgtagatggtgggtatgcaaatacaccatcatacattgcaccatacagaggtgttcgataccatctcagtcaatttaggaggagtcgttcatcacaaagtggttatgcaaactacaaagagttattcaatcatcgccatgcaattctccgcaaccatatagagagggccattggtgttcttaagaaaaggttcccaattctaaaagtagacacattccatcccatagaaaatcaaatcaagatcgcagctgcagccattacatttcacaacataattagagggcaaaatggtgatgaaggatggctggacaaccaactagattatatatctccaagccattacattggtgttacttggtacttgcagagtgctgagtggaagcaacatatgaagctgacacggaaaaggaaaatggatgatctccttggttatgtttccctgtcttgtgcatgctgcatttcctgctaccgtgaagaccggggtccaggagagtaggagactgaaagcactgtcgagaagactgaaattatcacattgacatgaagaccaaagccatctcttacctacttatctttgtagcttacgtttctattttattctgtcatgaaaactaaagtcttatgtatggtcattatgtactattttggttctgaaaatatttgtttatgttatgaaaactattggttgaaagaatggtgattacggttttggcttgaa

SEQ ID NO: 112670 - DNA, 558 bp, Zea Mays
gtcgggccactatccctctggcctcgtctcgtcttctcttctcgcgaatggcggcgctgtgcgatctccgtcgctgccccctccgccagtgatttctgggacgcgcgacgaacacgagttggaaggaggtggtcgtgctttgggcggcgaaggacctgggcgctagcagcctcagaccctgacagatcacaacctgacagatcacagagtgctgagtggaagcaacatatgaagctgacacggaaaaggaaaatggatgatctccttggttatgtttccctgtcttgtgcatgctgcatttcctgctaccgtgaagaccggggtccaggagagtaggagactgaaagcactgtcgagaagactgaaattatcacattgacatgaagaccaaagccatctcttacctacttatctttgtagcttacgtttctattttattctgtcatgaaaactaaagtcttatgtatggtcattatgtactattttggttctgaaaatatttgtttatgttatgaaaactattggttgaaagaatggtgattacggttttggcttgaa

SEQ ID NO: 112671 - DNA, 1674 bp, Zea Mays
gtcgggccactatccctctggcctcgtctcgtcttctcttctcgcgaatggcggcgctgtgcgatctccgtcgctgccccctccgccagtgatttctgggacgcgcgacgaacacgagttggaaggaggtggtcgtgctttgggcggcgaaggacctgggcgctagcagcctcagaccctgacagatcacaacctgacagatcacagataatgggttcttgggaggagaatgttaggcaatttttgttggaggaggaggaagatgatgatgaactattctttgttattctccctgctataatcccatacctctcggaagagaaaagacccatccacacatcctccctcaccggtgctaaaaaggttaaagaaattcttgaagggcatgagagctggtgcaaatctgagtttagaatggaaaaggaaatattcaaagccacgtcaaattttcttagaagggagaatttactacgtgacacacgaggagttagtgttgagaagcaacttgggatgttcatgtatatgatctcccacaacgccagtaaccaaatgctacaaaaggcttttcaacacagtggagagactatccatcgaaaaatatctgaagtttttgagatagttcccatactaactcaacgatttgtgaagcttcctagctcagttcaaactcatgctaggattgcaacagattctaggttcatgcccttttttcagaattgccttggtgccattgacggcacacatgtatccatcactatcgcagaagatagggcccctccatatagaaatagaaaaggaactctttcacacaatgttatggtagtctgcgactttgatctcaattttacatttgtctcgtgtggatgggaagggtcggcatcagacgcaggggtgcttcgatctgctattagcaaaagatttagtgtgccagaaggaaagttttatcttgtagatggtgggtatgcaaatacaccatcatacattgcaccatacagaggtgttcgataccatctcagtcaatttaggaggagtcgttcatcacaaagtggttatgcaaactacaaagagttattcaatcatcgccatgcaattctccgcaaccatatagagagggccattggtgttcttaagaaaaggttcccaattctaaaagtagacacattccatcccatagaaaatcaaatcaagatcgcagctgcagccattacatttcacaacataattagagggcaaaatggtgatgaaggatggctggacaaccaactagattatatatctccaagccattacattggtgttacttggtacttgcagagtgctgagtggaagcaacatatgaagctgacacggaaaaggaaaatggatgatctccttggttatgtttccctgtcttgtgcatgctgcatttcctgctaccgtgaagaccggggtccaggagagtaggagactgaaagcactgtcgagaagactgaaattatcacattgacatgaagaccaaagccatctcttacctacttatctttgtagcttacgtttctattttattctgtcatgaaaactaaagtcttatgtatggtcattatgtactattttggttctgaaaatatttgtttatgttatgaaaactattggttgaaagaatggtgattacggttttggcttgaaggttcagaa

SEQ ID NO: 112672 - DNA, 2069 bp, Zea Mays
tccagcgcgttcagggggccttggtcttgcgggcacgaggcccagcgcgaagagaggccgctcgggtcctgtggtaggtcctgccgtcctggcggctggcgaagaggaggaggttatagtctgcctgtaagccgctttctgcgccaaccctcctgtggagtcatttggtgattgctaaaaccagcatgtcgcaggagcggacattggatgaagtcgtttttccatttctaatgcagttggaaagggcaagagttgttcctttgggtccagatgaggatagttcacattcagatattttacttctgtttgaaaatatcaagaaagaagcatgtgaagtcaaggatatacttctgagagtgtctaaatgggaaaatgagataataaatgattttggaggaatagctagacatttggatgaaatcatagaagaaggcaaccagctcaattcaatacattccacacttcaaattgtaaacactgagatgtccaagttaaaagatcgtatgcaacttcctctccatgttcccatgatcaagccaatagctcccacaaccttgccatcatctgtaccatccaaatgggttcacgcaaaagtttcagagcagtggaaaaggctagagattgagaggaaaatccttgagagctcaaccatttctaacttgcaggttagctatgataatcttgatctgcaactgaagttgtgcttgttatgcttctctgtcttcccagaaaattctatcatcagcaagagggccatgatccattggtggattggcgaggggttagtagcagccacaagaagtcagacagccgaagatgtcggaaaggcatgctttgagaagctgattgctctagagatgattgaaccggtgtatcagaaatgcaggtatggggtaaaccaatgcaagttacacccctggattcgtcgtatgttgattaaagttgcaaagcaagcacggttttttgaatttgattcagatggcaatgcaacatgggactgttcagctactcaccgtgcttgtctagttgaagagcaccaacaggaaatcgatgtggcatcactcagaaaccttctaacaatatttaatataaatgagcaatacctacaatttgagaagagttggttcttggatttgagaaagattgcagttctccaactaggaagatggcacaacttatgtcgacaccatattgaggttgacagtactgaatttttggaaggactgcagtcatccaatcagttgaaatatctttgtctgaggggcatctctagaatcattgaacttcctgcttccattggtggactctcgaatcttaggatcttggaccttcatgcctgtcacaaccttgagagactgagtactagcatcacgtatcttcagatgctcacccaccttgatgtgtcagagtgctacttgctggaaggcatgccaaggggtattggcttgcttactgaactccaagtgctcaaagggtttgtcattggtggttcaactggcaattacaattgccgggtagcagagttggctaggctggacaaactgaagaagctgaccatatatattggaagcaaagttgcagtgacagaaaatgaactgaatgagcttgagaacatcaaaggcctttgcgtgctgaaaattacatgggctgtatcactttcaaagaaagaacgagtccatcaaacttctgattctacaccattgataacttcactctccctacctctaaatctcgaaaagctagacctgtgctgcttccctggagagaaggtgccagattggttaagtccgagtaagctgttgagactgaagagactctacttcactggaggaatgctaaaaacttttggaaacaaaaacatgttagaggtgtggagcgttgaggttttgcgcctgaaattcttgaatgatttatcagtacaatggacccaggtgcatgaaatatttccaaagctgacctttctggaggtcttcagatgtaggaagctagaatccttcccttgcgataaggatggggtgtggatgaaccatgatacgaaggatagcagaaagtagaaggcaggaatggat

SEQ ID NO: 112673 - DNA, 500 bp, Zea Mays
gcgaatcaacaatggatgcgaactggacatacatggacagcttcctgacaacatggaatgagtgggagatccgcatgcttgtgctcaccagcctcgccctccaggtgttcctcctcttctccgccggcatccgcaagcgtaacgtctccgccgtgctgagcctgcttctatggttggcctacctgctcgcggactccatcgccatctacgcgctcgggtacctctcccagacgcgcgtgcccaagggcgtggacccacagtccttcgagcgcactcaccgcgtccaggccttctgggcaccgttcctcctcctccactcggcggccaggacaccatcaccgccttctccaccgaagacaacgagctctggaagcgccacctgctcagcctcctcacccagaaattccagtagtcattggtcgggtgtgctgttgatgtctgctctaggtgttgattatgatgttaatcggggtcctttttttgccatattgtcgaaatag

SEQ ID NO: 112674 - DNA, 1512 bp, Zea Mays
atgggcgctcaagtgtgcgagcatggacaatctgcggagcagcatgggctcgaggcggagatcgtcatcgagcaggaacgtcgtgcgaagactgccgccgccgtgactgtggccgtcgcagaggaggcagtgccctacacgacggtgatcaccgaagcgagccacttctttgtcatcttcaagcggctcttcgtcaacctcatcctcagcttccaggagcgcacccagagccagagcacgtttctgcggctgacgccagagcaggcatacaagatcatcgagatcgagctgtcactcatgtacgacacccttcactccaaggcggcagtgatacacacctggtacggccgcctgtttcgatgtctgactctcctctcgacctctacggcgtgcgtcctcttcaacatgcttgacaggggtaaacacaagtcacacagccgcatcgacatctgcatcaccaacattttgttcggaggagcgctgtgcctggaggtgtatgccattgggatgatgcttgtatcctactggacttatgccgctctgcatgactgcaactaccggtcactgggcagcctggtgttccggagcattcagtatttccggccggaaagccgggcgaagtggtccaatttgatggcccagcacaacctcatcggcttctgcctcctggacaaaccaaccaagctcaccaaggttttgagcgtcctagggcttaaagtccactgggacaggtggctgtacatccggcacatcgacgtgtcatcggagctcaagaccttggtcttcagggagctcaaggataagacggtgagcatcgtggacgccgagagctaccgcaagttcagcaaccacaggggccagtgggctctgcagtgcaagggctactacaaggagctcggctggagcgtcgaggtggagttcgacgagagcatcctcctctggcacatagccacagacctctgcttccactcgggggatggcgatgacaacgacgccaagatgatccctcattacgttgatatcagccgggcgatatcgaactacatgcttttccttctcgtcgcgcgccccttcatgctgaccgccggcattgggcagatccggttcggcgacacctgcgccgaggccaagaacttcttcaagcgggcagagatggcgcgcccgagcgcgagcgctgcggcgaggatggtgctcgacgtgaacgccgagatcgcgccgagggacgtgaagggtgaccggagcaaatccgtgctgttcgacgcgtgccggctggccaagtcgctgctggagctgcagccgcacaagcggtggcgcgtcatccgtgtggtgtgggtggagatgctctgctatgccgcgaacaagtgccaaagcaacttccatgccaagcagctgagcaccggcggcgagctgctcacggtcgtttggttcttgatggcgcacttcggggtaggcgagcagtataggattgaggcggggcatgcaagagctaaactgatcgtacagaagaactga

SEQ ID NO: 112675 - DNA, 466 bp, Zea Mays
aaattgaacgccagttactagtgaagtagtgatttatacttgtgcaccattactgtcacagcaatggccaggccaataaagttgatgaaacagcgtcacacagagcaaatggaacacttctaaaagcattcttcttcccctaattgaactttaccttgtggctgaatagaaagcaatttagtgcaggcgtccatgttgatactgttgtcatgaatcctccctttggtacacgaaggaatggagcagacatggagttcctctctatggccttgcaggtcagaaccggtgcttgtttgcgactagcagtttcctttggaattaacaaggacacaagtcttcactgagacacaaccatagttgaacgtacataactacttaatagaaaaatagcatcaggaagatatcgtttgaagttgttgaagatcaaacttcaatgctgccctcagcgtcacagcagtaagttctt

SEQ ID NO: 112676 - DNA, 1740 bp, Zea Mays
cgcatcccttccaggctctcgcatctacctggccacctcccacctctctccatatactacccctccccctcctccgcatcctccccgtcgagccacaccacctcccctccctcccaaaccccagcgcctcggcagggtggtgaaccaccgcccccgcgcccttgctgcaatccgagaaccaagatcccaggggcagaaagccagaatgcctgcgcaaaagcgccggctcccatcgccgtcttcgaaaccccgcgacgacgtcgcggctacagcctctgatgccgccgccggcggaggcgtaggagaaggaagaggaggacgcccgccgctgccgagcagggacgccgccaaacggtggttgactgacccggagccacagcaaggattcgaagacgattcggacgcggaggatgatggcggcgcggacggcgacagcgagttctcccagagcgacggcggcggcaacgacgggtttatgctagtgaaattagcagagataaggaaggaggttcagtgccctatctgtttaggcattattcggaagacaaggacagttatggaatgtctgcaccgcttctgtagagactgcattgacaaatctatgcggctaggaaataatgaatgcccatcgtgtcgcactcattgtgcaagtcgacgttctttgagggacgatcctaactatgatgcactgattgcagccttatatccagatattgataagtacgaggaagaggaacttgcttttaatgagcaggagatgactcggaatcaaaagatacaagaaaccattgaggaaacattccgaagacagtcccaggcaattggtaagaaacgttctatagcaaaagaaactggcactgcctttgcaaggaagtacagaagaaatatgcgaacacgggggagaggtagaactactacccctgatattgctcctactagctcaaatgaggaggatagggaaggagaaaatgtcaatgaggtcaccaaagtaccatcttctgctgacgatcattctccagatttaagacagaaaagatgcaggaagacgtccacatcacaagcatcgcctgctagaaacattggcagtagtgatcacagctttgaggagaacgatgaattagttgccgcaaaagaaattttagccacctctccattgcgaggggagatgcttgcatggggtaaaaatggtacacggagccaaaatcgacatggcagtgctggttcaaatggcaggattggaaggagcgggcgcattgccaaattggtggatcacctatgtaatgctgatgaaatggataaagagttccagttgtatctggttctgcttcctgtcgatggacaaaccatacctcacttggaaaagccttatctaagttgtcaaccaaccttgtccattcaacatcttgtagagttaattgctcttcagttgtctcggaaagtcgaagaacttgagatgtacataaggatggacggcgaccatggaagtgttggctcgatggcttgcagtataggtgaatttgatggcttggaaaggctgagggaagataaacttctttcggaacttcatccttcgtttgcctctagcaacggtgatctggagttgcgatatgctttgaaaactcgagactagatcagttttaatcttcagctactaatttatgaagtcactgtccatacggtggtgatgcaaatgagatctgcatctggtgaacggatttatgtaaaaagaatattcaatgt

SEQ ID NO: 112677 - DNA, 1418 bp, Zea Mays
gggaatgcgatgcccccaacaggggaagcagcgcccacgagcgtcgccgtcgccgaggctttcgcccaagaagcccccagcaccaacgcattattcggaagacaaggacagttatggaatgtctgcaccgcttctgtagagactgcattgacaaatctatgcggctaggaaataatgaatgcccatcgtgtcgcactcattgtgcaagtcgacgttctttgagggacgatcctaactatgatgcactgattgcagccttatatccagatattgataagtacgaggaagaggaacttgcttttaatgagcaggagatgactcggaatcaaaagatacaagaaaccattgaggaaacattccgaagacagtcccaggcaattggtaagaaacgttctatagcaaaagaaactggcactgcctttgcaaggaagtacagaagaaatatgcgaacacgggggagaggtagaactactacccctgatattgctcctactagctcaaatgaggaggatagggaaggagaaaatgtcaatgaggtcaccaaagtaccatcttctgctgacgatcattctccagatttaagacagaaaagatgcaggaagacgtccacatcacaagcatcgcctgctagaaacattggcagtagtgatcacagctttgaggagaacgatgaattagttgccgcaaaagaaattttagccacctctccattgcgaggggagatgcttgcatggggtaaaaatggtacacggagccaaaatcgacatggcagtgctggttcaaatggcaggattggaaggagcgggcgcattgccaaattggtggatcacctatgtaatgctgatgaaatggataaagagttccagttgtatctggttctgcttcctgtcgatggacaaaccatacctcacttggaaaagccttatctaagttgtcaaccaaccttgtccattcaacatcttgtagagttaattgctcttcagttgtctcggaaagtcgaagaacttgagatgtacataaggatggacggcgaccatggaagtgttggctcgatggcttgcagtataggtgaatttgatggcttggaaaggctgagggaagataaacttctttcggaacttcatccttcgtttgcctctagcaacggtgatctggagttgcgatatgctttgaaaactcgagactagatcagttttaatcttcagctactaatttatgaagtcactgtccatacggtggtgatgcaaatgagatctgcatctggtgaacggatttatgtaaaaagaatattcaatgtgaaaaaatggtgaacctgtttttctgatgagtcttgctaggttaatttaccaactttgtaaatatataatgaactgaattgtgaatgtttgcagtaggtgaacatgctgtctaatatttat

SEQ ID NO: 112678 - DNA, 1506 bp, Zea Mays
ctgatcaaatctttaaattttaccataaaatttagagctcattaacacccatgtggctggttgacgagacaaacggggatctggatctaccggagaagagaaaaataaaaggagaggaaaaaaataaaaaataaagtaaatatgggccccacctgtcataatatgcattgggaatgagatattggtaatctgctgcagtatgttggccaataatcccgtcctgtttccggcggtataaaacgaaaatacggtacaggactggccattcctatcaatacttccacacggcacaactatcggcggcggcaacgagccaggaccctgttgtgatgctaccgtcgccgccggtgctactacgcccttgcgctgcccgggcctccccgcttccgccccctagacctagagctgcaaatcctaacaccgagtcggcgacgacgacaaccgccgccacttcagcggacagagcggccaccatgggcgcggcagcgtggtggcggcgcgccctggggcagcggttcaacccagccggtgtggccgcggtggcggccgtcgcggcgtccaagccgcgcctggcgctgccgcacgtgtcggtgcaagacatcaggtggctcgactgggctgagctccgccgcgccgggttccgcggcgtcgttttcgacaaggacaacacgctcacggccccctacgcgcccgcgctctggccgccgctcgctgcagcatttgaccagtgccgtgcgacgttcccgcccggtgcgctcgccatctacagcaactccgcagggttgacggagtatgatccggacggggtggatgcgagggcgatcgaagctgtcatcgagggggttcatgtgatcagatataaagaaaccaggtggactagctactgaaatagagagttactttggttgttcagcctcaaatcttgtgttggttggtgaccgttacttcactgatgtggtctatggaaacaagaatggctttcttacagtcctgacagagcctttaaacatcactgatgaatcatacattgtcaaaagggttaggaaactggaggcgtacatcatcagttattggtacaagaaagggcacaaaccaatagagcatcctttgctcccagatgcaagaagaatagtgaagtttgacccatatgacgactcagtttcaaccagaatataatgtaatgatgtatcttgcacctgctcatcagagagtgagatctactgtttgtagcttagggtgtgtttgtttccttctaaattatataaactggattatggtggaagggtaagaccgtaagagagtaaaatattacattgtgacaacaaataagctgaaataaactaatattggatagcttattttagcttatttgtaatcccaaagtggtaccataatccaatttatataaacatacagggcctcagcagaagattacaagggataaacatatggtgtgtagatttgctgtctctctctttcactctcgcagaatgcaatttttcaggg

SEQ ID NO: 112679 - DNA, 1609 bp, Zea Mays
ctgatcaaatctttaaattttaccataaaatttagagctcattaacacccatgtggctggttgacgagacaaacggggatctggatctaccggagaagagaaaaataaaaggagaggaaaaaaataaaaaataaagtaaatatgggccccacctgtcataatatgcattgggaatgagatattggtaatctgctgcagtatgttggccaataatcccgtcctgtttccggcggtataaaacgaaaatacggtacaggactggccattcctatcaatacttccacacggcacaactatcggcggcggcaacgagccaggaccctgttgtgatgctaccgtcgccgccggtgctactacgcccttgcgctgcccgggcctccccgcttccgccccctagacctagagctgcaaatcctaacaccgagtcggcgacgacgacaaccgccgccacttcagcggacagagcggccaccatgggcgcggcagcgtggtggcggcgcgccctggggcagcggttcaacccagccggtgtggccgcggtggcggccgtcgcggcgtccaagccgcgcctggcgctgccgcacgtgtcggtgcaagacatcaggtggctcgactgggctgagctccgccgcgccgggttccgcggcgtcgttttcgacaaggacaacacgctcacggccccctacgcgcccgcgctctggccgccgctcgctgcagcatttgaccagtgccgtgcgacgttcccgcccggtgcgctcgccatctacagcaactccgcaggtctgccgggtttgactgctcctagcaatcgaattggggcgtttttttttgccaggttctgggtgataatcgaattgttttttctgtgggtgtggaagggttgacggagtatgatccggacggggtggatgcgagggcgatcgaagctgtcatcgagggggttcatgtgatcaggcatgatataaagaaaccaggtggactagctactgaaatagagagttactttggttgttcagcctcaaatcttgtgttggttggtgaccgttacttcactgatgtggtctatggaaacaagaatggctttcttacagtcctgacagagcctttaaacatcactgatgaatcatacattgtcaaaagggttaggaaactggaggcgtacatcatcagttattggtacaagaaagggcacaaaccaatagagcatcctttgctcccagatgcaagaagaatagtgaagtttgacccatatgacgactcagtttcaaccagaatataatgtaatgatgtatcttgcacctgctcatcagagagtgagatctactgtttgtagcttagggtgtgtttgtttccttctaaattatataaactggattatggtggaagggtaagaccgtaagagagtaaaatattacattgtgacaacaaataagctgaaataaactaatattggatagcttattttagcttatttgtaatcccaaagtggtaccataatccaatttatataaacatacagggcctcagcagaagattacaagggataaacatatggtgtgtagatttgctgtctctctctttcactctcgcagaatgcaatttttcaggg

SEQ ID NO: 112680 - DNA, 2060 bp, Zea Mays
ctgatcaaatctttaaattttaccataaaatttagagctcattaacacccatgtggctggttgacgagacaaacggggatctggatctaccggagaagagaaaaataaaaggagaggaaaaaaataaaaaataaagtaaatatgggccccacctgtcataatatgcattgggaatgagatattggtaatctgctgcagtatgttggccaataatcccgtcctgtttccggcggtataaaacgaaaatacggtacaggactggccattcctatcaatacttccacacggcacaactatcggcggcggcaacgagccaggaccctgttgtgatgctaccgtcgccgccggtgctactacgcccttgcgctgcccgggcctccccgcttccgccccctagacctagagctgcaaatcctaacaccgagtcggcgacgacgacaaccgccgccacttcagcggacagagcggccaccatgggcgcggcagcgtggtggcggcgcgccctggggcagcggttcaacccagccggtgtggccgcggtggcggccgtcgcggcgtccaagccgcgcctggcgctgccgcacgtgtcggtgcaagacatcaggtggctcgactgggctgagctccgccgcgccgggttccgcggcgtcgttttcgacaaggacaacacgctcacggccccctacgcgcccgcgctctggccgccgctcgctgcagcatttgaccagtgccgtgcgacgttcccgcccggtgcgctcgccatctacagcaactccgcagggttgacggagtatgatccggacggggtggatgcgagggcgatcgaagctgtcatcgagggggttcatgtgatcaggcatggcaagtgcagaatcgctacctgtctatcgtgtttgtcctttgaaatttacctgatagcccaaagaagctctgttcgatgaattagtgctcagtttcataatcttacttcaaattggtggttcttagctttgtacacttgtaaattgacttgttcttggtaatttcaaaagttattgggtctaatgcctaacttttaaggaaactcagtggatggatcattggagctaacttgtttcctcgatggtccatttgcattgtgcagtactgcagtaccattttagttttagttattgtttcattaatataagttgtgtaccaaatacgcctcatgatattttcaaatgtgtacggtgtacctgtacctgtgtccgtctcttataatttgacttttctatataagggggagctctaaatcatcattttcatgtttaagatataatgtttgcgtttctgttctattgattgcagatataaagaaaccaggtggactagctactgaaatagagagttactttggttgttcagcctcaaatcttgtgttggtaggaggatagttgtgagctgtgactattcttactataaatgcgttgtggttcattaactttaggttgtcacctccccaggttggtgaccgttacttcactgatgtggtctatggaaacaagaatggctttcttacagtcctgacagagcctttaaacatcactgatgaatcatacattgtcaaaagggttaggaaactggaggcgtacatcatcagttattggtacaagaaagggcacaaaccaatagagcatcctttgctcccagatgcaagaagaatagtgaagtttgacccatatgacgactcagtttcaaccagaatataatgtaatgatgtatcttgcacctgctcatcagagagtgagatctactgtttgtagcttagggtgtgtttgtttccttctaaattatataaactggattatggtggaagggtaagaccgtaagagagtaaaatattacattgtgacaacaaataagctgaaataaactaatattggatagcttattttagcttatttgtaatcccaaagtggtaccataatccaatttatataaacatacagggcctcagcagaagattacaagggataaacatatggtgtgtagatttgctgtctctctctttcactctcgcagaatgcaatttttcaggg

SEQ ID NO: 112681 - DNA, 1511 bp, Zea Mays
ctgatcaaatctttaaattttaccataaaatttagagctcattaacacccatgtggctggttgacgagacaaacggggatctggatctaccggagaagagaaaaataaaaggagaggaaaaaaataaaaaataaagtaaatatgggccccacctgtcataatatgcattgggaatgagatattggtaatctgctgcagtatgttggccaataatcccgtcctgtttccggcggtataaaacgaaaatacggtacaggactggccattcctatcaatacttccacacggcacaactatcggcggcggcaacgagccaggaccctgttgtgatgctaccgtcgccgccggtgctactacgcccttgcgctgcccgggcctccccgcttccgccccctagacctagagctgcaaatcctaacaccgagtcggcgacgacgacaaccgccgccacttcagcggacagagcggccaccatgggcgcggcagcgtggtggcggcgcgccctggggcagcggttcaacccagccggtgtggccgcggtggcggccgtcgcggcgtccaagccgcgcctggcgctgccgcacgtgtcggtgcaagacatcaggtggctcgactgggctgagctccgccgcgccgggttccgcggcgtcgttttcgacaaggacaacacgctcacggccccctacgcgcccgcgctctggccgccgctcgctgcagcatttgaccagtgccgtgcgacgttcccgcccggtgcgctcgccatctacagcaactccgcagggttgacggagtatgatccggacggggtggatgcgagggcgatcgaagctgtcatcgagggggttcatgtgatcaggcatgatataaagaaaccaggtggactagctactgaaatagagagttactttggttgttcagcctcaaatcttgtgttggttggtgaccgttacttcactgatgtggtctatggaaacaagaatggctttcttacagtcctgacagagcctttaaacatcactgatgaatcatacattgtcaaaagggttaggaaactggaggcgtacatcatcagttattggtacaagaaagggcacaaaccaatagagcatcctttgctcccagatgcaagaagaatagtgaagtttgacccatatgacgactcagtttcaaccagaatataatgtaatgatgtatcttgcacctgctcatcagagagtgagatctactgtttgtagcttagggtgtgtttgtttccttctaaattatataaactggattatggtggaagggtaagaccgtaagagagtaaaatattacattgtgacaacaaataagctgaaataaactaatattggatagcttattttagcttatttgtaatcccaaagtggtaccataatccaatttatataaacatacagggcctcagcagaagattacaagggataaacatatggtgtgtagatttgctgtctctctctttcactctcgcagaatgcaatttttcaggg

SEQ ID NO: 112682 - DNA, 186 bp, Zea Mays
atgaccattttctactccacttccaccgttggtgccgccgccgccgctgccgctggaaacaggcgtcggcgacggtgtctgccccgctggagcaggggacggggggacctcaccagggcaaggccccaagggtccgccgcacaagcccgtccccaggaacgcggagcgcggttgcgaccgaagtga

SEQ ID NO: 112683 - DNA, 911 bp, Zea Mays
gcaagcagacatacgctccattttataaccaaccggcggtccatctgaggaggaccaagaaacatagagagagcggttctacgtccgagtcgtcgcatcaggtcccctcgattcgccggcggcgccaccaaccaagctcatacatctgaattgactagtcaaactcagtgatctctttggggactaatcaaactcaagaactaagtttcatgtctgatctcgacgtccagcttccatctgcttttgatccgtttgcagaggcaaatgctgaggactccagtgctggtgctggatcaaaggactatgtgcacgtgcgtattcagcagcgcaacggaaggaagagtctgacaactgttcagggcttgaagaaagagtacagctacaacaagatcctcaaggatctcaaaaaagagttctgctgcaatggtactgtagtccaggatccagagctaggccaggtcattcaactgcaaggtgatcagcgtaaaaatgtcgctacttttctagtccaggccggaatcgtgaaaaaagatagcatcaagattcacggattttagactgcaaattttgagtgcttgtgtgtgcctatcatatggtaccatatgataccaggtattgaagcttcggaagcttgttggccttcgtaacatcagtagtcgttattcatctgaatatgtgtcattatttgatttgataagactggtattgatgcaagttgtccttgcagtatgttttgtaagtgttacctgcatgaaagtatcgtttgtctggggaactgtctactactgatattgaataacaagagagattgctgttcgtgttcgtctatgaattattatgatctttccccagacttgagctttccaatccgtgttcttttatgatcactttgcttctcatgtgctttctga

SEQ ID NO: 112684 - DNA, 809 bp, Zea Mays
gaggacctgatgttgggctcctccgtttcttgattgatctgtggtcaatcgaattgtgcgtcgtaatctcgccccaaatcgagcagattttggggttgtttcgaggaacttgtgcgttggtttgttaaggtgggagaatatttgctccgatggtggcgtcggggagggtgccgatgggttggcggtcctggcggttcgattttaaccccacatccacacggcctgattggctgattttgaggaacctccccccaaacaccaccaccaggctcatacatctgaattgactagtcaaactcagtgatctctttggggactaatcaaactcaagaactaagtttcatgtctgatctcgacgtccagcttccatctgcttttgatccgtttgcagaggcaaatgctgaggactccagtgctggtgctggatcaaaggactatgtgcacgtgcgtattcagcagcgcaacggaaggaagagtctgacaactgttcagggcttgaagaaagagtacagctacaacaagatcctcaaggatctcaaaaaagagttctgctgcaatggtactgtagtccaggatccagagctaggccaggtcattcaactgcaaggtgatcagcgtaaaaatgtcgctacttttctagtccaggccggaatcgtgaaaaaagatagcatcaagattcacggattttagactgcaaattttgagtgcttgtgtgtgcctatcatatggtaccatatgataccagtatgttttgtaagtgttacctgcatgaaagtatcgtttgtctggggaactgtctactactgata

SEQ ID NO: 112685 - DNA, 953 bp, Zea Mays
cacgacttgaccttataagcatgaaatcgttcttcatggatggacaaacattagcatttttctctaagtatgagcaaaaacaccaagtcgccaacactgcacacacaatgaaggtttcgccaccattggaaagctacaatgctagtttaaccgaagtagtgagcttcgataagagaagcagcgcaggtgtgcccggcacagtcaatcaccaacagttcgataccgacaattctccaaaactacatgaaatgatgaactatgtgccaaaagtgtccgtcgtgccagccaccgacacggcgacagctcagctacgctaccaaggcagcgccatctacaaccctagaacaaaacaatcaaggcacacaagcacatcactggcagagatcccgcggcaagctcacctgctgagccctccgtggcgccgtcccaggccccggcggccgcggcggtggctgcattcgccacagcgccgcggcgatctccctcaccgacagggcagcgcccgctcccggacgggaggtagagcgagcgcccgcttccaggggccaccgaaccggcggcgtctccggagggggctgtggcagctgcatcggcggggcggacgcggaccccccgcggacggccgcgagagaggggctctggacgcggacccggcgggcgcggcggcgggaggcggacccgggccgcgggggagtggctgccggccgcggctcggggctggccggaggcggcgggcggctggcgcggcggcggctgccggggcgcgccatggacgaacgtggtcagctcggggagtgggagggactgggatgggatgggtagccgaggtggtggtcgcggggggcagtggcacttgtcgtgtgcagcgcgggtgtggggtggggtggggtggggtgggggtgagatctgggtatgggtatccgacgccgcgacactgcgagtactgcctgtga

SEQ ID NO: 112686 - DNA, 366 bp, Zea Mays
atgggcaactgcgccgtcacgcagcacgcggtgacgtcgtgggcggacgacggcgagtgggacgtgccctcggcggcggcggcggcggccgacgaggagggcgccggaggagcggttgccgccgccgggacaagcgggaggaaggaccacgcggcgggggcggcggaggtgacgatcaggatcacgaggaagcagctgcagcagctgatggagaagagggccggcgggctccacggcctcaagaggcggcgggccgccgcgcagctgctggcggacgtcatggacgccgggcaggtcttccaccactgcagagcggcgcactggaagcccgcgctgcagagcatcccggaggccgtggagtcgtga

SEQ ID NO: 112687 - DNA, 312 bp, Zea Mays
atggggaactgcctcaggctgcggcgcgcggcgacgtgggcggacggcgacgagtgggaggaggaggcggagccctgcagcaaggccaaggcggcgcccgcagccgtcgaggacaaggtggaggtcaagatccgggtgactcggcggcagctgcaggagctgcttgagaaggccagccggcggcaggtggaggaggtgctggcggagctgatgacttccggcacggtgtactacccgcgccagcgcgatgagattcggcggcactggaggcccgccctctacagcataccggagggcgtcgaggagtcgtga

SEQ ID NO: 112688 - DNA, 390 bp, Zea Mays
atgggcaactgcacggcgtcgcagcgcgcagcggagtcgtgggccgacgacggcgagtgggaggaggcggcgtcatcgtcgccgttgtcgtcggagggcgaccaccaccaccatcatcatcaccgcgacgagaggagagaggatcaccacgactccgaggtgaccatcaggatcaccaagaggcagctgcacgagctgattgagaagaacggcggcggccacgggttaccgctaccggggtccgggaggcgccggcggtcgtccgcggagcagctgctggccgacatcatggactccggcgaggtgcaccaccgcgaccaccacagggaggaccactggcactggaagcccgcgctgcagagcatccccgagaccgtcgagtcatcatga

SEQ ID NO: 112689 - DNA, 1281 bp, Zea Mays
atggcgaggtctcgtcgtcttggggacttgggacaggtcccgagcatggcctccaaagaattcctcctcgccttccttgttatcatcctccatggcgcagccgcaacgaccacggtccatgccgcaaacatcatcgaccggtgctggcgccggcagcccaactgggcggccaaccggcagcggctcgccgcgtgctcggtgggcttcgccgggaagatgcggcagaaccgcgggcccggggtcaccgcgtacacggtgaccgaccccggcgacgacccggtgcgcccgcggccgggcacgctgcggtacggcgcgacggtgctgggcgggaaggtctggatcaccttcgagaggggcatgcacatcaggctggcccagccgctgttcgtgaggagcttcacggccatcgacgggcgcggcgccgacgtgcacatcgccggcggcgcgggcatcgtgctgcacgaggtgagcggcgtcatcatccacgggctgcacatccacgacatccgctcgcagccggagggcccggcggtcaggcccggcggcgccgtgcggcctgctggcggtggcggtggcagcggcagcggcacggacggcgacgccatccgggtggtggcgagcagcaaggtgtggatcgaccacaactcgctgtcgcggtgcgaggacgggctggtggacgtgacggtcggctccaacgacgtgaccgtctcgaacaactggttcttcaaccacgacaaggtcatgctgctcggccacgacgacggccacgccgccgacagccggatgcgcgtcaccgtcgcgttcaaccggttcggacccaacgtcaaccagcgcatgccgaggattaggcacggctacgctcacgtcgtgaacaatgtgtacttgggatggagagattacgccatcggaggaagcatgggaccgagcgtcaagagcgagggcaacctgttcgtggcctccggcacagcggagaacaggaaggtgacgagaaggatgccgttcgccgggagggattgggattgggcctccgtcggggactccttcgagaacggcgctttcttcaagcagacgggcagcagggtgcagccgaattacaacaagcaccaggccttcgcggcggccagctccaaccaagtgaggtcgctgaccaaggacgccggcgctctcagctgctcggtcggtgttagaggagcacggtggctgtggcggagcgctgtttacttcggcctcgtaggggccctggcagggggcgccgctgcggccatagcgggcactctgtag

SEQ ID NO: 112690 - DNA, 920 bp, Zea Mays
acatgcaaaagttataggagggtcaaaatttaaaagtaggacagcctagcgttccaattccaaggtccaagcctccaaggctgctcccagcaactcgtttctttcttcgagagagggcaaaaaccggcaaggggagcgaagcggagagtctcgagagcaagggagcgcggtgacgtcatcgttttccaaggtttctcgatcggctgctatggcgaccagggcggcgtcgagattcctgcagcgcaggctcctgtcttccggcggcaaggtcctcagcgaggaggagaaggccgcggagaaagtgtacatcaagaaaatggaacaagagaagctggagaagctcgcacgcaagggccccagctcaggagagcaaccttcgtcgactacagtctctgcagcaagtgatgtgaagactggggctgggccaacagagtcagcgtctgcaaacgtgtctaccgacaagaacaggaactacgctgtcctggcaggcacaattgctgctctgagtggcctgggttggtatctattgtcaaagcctaagaagtcggaggaggttgtggactgaagagggggttacgaatgcgagctgtggatggttggccttatatttcaccatggtttactttctgcgcacaccttctggaaataattgttgaaacatacgctgcagtctgcattacttgttctgaggcctgttgcaacaccgaacattgaagtctgtactcgagacgttccgtagttctctccctcgcttgacaggttgcaaatgttgagtgatgcttgtcctacgtcgttgctggagaagtggagaggtttttttggtactgatgttttgaatgtaaactcgttgccactggccagcacacatgacgaagagcattctgtgataatgagaatgtgttacacgcgttcccagtccc

SEQ ID NO: 112691 - DNA, 665 bp, Zea Mays
gtggtggtgcagacatgtccttagtgacatcaggatagcattctgcacccatgatccaaaaatggaacaagagaagctggagaagctcgcacgcaagggccccagctcaggagagcaaccttcgtcgactacagtctctgcagcaagtgatgtgaagactggggctgggccaacagagtcagcgtctgcaaacgtgtctaccgacaagaacaggaactacgctgtcctggcaggcacaattgctgctctgagtggcctgggttggtatctattgtcaaagcctaagaagtcggaggaggttgtggactgaagagggggttacgaatgcgagctgtggatggttggccttatatttcaccatggtttactttctgcgcacaccttctggaaataattgttgaaacatacgctgcagtctgcattacttgttctgaggcctgttgcaacaccgaacattgaagtctgtactcgagacgttccgtagttctctccctcgcttgacaggttgcaaatgttgagtgatgcttgtcctacgtcgttgctggagaagtggagaggtttttttggtactgatgttttgaatgtaaactcgttgccactggccagcacacatgacgaagagcattctgtgataatgagaatgtgttacacgcgttcccagtccc

SEQ ID NO: 112692 - DNA, 240 bp, Zea Mays
atgcccgcgcctgctctgccttctccactgtgtctcgcactcgtgacgctgcccctccccaacctgctccgccccgtccgcgtggacgtcgtccctcgtcgtccttgcctcgccgattccctgctccatcccaccgggcgtccctggggtccgcacccaagacgcctccccgttgtcctcacttcctctctccaacgcctgttgcctatctcactccacggcatggatctggaattgtga

SEQ ID NO: 112693 - DNA, 1794 bp, Zea Mays
atggcatccatgtcgcatttaattgctaagccagctccagctgccacctttcctctatcccttccgagaacgagctccggcttcaggcctcgccgcgttaccgtccagcgcgtatcgtgcgcatctcccagaggcgaacgctacgagctagacgcccgaaagcacgaccgccgcgacgtcctcctcggcctcggagcgctcggtgccagtgccaccgctaccctggcgtccgcgcgccgcgccggcgccgaccccgtcgccacgcccgacatctcttcctgcggccaagcgaaccttccggtgagcgccaacgtgctgacgtgctgcccgccgccctcgagcgcgctgcccgtggacttcatcctccccgacgccacgtccttgccgctccggacgcgccccgccgcgcactcggtcaccacggactacgtcgccaagttcaacgccgggatcgctgcgatgaaggcgctcccggcggacgacccgcgcagcttcgcggcgcaggcgagcgtgcactgcgcctactgcgacgggtcgtacagccccgaggggttccccggtgtggagctccaggtgcacaactcgtggctctttttccccttccaccgctgctacctatacttcttcgagcgcatcctgggcagcctgatcggcgaccccggcttcgccgtaccgttctggaactgggacgcgccggacgggatgcgcatgccggccatgtacgcggaccggtcatcccagctgttcgatccgcggcgtgacagccggcacgcgccgccgaagctcatcaatctcgactacaacgccaacgttagggagccgaggttcacttacaaacaacaggttgatcacaacctcagggtcatgtaccgtcagatggtatcgctgagcccgacgccgtcgctcttcttcggcagcgcgtaccgcgccggcgacgacccgaaccaagggccagggccggtggagagcatcccgcatggcccggtgcacatctggtgcggcgacccgaaccagccggacggcgaggacatgggcaacttctactcggccgggttcgacccgctcttctacgcgcaccacgccaacatcgaccgcatgtggtccgtctggaaggggctcgacgtccggcgccacacggacctcaccgacccggactggctagacgcctccttcctcttgtacgacgagacccccaagctggtgcgcatccgcgtgcgcgacgtgctcgacaccgacaggctgcggtaccggtaccaggacgtacccctgcactggacggccgccaggccaaccgtgaccgccgggacgcggagagcggactcgttcctcgcgcccgcggcgcaggccgctcccgccgccgctaggaaggcgggcgagttccccatcacgctggacgaggcgacgatcgtgacggtgaagaggccggtcgcggggaagaggagcaaggcggagaaggactccaaggaggaggttctcgtcatcgacggcatcgaggtggacagggacgtggccgccaagttcgacgtgttcgtgaacaccgaggaccacggcgcggtgggatcgggcgggcgggagctcgcggggagcttcgtgaacgtgccgcaccggcacgggcacgggcacgggcacgccaagaaggggagagggatcaagaccaagctgcggctcgcgttgaacgagcagctcgaggacctcgaggccgaaggcgacgagagcgtggtggtgaccctcgtgccgcggcaaggcaagggtagggtgaagatcggaggcgtcaagattgagctgatgcattga

SEQ ID NO: 112694 - DNA, 1636 bp, Zea Mays
ccaaactcctacccccgcctcaagaatctctcttcgctccgagcgccggggccgatacggccatacccactgcaatgctccgcgttccacggccatggccttcctcaagaccctaaaccctctaatacgcaggcaggccaccccgatcgctatccccaggctgctcctctccctccacactgtcctcgattcatcctcccccaccactaccgccgccgccaccccgtttgccaacgctgtgcacacccatgtccccatccggtccggcggtccgctgttcctctcgtcggccccatggatgctgtcgcagtcggcgacaccgctcacggccgcggctgccgcccttggcgccaagctccacagggcccaggccctccccggcggccgcgcgctggccgtcgcggccgcagtggggtgggagcacatgcggatctccaggggtgaagcggaggttgcgacgtcttcgggaattgtgggatatggaggtgagaggtttctgaatgcgcccaatttagtgtcgattggacggatggtgtcagggccggtcattggatggatgatcgtgaatgaatggtatcttcctgcctttgccacattggctatctcgggtgcaagtgattggttggatggctttttagctagaaagatgggcatcaattctgtatttggatcatatttggaccctctggctgacaaggttttgattggctgtgttgctgtagccatggttgaaaaagaccttttacatcctggtcttgttggcctcgttgtcgtaagagacttgctccttgtgggtggtgctttctacaagcgggcttctagtctgggatggaagtggaatagttggtcagaatttgttaacctagatgttattcatcgtgaaaaggttgaacctctgttcatcagcaaggtaaacacagtcttccaattaatgttggttgccgctgcacttcttcagccagaatttggcacagaggagactcagaattatattgcacttctgagttggcttgtggctactacgacaatcacttccacaataggttatggtgtgaagcactaccgaatcaaaccaaggagtcggtgactgttgctgcaggctattcatggattaatttgctgctgctgatgacatacatcaagtgacttactgacttgtatcaagcatgctgttgtttcttaagcttcgtcaacttcccaatttgcagctgcacaactataggtcttgttgcccccctttgtcctcatggatttccttaacggcaaaattttgggcaatattggagaaaggagtgaagaacggtctcatgaattgaatgtaatcggtgcatgatttgtgcggtaggcctctggccgtcctcctgtagctgttaagtcgtggtgactacttttgcctagttttggcctaaagtgtccatcaatttgtcagagatcaaactagccgaacctttgccttttgctttgtccagacacattagctatattgcaggtgtacatatgtacttcagaatacttgaacttggcaaatggcgatcgctaggtgatatcacgcttccagatgtctgcaggttaaatgcatttacaactatgttcatgcatcaatgcaactgtttagcagggcttttttatgagaaaa

SEQ ID NO: 112695 - DNA, 1221 bp, Zea Mays
ggcccacttgccatatatatctgcgaagaaaaaccctacgtgtcacaagcctccgcctcttctcccgtttgcgacgactgggtgggctacgccgccgccgccgccgctgccgctgctctacggtgctgagtcctttgccgatttcttcccggcgaagagcgccaccagccttttgcataaatcatcgggtatacatccatcttcatttagtagatccgcccctgctgaaaacgcactcgatggcgtccgcgacggggggttcctcctcggagatggcggtggaccacgcgacggggctgggcaccgtggagaagccgcggtttgatgctctgatgccgagtgagatgagcggcgggaggacccagttccggaaagtgaccgtgccgcagcaccggttcgcgccgctcaagcgatgctggatggaaatctacacacccgtttacgagcacatgaagatcgacatacgcatgaatctcaaggcgaggagggtggagctaaagacaaggcaagacacaccagatgtcagcaaccttcagaaatgtgctgactttgtgcatgcttttatgctcgggttcgacattgctgatgccgtcgccttgctgcgtcttgatgatctgtatgtggattcctttgagatcaaggacgtgaagaccttgcgaggggagcatctgtcgcgcgctattggccgcttatcagggaaaggaggcaagaccaagtacgccattgagaactcaaccaggacccgcattgtcatcgctgatacaaagatccacatacttggatccttcgttaacatcaaggtcgcacgggattcactttgcagtctcatcttgggttctcctgctggcaaagtgtattctaaactaagggctgtatcagctaggttggcggaaaggtattaaattaaatggggtttgcccgcaccgtataagggcatgttcggttcccgctcaattcatatggattggaggggtttgagtgggattaattccatatcaagtcaaaatccttcataatttttttcaatgctttccaatcccatgaggtataggaataactgaacaaggcctaattgttgcagttttggtcacattcacacagtgtgttatagtagcagtttgtgtgctcgggacactggggaagtttaatgtatccttaccttatgaatagcggactatgatgaagggagatttaaattgatatgtattctgtgtttgctct

SEQ ID NO: 112696 - DNA, 1179 bp, Zea Mays
ggcccacttgccatatatatctgcgaagaaaaaccctacgtgtcacaagcctccgcctcttctcccgtttgcgacgactgggtgggctacgccgccgccgccgccgctgccgctgctctacggtgctgagtcctttgccgatttcttcccggcgaagagcgccaccagtagatccgcccctgctgaaaacgcactcgatggcgtccgcgacggggggttcctcctcggagatggcggtggaccacgcgacggggctgggcaccgtggagaagccgcggtttgatgctctgatgccgagtgagatgagcggcgggaggacccagttccggaaagtgaccgtgccgcagcaccggttcgcgccgctcaagcgatgctggatggaaatctacacacccgtttacgagcacatgaagatcgacatacgcatgaatctcaaggcgaggagggtggagctaaagacaaggcaagacacaccagatgtcagcaaccttcagaaatgtgctgactttgtgcatgcttttatgctcgggttcgacattgctgatgccgtcgccttgctgcgtcttgatgatctgtatgtggattcctttgagatcaaggacgtgaagaccttgcgaggggagcatctgtcgcgcgctattggccgcttatcagggaaaggaggcaagaccaagtacgccattgagaactcaaccaggacccgcattgtcatcgctgatacaaagatccacatacttggatccttcgttaacatcaaggtcgcacgggattcactttgcagtctcatcttgggttctcctgctggcaaagtgtattctaaactaagggctgtatcagctaggttggcggaaaggtattaaattaaatggggtttgcccgcaccgtataagggcatgttcggttcccgctcaattcatatggattggaggggtttgagtgggattaattccatatcaagtcaaaatccttcataatttttttcaatgctttccaatcccatgaggtataggaataactgaacaaggcctaattgttgcagttttggtcacattcacacagtgtgttatagtagcagtttgtgtgctcgggacactggggaagtttaatgtatccttaccttatgaatagcggactatgatgaagggagatttaaattgatatgtattctgtgtttgctct

SEQ ID NO: 112697 - DNA, 1176 bp, Zea Mays
ggcccacttgccatatatatctgcgaagaaaaaccctacgtgtcacaagcctccgcctcttctcccgtttgcgacgactgggtgggctacgccgccgccgccgccgctgccgctgctctacggtgctgagtcctttgccgatttcttcccggcgaagagcgccaccagatccgcccctgctgaaaacgcactcgatggcgtccgcgacggggggttcctcctcggagatggcggtggaccacgcgacggggctgggcaccgtggagaagccgcggtttgatgctctgatgccgagtgagatgagcggcgggaggacccagttccggaaagtgaccgtgccgcagcaccggttcgcgccgctcaagcgatgctggatggaaatctacacacccgtttacgagcacatgaagatcgacatacgcatgaatctcaaggcgaggagggtggagctaaagacaaggcaagacacaccagatgtcagcaaccttcagaaatgtgctgactttgtgcatgcttttatgctcgggttcgacattgctgatgccgtcgccttgctgcgtcttgatgatctgtatgtggattcctttgagatcaaggacgtgaagaccttgcgaggggagcatctgtcgcgcgctattggccgcttatcagggaaaggaggcaagaccaagtacgccattgagaactcaaccaggacccgcattgtcatcgctgatacaaagatccacatacttggatccttcgttaacatcaaggtcgcacgggattcactttgcagtctcatcttgggttctcctgctggcaaagtgtattctaaactaagggctgtatcagctaggttggcggaaaggtattaaattaaatggggtttgcccgcaccgtataagggcatgttcggttcccgctcaattcatatggattggaggggtttgagtgggattaattccatatcaagtcaaaatccttcataatttttttcaatgctttccaatcccatgaggtataggaataactgaacaaggcctaattgttgcagttttggtcacattcacacagtgtgttatagtagcagtttgtgtgctcgggacactggggaagtttaatgtatccttaccttatgaatagcggactatgatgaagggagatttaaattgatatgtattctgtgtttgctct

SEQ ID NO: 112698 - DNA, 1930 bp, Zea Mays
aagcctccgcctcttctcccgtttgcgacgactgggtgggctacgccgccgccgccgccgctgccgctgctctacggtgctgagtcctttgccgatttcttcccggcgaagagcgccaccaggtattcccaattccttctcatccctgtttgctccaatttctaacccgattacccaagctctaacctcaaactattgcctgtattgtaacttgtagccttttgcataaatcatcgggtatacatccatcttcatttagtagatccgcccctgctgaaaacgcactcgatggcgtccgcgacggggggttcctcctcggagatggcggtggaccacgcgacggggctgggcaccgtggagaagccgcggtttgatgctctgatgccgagtgagatgagcggcgggaggacccagttccggaaagtgaccgtgccgcagcaccggttcgcgccgctcaagcgatgctggatggaaatctacacacccgtttacgagcacatgaagatcgacatacgcatgaatctcaaggtaaggagatagcccagtgtcaatttattctcgtgaacgcggcgcgctttgttctgtatgagcttggttggcgttgcttcggcgttctcgtttctgaatcgtatagatggtttcagattcagcacagttatgtttagacattatatgtattcgtattccattctcatggctacatttgaatctcaaaatcttcgatgtctgcattagactgacagcacgtattcgaggcagagttatcctattgttttgtttgttggatgaagttttatgaatattttgttgaagactgacagctaggaattctacaagaattctgatcatagtattgtagctgctaagcaagtaatgcacaatcgaatatattggcccctcgtctagtttaagctcatactagtcacctcagtaaaataactacatgtgatgagtgttctgtacatgcatatcttgcctgagccattgctaaactaaaccacaatattatagttgtttctgttttgataattgcttaggactcaactggtttgtccttgtcagtttagactgttggctcagaacttaatgtatggctgtctgctattattttctacttaaatactcttatgttgtaagcctattactgaatgctcaaggtgtagtatgcatcatatctgttgggcccattaaaccgttttctctgttccaggcgaggagggtggagctaaagacaaggcaagacacaccagatgtcagcaaccttcagaaatgtgctgactttgtgcatgcttttatgctcgggttcgacattgctgatgccgtcgccttgctgcgtcttgatgatctgtatgtggattcctttgagatcaaggacgtgaagaccttgcgaggggagcatctgtcgcgcgctattggccgcttatcagggaaaggaggcaagaccaagtacgccattgagaactcaaccaggacccgcattgtcatcgctgatacaaagatccacatacttggatccttcgttaacatcaaggtcgcacgggattcactttgcagtctcatcttgggttctcctgctggcaaagtgtattctaaactaagggctgtatcagctaggttggcggaaaggtattaaattaaatggggtttgcccgcaccgtataagggcatgttcggttcccgctcaattcatatggattggaggggtttgagtgggattaattccatatcaagtcaaaatccttcataatttttttcaatgctttccaatcccatgaggtataggaataactgaacaaggcctaattgttgcagttttggtcacattcacacagtgtgttatagtagcagtttgtgtgctcgggacactggggaagtttaatgtatccttaccttatgaatagcggactatgatgaagggagatttaaattg

SEQ ID NO: 112699 - DNA, 2435 bp, Zea Mays
ttcctaggcaaacggtcgaacacctcagcggcaaggctcggcgccaccacccatgcgcgctctacttcacctccggcgctggcaatctctacctctgatcgcgaggacctcctccacaatcactttctcatcctcctcctcttccgagcctcacgaaatccccaccatctactccttcctccagccatctatcttcgcgccgcgccccaggtcccaaccgccacagccgccgcccccgcccccgcccggagcccatgatcccgcccgcaggaagacgctccccgtcgctgacgccgccgcgctggagtccgacctcctcgccgccgtctccgagggccgctcggacgacgcgtggctcgcgttcaagtccctggccgcggcatcctgctcgccctcgccccacgccgcggcggcgctcgtatcccacctcgccgccgccgctggacagcaccgtctcggcctcaaacgtgccttcgccgcggccgtcttcctgctggagaagagcccgcacgcggcgcccgttccggagccagcactcgaggcgctcttctccgcgttcgtcgcggcggggtccgccgccccggcggtggcgcttgcgcgcgcgatgctccgctgcgggcgccgcctcccggcgttctccgtctgggggcacccgcttatcgagctcacccgcaccgatcctggcgccttcgcggccttcctgacgttgttcgacgaggcctgcaagctcgtggtggaggagaaatcccctgctgaagcggcggcgatgcgccctgaccgcgctgcgtgcaattctgtcctttctggttgctgccgcgggctaggttcgctggcagatgcagagcgggtgctggagactatgtcggcggttggtgtctcgccagatgtagagagctttgggtgcctcgccttcctgtatgcttggagaggtgttcccagtcgggttgatgaactggatacattgtttgatgctctgggcttcagcaagaaggggtttttcaagaacctggttagtgggtacctcaaatctggtgacttcgagtcggtttcaccaatcattcttcgtgcagtgaaggaccgcagagttggggatgacaatggacttgatgaggaaacctatactgaggttgctcagtgctttgtggatcgtgcgaggattagggaactagctcagttgatcatccaagctcatgagattgagctcgctcaacaatctatatcagttgaggattctgttgggtttggaattgtgaatgcttgtgttgagctcggcctattgaacaaagctcatagcatactcgatgaaatgacagctcaaggagcctctgtagggcttggtgtgtactcgtcaatcttgaaagcctattgcaaggagcaaaagactgcagaagctgcacaacttgtggcagagattagtgcagccgggctacagcttgatgctggtagttatgatgctcttattgatgcttccatgacagcccacgatttccagtctgcatttgctcttttcaaggacatgagggaggcaaggctaccagaacttaggacaagttatcttactataatgacaggcttaacagaaaacaacaagcctggcctcatggcttccttcttggactcggtggttgatgacccgagaatagagattgctacacacgattggaattcaataatacatgctttctgcaaggtcgggaggttagatgatgctagaaggacataccgaaggatggtattccttagatttgaaccaaataatcagacatacctctcactcatcaacggttatgtctcaactgagaaatactttagtgtgctcatactgtggacagaagtaaggaggagggggattgaattcaaccatgagttgattgatgcctttctttatgctttggtaaaaggagggttctttgatatggcgatgcaggtgattgaaaaggcgcaagagttcaaaatatttatcgataaatggaggtacaagcaagcattcatggaaacacacaaaaaactgaaagtggcaaagctaagaaagcggaacttcaggaaaatggaagccctagtggctttcagaaattgggctggtatcaacacataacatcgcaaccttgattttatcaacctgtcatgtgtcatgactgaatttatgatcttcagaaagctgtagcaagcgctatggatctttagagatggttaaagtaaagcagctgtttggctgtggtaaatttgcattttgcaacaaggttagataaaaattggctcgcttgtgttctctatgttatttataggactggatgtttactttgtactttatagctatactgacctgtctaggcactggtttgcagtaggaccccattcaaacttcagaccatgtgtagtactggaatgatcaatgacaagtttctcttgaaataccttgcatggagtgcattttt

SEQ ID NO: 112700 - DNA, 3582 bp, Zea Mays
aaaccgcgcacagggtaatcgtagagtcccaaggtctagtcagcgcggccatctatcctccacctctccacatttgcagtgtgagttttcttgattcccttcatccttttgttgcttcgtcactaaggacgctacaccagttcatcactcgctacttgtccactagtccagtctcggatatctcagctcggacgcctaccgatctgtccgtttcctacagccgctccccaaaaattccaactgattcctccgcctcttccgagttccccagaatccccagtttgatgctgcctctggccccctgcccaccgattggatcttggtcgatttctccgttcttcagatcctgtgcgcatccgctctaggtagtggccctttgctcggctcccttcctcctccttcgcccatgctcggatctttcaatctgcgccggttttgagttcttgcccctgctagctgccggccgtcaaaggctagagctttaatttcctggcaaagattggggattcctgctcgcgaggatggaattcgtggcgtccattgtcgacacggtgttccggccgctcaaggactacttcgcgcggaccgtcggctacgtcatgtcctgcggcgactacatcgacgcgatgggcaacgagatgaacgagctcaagagcaagcgcgacgacgtcaagcgcatggtcgacgccgccgagcgccagggcatggaggccaccagccaggtcaagtggtggctagagtgcgtcgccctgctcgaggacgccgccgcgcggatcgtcgacgagtaccaggcgcgcctgcagctccctcccgaccagccccccggctacaaggccacctaccacctcagcaagaaggccgacgaggctcgcgaagaggccgcgggcctcaaggacaaggccgacttccacaaggtcgccgacgaactcgtccaggtccgcttcgaggagatgccgagcgcgccggtcctcggcagggacgcgctactccacgagctccacgcctgcgtccgggacggcgacgtgggcatcgttggcatctacggcatggcgggggtcggcaagaccgcgctgctcaacaagttcaacaacgacttcctcatcaactcccacgacgtcaatgtcgccatctacatcgaggtcggcaaggacttcgatctcaacgacatccagaggatcatcggcgaccggctcggcgtgtcatgggagaaccggacgctcaaggagcgcgccggtgtgctctacagagtgctcagcaagatgaacttcgtgctgctgctggacgacgtttgggagccactcaatttccggatgcttggcatcccggtgcccaagcacaactcccagagcaagatcgtcttgacgaccaggatcgaggatgtgtgcgaccgcatggacgtccgccgcaagctcaagatggagtgccttccctgggagccctcgtgggagctcttccgtgagaaggttggcgaccacctgatgagcgctagccctgagatccggcaccaagcgcaggcgctggccatgaagtgcggcgggctgcccctcgctatcatcactgttggccgggcgatggccagcaagcgcactgcaaaagagtggaagcacgccatcactgtgctaaagattgccccatggcagctccttggcatggagtttgatgttcttgagcctctcaagaagagttatgataacctgcccagtgacaagttaaggctctgcctgctatattgctcattgttcccagaggagttctctatttccaaggattggatcataggctactgcatcggtgaaggtttcatagacgacttgtatactgagatggatgaaatatacaacaaggggcatgaccttcttggtgatctcaagattgcctctttgctggagaaaggtgaagatgaggatcatatcaagatgcaccctatggttcgtgccatggctctgtggattgcatcagatttcggcaccaaggagaccaaatggcttgtccgtgctggagttgggctgaaggaggcaccaggcgcagagaaatggaacgatgctgagcggatttctttcatgcggaacaacattcttgagttgtatgagaggcctaactgccccttactgaagacattgatgctgcaaggaaatcctgggctggacaagatatgtgatggattcttccaatacatgccatctctcagagtgttagatctgtctcatacctctatcagcgaattgccttcagggatcagttcattggttgagttgcagtacctggatttgtataacacaaacatcaggtcacttccaagggagctaggatctctatcgactctgcggttcttgcttctctcgcatatgccgctggaaacgatcccaggtggtgttatatgcagcctcacaatgctgcaagttctgtacatggacctcagctatggagattggaaggttggtgcaagtgggaatggtgttgattttcaggagcttgagagcctgcgtaggctcaaggcgctggacatcacaatacaatctgttgaggctctggagcggctgtcacggtcatatcgcctcgctggttccacaagaaacctactgataaagacatgctcgagcctgacaaagatagagcttccttccagcaacctgtggaagaacatgactaacctgaagagggtgtggattgtcagctgcggcaacttagctgaggtaatcatcgatagcagcaaagaagctgtgaatagcaatgcgcttccccgttccatcttgcaagctcgggcggaacttgtcgacgaagagcagcctatccttccaaccctgcacgatatcatccttcagggactgtacaaggtaaagatcgtctacaaaggcgggtgtgtacagaatctagcatcactgttcatctggtattgccatgggctggaagagctgattactgttagtgaagaacaagacatggcggcaagcggtggcggaggacaaggttcggcagcgtttagagtcatcacacccttccccaacctcaaggaactgtacctccatggcttggcaaagttcaggaggctcagcagcagcacatgtacactgcacttccccgcgctggagagcctgaaagttatcgagtgcccgaatttgaagaagctgaaactctcagctgggggactcaacgtgatacaatgcaacagggaatggtgggatgggcttgagtgggatgatgaggaagtcaaagcttcttatgagccattgttccgcccattgcactgaactcagttttggttgctagagattcttctgttattttagaggttgctcttccccgtgcatgcagtagatcgcgtgaattcagagatggccagtctgcactctgcagtgggtgtgattgtttgtattgtccatcttgcaagtacaagttgggcgattctttcttttttacccagctcgtgttctatagaaagaccagtcagcatgtgtggcagccaggaaactggcagatgtaactgtcgaaatctcctgaacagaatggctggtggataccggtacaaccattttctctaattctccgtttctgctctctgtgagaaataagttgagggtgtca

SEQ ID NO: 112701 - DNA, 220 bp, Zea Mays
tctcatttggatttcccgcgcagcaacctctctctccctctcccacctctctctccccgtggtgccctagggtttggagtcgagatcaccggaatttggatccccggaggtgagtttttcccctccccttcccttctctctctccctccctctcccttcttcttcccctgcgcgcgcccctgctcccccgcggcggcgcggctcgcccctgcccacccct

SEQ ID NO: 112702 - DNA, 1415 bp, Zea Mays
atggcattgaggcggcggctgttgctgctggtggtggtcgtggcggccgccgtcgctcgctgccgggcggacgaccccgcggtgagcatgctgctgccgggactcccggtcgccggcctcgccgtggggttctacaacgagaagtgcccgcaggcggaggacctggtgctcgccgagatgcggaccctcgtcgacaaagacgagaccatcggcccggcgctgctgcgcttcatgttccacgactgcctcgtccgggtgcgtacgttgccgcagccggccttctcatcgtctgcctactgcttgatacgagcttcctggatgtctttttttttttgttgttgttgttgcctcgcgcgcgtgcgcagggctgcgacgcgtcgatcatgctcgtctcgcggaacgggactgcggagagggacgccttcccgagctacggcctccggggctacgccgagatcgagcacatcaaggccaagctggaggacgcgtgcccgctgaccgtgtcgtgcgcggacatcatcgtcatggcggcccgggacgccgtgtacctgagcaacgggccgcggtacgccgtggagaccggccgccgcgacggcaaggtgtcggcggagtacgacgccgacaacgacctcccgccgccctcctccaaaatcgtcgacctcaagacctacttcagcttcaaggggttgggctggaaggacctcgtcgtgctgtcaggaagccacacgatcgggagggcgcagtgcaccacgttcgcgtcggaccggctgtacaactacagcggccacgtggggcaggacccgtcgctgaacaaggcgtacgcggcgcagctgcgggagatgtgcgagccggggctcgccgacgacaccaccatggtggagatggacccgcgcagcccctacaccttcgacctcagctactaccgcaacgtgcgcgccaaccggggcctcttcacctcggaccaggccctcctcgacgacccgtggaccagcgcgtacgtcgagcgcatggccgacgcggcgtcgcccgacgaattcttcgccgactacgcggccgccatcaccaacatgggccgcatcgaggtgctcacgggtgacaacggcgagatcaggagcgcctgcgccgcgtacgttgactagaaattactaaccgatcgaggtcgaggaataggatagccagcgagtggttggcttggctgctgccctgctctgggcggcggtgccgttgttgacctggtcttgtcgtgcgagcgagtgcaattggtggatggatcgtcagccgtcgcgtcatgtggccacgacaacgtgggagccaaccaggatgcagtagttgcggtattctcttctctccgccgtttgggctggggtccatctgttttgttctttacgttgcgcctccattgtttgctgaggtgt

SEQ ID NO: 112703 - DNA, 1305 bp, Zea Mays
atggcattgaggcggcggctgttgctgctggtggtggtcgtggcggccgccgtcgctcgctgccgggcggacgaccccgcggtgagcatgctgctgccgggactcccggtcgccggcctcgccgtggggttctacaacgagaagtgcccgcaggcggaggacctggtgctcgccgagatgcggaccctcgtcgacaaagacgagaccatcggcccggcgctgctgcgcttcatgttccacgactgcctcgtccggggctgcgacgcgtcgatcatgctcgtctcgcggaacgggactgcggagagggacgccttcccgagctacggcctccggggctacgccgagatcgagcacatcaaggccaagctggaggacgcgtgcccgctgaccgtgtcgtgcgcggacatcatcgtcatggcggcccgggacgccgtgtacctgagcaacgggccgcggtacgccgtggagaccggccgccgcgacggcaaggtgtcggcggagtacgacgccgacaacgacctcccgccgccctcctccaaaatcgtcgacctcaagacctacttcagcttcaaggggttgggctggaaggacctcgtcgtgctgtcaggaagccacacgatcgggagggcgcagtgcaccacgttcgcgtcggaccggctgtacaactacagcggccacgtggggcaggacccgtcgctgaacaaggcgtacgcggcgcagctgcgggagatgtgcgagccggggctcgccgacgacaccaccatggtggagatggacccgcgcagcccctacaccttcgacctcagctactaccgcaacgtgcgcgccaaccggggcctcttcacctcggaccaggccctcctcgacgacccgtggaccagcgcgtacgtcgagcgcatggccgacgcggcgtcgcccgacgaattcttcgccgactacgcggccgccatcaccaacatgggccgcatcgaggtgctcacgggtgacaacggcgagatcaggagcgcctgcgccgcgtacgttgactagaaattactaaccgatcgaggtcgaggaataggatagccagcgagtggttggcttggctgctgccctgctctgggcggcggtgccgttgttgacctggtcttgtcgtgcgagcgagtgcaattggtggatggatcgtcagccgtcgcgtcatgtggccacgacaacgtgggagccaaccaggatgcagtagttgcggtattctcttctctccgccgtttgggctggggtccatctgttttgttctttacgttgcgcctccattgtttgctgaggtgt

SEQ ID NO: 112704 - DNA, 1695 bp, Zea Mays
atggcattgaggcggcggctgttgctgctggtggtggtcgtggcggccgccgtcgctcgctgccgggcggacgaccccgcggtgagcatgctgctgccgggactcccggtcgccggcctcgccgtggggttctacaacgagaagtgcccgcaggcggaggacctggtgctcgccgagatgcggaccctcgtcgacaaagacgagaccatcggcccggcgctgctgcgcttcatgttccacgactgcctcgtccgggtgcgtacgttgccgcagccggccttctcatcgtctgcctactgcttgatacgagcttcctggatgtctttttttttttgttgttgttgttgcctcgcgcgcgtgcgcagggctgcgacgcgtcgatcatgctcgtctcgcggaacgggactgcggagagggacgccttcccgagctacggcctccggggctacgccgagatcgagcacatcaaggccaagctggaggacgcgtgcccgctgaccgtgtcgtgcgcggacatcatcgtcatggcggcccgggacgccgtgtacctggtaaataaaataattataagcagcctccgacataatttgttgctctcctcgatcggaccatatcaacctagctacacattaattgaattgaagaagcggcttctccttgttcccagagcaacgggccgcggtacgccgtggagaccggccgccgcgacggcaaggtgtcggcggagtacgacgccgacaacgacctcccgccgccctcctccaaaatcgtcgacctcaagacctacttcagcttcaaggggttgggctggaaggacctcgtcgtgctgtcaggtacaatacaaccaatgagctgtccaactacgtacgtacgtacgtcctgcaagcaaagtagctagacgactgatcgatcgacgacggtggtacacacggaacaatccctgactgcatgcagtgcaggaagccacacgatcgggagggcgcagtgcaccacgttcgcgtcggaccggctgtacaactacagcggccacgtggggcaggacccgtcgctgaacaaggcgtacgcggcgcagctgcgggagatgtgcgagccggggctcgccgacgacaccaccatggtggagatggacccgcgcagcccctacaccttcgacctcagctactaccgcaacgtgcgcgccaaccggggcctcttcacctcggaccaggccctcctcgacgacccgtggaccagcgcgtacgtcgagcgcatggccgacgcggcgtcgcccgacgaattcttcgccgactacgcggccgccatcaccaacatgggccgcatcgaggtgctcacgggtgacaacggcgagatcaggagcgcctgcgccgcgtacgttgactagaaattactaaccgatcgaggtcgaggaataggatagccagcgagtggttggcttggctgctgccctgctctgggcggcggtgccgttgttgacctggtcttgtcgtgcgagcgagtgcaattggtggatggatcgtcagccgtcgcgtcatgtggccacgacaacgtgggagccaaccaggatgcagtagttgcggtattctcttctctccgccgtttgggctggggtccatctgttttgttctttacgttgcgcctccattgtttgctgaggtgtgtgtgaagagacggacggtatggttgctcattcagaca

SEQ ID NO: 112705 - DNA, 3346 bp, Zea Mays
acggaaccgcaggcaaaccctcgctttctccgatcgaattgctcgtccccgtgcaaccaccaccggttcggccgctccccaccaccagtcctccccgcccccgcccgccggacgatctactaggcctctcgccccgcgcgtgccgatttcccccacctcgagcgccgccctcctcccgcgcccatggcgagcacctgaggatacggtcagtgggctgtttctctgcgagagtcccacgagtccccacagaaacagcccgggggcatcagcgatcgattcggaacgccttggttcggtctgattgccggattggtggtttcgtctcggcctcggcttcctcaactatctagcttggaagccaagtctgggcttgcttcgtgtggattgcatctggggaggcggtagcgtgcacgggtgtgattctcggaccggcttcatgcgggacggcgcgccggctcctcgcgccggcgggggcttcttctcggcgcggtcgctctccaactgcatgaggatcgtgtcgtcgggggcgtccacggccgcctccacgctgcgctcggccggggcatcgctggtcaactcgatggccagccacgaggaggatgcaagtcgtgaccaggtacagtgggctggctttgataaacttgaatgtgggggtggcttgctacggcaagttttgttgctggcttataaatctggtttccaagtgtgggatgtggaacatgctgatgatgtaagacagctagaatccagacacgatggtgctgtttcgtttattcaagtgctgaaggatccaattttcacaacagaatctggagacagatttgcagacacacgaccattgctagctcttgcctgtgaaggaactcacacaggaagtggaaagaaccatgatactaatgttcctgtttttgatggaaccaatggtgctttccatagtataggcggtgaaaaccttcctactgtcttactattttattcactgagaacccatgaatatgtgcatacattgaggttcagatcagctgtttattccataaggtgcagtccgagagtcgtagctatttcacaggctactcagatacattgttttgatgccgcgaccatggagagagaatatactgttcttaccagtcctacggttgcacaagtttcaggctatggcccacttggattgggtcctagatggattgcatattctgggaatccagttccggttccagatactggacgtgttagcccacagcttcttagtctatctccctctgttccacctcctggttcaaatggtagtgtggtggcatattatgcaaaagaatcaagcaagcaactggcagctggcattgcaacacttggtgaggttggatataataagctgtccaagtactatgcagatttcattccaaatggtaatggtaccataaagcaaagaagttctgtttacaaagcaaatggtgtaacaaatggccacctcattgacagtgaatatgctggaacggtcatagttcgagatattgtctctaaattattgatagttcagttcagggcacacactagtcccatttctgcactttgctttgatccaagtggaactttgctggtgacagcatctgttcatggtcaaaacatgaatgttttccgcattatacctccacatgggacatcagaagctggtcaaattggaacctatgttcatctgtacaaactgcaaagaggcataaccaatgcgatcataaaagacatcagctttagtgatgatagtgactggataatgattagctcttcaagaggaactagccatttgttttcaatctctccatattgtggatcaacaagattccgttacagtgataacaaccctgtagaaaatgattacacagtggattcatcagttaatcatactgctcattggtcccaaaattcagcaacctctttgagtctgagtcagaagactctcttcgtatctggaccccctgtcacattgtctgttgttagtaggataagaaatgggagtaacgtgtttaagggtgctgtccatggtgctgctgcatttgcaactggtgcttccactccaatttctggtgcgattgcttcaacttttcacaaccgcatggctggtgacatcgattcagatggcagtttgcgcatgaagtattatttactagtattttctccatcaggaagcatcatacagtatgctctccatctctcagctgaacaggattctggattggatttccggacaagccccatttcttatgggccagagagagaaactgatacaaaatttgttattgaagctcttcagaagtgggatgtttgttataaaagaaatagaagagacagtgctgagagttttgcatatagtgattttgagaatggagaaaataataaacttttgctgaaagctatgtggaaagggactagtatctacccatttgactgttctgttgaaaggcaaaagctcagtgctgatgaaaaccgtaatctctatatttctcagagtgagttgcagactcatgttgtgcaaactccactctggtctaaatccaggatacactttcaagttatggagggtgaaactttagaagcagacaatgctgatgtaatttcaggggaagttgaagtagaaaaagtccagacccacaacatagaatcaaggtcaaagaatctcataccagtcttcgactccctccatacatcaaggtttcaacagacaaggttgaacgctcctgataacagcaggtgcgggctgctgcagcgacagaaatctgggatttcagaagatggtagactctctcgcagaagcagctgtagttctttggactgcatgtctgaagggcccaaaagctctgatgacggtgctttcagtaaatatgtagtagatgataacagttctgctgtaattaacaacccaagtgttaaatttcatgccgagcttgtaaataatactgggagcctcaagtcagaggcccagctcggatttgtaaatagcgaggaggatggtggaggtggagagcaactcccagacttgtgatgttgactatgtcaagatggtcgatggtgatggaggagcctctttaatcgctgaagtcttcattgtgcgtgtgtagctgaattctttcatttctccatcctgagttctttacctctcttctatctatagttctattcataggcattcatgaaaattttaccgagagaaaagataggaagggaggtttaattctggccctatgggtgtggaagctttggtgatgttagttcgatatcttacaagttgtaaataacatgcaataatagcacgtaatttgtgaatatttaaatcataatgtgtccaactgaggta

SEQ ID NO: 112706 - DNA, 774 bp, Zea Mays
gctacataaggtatttcatctatgtggttgataaaggctgggtaattattgctggataattcaggccttcatcctgattttggaaattgctgctattgttttgtctgattagatttctcctgtggtgacttttatatttttaccctccaggttgaacgctcctgataacagcaggtgcgggctgctgcagcgacagaaatctgggatttcagaagatggtagactctctcgcagaagcagctgtagttctttggactgcatgtctgaagggcccaaaagctctgatgacggtgctttcagtaaatatgtagtagatgataacagttctgctgtaattaacaacccaagtgttaaatttcatgccgagcttgtaaataatactgggagcctcaagtcagaggcccagctcggatttgtaaatagcgaggaggatggtggaggtggagagcaactcccagacttgtgatgttgactatgtcaagatggtcgatggtgatggaggagcctctttaatcgctgaagtcttcattgtgcgtgtgtagctgaattctttcatttctccatcctgagttctttacctctcttctatctatagttctattcataggcattcatgaaaattttaccgagagaaaagataggaagggaggtttaattctggccctatgggtgtggaagctttggtgatgttagttcgatatcttacaagttgtaaataacatgcaataatagcacgtaatttgtgaatatttaaatcataatgtgtccaactga

SEQ ID NO: 112707 - DNA, 1410 bp, Zea Mays
agaaaaaccccgtcggcccccgaccaccccatgcagttgaatcaagctccacctccccgacaccaccacacatcgtcgtttgttcgtgttcatcgcgccccacctccgccgcacccaagccaagccaaacctcggtggggagcgtgtctccgtcaatcaatcaagcgcatggccaccgttcccagcaacaccctcgtcaaggtggcggagctcgtgtcgacgcactcctcgccagagtcggtctatggcgcaggtcatggggtggaagccgatgctcgcgcttgcgctcatgtacctgaggaagcaccacacggggtgcctgttctcggtcgaggtcgatgctactcgtggcgtgccggcctccatggaggggttccgcctcgctgtctgtgcacaaggtggagactagggatggcttagtgcagaccccgccgtgctgggtatgcgacgtcaccacggacttcgacgagtcgctctttgtcaaattccccctcccctcgtgctctctggatcggactgtggtggcttggactgttccccttgcagtgttgtctcggagggaggaacaagaccattgcagctgtgttgaccgttgagttacccacgatcgtctccacatgtcctattcctgttcaaggaggagtgcggtgagccagtacccggtgacgccgttgcggaccctgctcgacaagctcttcagtggcgacagcccctacgtgggcttccctcctgagcacacgacaaccgccagatatccaattcatcattatgttgtggtcatggcaaagtcgggagaaccatatttcgaccaaagcaagcagaggcaggggtgtgaggagcagatggattacgatggctgcagtggggaggaagcatgaggtacgtggtgggggcagatcggaggaggccgaccacgggtgcgagtaggtggagcacagtgagaaaaggaagaggcggaggaggccggggcgtgagggagaggttgtggacgcttgacgcgtgtcgcgacgtgaatcgtggcggcaccgtgaagctcggagagcacaacaaaacagtcgtcttttaataattctgatatacgagtcttcaattgcacaagctaactaatgttccacagagatatggggaatgatctgcatggtcgtcactgctcgaatcgtgatgccaagggcaacggtgaggctttcagcaggccgaatatggttctccatgccagatcaagcactctgcttccttggtggggccaactcaatctttgctaacgagaaacttctcacaaccgcgaacaacgactttgacgtggaccaggcgatgtttacattctgttcacctatatatgcctatgctatttattgactcaatcattgtagcaaaaaattatattgcactagcaaatatgatgtttttata

SEQ ID NO: 112708 - DNA, 1571 bp, Zea Mays
aattcgtaggatccaaacaggccttacacatctttctttaagtcttataacccagtcttgtgtgtgagacacaaggttcatcgcgtacaaaagtagtcacagacatatctcccctctgttccgagaagcaaacagaggccgaagccaaagatgacgaggactacgcagctcgtcgccgccatcgcggtttccttcctgtcagcggcggccgcgtccaacaccaccacgtcactccaaagcctcgtcgccgaagtgtcgcagtggcgggaaatccacctgggcggcggcgcggcggcggcgcatggcgtccggccgagcaccgtcgtggcgtgggcgctctccttcctggccgcgtccgtgtcgagcgccggcggcgtgggcggcgggtcgctgttcctgcccatcctgaacctggtggcggggctgagcctgaagcgcgccactgcctactcgtccttcatggtcaccggcggcgcggcctcgaacgtgctctacaacctcgcctgcacgggcggcggcgggagagggaggctgatcgactacgacatcgcgctactgttccagccgtgcctgctcctgggcgtgagcatcggggtggtgtgcaacgtcatgttcccggagtggctcatcaccctgctcttctccctgttcctcgccttctgcacagccaagacgtgccgcgcgggggtcaagatctggcggtccgagagcagcgggtgcgggtccggggctaggtcctcgcgcggtggacacagccacagcaaggagcccctgctgccccgcggcaccagcgacggcgacgccgagggcggcggcggaaatggcgcggggttcccgtggggagacgtggctctgcttgtcatcatctggctctgcttcttcgccctccatgtcctcattggcgataagcacgggaagggcgtgatcaggattaggccctgcggcgtcgcgtactggctgatcaccttcttccagctacctgccgctgtggctttcacagggtatattgtatacgccaagaggaagaaacgcgctgttcatagcgaaagccaagaggacggcagcaaggcagaccttgcggacgcaggagtggaagccttgccactacctacactacctctcgccgctttcgtcaccggggctctgagcggcctcttcggcatcggaggagggctgcttctgaaccctgtccttcttcagatcggaattcccccgcaggtcgtacgaccgcggcagcgacgtcttcgttcatggtcctgttctgtgcgtccatgtccatggtccagttcatcctgctgggcgtggaaggcgtcgggcaggcctgcgtttacgccggggtatgcttcgccggctcggtcgcgggggtcgtcgtgatcgagcgagccgtcagcaagtctggccgggtctcgctcatcgtgttcctcgtcaccgccatcatggcgctcagcgctgtcatcgtcacctgcttcggagcgttagacgtctggatgcagtacaccaccggggaatacatgggcttcaagctaccttgctgacatcttgctcggtgttatgggcttcgttttggtttt

SEQ ID NO: 112709 - DNA, 1680 bp, Zea Mays
aattcgtaggatccaaacaggccttacacatctttctttaagtcttataacccagtcttgtgtgtgagacacaaggttcatcgcgtacaaaagtagtcacagacatatctcccctctgttccgagaagcaaacagaggccgaagccaaagatgacgaggactacgcagctcgtcgccgccatcgcggtttccttcctgtcagcggcggccgcgtccaacaccaccacgtcactccaaagcctcgtcgccgaagtgtcgcagtggcgggaaatccacctgggcggcggcgcggcggcggcgcatggcgtccggccgagcaccgtcgtggcgtgggcgctctccttcctggccgcgtccgtgtcgagcgccggcggcgtgggcggcgggtcgctgttcctgcccatcctgaacctggtggcggggctgagcctgaagcgcgccactgcctactcgtccttcatggtcaccggcggcgcggcctcgaacgtgctctacaacctcgcctgcacgggcggcggcgggagagggaggctgatcgactacgacatcgcgctactgttccagccgtgcctgctcctgggcgtgagcatcggggtggtgtgcaacgtcatgttcccggagtggctcatcaccctgctcttctccctgttcctcgccttctgcacagccaagacgtgccgcgcgggggtcaagatctggcggtccgagagcagcgggtgcgggtccggggctaggtcctcgcgcggtggacacagccacagcaaggagcccctgctgccccgcggcaccagcgacggcgacgccgagggcggcggcggaaatggcgcggggttcccgtggggagacgtggctctgcttgtcatcatctggctctgcttcttcgccctccatgtcctcattggcgataagcacgggaagggcgtgatcaggattaggccctgcggcgtcgcgtactggctgatcaccttcttccagctacctgccgctgtggctttcacagggtatattgtatacgccaagaggaagaaacgcgctgttcatagcgaaagccaagaggacggcagcaaggcagaccttgcggacgcaggagtggaagccttgccactacctacactacctctcgccgctttcgtcaccggggctctgagcggcctcttcggcatcggaggagggctgcttctgaaccctgtccttcttcagatcggaattcccccgcagaccgcggcagcgacgtcttcgttcatggtcctgttctgtgcgtccatgtccatggtccagttcatcctgctgggcgtggaaggcgtcgggcaggcctgcgtttacgccggggtatgcttcgccggctcggtcgcgggggtcgtcgtgatcgagcgagccgtcagcaagtctggccgggtctcgctcatcgtgttcctcgtcaccgccatcatggcgctcagcgctgtcatcgtcacctgcttcggagcgttagacgtctggatgcagtacaccaccggggaatacatgggcttcaagctaccttgctgacatcttgctcggtgttatgggcttcgttttggttttgcgtttgtgctcttcaccttgtaatgtctggaaagagaggccggagtaggactggttgtgcatgggcactcattgtaatttccaattttcaggttttatatagtgtgaattgtcatc

SEQ ID NO: 112710 - DNA, 104 bp, Zea Mays
ctataattgagacatttgtccgcaaagtcattgtgagggggaggagtcacttgatgagaaccggaatcctacaaaataaaccaaaattctcataaatatacaac

SEQ ID NO: 112711 - DNA, 729 bp, Zea Mays
gttggcaacctcagacgactccagacgcagcgtcaacctctgcggcgaagatgggaaagatgaaggcagtggcgtgcgtcgcctgctgggcggcattgtcactgatcaatgtcgtgatggccgtcgattacgtcgtcggcaacccggccggcggctgggacgggaggaccgactaccagtcttgggccgcagccgagacttttgctccgggagataccctaagtaagtgtcatcaccaggtttcagctcgtattttgttgccatcagctcgtatgcatagactttgtcggctgtcaatgtcattgtgcgttgcgttgcatctcggggaattctcatcgcgttgactattcctatatgcacatgcaacacgtacgacgtgcgatgcatgcagccttcaagtacaactcataccacagcgtcatggaggtgaccaagagcgccttcgaggcgtgcaccacgaccgacccgatcttgtacgacaacagcggcagcaccaccgtcgcgctcaccatgccggggacgcgctacttcatctgcggcgcgccgggacactgcctgggcggcatgaagatgcaggtgcaagtcgccgaccgacccgcacccaccacacccagttcgccgccgccgccgccagcacacgcgaaacagaagcggcatgcaacggcaccatcaccgacgcctatgccgtgggctccagcgccgacaccatggtcgcccgcgccggcaccc

SEQ ID NO: 112712 - DNA, 1166 bp, Zea Mays
gttggcaacctcagacgactccagacgcagcgtcaacctctgcggcgaagatgggaaagatgaaggcagtggcgtgcgtcgcctgctgggcggcattgtcactgatcaatgtcgtgatggccgtcgattacgtcgtcggcaacccggccggcggctgggacgggaggaccgactaccagtcttgggccgcagccgagacttttgctccgggagataccctaaccttcaagtacaactcataccacagcgtcatggaggtgaccaagagcgccttcgaggcgtgcaccacgaccgacccgatcttgtacgacaacagcggcagcaccaccgtcgcgctcaccatgccggggacgcgctacttcatctgcggcgcgccgggacactgcctgggcggcatgaagatgcaggtgcaagtcgccgaccgacccgcacccaccacacccagttcgccgccgccgccgccagcacacgcgaaacagaagcggcatgcaacggcaccatcaccgacgcctatgccgtgggctccagcgccgacaccatggtcgcccgcgccggcacccgcggccgcgccaccgagacgtgcagggcacaagaagaagcacaagaagaggtactgcccgcctgaaaccgtgcatgcgcccgcacgggcccccacccccacagtgcaggccgtcgaagcagactttccgttcgcggcgtttgctcctatgacagctccgccgccgccgccgccaacgtcgggagggcttgcatggcggcgagcaacgtgtggcgaggctactgcggccttagccgctctcgtctggttcatgctcctctgagccggggaggtttcagatccgaagattttagacgccaggtcatattatatgaatatcgtgtgcacgtacgttttgcttataatttatatacatgtttactagaatgtggtatttgttgagattctgggtttgtatctttcgtgcgttatgaggtaatgaagttgtagcatactcccaattctattttaacaagtgttcgctcgttttcaattgagccaactatacaacgggctattagctataggctggattcagtgctcctagaatgtatgaattggtcctttgtctaccccaactttattaccgtcgaattacacaatacacatgtcccattaaaataaaaaa

SEQ ID NO: 112713 - DNA, 1969 bp, Zea Mays
gcctcggcgggcaacacgccaggcaaacagcagcgtagagctgggcagacggcagagtcccgagtcgagcagttggtttttgtttggtggtgcgccattactaatttactgccgcccgcccagcacaacactttcccagggagcgtttaattgcctccgcctgcctcgctctcgcttccttcggatgccgctctgcctctgccgcgcccgccagctgcactgaccggcaggccgagcgaccgagtcacgcagttcagcaacgcgcgcgccacggcccgcgacgcgatgagcgagaggaggaggcgggcgagcgctgcttccctcgggggtggaggtggcggcggcgttggtggtgttgcgcctgcgcgggccgaggaggacaaggtcgcggcgccgggtaaagcgcctccgccgacggtgtggttcgcgttcaagcggtcgctgcactgccgctccgagccgtcggaggtccacgtgccgcgtgccaaggccggtcccgtcgcgggcgggggcgccggcgcggctgtcggcggcggccacctgtcgtcgatcgtcaccaagcgcgccgcgcggtcggggtgctcgcgctccatcgccaacctccgggacgtcatccacgggagcaagcgccacccggggcagccgcccagctgcagcccgcggtccatcggcagcagcgagttcctcaaccccattgcacacgaggtcgtgctcagcaccaactcccgctgcgagctcaagatcaccggcttcggcggctgcggggggctggcggccgtcggggtggggaccggcgccgcgaacgacgccgacggcgggggcgacggcggcgtcgtgtcgtcgttcgtcggcacgctccgccctggcacgccgggcccagcgtgggccggacacggactgccgtacagcggctccgtgcggggcagcgtgcgctgcacgccgccgaggtcgccgaacgtgatgctcgagaggaatggctcagtggtgaacggccaccgcgcgtcatgcgacgaaaccgctaaaaacggcgccagcaagggctccggtgggctcagctgccacaagtgcggcgagcagttcagcaagtgggaggcgctggaggcgcaccacctctccaaacacgcagtgacggagctggtggaaggggactcgtcgcggaagatcgtggagatcatctgccggacgagcctgctcaagtcggagagcagctgcgtccggatcgagcgcgtgttcaaggtgcacaacacgcagcggacgctgtcccgcttcgaggagtaccgcgaggccgtgaagctcaaggcgagcaagctagccaagaagcacccgcgctgcctcgccgacggcaacgagctgctgcgcttccacggcgccacgctctcgtgcgcgctcggcggcggctccggctcttccagcctctgcgcctccgacaagtgcgccgtgtgccgcatcatccggcacggcttctccgccaggaaggagggcaagggcggcgtgggcgtgttcaccacgtccaccagcggccgcgcgttcgagtccatcgttgaggcgccccccgccatcggcgtcggcgacgacgacggagcgggccagctgggcctgggcaccgcgcgcagggcgctgctggtgtgcagggtcatcgccggccgcgtgcacaagccgctggacaacctcaaggagttcgtggggcagacgggcttcgattcgctcgccggcaaggtcggaccctactccaacatcgaggagctgtacctgctgaacccgagggcgctgctcccgtgcttcgtcgtcatctgtagaccgtagcctactactagctaaacacaccgtctcattcttctctcttcccacttttctctttcgattgctactctagtgtacgtagttaacacggacacggcatagctatcgcctatcggttggaaggtcggatggatttgtccatgtttccgtgcaggtgcgtgcgtgcctt

SEQ ID NO: 112714 - DNA, 102 bp, Zea Mays
ctctcgacggatctccatcaccttggccttgagtacgacgtggacatggcattacgcaaacaattatgctcgtgtcgtgcggattccgggccatctaccgac

SEQ ID NO: 112715 - DNA, 735 bp, Zea Mays
taggatgatatagatacttctcaatgctcgacaacacatacttgcattcttggacaattgcatgggaatatcagacgtttgctcttctttactattgacctgaaacatgcattgtatgtaattatgatcaggctagaactactatgctgaattggtgcctttacaggtgaatgaatcacgtttagctgaagacctggagcaaacttgggaggtccttgctgagccaatacagacagtgatgcgtatatatgggatacctgaaccttatgagaagctgaaggaactgacgagaggccaagctgtcaccaaggacaacatgcagcaaatcattaatggtctagacataccggaggaggtccgatcgaagctttcgaagctaaccccgcattcctacactgggccggcggaggatttggccagagacatcatgaagtgggttgatcttgaatctggattttagatcaagtgagctcccatttaaaaatggatggtgctctccacagtttttctttttgacaacaatggagaaaataaataacagacaggaaccataggaaacgagaatccaatgcgcgtggcctctgacctgtctaccgagataatctacatgctgaccatttatataattctggcacatgtaaaatgcgcctcaaggaattatgcaagctgtatcttgactggaaaattgtcgagctgaaaaagttgactgctcgatttcttatgagtactgagttg

SEQ ID NO: 112716 - DNA, 1792 bp, Zea Mays
tggttgatgctcaacgcacacggcgctgaacccgtcattcatatatatccagattcccctcctcccttcctcccgttcaacttcaacccacctttctgccacacacctcgagcgaagcaagcaccgcaagaattgaagagccagggagattttccgtcgctccgtccgatccatggccgaacagtggtggggcagtgcctctcacaggagtcacggcacgtcggcgtgctcggccgccgcgccgccgccgctcacggtcacgggtagggtggcctgcggcagcaccttccccaccgcagccgttgagtcgacgagctccgtaaccttccaggacccttacagaaactccacccatcagcctctgtctgatgccgcctcctcgctcggtgatccacacctggactggacgcaaaccttcttgagcgggaggagcgatgccagcttccaagccgtgctccaagaaccctccgcgacgaacgatccattaatcagggaccacatggacatgggtgccggcttcttggccgaccaggcgcagctagcgccgtcgccgtacggcggcacggagccatcgcaagctcaagctctattcgacgccacggcggcggtgcacaacattttgatgtacggagacagcgagtcctcggtgagctacgacgccgccgcggcgtcgatgcagttttcccagctgctcaggacctcggtgcccgcgtctacgcctacgcaaggcgacggcgtcgccgtcggcgctccgatgcagtacttgtccggcagtagttacctgcctttcggtggcccgctgccgtctcaccttctcttgcaggccctgcaggcggctaagcccaatagccgcagctccaacgctaactctccgacggcgaaggacgactgttctccaccaccggcggcgacgaggaaaagcgtctccgagccgcctgcggccgcgaaaaggccacggatcgaggcgccatcgccgctgccgacttttaaggtgaggaaagagaagctaggggacagaatcactgcgctccagcaactcgtctcgccttttggaaagactgataccgcatcggttcttcacgaggccatcgaatacatcaaattccttcacgaccaagttgcgtcactgagctctccctacttgaaaaatgggatccccatgaagcaattccagcacaagggctctgaggattccaaagataacggcgacacgaagcaagacctgcggagccggggcctgtgccttgtcccagtggcgagcacatacacggtggcggccgagacaccggagttctggcaccctacatttggaggcacattccgatggtgatgatcgtccagttttagtagcaagctaagtagcctgctgagacggaaagcaagaaatcatgatgccgcccaaagcaatcgaaggatgttttgcaagggaaaagacgtacgatgatggatatgataataggtttccggtggtctcttctaagacatgcatacatgctggatcaggtgcagaagagagaatgattaattgaggccgtgtgtatgtgtggcacctatactcatatatatgcatgcatgcaactttgcaagcaaataattagtgacagctatatataattagcactgtgtagtatgcataggttggcgttggaaggggaaagggtgggggcaggtgccaaaattatttcgaaggaaaagcaggagggtattggtgcagatagatggcaacagtcatggcagcatggcaatgattctttatctcattataagctcctattactggaagtatgcgctc

SEQ ID NO: 112717 - DNA, 1752 bp, Zea Mays
ctgtgactgtgaggctgtgaccagagataagcagccacagcccacagctccccctggccggtggccgccactccacgctccacgacattcaccaccaccacggcaccaccctgtcccttcagctccaacgtgcatgagagacgccactcgcggtacccacgcggcggcagaggcgctggcggcccgtcgtccgcgccgagcaatggcgtccccactgctctgcggctgcgccctcctcctctacctacttggccacctcgcgacctgccacgccgccagggacaccatcacgccgagcagcccgctggcggccaacgagacgctggtctcgggcggcgacggcaacttcgcgctgggcttcttcaccccgccgggcgccaacagcacgtacctcggcgtgtggtacaacaaggtctccctccgcactgtggtgtgggtggccaaccgcgaggccccgatcgcgggcgccgtcggggacaacccgggcgccacgctgtcggtctccggcggcggcacgctggccattgccgcggggaacgggaccgtggtgtggtccgtccggagcgcgtccagcaggcggctggcgagcccggccgcccagatcctcgacaacggcaacctggtgctgaaagacggtgccggcggcggcggcgccgtggcgtgggaggggttcgactacccgacggacacgctgctcccggagatgaagctggggatcgactacgtgaaggggaagaaccggacgctgacgtcgtggaagagcccgtcggacccgtccacgggccccgtcgccatggtgatggacaccacgggcgacccgcaggtgttcatctggaacggcggcgagaaggtctggcgctccggcccctgggacggcgtccagttcaccggcgtgcccgacaccgccacctactccggcttcaccttcagcttcataaacagcgcgcaggaagtaacgtacagcttccaggtgcataacgcgtcgatcatctcgcatctgggcgtcgtgagctcgggcaactacggcctgctgcagcgttcgacgtgggtggaggcggcgcgggcgtggaacctgtactggtacgctcccaaggaccagtgcgacgcggtgtcgccgtgcggcgccaacggcgtgtgcgacaccaacaacatgccggtgtgctcctgcctgcgcggcttcacacccaggacccccgcggcgtgggcgctgcgggacgggcgcgacggctgcgtgcggtcgacgccgctggactgccgccgtaacggcaccaccagcaccaccgacgggttcgtcgcggtgcggcacgccaaggtgcccgacacggagcgcagcgcggtggactggagcctgacgctggagcagtgccggcaggcgtgcctccgcaactgctcctgcacggcgtacgcgagcgccaacgtcagcagcggcggcggcgggcgcggcggcggcgccggcggagggtcgggctgcgtcatgtggaccacgggactcaccgacctgcgcgtgtaccccgacttcgggcaggacctcttcgtccgcctcgccgcctctgatctcggtacgtacacgtacgaacgcccgccgcgctttgtcccgttaatttctttctattgatgtcgttggaggaggggctagctgctacgagatgccgaattggtatcatcttccacgcagcattctccagtgcgagagcgagcgccgtgagatggagatgctgagacatatcgtggatcaattgatcgatacagaac

SEQ ID NO: 112718 - DNA, 2893 bp, Zea Mays
gcagccacagcccacagctccccctggccggtggccgccactccacgctccacgacattcaccaccaccacggcaccaccctgtcccttcagctccaacgtgcatgagagacgccactcgcggtacccacgcggcggcagaggcgctggcggcccgtcgtccgcgccgagcaatggcgtccccactgctctgcggctgcgccctcctcctctacctacttggccacctcgcgacctgccacgccgccagggacaccatcacgccgagcagcccgctggcggccaacgagacgctggtctcgggcggcgacggcaacttcgcgctgggcttcttcaccccgccgggcgccaacagcacgtacctcggcgtgtggtacaacaaggtctccctccgcactgtggtgtgggtggccaaccgcgaggccccgatcgcgggcgccgtcggggacaacccgggcgccacgctgtcggtctccggcggcggcacgctggccattgccgcggggaacgggaccgtggtgtggtccgtccggagcgcgtccagcaggcggctggcgagcccggccgcccagatcctcgacaacggcaacctggtgctgaaagacggtgccggcggcggcggcgccgtggcgtgggaggggttcgactacccgacggacacgctgctcccggagatgaagctggggatcgactacgtgaaggggaagaaccggacgctgacgtcgtggaagagcccgtcggacccgtccacgggccccgtcgccatggtgatggacaccacgggcgacccgcaggtgttcatctggaacggcggcgagaaggtctggcgctccggcccctgggacggcgtccagttcaccggcgtgcccgacaccgccacctactccggcttcaccttcagcttcataaacagcgcgcaggaagtaacgtacagcttccaggtgcataacgcgtcgatcatctcgcatctgggcgtcgtgagctcgggcaactacggcctgctgcagcgttcgacgtgggtggaggcggcgcgggcgtggaacctgtactggtacgctcccaaggaccagtgcgacgcggtgtcgccgtgcggcgccaacggcgtgtgcgacaccaacaacatgccggtgtgctcctgcctgcgcggcttcacacccaggacccccgcggcgtgggcgctgcgggacgggcgcgacggctgcgtgcggtcgacgccgctggactgccgccgtaacggcaccaccagcaccaccgacgggttcgtcgcggtgcggcacgccaaggtgcccgacacggagcgcagcgcggtggactggagcctgacgctggagcagtgccggcaggcgtgcctccgcaactgctcctgcacggcgtacgcgagcgccaacgtcagcagcggcggcggcgggcgcggcggcggcgccggcggagggtcgggctgcgtcatgtggaccacgggactcaccgacctgcgcgtgtaccccgacttcgggcaggacctcttcgtccgcctcgccgcctctgatctcgatgtgctggaaggcagatcaagggcggcacgcattagaatcgcggttggtgtcagcgtctcgctgctggcgcttcttctagcggttgctggcctcctcatctggttaagaaagagaaggctaacgagaacagccggatccagcaaatggagcggctcacgcagcaccggccgtcggtacgaggggagcagccatggtgacgatctggagctgccaatatttgatctgggcacaattgcagccgctacggatggtttctccatcaacaacaagcttggcgagggtggctttggaccagtatacaagggtaaactcgaggatggaatggagatcgcagtgaaaacactctcgaagacatccgcacaaggtcttgacgagttcaagaacgaggttttgctgatagccaagctccagcaccggaatcttgttcgccttctcggatgcagcattagcggacaggaaaggatgcttgtttacgagtacatggcaaacaagagcctggacttcttcctgtttgagaaagacactgtggtgcttgactggcaagtgcggtatcgtataatagaaggcatcactcgaggtttactctacctccaccaggactcgaggtacagaatcatccatagagatctgaaggcggccaatgttctcctagacaaggagatgactcccaagatttcagactttggcatggcaagaatatttggcaacgaagagacggaaattaacaccttaaaagtggttggcacatatggttacatgtctccggagtacgcaatggatgggatcttctctgtcaagtcggacgtgttcagctatggagtactattgctggagatcgttagtggcaggaggaacaggggagtgtattccagttcaaacaaccaaagccttctaggccatgcatggagcttgtggaacgaggagaagagcatagagctagcagatgagagaatgaacggacaattcaactcagacgaagtgcagaagtgcgtcagggttgggctactgtgcgtgcaagagaatccagacgaccgtccgctgatgtctcaggtgcttctgatgttagctagtcctgatgccgcatcactgccgactcctaagcaacctggcttcgcagctaggagagttctaatggaaacagacacatcatcgaccaagcccgactgcagcgtgtttgacagtgcgacaaccatcatgcttgaaggtcgatagaaaacatgactaacacaccttgttgaaactgaaactagtcgaaaaatttgtattctagactaaatttcgtggcatcttcagtatcttgtatgattaggcagcaaaaaattatatgaatattagataatagtagtaggtagaatcttcgtt

SEQ ID NO: 112719 - DNA, 966 bp, Zea Mays
caaaaaaaaaaaaaaaacctaacctcctcctatatatcgacagagaaagacactgtggtgcttgactggcaagtgcggtatcgtataatagaaggcatcactcgaggtttactctacctccaccaggactcgaggtacagaatcatccatagagatctgaaggcggccaatgttctcctagacaaggagatgactcccaagatttcagactttggcatggcaagaatatttggcaacgaagagacggaaattaacaccttaaaagtggttggcacatatggttacatgtctccggagtacgcaatggatgggatcttctctgtcaagtcggacgtgttcagctatggagtactattgctggagatcgttagtggcaggaggaacaggggagtgtattccagttcaaacaaccaaagccttctaggccatgcatggagcttgtggaacgaggagaagagcatagagctagcagatgagagaatgaacggacaattcaactcagacgaagtgcagaagtgcgtcagggttgggctactgtgcgtgcaagagaatccagacgaccgtccgctgatgtctcaggtgcttctgatgttagctagtcctgatgccgcatcactgccgactcctaagcaacctggcttcgcagctaggagagttctaatggaaacagacacatcatcgaccaagcccgactgcagcgtgtttgacagtgcgacaaccatcatgcttgaaggtcgatagaagttactcgatcactcgcctcagaataagtgtcgtgtcagtcaagttttttttaaagttttgactaggtttgtagaaatattagcatcttcaaataagtttattaaaaatagatttaatgatctatctatcatatatactataaatattaatatttttatatatttagttacatttaaaattatttaatttctagaaagcgagacagctcttattttcggacgg

SEQ ID NO: 112720 - DNA, 1863 bp, Zea Mays
gagccgcatgtccagcagatcgacggcccagatgacgcagccgcggtcgacacccccgctgacgttcgccgccgcgtacgcccggcagctgcagttgctgaggcacgcctgcctgcactgctccagcgtcaggccggcgtacaccgtcgcgttggtggcctccggcagcttcatctggtcgacgacccagaacccgtcgctgctggcgttggcgccgccgccgcagccgaggctggtcctcctcacgcagccggccgacccgtcgcggaggttccactgctgcggggaccgtggctcgaaccccgggaggcagaagcaggccggggactggccggtgccgtcgcagtacccgaacggcccgcacttggcgtaggtgtcgcacgggtcggtggggtagtaccagaagttgctccacccgccgttgagcatcacgaagcgctgcacctgccccgccgcctcgtccacgacgagccgcgacagcagcgcgtcgacgccgatggagtaggtgtagtacgtctcgtcggggctccacacgaccctgaaggtgaagtcgttcgagctgaggtacggcacgccggtgaggatctcgccgttccacggcccgctcgtgtacagcctcgccttgccccggaggaggaagaactgcggcagcccgccggtgatcagcttgaaggtgacgtcgcccggcgacgggtcggacgcgctgcgccacgccgtgatgttccgggtgatgccggccctggcgtccaccccgagcttcatgcccgggagcagcgtgtccgtcgggtagtcgaagctctgccacgccacgctctggtcggagccgctcccgtccgagctgagcacgaggttgccgctgtccagcagccgcgcggtggcgccggcggtcacgttcctggtcggcgccgccgaggcccacaccgtgccgttctggccgtcgaggacgaggaggcggccgtcggcgccggagagccggaggacggctggagagctgaggaccgggctctggcggttggcgacccacacgatggtgcgcaccgtgatgttgtagtaccaaatcccgaggtacgtcctggcgccatccgggctgaagaagccgagctggaagacgtcgccggccgagacgagcgtctggttattgccggcgatggaggcggacgtgccgagggtgtcggtggaggtggagagtgggaagaacgcggcggtggcgaggaggacgagggggagcgcgcacgccctcatgctcgatctcgcctgaatcgcacaccccgcgccagggcaaaacggactactgctaactctcaggacattgcgcccccagttgccttgtgacggtgcctgcgctgcgcctgcaaacctcgagggaggcttcggatcagcgggagggagaggacgttgtcttgtaccgggtaatcaaccagtgcgacggtgcggccgagaatttgttattctagtcagtcacatactcacatggggcagtggccacgtttgagttctttttttttatcaacaggcttttaacaagacaagatcccagccctgtgcgggttggttggcatttggagaactggagtataagaagccgggcgagtcagagttggagacttgggaggctggaacggcgagctgtttccacgcgggttggttggcatttggagaacgagtttgatccgcatgcgaactacaaaaccaaacacacgcgtgcgcacaggtttcctcctccgccgccgcacacgcctgccatatagagatgtcaatgtgctcgataccctttcgccgtcgacgaattcctgattgccgaacttgcggaacagatgtaggtatattccctgtgcgggtaaatacgaagaaaaaattgtttca

SEQ ID NO: 112721 - DNA, 1174 bp, Zea Mays
ctctgctccgttttccaattagtgaaccagataggagtcttcttcctccccgaccacaccgctcctctccttccaagccctcgtcaccaccagcctgctctcattcctgtgccacctggatctcaactgcttgcgctcaacatgctccccacacactctcgctgcggcgtgtgcccgcccaacccgtgcatcgctctctgtcgcttccgcctcatcataggtgatggcgtcgtcgtccccgcagcagcacacgaggtcggctcgtcctcgaacctcgcgcaatttaggaatagcggcggatccttcccaggtagacttggatgttgcggtccagcgaatgtcgggggtgtggaaggagatctccaccgctggagggctctccacgcccatcctccctcccccatccccgctgccagctctgacgctgacagtgccgcagagacgacgctggagtattgtattagtttgtttatcttttgttttgatctaggtcttaatttgccttgatatgtgcaaggcctgcagttgaatgcaatgcgagcaacagctcagttatgtgtgtgtgacgctgaagggatctatctctatgctcaagcataagaagcataattttgttattcattgaatgaagaactggctactctacccgttccaaattatatatacttcaagctgtacatgataatcaggtggcaaaagaatgtcaactcaattttttctatgttttctttttcaggtggcagcaacttttgatagacaaccttgttggatatgatactatacctacaaacagcttggtgatttctcctggtcatggttatttatacaactttgagatgaaggagctaaatggtcttagttatggccatgaaacaccagaaggtcctacaaaatttggagcttggaagatggtgctacgattttcaagagctgctagccaacgccaatgcatctcgtttaagatcgtgcatgtgacctttcctctcctctcctgatgttaggccttcacaacttgtattatgtgcgggcagaaaaaatccactcttttatatagcaaccacctgctgttaagacctttttgactctatatcctaaggctgcaaactgtgttctctaagtatatgtgtaaccagcatcttttattggcccaaaaatgtatttgattccatgcctc

SEQ ID NO: 112722 - DNA, 673 bp, Zea Mays
aaccagataggagtcttcttcctccccgaccacaccgctcctctccttccaagccctcgtcaccaccagcctgctctcattcctgtgccacctggatctcaactgcttgcgctcaacatgctccccacacactctcgctgcggcgtgtgcccgcccaacccgtgcatcgctctctgtcgcttccgcctcatcataggtgatggcgtcgtcgtccccgcagcagcacacgaggtggcagcaacttttgatagacaaccttgttggatatgatactatacctacaaacagcttggtgatttctcctggtcatggttatttatacaactttgagatgaaggagctaaatggtcttagttatggccatgaaacaccagaaggtcctacaaaatttggagctagcttggaagatggtgctacgattttcaagagctgctagccaacgccaatgcatctcgtttaagatcgtgcatgtgacctttcctctcctctcctgatgttaggccttcacaacttgtattatgtgcgggcagaaaaaatccactcttttatatagcaaccacctgctgttaagacctttttgactctatatcctaaggctgcaaactgtgttctctaagtatatgtgtaaccagcatcttttattggcccaaaaatgtatttgattccatgcctc

SEQ ID NO: 112723 - DNA, 669 bp, Zea Mays
aaccagataggagtcttcttcctccccgaccacaccgctcctctccttccaagccctcgtcaccaccagcctgctctcattcctgtgccacctggatctcaactgcttgcgctcaacatgctccccacacactctcgctgcggcgtgtgcccgcccaacccgtgcatcgctctctgtcgcttccgcctcatcataggtgatggcgtcgtcgtccccgcagcagcacacgaggtggcagcaacttttgatagacaaccttgttggatatgatactatacctacaaacagcttggtgatttctcctggtcatggttatttatacaactttgagatgaaggagctaaatggtcttagttatggccatgaaacaccagaaggtcctacaaaatttggagcttggaagatggtgctacgattttcaagagctgctagccaacgccaatgcatctcgtttaagatcgtgcatgtgacctttcctctcctctcctgatgttaggccttcacaacttgtattatgtgcgggcagaaaaaatccactcttttatatagcaaccacctgctgttaagacctttttgactctatatcctaaggctgcaaactgtgttctctaagtatatgtgtaaccagcatcttttattggcccaaaaatgtatttgattccatgcctc

SEQ ID NO: 112724 - DNA, 1263 bp, Zea Mays
taacgtggatatgctaaactcagaacaagaccacaacaacctgaatagggtacaaatccagagaatgtggatgtgctgaaccctgagcaggaccaccgtttttgctgttccagctttccaagacataacatccaaatactaatcatttaattgagttctcactcgaaccacgtccaaggaatggttggactgtgtcattgcctgtaaaatctgctatttgtatgcttttaagccttttcttgatgccagcctttcttatagtatcaaagttcttcacattcttagtcttggtttctcaagtttgctgcactgtgcaattttttgtggctaccaagagaatattctcagctagcatgttcttatgcctactacttcttaaacattgtttcatcagtgtgtcatgtctaaaagcatttgcccctcttatagtgtacttctgggactatatgtatagaactatagaccacaatatacatgggggtggtttatttataagatgctctgtttaatggtggttgttacaatcatctacgttatgtttcttgctttggttaagtgataggatcgatatggttcgaaacatttcagtcttttttccttttactaatttgtattgtggctatttggagaaaaatgcaatttttttgttcaaatcaactgccacgaacgtgtgttctaatgaacccatgctatagaatctcgatcttttttcctataacatataggagtcctacatttataatatggatatacgtctattgcctaacaaaacgtgctcaatattttgtatatcttttgatcagtatatgttttcataatgttatttgaatgtaactcaagctagcttggaagatggtgctacgattttcaagagctgctagccaacgccaatgcatctcgtttaagatcgtgcatgtgacctttcctctcctctcctgatgttaggccttcacaacttgtattatgtgcgggcagaaaaaatccactcttttatatagcaaccacctgctgttaagacctttttgactctatatcctaaggctgcaaactgtgttctctaagtatatgtgtaaccagcatcttttattggcccaaaaatgtatttgattccatgcctcacttatggttgtttacttttatttatagttatttctgtaccttaagtctagctggaggtgcttttatatacttgtgctaactgaaagttagcattgtaccttaagtctaactggaattgttatttctatacttgcactaactaaa

SEQ ID NO: 112725 - DNA, 2593 bp, Zea Mays
gaagaaacaagacccgttcaagcaaccactctttcagatctcgcggaagacagctaaccctgtgtgctatttcgcagaaactaccggatgcaacaaccacctggagataggcagctcagggaaacctgcaaggctacaattacctgtactttggctggcatgcactgggagactctacttctaaggacctccatggattcacccccccccccccccccccctatataaccaacaacctctctctccatcgctcatcaaccacaatctcactcataaatcttgccaaccattgccagatctttaatcttcaccatgatctcccggggcaattctagtacgagctcagacaacggctcctccatgcagttgtaggacttcctgccaatgatggtgaggaaggtaggggtggaggggctgattcaggagctatgcaaagggttccagctgctcatggagcctaggacaggcaagatcacctgccagagcctgaagcagaatgcggccaggttcgggcttggagaactccatggtgatgagctcccggagatgatcagggaaggggatcttgacggggatggggcgctggatcagatggagttctgcattctcatggtcagattgagccctaagctgatggaagaagaggcacacatgatgtttcaatattgatgtaacttgatccttgttgcttagtacaacagaacagtgattttaatgtcaatttggtccagctccaatgtgatattgaattcagaaacactaatgtagtctgacaaacttactcatattatgatactaacaaaaggtgaaaattatacaacaaagtaccatgagcacttgactacttgaggtctctagggcatctcaaagcaaaggatatatgtctgatgtttactttgtcctgttatcagcgaatgaaattatttatcccaaacagtgtgcaaatgtccagaagaaaatcttgtgaataaccatattacaggagggttgtctcatactctcattcatactgtacctcaagtgcactgctctccatccaacctagttgtgtggcatttcctgtactattatgaaagttgtactggagtaccacagagctcaccaatctccttctcaagaagttgcacaagattcgatccagttcgcttgtatatccaaccattagttgctgcatcccagtcaaacctagaaggcccactgcatgcatatccagatagcatttttttatatataagatatataagaataaagagcttttggttggaaatgaagtatagacgattcaatgaagagcttttggttgctgtacaagatatccaacagtgggtctatttgattggaaatgaagtatagataaatttcagaaccacatcataagacgcatagcctactggataaaccaaacgacatatcacaaatggccgctctcttctatccagaaaatgccttttttccttcccaaaaaaggaagacatgtaatcattagccattacacagtgataggttcctgaaactatatgcctatctaactcagaggtccaatacataaaatgaaacaaacaacaactgagatactaagatggtagtattaccttacaggtgaagaaagccagatttgtctgtttggtgattgcttgttcacaacatatgtccccaaatccccaagcctcaatgtcaaaacctggttctagaatgtcaaggaaaagagaaggatgcatcaataattgaatacacgaaaacaaaaacacataatagtaagaatcacatgattctccatggcatgttgcaactaaccccatagtctatgtcgaaaccatccatctgaatggagtcaccatattcctaaaatagagacatgaagaattgtatcggtcaaaggtacaatggcttaacatcttcgacgagagcttttgctcaagtgctgagatttgaaggccatatcaccacctcaagtgtttcaagcaaatcatgaattgtctcatctgctaatttgtgaaattcatcctcttgcattatcgacctattcaatgtacataatcatataatcaacagctaacccatgcgaaaaaaagctatgtagcaaatctcacgtaaccaaactagagcaattataaagtaaaaacagttaacatactcacgatcagattttattttaaattactgtgataaacttatatcagtaagcccagctttccacatttcagactgttgattcgattcaagcaactcttacctctcctgaacaaccttttgtccattgtcactatattggaaaattacatagcattttgagtgtctggtttagggctaccgattgacacaggtggaggcaaaaaaaattccaacaaaaattgctctatcaagcatccaacgatcttacatgtatgatgtatccagtttcgccattggacccattcgcacttgaaagctttccaaactacccagagtgcataaataaatggaataacgtgctgagactgcgaggtcgagaaacaaacttgtggtccaccacagatgggccgggcgcgtcactgaaggcggacagtttcgagaggcgcgttgacgagatggtcctcaaagagaacagaagagc

SEQ ID NO: 112726 - DNA, 1155 bp, Zea Mays
agaaactaccggatgcaacaaccacctggagataggcagctcagggaaacctgcaaggctacaattacctgtactttggctggcatgcactgggagactctacttctaaggacctccatggattcacccccccccccccccccccctatataaccaacaacctctctctccatcgctcatcaaccacaatctcactcataaatcttgccaaccattgccagatctttaatcttcaccatgatctcccggggcaattctagtacgagctcagacaacggctcctccatgcagttgtaggacttcctgccaatgatggtgaggaaggtaggggtggaggggctgattcaggagctatgcaaagggttccagctgctcatggagcctaggacaggcaagatcacctgccagagcctgaagcagaatgcggccaggttcgggcttggagaactccatggtgatgagctcccggagatgatcagggaaggggatcttgacggggatggggcgctggatcagatggagttctgcattctcatggtcagattgagccctaagctgatggaagaagaggcacacatgatgtttcaatattgatgtaacttgatccttgttgcttagtacaacagaacagtgattttaatgtcaatttggtccagctccaatgtgatattgaattcagaaacactaatgtagtctgacaaacttactcatattatgatactaacaaaaggtgaaaattatacaacaaagtaccatgagcacttgactacttgaggtctctagggcatctcaaagcaaaggatatatgtctgatgtttactttgtcctgttatcagcgaatgaaattatttatcccaaacagtgtgcaaatgtccagaagaaaatcttgtgaataaccatattacaggagggttgtctcatactctcattcatactgtacctcaagtgcactgctctccatccaacctagttgtgtggcatttcctgtactattatgaaagttgtactggagtaccacagagctcaccaatctccttctcaagaagttgcacaagattcgatccagttcgcttgtatatccaaccattagttgctgcatcccagtcaaacctagaaggcccactgcatgcatatccagatagcatttttttatat

SEQ ID NO: 112727 - DNA, 1687 bp, Zea Mays
aaaaagagcgggcagtactggtggcccgtggccctggtggggcaccactaggctgctacgtgttcttccccaaatcggcctcacagccctcactgttgcaaagtagggactagggagtacctgctctctcgctctcgcccatcccattgccttcatcatcaaatcgccaccgaaaattccccccaaaaaacaataagcacttgttcatcatcatcagagtaaacacagcagaaccctagcgcgccgttcctccgacgactcacatcccacccactcacccaccccatggcggccaagctctccaccagcgccgacgccccggcctcggtgcggctctccgcagcagcgcaggcggctgcgatccagccctcctctccgcgcttcttcttctcctcgctggccgggaccaacccggcctccccgcatcgccgcatcgccattgccgtcgatctctccgacgagtccgccttcgccgtcaagtgggccgtgcagaactacctccgccccggggacgccgtcgtgctgctccacgtgcgccccacctccgttctctacggcgccgactggggttccatcccggtctccgtcgctgacgaggccgacgctgccgaggacgccgccgccgccgccgagggcggcccctccgaggaggagctgcagaagaagcgggaggaggaatacgacgccttcacctctaccaaggcgcaggacctcgcgcagccgcttgtcgatgcccagatccccttcaagatccatgtcgtcaaggaccacgacatgaaggagcgcctctgcctcgaggctgagcgccttggcctgtccgctatgatcatggggagccgcggttttggggcctctcggaaaggcggcaaggggaggcttgggagtgttagtgattactgtgtacaccactgtgtatgccccgttgtggttgttcgctaccctgatgatgctgcagatgccagtggagatgcatcaggggcgacagatgagttgcacactgtaccagaggacgaacctgtttatcacgatgcgcctgaggtgcagaaagaaaactgaggcaatggccgcaagcagctgaagaacgaaggaaaacatggggcctgtagtgactagtgaggcgattctgtgtatctgaaagatgggactggctgtttatcttcgcttctgtatatcaactgcgtgtcatgatcagtggctgcttcgcgtttgagtttcatatcggagtcctagatcatcgaagtctttgttggtttgcttgtgagatgtttatgttgtgaacaccatgtagagtactcttctcgtaggtagaagctgccttgaagatgcttatgcagttatgctggggtctgggctctcttgtcttgttttgcggagccggtgatgagctttatgttctcaaatggtagttatctacacggtattatgtgctctgttcagcctgtttactgtattgcatattcgtcaatggagaatcactacttattattccctgtatactggataaaacaattgtttagagctagtttgaaaatcttatttttctatgggattttcattttctcttgggaaaattggaatcctttgggaaaacggtgttttcaaactagccctatctatgtttgcatgctctatatttgtattttgtaagactggtatctgaagaatttttagaaataaatttgtcaaa

SEQ ID NO: 112728 - DNA, 1000 bp, Zea Mays
ggactagggagtacctgctctctcgctctcgcccatcccattgccttcatcatcaaatcgccaccgaaaattccccccaaaaaacaataagcacttgttcatcatcatcagagtaaacacagcagaaccctagcgcgccgttcctccgacgactcacatcccacccactcacccaccccatggcggccaagctctccaccagcgccgacgccccggcctcggtgcggctctccgcagcagcgcaggcggctgcgatccagccctcctctccgcgcttcttcttctcctcgctggccgggaccaacccggcctccccgcatcgccgcatcgccattgccgtcgatctctccgacgagtccgccttcgccgtcaagtgggccgtgcagaactacctccgccccggggacgccgtcgtgctgctccacgtgcgccccacctccgttctctacggcgccgactggggttccatcccggtctccgtcgctgacgaggccgacgctgccgaggacgccgccgccgccgccgagggcggcccctccgaggaggagctgcagaagaagcgggaggaggaatacgacgccttcacctctaccaaggcgcaggacctcgcgcagccgcttgtcgatgcccagatccccttcaagatccatgtcgtcaaggaccacgacatgaaggagcgcctctgcctcgaggctgagcgccttggcctgtccgctatgatcatggggagccgcggttttggggcctctcggaaaggcggcaaggggaggcttgggagtgttagtgattactgtgtacaccactgtgtatgccccgttgtggttgttcgctaccctgatgatgctgcagatgccagtggagatgcatcaggggcgacagatgagttgcacactgtaccagaggacgaacctgtttatcacgatgcgcctgaggtgcagaaaggtctgcctcttttcttcttttagctcatcttttcgttttagtaatgcggattgactat

SEQ ID NO: 112729 - DNA, 252 bp, Zea Mays
atgggcctatggctcgctctactgctcgccgaccacggatcgctcatgtacctcttcctcggagacctcgggtgcatgctgtacacggggtgcttccggtgggagctcgggagcgataaagcgcggcgggcgaagcaggctttactggacgagctcggcggggataccattattgatgtgctctatttggagttctggacaacacctatcgtcgctgagcagtctaccgctgatgatgcccttaggccttag

SEQ ID NO: 112730 - DNA, 1871 bp, Zea Mays
aacctgcaaccctccctccctccctcctcgagctctgctcagcacacaaggacacccaaaacgcgcaggtgagagaggcgagggaatccctccccctcccgttccaattcctttcctccgctcgcggctcgcctcctcgaccgacccccccaaagcggcgctctccttttcggccattgcgccacccgcccacaagcgattcggattctcccccccacatcgtcctttccaggttgcaggcttaaatggagaacgatgttgagaaaaataacatggtgaaagagttctatatcccaacctatattttcgtgccagagtctccagtggagcatgcatctcagatacctacttgtccggtgattgtttttgtcaacacaaaaagtggaggtcaactgggacgtgagttgattgtcacataccgtaagcttctcaaccatgcccaggtatttgatctgcttgatgaagctccagacaatgtcttgcacagactatacagcaacctggaaaggctcaagcacggtggtgacactcttgcttctgaagtctataggagactaaggctaatagttgctggaggtgatggaacggcaggttggttgcttggagttgtatctgatcttaagttaggacatccacctcctgtagctacagttccgctggggactggaaataacttgccatattcttttggatggggaaagaaaaatcctggaacagattatgattcggtcatatcatttcttcagttggtaagagaatcaagagagatgaacattgacagctggcacattgtcatgagaatggagagcccaaaagattctccttgtgatccaattgcacctcctgacttgcctcattctttgcatgcatttcgacgtatgccaaagacagatccacaagatatggagtattcttatacatatcgtgggggattttggaattacttcagtatgggaatggatgcccaagtgtcttatgcatttcattctcagaggaaactgcatccagagaagttcaagaatcagttgtccaatcagaaaacatacttgaagctggcatgcacacaaggatggttttgtgcctctttgtttcatccaatgtcacggaacattgcttgccttgcgaaagtgaagataatgaaaaaatctggaaaatgggaaaccatggaaattccacaaagtattcggtccattgtttgtctcaatttgcccagcttctctggtggactaaacccttggggaacaccaagtaagaggaagcaaagaaaacgagacttggtgatgcctccacttgtggatgatggccttctagaggttgtgggtttcaaagatgcttggcatggccttgtcttgctatctccaaaaggccatggaactcgccttgctcaggctcaccgtgtccgattcgagttcctcagaggcgcaactgatcatgcttacatgagaatggatggggaaccctggaagcagcctcttcccacggatgatggcaaagtcgtggtagagatctcccatgctgggcaggtgaagatgctcgcgaccaaagactgcatagccaaaggggtccatgaccatgagtcgtgcccagctatttcaacggttcatccagagtccatctacaacgacatgaacgatgacttcgaggaggaacggaggaactttggtgccgccttgtcgtttcgatacttgagtgatgtgaacaaacaataagaactcatgtttttattgagccttgggacaggttgcttgcatagggcgtagcaaagtagtttgatgcactaacttatgtaagattgtaagttgcccatgtaagataacttttgctggcaatacaacggattctgggttgactgtttgtatcatcagtatttt

SEQ ID NO: 112731 - DNA, 264 bp, Zea Mays
atggcgagccgtggcagcgccgctcttgtcgtggcgtgtctccttgtcgcggtcaccgtggccgccgcagtcccgccgccggtgtcggtgtcgcagctgttctgcagaaaggtgtacgggatgcatgagcgggagacgtgcttcgctgtggcgcaggccgccgggctgaccctgaagcagttcctccgcttcaaccccaacgtcaactgccgaaagctcttcatcggccagtgggtttgtcttgacgctattctcgtttcttag

SEQ ID NO: 112732 - DNA, 1882 bp, Zea Mays
ggagtataaaagctagctccggtccccgggggccgcggcctcgggctgccgctggttccgaacgcgtggtgcgacccgggattccctcgcgcttctctgtgtccccttcctccggcctgaggggaggaccccgcagatcccatcgaaattcacggccggcctaacccaagccggtcctccccgactcccggcgacgaccaatttctccttgttctcgcccctccaacccttcatgatgcttagataatatacagtgctgggttttagcactgttttgagtttttaaattgagctaaggcttcagtgttagtcttgaaagatgaacggttcaagtggttcccaagggcatcatgtcagtggagagaagaagcaagtgtgtcatgttagccggcccattcttaacaatggaccaaagcaccgtccattgacccccatgaggcgatgccgtggtgtagcatgtgtagtgattatactgtcaacagcattcctgttggtagtttacttggctcctattactacttttgctgtgcggctgttcagtgtgcattacagccgaaaggcgacttcctttctatttggaatgtggttatctttatggccgttcttgtttgagaagataaacaaaaccaaggttgtcttctccggtgaaaatgtgcctccaaaacgacgtgtattgttatttgctaaccacaggaccgaggttgactggatgtacttgtgggatcttgcactgaggaaaggccatttaggatatatcaagtacatacttaagagcagcttgatgaagttgcctatttttagctgggcatttcacatttttgagtttatcccggtagaacggaaatgggagattgatgaagcaattattcagaacaagctatcaaaatttaagaacccgagagatcctatctggttggcggtttttcctgaaggcacggattatactgagaagaaatgcatcatgagtcaagagtatgcttcagaacatggcttgcctatgctagaacatgtcctccttccaaagacaaagggcttcatttgttgtttgcaagagctgaggagttccttagatgcagtttatgatgtcacaatagcatacaagcatcgactcccagattttctggacaatgtgtatggcgttgatccttctgaagtccacatccacgtcagaatggttcagctccatcacatccccacaacagaagacaagataacagaatggatggtagagaggtttaggcagaaggaccagctcctggcagatttcttcatgaaggggcactttcctgatgaaggaactgaaggagatctgtcgacgccgaagtgcctggcaaacttcttaacagtagtatgcttgacggccatctgtttgtacctaactcttttctcatttgtgtggttcaaggtctatgttgtagcaagctgcgcttacctctcatttgttacctattactccatactaccaccccaactgataggttcaccagagggtgatgtcaaggccaaaaaggttgtgtagatgttgatgtaacttgccatgaaaactgtacatccgcaaacgatttttactgctggagtttctgccttgtgacatttaaggttccctttctgcagtaggaggtatgaatgtatgatagtgcgtatgtaggaattttctgtgattcatcagtgtgtgagggccctatctgaaggcagtaaactgattttagatatatgttcttaacatttttataaacaaaactagaccacatttgttacaaatattgaagatttatttatttattttatttgatctttgttctgatgcaaacaatcaaacattagctatatccaacttgaatatattaatacaaacaaccaaacaaaaacaaccaaacaaacg

SEQ ID NO: 112733 - DNA, 999 bp, Zea Mays
ttaatgtgcatgattcttcctcttttcctatattttgttgctgattgctgattcaatcttagtgagaagaaatgcatcatgagtcaagagtatgcttcagaacatggcttgcctatgctagaacatgtcctccttccaaagacaaagggcttcatttgttgtttgcaagagctgaggagttccttagatgcagtttatgatgtcacaatagcatacaagcatcgactcccagattttctggacaatgtgtatggcgttgatccttctgaagtccacatccacgtcagaatggttcagctccatcacatccccacaacagaagacaagataacagaatggatggtagagaggtttaggcagaaggaccagctcctggcagatttcttcatgaaggggcactttcctgatgaaggaactgaaggagatctgtcgacgccgaagtgcctggcaaacttcttaacagtagtatgcttgacggccatctgtttgtacctaactcttttctcatttgtgtggttcaaggtctatgttgtagcaagctgcgcttacctctcatttgttacctattactccatactaccaccccaactgataggttcaccagagggtgatgtcaaggccaaaaaggttgtgtagatgttgatgtaacttgccatgaaaactgtacatccgcaaacgatttttactgctggagtttctgccttgtgacatttaaggttccctttctgcagtaggaggtatgaatgtatgatagtgcgtatgtaggaattttctgtgattcatcagtgtgtgagggccctatctgaaggcagtaaactgattttagatatatgttcttaacatttttataaacaaaactagaccacatttgttacaaatattgaagatttatttatttattttatttgatctttgttctgatgcaaacaatcaaacattagctatatccaacttgaatatattaatacaaacaaccaaacaaaaacaaccaaacaaacg

SEQ ID NO: 112734 - DNA, 102 bp, Zea Mays
gaactcaatattttgctagctaatatgaatgaacattttttgcttccgcttgtccaaacaggccataaatctttcgctcagcatttgtccatttgccaactc

SEQ ID NO: 112735 - DNA, 78 bp, Zea Mays
caacagtgaaactttgtcagaacatgtcctcggtctgatctgtactcctaactacgtactctacccaaagaaaaaaaa

SEQ ID NO: 112736 - DNA, 1746 bp, Zea Mays
tgaggctgtccgcagtgaacgacttcaaatgcctactctaaaggtatagagtacgtatagagtgactgaacagctgcagtgaaggacttcaaatcgcaccctacggtagagttcacgttctctcaccccagatgtagtgcagtacggagatcaactctatcttgcgtgtgcatgcatggattggagggaggaaagagagagataggggtagcagttaaaaataataataataaatatggtagttggtatatgttagatatttagagtaaacatgactgcagagtattgttggatagagtagaaaacctcgctgaccaggatagaatatttcttttagagtagagaaataggatagtatgactgcggatagcctgaagaagcatatacaaacatcaacatcccatccatcatccataggttaaaagggcaagcacccgcacaacaccaagcttcctctaagaggctcagaccctcatcaccaactcccctccatctcgctcccggtcctcactctcctctccgcctcctccctcctctccctttcgaaaccccatcttcgttggcgtagggctcgggggttggagtttgggctcgggggttagagtttggaggaagcattcgtgaagactctgtggcgacttctccagatcggcagatccgtctttctgggcgatttggagcgaagcccccaagtagtttgttacagaaagcagcggcttttgcgtcgctcctgcgtcagtgtacctgttgcgttcgtcgttcctggccccggccttcggatcatatatatccagctaggaaaaggggcactttgcatttattctttggccccttcggagatcgccctcgtcaagatttgatcaatctgtggccgttgtttccatcggagctgttgaggtttgtcttcttctcggccgaagacatggcggcggcgaacggagctgccggtgcggtgctgttcagcgaggaggacctgagggaggtgagtggggtgcgctggggagaggacttcgtggaggtgacgtgcggatgcaccagccaccgctacggcgacgccgtcggccgcctccgcgtctttgcgtcaggcgacctggagatcaactgcgagtgcacgcccggctgccgcgaagacaagatgacacctgctgcctttgagaagcactccggaaaggagacagctggaaagtggaggaacaccgtctgggtaatggtccagggggaaaaagtgccactgtcaaagacggctctgctcaaatactactacctggcgcacaagtcaggcaacggttctcacaagggccgtaacggacgtccgtcccaccgcgacgagttcatctgctgcgcaggatgtggcaaggagaggaggtttcggctccggtcaaaggaagagtgccgtgtttaccatgacgctcttgccaaagctagctggacgtgtgcggatttgacaactgataggtatgtgttctcacacttttggccactgtgacgttaatttgtgaaccttttgggcaatgatgacccatgccatagcctacttttcgaaaacaacagagaggtccacaatagctgagatgaatccaaagcatacaaaattaggcgagtaaaatacattttcggtccttaaacctgtctggctgtgtaacgttatacatcttgacaagtttaaggacccgaaatgtattcatctcagctattgtggccctctgttcgaactgttcatttcaatcaggccacggactggtacca

SEQ ID NO: 112737 - DNA, 2381 bp, Zea Mays
tgaggctgtccgcagtgaacgacttcaaatgcctactctaaaggtatagagtacgtatagagtgactgaacagctgcagtgaaggacttcaaatcgcaccctacggtagagttcacgttctctcaccccagatgtagtgcagtacggagatcaactctatcttgcgtgtgcatgcatggattggagggaggaaagagagagataggggtagcagttaaaaataataataataaatatggtagttggtatatgttagatatttagagtaaacatgactgcagagtattgttggatagagtagaaaacctcgctgaccaggatagaatatttcttttagagtagagaaataggatagtatgactgcggatagcctgaagaagcatatacaaacatcaacatcccatccatcatccataggttaaaagggcaagcacccgcacaacaccaagcttcctctaagaggctcagaccctcatcaccaactcccctccatctcgctcccggtcctcactctcctctccgcctcctccctcctctccctttcgaaaccccatcttcgttggcgtagggctcgggggttggagtttgggctcgggggttagagtttggaggaagcattcgtgaagactctgtggcgacttctccagatcggcagatccgtctttctgggcgatttggagcgaagcccccaagtagtttgttacagaaagcagcggcttttgcgtcgctcctgcgtcagtgtacctgttgcgttcgtcgttcctggccccggccttcggatcatatatatccagctaggaaaaggggcactttgcatttattctttggccccttcggagatcgccctcgtcaagatttgatcaatctgtggccgttgtttccatcggagctgttgaggtttgtcttcttctcggccgaagacatggcggcggcgaacggagctgccggtgcggtgctgttcagcgaggaggacctgagggaggtgagtggggtgcgctggggagaggacttcgtggaggtgacgtgcggatgcaccagccaccgctacggcgacgccgtcggccgcctccgcgtctttgcgtcaggcgacctggagatcaactgcgagtgcacgcccggctgccgcgaagacaagatgacacctgctgcctttgagaagcactccggaaaggagacagctggaaagtggaggaacaccgtctgggtaatggtccagggggaaaaagtgccactgtcaaagacggctctgctcaaatactactacctggcgcacaagtcaggcaacggttctcacaagggccgtaacggacgtccgtcccaccgcgacgagttcatctgctgcgcaggatgtggcaaggagaggaggtttcggctccggtcaaaggaagagtgccgtgtttaccatgacgctcttgccaaagctagctggacgtgtgcggatttgacaactgatagggtcacctgtgacgacgaggaggagcgtgcaagccgcaaggtcctgcggggctgctcccgcgcgccgtcctgcacgggctgcatgaagtgcgtgtgcttcggctgcgagacctgccgcttcaaggactgcgactgccagacctgcgttgacttctaccgcaactccaaggaataataaaaacacaaggatctaacgccattggttccagcaggagtgctctcaacaacaatgccgatgactgtagggcaggccgctattctattctattctaaacaattccattcgcctaccattctccatggctggctggtgctatagtatccgtcgagcagcgatggacgccggccgattttgctacagtgcagtctaccaatggttcccgacttcccgttaaaacgcgcattgctcacatcaagatctctctcgtagtcgtgcaagtgaaaatgttcgttcggttgctttgatgcgcacgtaggactgtaggagtatagtgctactcctgtgtatgtcccccggttttttatttggtggtaaaaggagctctgacatgagagcagacacaaagattgacctttctcctgtagacgacgcagtatgctcgtcagctcgtcaggatgtagggctatagtagctgtgtagctgtactctttccctccgtccttgtcctgaacaagtgctctcgttgatgtttgtgtcattcaattattttaaatttattaataacatttatattgtaaatctttttattaaaaatagatttaataatttgtttgatcttattaactatatgatgctatatttttaaataaaattattataaaacatgtttaatgatttttttagtgacactaatcatatattataaatactagtatacatataattaaaatttaaatagttgaacttaaaaacagaaataaaaaaa

SEQ ID NO: 112738 - DNA, 1399 bp, Zea Mays
gtgggatttgcccctccctctgttcagtcgtggtgtccatccagcagtacaacaaattataacgtctctgttcatgttcaggccttcgtttgcatggattaggacctgttcccgtttagagttgcatgctgctgtcttttgtagatagacaagatgacacctgctgcctttgagaagcactccggaaaggagacagctggaaagtggaggaacaccgtctgggtaatggtccagggggaaaaagtgccactgtcaaagacggctctgctcaaatactactacctggcgcacaagtcaggcaacggttctcacaagggccgtaacggacgtccgtcccaccgcgacgagttcatctgctgcgcaggatgtggcaaggagaggaggtttcggctccggtcaaaggaagagtgccgtgtttaccatgacgctcttgccaaagctagctggacgtgtgcggatttgacaactgatagggtcacctgtgacgacgaggaggagcgtgcaagccgcaaggtcctgcggggctgctcccgcgcgccgtcctgcacgggctgcatgaagtgcgtgtgcttcggctgcgagacctgccgcttcaaggactgcgactgccagacctgcgttgacttctaccgcaactccaaggaataataaaaacacaaggatctaacgccattggttccagcaggagtgctctcaacaacaatgccgatgactgtagggcaggccgctattctattctattctaaacaattccattcgcctaccattctccatggctggctggtgctatagtatccgtcgagcagcgatggacgccggccgattttgctacagtgcagtctaccaatggttcccgacttcccgttaaaacgcgcattgctcacatcaagatctctctcgtagtcgtgcaagtgaaaatgttcgttcggttgctttgatgcgcacgtaggactgtaggagtatagtgctactcctgtgtatgtcccccggttttttatttggtggtaaaaggagctctgacatgagagcagacacaaagattgacctttctcctgtagacgacgcagtatgctcgtcagctcgtcaggatgtagggctatagtagctgtgtagctgtactctttccctccgtccttgtcctgaacaagtgctctcgttgatgtttgtgtcattcaattattttaaatttattaataacatttatattgtaaatctttttattaaaaatagatttaataatttgtttgatcttattaactatatgatgctatatttttaaataaaattattataaaacatgtttaatgatttttttagtgacactaatcatatattataaatactagtatacatataattaaaatttaaatagttgaacttaaaaacagaaataaaaaaa

SEQ ID NO: 112739 - DNA, 2429 bp, Zea Mays
ccgaacgatagcagtgcccgctcccagctcccttggacccgggcctagctttgactggccgcgtgctctctcgccattgtctgcatgagcacatcgaattccttccatctctgatctctcccactcccacgtcccacccataaatacttggccaccatctttcctggccttccatttcccaaaaaaaacgcaagcatagatcagtggataccactccatcatcctgcttggccccggccggctggtagatcgtcgttccggagtcgtcgactggaataacgaactggcgcagcaggaggccaataatggccaccatgaagctgggttccaagccggagattttcgtcctccaagacctcacatggagatgcacgaccgagctcgagagtgatgtagttgtcgaagtcggagagatgtccttttacctccacaagttcccgctgctgagccggagcggcgtgctgcagcggatgatcagcgagtaccaggctccggcggatggcggcggcatgtgcacgctgcagctggacgacatccccggaggcgccaaggccttcgagctggcggccaagttctgctacgacgtcaagatcgagctcaacgcgctcaacgtggtgtgcctccgctgcgccgccgagtacctgcgcatgacggacgactacgccgagggcaacctcatcacgcaggccgagtgcttcctcgtcgacgtgctcgccaactggaaggactccatcaaggcgctcgagacctgcgagggcgtgctccccactgccgaggacctgcacctcgtctcgcgctgcatcacggcgctggcctccaaggcctgcggctccgacgctgccgcgccagtggtcaggaacgccagcgtcgacaaggacgcgctctggaacggcatccggtcgggcgacacgacgtcctccgccgccgcggcggcggcggcggccgggatggactggtggtacgaggacgtgtccttcctcagcctgcccatgttcaagcgcctcatccaggcgatggaggccaagggcatgcgcgacgagagcatcgccggcgccatcatgttctacgccgggcggttcctcccggggctgaagcgcaacaccagcttcagcaacgcgctggccagctacggcgccgacggcagcggcggcgccggcggtggcatgagcagccgcaacatcaccccgcgcgccgccagcgtgtccgctccgtcggagggcgaccagaggtacttcctggaggagatcgtggcgctgctgccgaccaagaagggcgtggcctccaccaagttcctgctgggaatgctgcgcacggcgatgctcctccacgccagcccactgtgccgggagaatctggagcggcggatcggcgcgcagctggaggacgcgtcgctggacgacctgctcgtgcccaacctcggctaccacgtcgagacgctctatgacatcgactgcgtgcagcggatcctggactacttcatgtcgtccacggacgggatcgggaccgggtacacgtcgccggcgctggcagaggagggtggcggcagcctcgggataccccaaggcgcgacgccgtcgtcgtcgctgtcgccgatcaccatggtggccaagctcatggacggtttcctcgcggaggtggcgccggacaccaacctgaagctgcccaagttccaggcgctcgcggccgtggtgcccgactacgcgcgccccgtcgacgacggcatctaccgcgccatcgatatatacctcaagtcgcacccgtggctgtcagaatcggagagggagcagctgtgccggctgctgaactgccagaagctgtcgctggaggcgtgcacgcacgcggcgcagaacgagcggctgccgcttcgggtggtggtgcaggtgctcttcttcgagcagctccgcctgcgaacgtccatagccgggtggttcttcgtgtcagacaacgcggcagggggcgacggcgcgcgcccacacgccggcggcgccatcgtccccaagggcaccgcggccatcgcaggctgcccgcaagcagacgccgacagtgacgtagagggcgacgcacccgatgggaaggagaccatcaccgacgtgaaagcgcgggtgtcggacctggagaaggagtgcaagagcatgaagcaggagatccggcggctcgggaagccccggcggtcctggagcctcctcacaaggaagtgcggttttggggccaaggtgcaacaagcgcagactgccatgagcggcaaatagattattttcccacttcatttgtttattaggcaggagcctcgattgcattccctaaggagtcttatcatctatttgctacagtaacagttcctaatctagccctagctcctagtgttatgcaataattacgtgcggatggtttgcacgggatgataataaacgtaacttcagcttcagcac

SEQ ID NO: 112740 - DNA, 1511 bp, Zea Mays
tttcttttgtaccgtgaatacccttgcaccagtgtgcattgccgtgcattaccaaattccgtccgataaactaataaacaggtggccactgtatcaacaggtactcacatgtcagccaataagtactgtacctgtatggctggttgccactgtttcaagtcagccagcagcaacctattcctgctcgaccgtacagtcctcgtagactagctggccactttctccgcttcccgctgaacctactcgaccgccagatccccacgccacgctcccatcaccaattcaccaccatcgtccatagcctcctcccgcttgaagtaccccgtgctggagtccaagaacccgccctcgaggcccaggtaccgcttctccccctctcactggtcaccacacaccacactactgagtccagaccacggccaacgcggcaggtggagacatgggatgttgcttcagcaagaagcgcaagacccgtccggtggccggagcctctgccttcccgcaccggtgcgagcccgaggaccgcgacccgccgtcgccagaggagacggtcaaggaggtgctctcggagacaccgaacactaagccgagggccgagtcgaagctcgtcggcaatggcgtcgtccccgccgcggacgagcgggaattggagaaggccaagaagcaggacagcgtcgacgccgcggtgagcgacctcggcagctgcgtgtcgctctcgctcgccaccgacgagcggtccgaggcggtgtcggagtcctcggtcgccaccagctcggtgaccggtccggagcggtcgcccgggaggaagccggccaggaggcgcccggtctccgtcgatctggggccagcgcggcgcgcccacgccgccgccgcggcctcctacggcgtccgctcccgcagcgcgcgagcgtcggcgtccccgccgccgcggcacgtgccacgggaccgctccgtccggcgttcgccgtcgccggcggccaatcggccgtcctctgagcgccgcagagccgccagcccagctgcgcccgtgcagcggaagccgcctgtcccggcaagtccggccggccgcgtctcgccgcggcgggcacaggaagcagcaactcctccgcgttccgccaccccgccgtcgccgccggaagacgacgccgtcaccgcggcaagtgagcccagcaccccggacggcagcgcgggtggcgatgttgaaggtggccacggcggcggcggcgacgacgggaaagagtcgttggagaacccgctagtgtcattggaatgtttcatcttcctgtagcgctgcgctggtgcagtgatgtgatctctcgcgccattccccttcgaaagccttgggctagctaatcgggtttagtctgtttagatgctagcgcagcagttagttgtagccttgtagggggcatggtgattcagcgaccttccgttaactttgacttttcagagccgtgtctgacgatgtgctttggcttttggcgtcctatattgcagagatgtttctgtaa

SEQ ID NO: 112741 - DNA, 219 bp, Zea Mays
atgtgccatccagggctgccgcctctgccgccggactgcgcagtcaggcggcgggagcagcaggcgaccgtggcaccgtcgcccccaccatctgtgccacgggcgcgccaggcgtcgccgcactactactgcgtgtgctcgcccacgacgcaccggggctcgttcaggtgccggtggcaccgcaacggcttcgagtgggggcgccggcgggcgtttgcg

SEQ ID NO: 112742 - DNA, 710 bp, Zea Mays
gcacgggttagctctggctctcctgctatagatatgagatgcaagaggcggccaaggctcggcatggggtggcttcgctccgtgctctccccgctcaggaagctctggtgccgcgtcaacgcggtgcagcgcaagaagagagggatctacatcctgtacgacgacgtcaagtcgtgccaatgcgaggacgtgcacgtgctgtgggcgatcctcgttgagtcccacggcctgccgacgccgacgccgacgccgcctctgctgagcctgaagcgatgaggggcggcgggtgctccgccgctgcaccccctgaataagcgaacggtccatggatatacctcgacatggctatgtcgctgagaggtgaattcaagtagtagcgattctgaattctgatgtacatagggatcaaccgatgtgtgttgtgtcgccggtgtgctgctctgctgccggcctggattggtgcctctgttggaggctgccgagacgagagtggtcgtgcagctgcggaggaatgcagctgccgcgcgtgtcgctttgttgacgagtgtggtgatgagcttcttggagttggagcgcacccctcgttcgtttgacttctacagtttacgtacgtgtaagactgcatctggatgcggtccttcagcccatctctattggagtttggaagggaatagcaggaacagaaattgaatcctcaccgattttctgaa

SEQ ID NO: 112743 - DNA, 4244 bp, Zea Mays
atgggtggcagtgaggcgatatgcgaggcgagcactgaaccccaaggcaaaggtagatatgaactcttatgtttgttaattgtgaaatttgctgtacttatctatgctctgcatataccgttcaggtttaatcaagttatggccactatagttgaagggtgtgttggtcccagtgagcttcacctgaagaaggaacttattgccttgagaaaggcacgtttcttgcgtgatcccgaaacatgctcatcctggaggtccccgttaagctctaaatcattcttgtcaacttctggtgttataaatcataatgaggtaggcagtagtttgtcagaaaagcgcacagagccagctgcagcaccagtcaaaagtgaaaagaaaagaaaaaacgtttatctctacaactggagacatcattctaacaaatctagtgaaagtggagtgaagttagatgtggacgatagacaagcctcagtagactgtagtctggaaagcccgtgtatttctaacggtatggactctaggagtgacacatgtcttgaagttcctgtcagcatatacagtgttcaaggttctaattcatgcactcctgttaaaagaactgttagaagggtaaggaggagttcattctcaaagaaaggagctatgagaaattctactgtttcaaagttgctagatctccatgtgaattctgctgagcagtctgaggatactgagaactacaactcagagactcatgagcaccttcagaaagtagggtatttttctcactctacatcaccactgtttgctgcatcagggtgttttagctcaacaaatccttctaagctgttgagagtgccaagaagagaaggatcttccttctcttgtactccggtctccactagctcctattacaggtacaaagggaggaatcctagtactgtaggttcatgggatggaacaactgctgcttcacttgatgacgatgggctgaaccaaccagaactgttgacaaatcagaggtgtggtattccttgttattggtcaaagaggagtaaacacaagggatctgaaaggagttgttctccttcactttctgatacacttagaagaaaaggcaccagtctattgtgtgggagtcaaactatgcatgggagaaagaaatcatcaggctccaataaatatggatatcttaaaaaatcttcccaaggtgtaccactgttgggtgatagtagtcattttgcttattcgtcatttgattcagctagtgatgaagtttcaaccatctttggagaattagatctggaagctttgagccgtttggatggcagaaggtggtcaagctgtaaaagccaggatgggattgcactgtctgtgagtggagctgatcatgtagtttcagatcacagaagcttgagccaaaaatatcgaccaaggtcatttctagaaattgttggtcaaaactttgttgtacagtcacttagtaatgctatcgcaagggaaagaatagctccagcatatctgttccatgggccccgcgggacagggaaaacatcttctgcaagaatactttcagcagctttaagttgtactgctactggagagaccaagccctgtggagtttgtactgagtgcagtgactttttcactggaaatggaactaatctaattgaggttgatgctaccaacagaaaaggtataaacagagtacgccatttgattgaaaatataccagcatctgcaacttcttcacggtacaaagtatttgtcgtggatgaatgccatatggtatcttctaaagtctggtcggcatttatgaaatttcttgatgaaccattacctcgcgttgtcttcatatttataacaatagaccctgaaaatcttccccgttctgtcgtatcacgttgtcaaaagtacatgttctccaagatcaaagacattgacatagtatgccggctgaggaagattgctatgaaggaaaaccttgacgttgaattggctgctctagatttaatagcactaaattcagatggatcattgagagatgcggagacaatgttagatcagttgtgtttactagggaagaagataacaccatcacttgtaaatgatctggttggggttgtgtctgaggagaaactccttgacctattggagatagccatgtcatcaaacactgctgaaacagtcaaaaggtcgagagagctgatggattctggtgttgatccaatggcattaatgtcacaattagctgggctcataatggacatcattgctgggacctatagattggcagaccctacatgcggtggagatggaattggtggtcgaaatataactgatgctgaattggaaagattacaacaagcgttgaggattctttctgatgctgaaaaacagataagactttcaagcgagcgttcgacatggttcactgctgctttactccagcttggttccggtcacaattcagaaataactcaatcaagaagcagcagtaagcaaagcgctaaggcaaccagcgaaaccatgatggaagcaatgagagaatcttctgcaagcaggagtacagctcatcatttatccacttttcctgattcaaagaaaatagtggatctgaaaacaaccagtgggcactccagtcctcatgcttcactgtcctccaggatgagacacaatgaaaacatgatttatgccgagcatatgtctgttgatagagcattattggattctgctcaaacaagtatttcttctgagcaaaagggtatgcatagtggaatctcagataaccttacccgaatttggatgaagtgcatagagaattgccactccaagacattgcggcaacttctctatgatcatgggaaattaacatctgtcaaagaatgtgaaggtaccattgttgcttttatagcatttgaggacaatgatataaagtttcgagcccaaagatttattagcagcatcagaaattcaatggaaactgtactgaaatgcaatgtggaagtcaggatttgtttgatgcaagaatttcttgctgggggactaaagcatgagacatacccagatgagacagctgaatctgatgtcttgagttgttcaacgaacagtgaacgtcgaaagggtgttctgaatctatcaggtgctggtggagtgcagccaaacaatgttcccatgatcatctctgaggaaacttcaggaatgcatagaacaagagggcaggatgtttctattgaacagttgaaggtatcagcttttgatgaacaaaggttagagagtgcatggctccaggctgctgaaaaacccatgcctggtatgttaaatcaaggtagacctgagagaaatcaaattcttccacaaaatggtggtcagcatcatggtaggtcctcaatggccaccgttgttccgtcaaggcatgttgacaaggatctatctaatgaactgaaagccttaaagatcagtgacagtcatggaccccataatggtcaagatgtacagatggagagtggttatgccatttcaccaagccttttgcatagaaataaccatttggcaaattgtgacaatgagagcgttgtttctgagtccggagcacccggttgccatgggctgttcccatgctggaaaactgaaaaaacgaaaaggagaaagggaaaagggcagacacggttgaggtcatcttaagttggcaattgacgacgataaaaggagcattgtggccctggattgtagaggaacatttgaagagatgcacgtgcctcacgaaactgccttacttcatttcttctagaggatttatgaagaccaattcgttattccatgcatttaatgctgccgctgagggttcagcattctctacgcgtggactcagcagagggtgataaaaagttgcagagatgttggacatgcggattttaacaagccattctgatccatctatgcttcttgtacagacatttggatgctgaggcgtatacgtgaagcggtcagcaaaattaggaaacattggttagcgagttaatgaggcgcaattatttttcagcatttttagtactgtgtttgacagcatttgaatttactttgcatttgttattgtaccaattcctttttttttgttagaacaaaggaagaccttgcgtcgataagctgtggttttatcaagtttgtacaaaaactggttagctcctgcatttgtgtagacttctttgtcatttcgtgtcggttgtttaaaaccctctattctactactatgctaacactggata

SEQ ID NO: 112744 - DNA, 1413 bp, Zea Mays
gtctgagctccacccccaccgtagcggtgccaatgccgcagtggtggggccaagaagcgcggggtggcggtgacaacacgtcggtggtggtgaagatggagagcccggactgggccgtccgggagccagaggcggcgaggggaaggccgaccgcggcaagaacgctcgccagatcacgtgggtgcttctgctcaaggcgcaccgcgccgcggggaagctcacgggcgccgcctccgccgcgctgtccccgtctacaccgagttcccccccgcgcgatttaacccctcgcctcgctcgtagcctccggttccctacaacgtgcacgcgatgttcgttcctcggccgctctccctagccacgtccttttccccccagagatctctgctggacgtgaggttcatcgattcaccttctccggggctgccagatctccgcggcggctggggatgggcaactgctgcgtaacaacgaatggagccgccgacgccggcgacggcaagaagtccaaggagccgaagcagaagattaaagaagggagggagcctgacgagatgtgtgagctggtcgattgacgacgactgcacaacgcctggagcacggcacgctgcctcaaacggacttgctggccgacgctctcgctggctagctcgacaatagtagttgcagcctatccgatctcaagaggaaggtgaggagtttgcagagctggtacgccaaagcggtcaagaaaggtgcgccaccgagcaaggatcaggatcgtcgtctcttcgacctctgcaagagccccgtggtgcgctccgcatccggcaatgccggggattttggctcgggcttgatgcgcttgacgcggatgtagaagcagccaaggcacaggatgaggcggtcggcgctctggacgaggaagagcacgacgcatgcatcggtgaggaactgtatccccggcgcaacgtaggcggcgtggaagcgcagccaggaggcgtacagcgactcgaggccgagggcggggagggcgagcgcggaggcggcgaggtcccagccgttgatgtacgccgcgaccttgacgaccagcaggagcagggagacgacgaggaaggccctgatgaaggcgtagaacccagagcgcaccacggggctctcgccggcgacggccagcacccaaggcagttaccaaggcgtcggctaacgatggtgctgggagggagcctgacgagatgtgtgagctgtataccttgcagaggaggtgtgtatcgacttatctccgtatttaatgttattgcgatatatttgacgccgattggccggtcttaaaaggtgcaaaagctgcttggttgttggcttgcttgttccctgtagctactactgcagcgtagcctgtgaataaaccaggtgagggcactggtgtattttttctcg

SEQ ID NO: 112745 - DNA, 905 bp, Zea Mays
gaagccaaagatttttttttgaaaggtcaaatctttgtttcccctcttccgcctccgctcccatccgcatcgccgcctccgtccctgtacccgtcacgtccgccgcgcgagagccactcgaagccgccgcggtcatccgcccacgcaaagcctccacctcctccccttcctagagctcgtcgtgggaggctacctcaagctcgccgtgctgtgcgttgcgcggcagcggctgctgtcgctgtcggtgtcgctgtgctacgctcaccccgccgattcctccgccacccgcgcacgccgaacaatttttggtggcctcggaccttaagctttttccgctagggtcggctccaaggtcgaccgtgtatgccctagccgaacgggaacagacatgaaagaggcgatggctgtggctgcgctagatgagatatggtggcgggagccagaggaggaagcgccggtggagtggacgtggagctggggcgcgggcacggacgggcagctggggaacggcggattcgacgaccaccaccttccgcagccgctgcttctcccgactcgatgccgcagccgtgtctctttcgtcgctggtggcggcgcccacgctatcgccctcacaagtaagcctggccacctatttgagctgccaccataagaggctgtaataatataggggttgatcaagtgaactctcgcagtggtttctccatgtttgatgtgttgaccactgttgtagaaaactagaaatagtagtgtgatgatagtagttatgctaaaagttgaaattttgagttgccaaggataggatagtcttggcaaccaagttgggggcagattgacctcctaccatgctcagctatccaatgtatatcaagccaacattaacccaaattggtacaattctagaa

SEQ ID NO: 112746 - DNA, 805 bp, Zea Mays
agacaattcagtgtatggatttggctcagcaagacgaggacaagttggtaaatgtgcttctaggatccaaaaatcatataatgttcctagactgattgatggttttccaaattgtaagatagtaaatatatatgccaatggcgatcacagtgctgcattggacgaatctggtcatctgtatgtctggggaagagcattaattggacaacatgatgatgatcaaccttcggaaattttgccctccttgagtgtttctcaagtggcactaggatggcaccatgctttagttttatctgctggagaattgtacacacttggtgtttaccgccaccagaaatgtgatctccctgggttaggaaatgtattggggcagcaatcggacacaagggcaacaagcagttctcatgattgttcatcctctttgtcagtgttggagacggttccattccttgatggagaacaggtggcgcaaatagcaagtggaactgagcactctgctttggtaacagataaaggaacagtcttcacctggggctggggagagcatggacagcttggtttgggtgacacttcggatcatgtagctcctcagagagtaaacgtaggtgacaatgggcagggcatgtccggttcatttgccgtctactgtgggagtggatttaccgttgctgtgaaatcgccctagtggctgtctagtttgtaatgcatgcaccaaattctccttcccacataacagtgaagaaataaacgacaacattttgttgtgatgccgtgaaggtagtggttggattattattttgcaaat

SEQ ID NO: 112747 - DNA, 2869 bp, Zea Mays
atggcgaggcgcaaggatggctggggcgacggcgacaagatcaagattggtgtctgcgtcatggaaaaaaaggtgtcgtgttctcccatggaacagattcttgagaggctgcgtgcgttcggcgagttcgagattataatttttggtgacaaagtgattcttgaagatcccattgaaagttggcctatatgtgattgtctaatcgccttttactcgtctgggtatccactagaaaaggcagagaaatatgctgctttacgaaggccctttttggtgaacgagttggcccctcaataccttcttcatgaccgcagcaaagtatatcagcaacttaagttgtatggggttcctgttccaacctatgctgttgtcagaagagaatatcctaatcaagaattaagctattttcttgaggaagacgattttattgagatccatgggaagcggttttgcaagcctttcgtggagaaacccattgatggtgatgaccataacataatgatatactatcccagctcagctggtggaggaatgaaagaactgtttcgtaaggtttatacagttgggcctgtatatgcacatgctgaagcacggaagtctccagttgtggatggggttgtcacaaggaattctgatggaaaagaggtgcgctatccggttctattaaccccttctgagaaacaaatcgcaaggagcatttgccaagccttcagacaagcggtgtgcggttttgatcttctaaggtgcgacatgggagaggcaacatcctatgtatgtgatgtcaatggctggagtttcgtgaaaagttcatacaagtactatgatgatgctgcatgcattctgaggaaaatatttcttgatgagaaagctccacatattccatcaaccattcctactaatctcccatggaaaatcagtgagccagctcaagcatctgatactgcgagatgtcgtgagagggtaactgttggattatctaggccatcagaagagctgcgctgtgtcatagctgttatacgccatggggatcgcacaccgaagcagaaggtgaagctaaaagtaactgaagaaaagcttttgaaattgatgttgaaatacaatggtggaaaggcccatgcagaggctaagcttaaaagtgctttgcagctgcaagatctattagatgcaacaagaattctggttccacgtgctagatctggtcgtgaaagtgatagcgacattgaagttgagcacgcagagaagctacgccaagttagagccgtccttgaagagggtggacatttttctggtatctataggaaggtacagctaaaaccatcaaactgggttcgcgttcctaaagataacagagaaggggaggagtatccagttgaagccctaatggttcttaagtatggtggtgttctaactcatgcaggaaggaagcaggcagaagaattgggaagatatttcagaaataatatgtatccaagtgaagggccaggattgcttcgcctccacagtacatataggcatgatctgaagatatacagttcagatgaaggccgcgttcagatgtctgctgcggcttttgctaaaggtcttcttgatttagagggggagttgacaccaatcctggtttcacttgttagtaaggactcgtctatgctagatggacttcaggatggaactattgacataaatgaagcaaaggctcagttgcatgatattattacatcttcagaagttgcacattataatgaacctatggaattcccatggatggttgatggagctagagtgcctaaaaatgctgctcagcttctcacagatttggctgagttgacaaaagaaataaccgcgcaagtaaagatgctttctgatgatgaagatgagaaagctgccataggtagtgattcaccaaatcctccttacgatatagccaaggcactggggaaagcagaaattgatacggatcgtcttttggctggattaccttgtggtagtgaaagctttcttttgatgtttgcccgttggaagaaactagagagggatctctacaatgaaaggaaaaagcgctttgacactacacaaattcctgacgtatgaccttcttcataactcacatctcaaccttactggtctgagtgatctcttcgaagtttctcagttgctagctgatagtgtcattccaaatgaatatggaataaatccaaagcagaaactcaaaattggctcaaagatagcacgccgtttattggggaagattctaattgacctgcataacacaagacgagaggttgctgctgctgctgctgaatctgacatatataatgatataatgacagtgtcatctgcaaaacggaaggagaggagttactatgaggaggttaagcatgaatgtgttgaaagatctatctctaacaagaagggcattgatctagatgactcccacgaggaaacaaaatactgcttggatccaaaatatgctaatgtggttgaacctgagcgacgtgttcgaacaaggctctattttacatcggtacctttggaagacccaaagagattccgtatagagatgacatttagtcgcggtgcagatataagttccttggagggtggaggcaaagaatctttgctgcctgatgaccacacaatgccgattatggagccagaaagattgcaggaagttggatcgtatatcaccttagacaaattcgataaaatggctcgcccatttgcaatgccagctgaagattttcctccagctgctcctcaacctttgcctgttcgcttctgcaaggacatcgaattacgaggaaaactgcagcataagtcagacatgatgagtggtgttttgaaaaggaagacaaaaaggcttcaggaatag

SEQ ID NO: 112748 - DNA, 2983 bp, Zea Mays
gaaaactcacaaaaatccctccaggttccagggggcgaggggagagagagagagagagagagagagagagttgagtgcgagagaggcgagggggcggcggcggcggcggcgacaatggggatccaggggctgctgccgcagttgaagtcaatcatggcgcccattagcgcggtggagctgcggggccagacggtggctgttgacacctattcctggctccacaagggcgctctatcctgcggcgaccgcctctgcaagggcatccccaccaccaggcatattgaatattgcatgcatcgggttaacatgttgcggcattttggtgtcagaccaattcttgtatttgatggaggccttctgccaataaagagctatcaagaggggaagcgagcaaggtcaagaaaggaaaaccttgagcgtgccagggaacatgaggctgctgggaactcacgtgctgcttttgagtgctatcagaaggctgttgacattacacctagaattgcttctgaactgattgaggtactgaagaaagaaaatgttaattatattgttgcaccttatgaagcagatgcgcaaatgacattcttatctgttaataaacttgttgatgctgtgatcactgaggattcagatttgataccatttggttgttctagaattattttcaaaatggacaaatttgggcaaggtgttgaatttcagattacacgcctagagcaaaacagagagcttgactttaatggattcacaagacagatgttacttgagatgtgtattttaagtggctgtgactatctcccctcattgccaggaatgggcgttaaacgagctcatgcactcatccaaaagctgaagtgtcacgaaaaggtgatcaagcacctgaggtatggtgctgtttctgttccacctcaatatgaagaggacttcaagaaagcaatctgggcatttaagttccaaagggtctacgatcctgctacagaagatattattcatttgtcaagtgtgcctcaaagcctcattgaagatttggaatttttaggcccatggttaccacagaatattgccaaaggcattgctctagggaacattgatccactcacgaaggaaccattcgagatcaatccagagtgcagtgcaccttctgttcataaggtttgtccaaccagagagcctattgcaccttcaaatgggaggaagaaactagatttgcctgtgcagaaaaatatattgaccaactatttctgcttagcatcccttgaggcaaaacggaaattcagggcgcctaaagtaacacataagcaacaaatattgaatgaagctttgcctagccctcaagctcaaggctctgctacctctgattcagttgaagatactaggttgccaacagatcgcattcaagcttctcaatgtagttctgagcatttaagctctgaacctcctcaaaatgacccaatcagtgttggctctcagtgtagttctgagcgtttcagctgtgagtaccccctcgatgattcagccaacatttcacaatgtagttcacttgatggtggtagtgatcctccttacaaggatactggcaataaagacagaaaggttgaggctggctacgacaacaaaaatagaatacctacaagtccttgcataatgggaaatttaccctggacatcagagccatttttagttccccataacgtgggaccatctataccagttcaacattatactgaaagcactgtggcctctaataataatggcattaccgtaagttcatacttcaaaacagcaaacaagagaatttgcacagatcaaggagaccagttagatgatgactatgatgttagtactggtaatctttgtggagatcaactgaggaaatctggcatgttgaagagaagaaagctttctggcatccaaaagtttgaagatgaaactttacagccgattcattctgacgatagtccaccattcgttgatgaaggtcaagatacagatgatcctgacgatacaaatataagaactgaaggaagatttggatgcaatgtttcccatgtgaatacatacagtggaattgcagaaaaatcaatggataagtttgctgcattgatatcatctttcagataccccggcccccgtgccagtggccttcgtgctcctttaaaggatgtgaaaaacacactttctgtgagatctattcttaaagctccagaaaaagacacattcagacgcacagcaaagaaaacaggtctaggccccccttcaaaaagcagatatacaagtgatgataagggaagtgctgccagcccccctgatattagcgcatttgcttataggcctatgaaaactgttgcttctgaccaaggcaaaaccacaggtaaaactacagacactattgatggccctcctgatctgggcttgcttgcatacacatctactgtctgctgtcccgagcggagcaaacatgcaggcaaccctcctgatctaagcacatttgcatataaacctgtgaaagctgcagtcggacgtttgaatgggagcagattcagagagaccgcaccgaaagcaactggagggacttctaggagccagttcaaatagaaccagtgccgttggctctctaaatgctgtggtgaaaggaaaacaacccctgatcagagcatttccgtttctgagcatcgttgaagatagttggcattgggcccccggaggacctcgaggggctgcagaggttcctttgcttcagagcccctctgtacctattcatcaacgtggaccctggaggaccgttactgcctgctagtagcagctcgttattttgagctcatcttttgtgctgctcgtcagctcgtgttcaaaccaagcctactgctcatttgctttccctgcagcagcagcagcccctactgttgcatcgaagaaagcaatctcattagcgactgcgttgaactgtagttaagatacttcttgtccatatccttgaggcatg

SEQ ID NO: 112749 - DNA, 147 bp, Zea Mays
tatgaatcatatcgagctccagatgtgaaagaagagaaaaacccagctgctggtccaggaaggatgtcacttagcttaccaacctgcccgtcagagagcatggacccccatctcgatgtgttctccccaaatttgctccccacctga

SEQ ID NO: 112750 - DNA, 2333 bp, Zea Mays
atcagcttttatactcattccttcaccctctcccatctctcgcctcgcctccccacgcgagcgagcccaacacgcaaacggaacgcttccgcgcccctccgccttatccgatggcgtccctcaccaccacaacctcctcaccggccgccctcccggcggccaccaccgcccccgcggcttcgtccatatctccccacgccggatcgaagcggccgctcctcgcgggcgacgacgcgccctggcgggccaccgcggccacctccgcggggcaggggatccgacccgtcccgcgcatcaaccacgcctccgtcctccgcgtttccacgcaggaagactccgccgcctacgccctcgccatcatgaagcatccggatccgattggcgaggggctggctatggaggcgttcgcggaggcagccgggccggagtgcatcgtgcccggacagcaagcgcctctaaggcttatggggctcaaggtctggcccgttgatatagatatgaagttcctagagccatttggacgggaactacattcaatgaaaaaagtgagtctttagcattagacttgtttacatgttttcccttgatgaatcgctgtttgtttgagttatgaaacgctcagttataaactagttagaaataatatgtgctaggtcacgatataaccttgtatggttttagcaatcatcaggtgggacatctgttcagtgttttcctgtaatttacatgattcatggatgtgtagccattgacagacttgtttgcactaagttgagagagataagtaggatatgcagttatcaatgtattaatacaccattatgtcatgataaacacgagaaaaaaaaaactcggccggggagggaaagaccgccctcccggtattatattaagaagagaccgaaacatggtcccggccgagaaaatccccgaaccctggccccccatcactagcgggccgtcaccgcccactctgcaacggcccagccggagggtggcgcgcaggacgtaacccgggagcgggtggggcacaacgaggggatttttttaaccaagccagaaattcgcccccgagggggatcgaacccaggacctggaggtgctactcggaagccttaaccattacgctagaggccctttcgcataaacacgagaaacacagtaagcatcatactcttcctttatagtgcaaacttgctaagtgcagccatatgtaaattggttatgtccctcttgcctaatatttgagggcaaatatagtggttctaatggtatagggaatttgtccactattgacttattgagcatggtttgaaagctctacttatatagtccagcaaacttttatctgagtagtttgaagaaatcaagaggataattacttttctgtttaagatttcttactcaagacatagatcctagttcactggattcatttctgaaatgaatgtagttttagatgagactctcacttgtgtaaggccagggtagtgctagagcagtggtatgtgctgtccatttatctttgttggaagagacatcatataggacctggtcttgtacatgtaaccatgattccacacttttgtgtcaggcaggcaatgaagtagccattatgccagttcatgtcctcttagtagttagtggtgttggagaggggatttgctgttgttgggttcatggtcttcgtcttgttgactgtttagaccctgctctgtatcctcttagcttttggggagtatgtgcagatgcgcgagctgtttttgctaatcaattgtgcaataatcaaattgcttagatcatatgtgttcttatgctctgctcaaaaagagacctaagcgggagatagttgtattgttagaatgttagttactctgtgctgttgcgaagacgagaatctttgattcttgtcctcaatattgccttccttataaagttacttcatatatcatgctccctattctaatattattattctgcaattttgcagttcatggacaaatcgtgcagtgttatggactcatctatggcaaacaagtaggcacatggcacatcagttccgcccaatacagctgttgttgtatccacctgcttcctgaagttacaagacctgaaaaatagaagagacattggagagaagccacattcttttgcgtatcttgctcaccgtcacctgacgaacaaaatatgacatcgggagtgcagtaacgattagtgagtggtcctgtattgagcctgggtgcagcctctgccagtataagtgctctacgtgttatacatttttttatgtccatgaaacattgatccactgagaaaatatatcttcaggtgcc

SEQ ID NO: 112751 - DNA, 1040 bp, Zea Mays
atcagcttttatactcattccttcaccctctcccatctctcgcctcgcctccccacgcgagcgagcccaacacgcaaacggaacgcttccgcgcccctccgccttatccgatggcgtccctcaccaccacaacctcctcaccggccgccctcccggcggccaccaccgcccccgcggcttcgtccatatctccccacgccggatcgaagcggccgctcctcgcgggcgacgacgcgccctggcgggccaccgcggccacctccgcggggcaggggatccgacccgtcccgcgcatcaaccacgcctccgtcctccgcgtttccacgcaggaagactccgccgcctacgccctcgccatcatgaagcatccggatccgattggcgaggggctggctatggaggcgttcgcggaggcagccgggccggagtgcatcgtgcccggacagcaagcgcctctaaggcttatggggctcaaggtctggcccgttgatatagatatgaagttcctagagccatttggacgggaactacattcaatgaaaaaattcatggacaaatcgtgcagtgttatggactcatctatggcaaacaagtaggcacatggcacatcagttccgcccaatacagctgttgttgtatccacctgcttcctgaagttacaagacctgaaaaatagaagagacattggagagaagccacattcttttgcgtatcttgctcaccgtcacctgacgaacaaaatatgacatcgggagtgcagtaacgattagtgagtggtcctgtattgagcctgggtgcagcctctgccagtataagtgctctacgtgttatacatttttttatgtccatgaaacattgatccactgagaaaatatatcttcaggtgccaatctacgacaataccttctgttctgttgctagatcaaatttatttgttctcaggctcagggcacatgcgatggtgaagtcagaattcttgagttagcctttgtgaggcgtgttggttcttcggaagagttgagcttctttgtctccgtgtt

SEQ ID NO: 112752 - DNA, 994 bp, Zea Mays
atactcattccttcaccctctcccatctctcgcctcgcctccccacgcgagcgagcccaacacgcaaacggaacgcttccgcgcccctccgccttatccgatggcgtccctcaccaccaccgcccccgcggcttcgtccatatctccccacgccggatcgaagcggccgctcctcgcgggcgacgacgcgccctggcgggccaccgcggccacctccgcggggcaggggatccgacccgtcccgcgcatcaaccacgcctccgtcctccgcgtttccacgcaggaagactccgccgcctacgccctcgccatcatgaagcatccggatccgattggcgaggggctggctatggaggcgttcgcggaggcagccgggccggagtgcatcgtgcccggacagcaagcgcctctaaggcttatggggctcaaggtctggcccgttgatatagatatgaagttcctagagccatttggacgggaactacattcaatgaaaaaattcatggacaaatcgtgcagtgttatggactcatctatggcaaacaagtaggcacatggcacatcagttccgcccaatacagctgttgttgtatccacctgcttcctgaagttacaagacctgaaaaatagaagagacattggagagaagccacattcttttgcgtatcttgctcaccgtcacctgacgaacaaaatatgacatcgggagtgcagtaacgattagtgagtggtcctgtattgagcctgggtgcagcctctgccagtataagtgctctacgtgttatacatttttttatgtccatgaaacattgatccactgagaaaatatatcttcaggtgccaatctacgacaataccttctgttctgttgctagatcaaatttatttgttctcaggctcagggcacatgcgatggtgaagtcagaattcttgagttagcctttgtgaggcgtgttggttcttcggaagagttgagcttctttgtctccgtgtt

SEQ ID NO: 112753 - DNA, 1169 bp, Zea Mays
agatttgtctaaaaactaaccccctgctccgttttatatcagtctctctcgccgtcccccgtctatgcattcgtgttcaaaccaagaaccaatcggacctccgtaccaaattatttcttggcacctcagatcagcatattccatctccaatcccccgccgcgttcccccgcacgctttgacccataaagtcgatccatctccgagcaccaagttgaacacgcgatcccattcccattctcttgctcaatacaacctccggctccagcaagccgcagcgccaagcctagaagcggagcgcggaacacacgaggccaggaagaggaggtgctgccgtccccgcgccgccgctgtgggagtgcggggaatggggcggcacggcgtggaccagatcggcgctgtggcagcgttcgtctgggtcaccctccttcccttgctgcttgtgtgcgtcgtgtggccgggcgcccaggccggccatacaagcgagtaccggcgccaactcggctccgccatcgacatgccactcgacgccgatgtcttccgccctcccccgggctacaatgcgcccgagcaggttcacatcacacaaggcaatcatgatggcacagccatgataatctcatgggtgacaacaagtgagcctggctcgagtactgtgatctacgggacttcagaggataacctcaactatactgcaaatgggaagcatactcagtatactttctacaactacacctcaggatacattcatcattgcacaataaaaaagttggagtttgacacaaagtattactatgctgttgggattggacaaacggtgaggaagttttggtttttgacccctccaaaaagcggcccagatgttccatatacactcggtctcataggtgatcttggtcagagctttgattccaatgttacgctcacccattatgagtccaatgcaaaagcacaagcagttctttttgttggggacttgtcatatgcagataactacccatatcatgataatgtgagatgggatacttgggcaagatttgtagaaaggagcgttgcgtaccagccttggatctggactgctggaaatcatgagatagatttcgctcctgaacttgtatgtagtagtatacttttcatatgctacatggttcaatgggtgtgttggcagtta

SEQ ID NO: 112754 - DNA, 2112 bp, Zea Mays
agatttgtctaaaaactaaccccctgctccgttttatatcagtctctctcgccgtcccccgtctatgcattcgtgttcaaaccaagaaccaatcggacctccgtaccaaattatttcttggcacctcagatcagcatattccatctccaatcccccgccgcgttcccccgcacgctttgacccataaagtcgatccatctccgagcaccaagttgaacacgcgatcccattcccattctcttgctcaatacaacctccggctccagcaagccgcagcgccaagcctagaagcggagcgcggaacacacgaggccaggaagaggaggtgctgccgtccccgcgccgccgctgtgggagtgcggggaatggggcggcacggcgtggaccagatcggcgctgtggcagcgttcgtctgggtcaccctccttcccttgctgcttgtgtgcgtcgtgtggccgggcgcccaggccggccatacaagcgagtaccggcgccaactcggctccgccatcgacatgccactcgacgccgatgtcttccgccctcccccgggctacaatgcgcccgagcaggttcacatcacacaaggcaatcatgatggcacagccatgataatctcatgggtgacaacaagtgagcctggctcgagtactgtgatctacgggacttcagaggataacctcaactatactgcaaatgggaagcatactcagtatactttctacaactacacctcaggatacattcatcattgcacaataaaaaagttggagtttgacacaaagtattactatgctgttgggattggacaaacggtgaggaagttttggtttttgacccctccaaaaagcggcccagatgttccatatacactcggtctcataggtgatcttggtcagagctttgattccaatgttacgctcacccattatgagtccaatgcaaaagcacaagcagttctttttgttggggacttgtcatatgcagataactacccatatcatgataatgtgagatgggatacttgggcaagatttgtagaaaggagcgttgcgtaccagccttggatctggactgctggaaatcatgagatagatttcgctcctgaacttggtgaaacaaagccattcaagccattcagccataggtatcccacaccctacaaggcttctggtagcacggcaccttattggtattccatcaaaagggcctctgcctacattattgtcttggcatcgtactcagcatacggaaaatacactcctcagtacaagtggcttgaagctgaatttcccaaggtcaacaggagcgaaacgccatggttggttgtcctcatgcatgctccatggtacaatagctataactatcactacatggaaggtgaaaccatgagggtgatgtatgagccatggttcgtgaagtacaaagttgacgttgtgtttgcaggacatgtccacgcctacgaacgcacacacaggatatcgaatgtcgcatacaatgttgtgaatggcctgtgcactccaatccctgatcaatcggccccagtttacatcaccatcggtgatggagggaaccaggaaggattggctaccaacatgtcgcagccgcagccgagctactcggccttcagggaggcgagcttcgggcacgccatcctggacatcaagaaccggacacacgcgtactacacgtggcaccgcaaccaggacgggagcgcggtggccgccgactccatgtggtttaccaatcggtactgggaaccgacggacgattcggccgacgatttccaatgaggacgagagctgcagctgggttggttattcgttgcggttcctcacgaccaataagcatcgccctgaatacacgaagccacccaagctccgatgcaggcctctgcacttcttaggctgagtccagggcacagcctctctctcgcccctgctgctccagtgcacaggctgtagcagactacaacttcaggctatagtcacgtcagcttttctatttcagaattaagtaatttacgcggatttatttcaacgctcagaaaacacacaacataatattttttattgaattaaaaaatacaaagtacataataattaaaataaa

SEQ ID NO: 112755 - DNA, 95 bp, Zea Mays
ttggagagataaaaaaacgtgtgaagagtaaaacggagtgtctctattctgattgggtaaagaattcacgttcacagcatacgttgccggtcgca

SEQ ID NO: 112756 - DNA, 1958 bp, Zea Mays
gccagcagacccctgtacgacgcccgaagtggccgattccctgagatcccaagcacccgcccggcctcgtccctgatctccccggggcgcgcgcgggcgacacgccacgcggccggcgagacggaggagatggctgccgccgactcggccacggcctcttcctcctcccccccggagtgtcccgctgccccttccattccgacggaccctgacttcctcagctgcgtcctgcagccaccgacctcctcctcgtcccgccccgacgccgattacgctaccctccgccgcctccttctccgccgcaagcccccctccgcccttcagcaccgaatggtatgtaggcgtaccccccgcttcttagatccccctcgttcatattgcatttagctttggggaatggatgaatccgactcattggtgttcgtgggaggcgttcctggggcaggagtggcggtgcaatgacaacggctatgtcgcctaccgcaactttctcctccggcgcatcgacggcggcagcgcccagagcacgcccagcaacagtggaaggtgggctccctctccggtacatgctatactctccgaggcagacagctggaattatatgcgggacttgagaagtaacagcggagtgttaaaccaggccataagtattggctcaaagcagagcgatactgagcggcatgtcagatttgccgagcctgcatactcatttgttggagtgcactgcatctttgacaactgcaaagcctcagttactatactgaaatttggccgtgcaaattctgatctgcttgcatatggtgcggcagatggcagcttgatggtctgccaggtttctgagccaccatctgttcttcaaaaaatgatagggcattctaaaaatatcacagtacatagcttcatgctctctggataaaactgtgcgagtatgggaaatctctaaaggcacatgcatcagggtcgtgtatggagtttcttcccagctatgtatctgttttcatcctgtgaacaataatttgcttttagttggtaatgcaaacaaggaaatcaatgcaataaattttagcactgggagagtaatcagcaaacttaactttgatgacgcggttacagctttggatattgatcacaccgggcagtttattttcgctggtgatgcacagggttacatatatactgttagtgtgaactcacatacagggtcattatctagaactcacaagaacaaaagtagtaagagcaaatctcctattacaaccatccagtatcggaccttctctctgatggcacgctgtccagtacttctttcttgtgctcaagatggaaacctttcttttttcagcatcacgacagatgctaagggatacttgactcttatatgctccctaaaattggcctcacgggtgcagactatccgtgcttcgttctgtccacttctttcccttgagaaaggagagttcatagtaactggaagcgaggacgcaaatgtttacttctatgatttggcacgcccaaagaattcgtgtgtgaacaaactacagggacatggttctccagtaatcggagttgcctggaatcacggggagaattttctggcctcatctgattcagatggcacagttatcgtatggaagcgatcgaaaacgagttagagcgattccatgccatgaaggatgtttttatagagcaaaaggtagatgttgtttgatgattccaacaaaggctttttttttgttgtacattggacctccatgggcattgtttgtaacataactacacaaggcatgggcaaagatcaaccggccttgattgtatttacggtagtataggtctccgtgtatgtagagtgtaaagcatttgtggcgatatatcctgtgtcattcgttttaggattgtatctttgtttcattcatgatttttgccctccaaatatgctgaacttggacatgattaacagg

SEQ ID NO: 112757 - DNA, 1835 bp, Zea Mays
gccagcagacccctgtacgacgcccgaagtggccgattccctgagatcccaagcacccgcccggcctcgtccctgatctccccggggcgcgcgcgggcgacacgccacgcggccggcgagacggaggagatggctgccgccgactcggccacggcctcttcctcctcccccccggagtgtcccgctgccccttccattccgacggaccctgacttcctcagctgcgtcctgcagccaccgacctcctcctcgtcccgccccgacgccgattacgctaccctccgccgcctccttctccgccgcaagcccccctccgcccttcagcaccgaatggagtggcggtgcaatgacaacggctatgtcgcctaccgcaactttctcctccggcgcatcgacggcggcagcgcccagagcacgcccagcaacagtggaaggtgggctccctctccggtacatgctatactctccgaggcagacagctggaattatatgcgggacttgagaagtaacagcggagtgttaaaccaggccataagtattggctcaaagcagagcgatactgagcggcatgtcagatttgccgagcctgcatactcatttgttggagtgcactgcatctttgacaactgcaaagcctcagttactatactgaaatttggccgtgcaaattctgatctgcttgcatatggtgcggcagatggcagcttgatggtctgccaggtttctgagccaccatctgttcttcaaaaaatgatagggcattctaaaaatatcacagattttgatttttcatctaataaccagtacatagcttcatgctctctggataaaactgtgcgagtatgggaaatctctaaaggcacatgcatcagggtcgtgtatggagtttcttcccagctatgtatctgttttcatcctgtgaacaataatttgcttttagttggtaatgcaaacaaggaaatcaatgcaataaattttagcactgggagagtaatcagcaaacttaactttgatgacgcggttacagctttggatattgatcacaccgggcagtttattttcgctggtgatgcacagggtcattatctagaactcacaagaacaaaagtagtaagagcaaatctcctattacaaccatccagtatcggaccttctctctgatggcacgctgtccagtacttctttcttgtgctcaagatggaaacctttcttttttcagcatcacgacagatgctaagggatacttgactcttatatgctccctaaaattggcctcacgggtgcagactatccgtgcttcgttctgtccacttctttcccttgagaaaggagagttcatagtaactggaagcgaggacgcaaatgtttacttctatgatttggcacgcccaaagaattcgtgtgtgaacaaactacagggacatggttctccagtaatcggagttgcctggaatcacggggagaattttctggcctcatctgattcagatggcacagttatcgtatggaagcgatcgaaaacgagttagagcgattccatgccatgaaggatgtttttatagagcaaaaggtagatgttgtttgatgattccaacaaaggctttttttttgttgtacattggacctccatgggcattgtttgtaacataactacacaaggcatgggcaaagatcaaccggccttgattgtatttacggtagtataggtctccgtgtatgtagagtgtaaagcatttgtggcgatatatcctgtgtcattcgttttaggattgtatctttgtttcattcatgatttttgccctccaaatatgctgaacttggacatgattaacagg

SEQ ID NO: 112758 - DNA, 1804 bp, Zea Mays
ccctgagatcccaagcacccgcccggcctcgtccctgatctccccggggcgcgcgcgggcgacacgccacgcggccggcgagacggaggagatggctgccgccgactcggccacggcctcttcctcctcccccccggagtgtcccgctgccccttccattccgacggaccctgacttcctcagctgcgtcctgcagccaccgacctcctcctcgtcccgcctccttctccgccgcaagcccccctccgcccttcagcaccgaatggagtggcggtgcaatgacaacggctatgtcgcctaccgcaactttctcctccggcgcatcgacggcggcagcgcccagagcacgcccagcaacagtggaaggtgggctccctctccggtacatgctatactctccgaggcagacagctggaattatatgcgggacttgagaagtaacagcggagtgttaaaccaggccataagtattggctcaaagcagagcgatactgagcggcatgtcagatttgccgagcctgcatactcatttgttggagtgcactgcatctttgacaactgcaaagcctcagttactatactgaaatttggccgtgcaaattctgatctgcttgcatatggtgcggcagatggcagcttgatggtctgccaggtttctgagccaccatctgttcttcaaaaaatgatagggcattctaaaaatatcacagattttgatttttcatctaataaccagtacatagcttcatgctctctggataaaactgtgcgagtatgggaaatctctaaaggcacatgcatcagggtcgtgtatggagtttcttcccagctatgtatctgttttcatcctgtgaacaataatttgcttttagttggtaatgcaaacaaggaaatcaatgcaataaattttagcactgggagagtaatcagcaaacttaactttgatgacgcggttacagctttggatattgatcacaccgggcagtttattttcgctggtgatgcacagggttacatatatactgttagtgtgaactcacatacagggtcattatctagaactcacaagaacaaaagtagtaagagcaaatctcctattacaaccatccagtatcggaccttctctctgatggcacgctgtccagtacttctttcttgtgctcaagatggaaacctttcttttttcagcatcacgacagatgctaagggatacttgactcttatatgctccctaaaattggcctcacgggtgcagactatccgtgcttcgttctgtccacttctttcccttgagaaaggagagttcatagtaactggaagcgaggacgcaaatgtttacttctatgatttggcacgcccaaagaattcgtgtgtgaacaaactacagggacatggttctccagtaatcggagttgcctggaatcacggggagaattttctggcctcatctgattcagatggcacagttatcgtatggaagcgatcgaaaacgagttagagcgattccatgccatgaaggatgtttttatagagcaaaaggtagatgttgtttgatgattccaacaaaggctttttttttgttgtacattggacctccatgggcattgtttgtaacataactacacaaggcatgggcaaagatcaaccggccttgattgtatttacggtagtataggtctccgtgtatgtagagtgtaaagcatttgtggcgatatatcctgtgtcattcgttttaggattgtatctttgtttcattcatgatttttgccctccaaatatgctgaacttggacatgattaacagg

SEQ ID NO: 112759 - DNA, 2047 bp, Zea Mays
acttgaatactccatctcaacttcccttcctctcccgtgctgcgctgagctatatagctgctcctcgacctccaagaagcacgcgggcggagcccggagcgagtgattagtgaaaggcatagcataaggccgcccggccgggaagtggtggcaatgacgcggtgcctcatgttcacgctgctgttcctcgtctcctccctcatctccaccgtggggctccccgtcgagccgcccgcggagctcctgcagctgggcggcggggacgtcggcggcgggcgcctgagcgtcgacgcgtccgacatcgcggaggcgtcgcgcgacttcgggggcgtcgcccgcgccgagcccatggcggtgttccatccgcgcgcggccggcgacgtggcgggcctggtcggcgccgcgttccggtcggcgcgcggcttccgcgtctcggcgcggggccacggccactccatcagcggccaggcgcaggcggccggcggcgtggtcgtggacatgagccgcggccgcggccccggcgccgccgtggcgcgggcattgcccgtgcactcggcggcgctgggcgggcactacgtggacgtctggggcggcgagctgtgggtggacgtgctcaactggacgctgtcccacggcgggctggcgccgcggtcgtggacggactacctgtacctgtccgtgggcggcaccctctccaacgccggcatcagcgggcaggcgttccaccacgggccacagatcagcaatgtctacgagctcgacgtcgtcacagggaagggagaggtggtgacctgctcggagacggagaacccggacctgttcttcggcgtcctgggcgggctgggccagttcggcatcatcacgcgggcgcgcatcgccctggagcgtgctcccaagagggttcggtggatccgggcgctctactccaacttcagcgagttcacggcggaccaggagcgcctcatctccctcggcagcggcggcggacgccggttcgactacgtggagggcttcgtcgtcgccgccgagggcctcatcaacaactggaggtcctccttcttctcgccgcagaaccccgtgaagctcacctcgctcaagcaccattccagcgtcctctactgcctcgaggtcaccaagaactacgacgacgaaaccgcagggtcggtcgaccaggacgtggatacgctgctgggcgagctgaacttcctccctggcacggtgttcactacggacctgccgtacgtggacttcctggaccgcgtgcacaaggcggagctgaagctgcgcgccaaggggatgtgggaggtgccgcacccgtggctcaacctcttcgtgccggcgtcccgcatcgccgacttcgaccgcggcgtcttccgtggcgtgctggggggccgcaccgccggcgccggcggccccgtcctcatctaccccatgaacaagcacaagtgggacccgaggagctcggcggtgaccccggacgaggaggtgttctacctggtggcgttcctgcggtcggcgctgccgggcgcgccggagagcctggaggcgctggcgcggcagaaccagcggatcctcgacttctgcgcgggcgcgggcatcggcgccaagcagtacctgccgggccacaaggcgcggcacgagtgggcggagcacttcggcgccgcgaggtgggaccggttcgcgaggctcaaggccgagttcgacccgcgggccatcctggcggcggggcagggcatcttcaggccgcccggctcgccggcgctcgcggccgactcgtaacgtaatccagctgcttatactaattattaggcgcgtttagtgtaaggtagaggtactagctacagcagtaaccatacaggattgtttagttagctccggttggttcatgtacaaatgtggggttgttaatcgcgtgctctgccatggctgctgtgatcggttctgtacaggggatgaggggagccaaatatgaacgtggcaaaatcgatacttcttataaagaaaaaatatctatggtaaatactggtgcctgcctctgtttcccgtc

SEQ ID NO: 112760 - DNA, 1459 bp, Zea Mays
gataatcgccactgtagtatccgtgggtctatctataagcagggcccccagccgcccgggccagccatggccagtccgacacatacgtacgcgtcatccggtcaggtgcatggtccacggtgcccctgctcaacgattagccgccgccgccgtgtcgtcgtcatcgagtccgcctttttctttttgtttagctcgtgggatctttcgcaagattttgttcctctgctaattaatcggcctgtaatcttagtagcagctaagaattgacgggcggaatgcatgggtggtggtggtggtggtggttgcttgcaggttcggtggatccgggcgctctactccaacttcagcgagttcacggcggaccaggagcgcctcatctccctcggcagcggcggcggacgccggttcgactacgtggagggcttcgtcgtcgccgccgagggcctcatcaacaactggaggtcctccttcttctcgccgcagaaccccgtgaagctcacctcgctcaagcaccattccagcgtcctctactgcctcgaggtcaccaagaactacgacgacgaaaccgcagggtcggtcgaccaggacgtggatacgctgctgggcgagctgaacttcctccctggcacggtgttcactacggacctgccgtacgtggacttcctggaccgcgtgcacaaggcggagctgaagctgcgcgccaaggggatgtgggaggtgccgcacccgtggctcaacctcttcgtgccggcgtcccgcatcgccgacttcgaccgcggcgtcttccgtggcgtgctggggggccgcaccgccggcgccggcggccccgtcctcatctaccccatgaacaagcacaagtgggacccgaggagctcggcggtgaccccggacgaggaggtgttctacctggtggcgttcctgcggtcggcgctgccgggcgcgccggagagcctggaggcgctggcgcggcagaaccagcggatcctcgacttctgcgcgggcgcgggcatcggcgccaagcagtacctgccgggccacaaggcgcggcacgagtgggcggagcacttcggcgccgcgaggtgggaccggttcgcgaggctcaaggccgagttcgacccgcgggccatcctggcggcggggcagggcatcttcaggccgcccggctcgccggcgctcgcggccgactcgtaacgtaatccagctgcttatactaattattaggcgcgtttagtgtaaggtagaggtactagctacagcagtaaccatacaggattgtttagttagctccggttggttcatgtacaaatgtggggttgttaatcgcgtgctctgccatggctgctgtgatcggttctgtacaggggatgaggggagccaaatatgaacgtggcaaaatcgatacttcttataaagaaaaaatatctatggtaaatactggtgcctgcctctgtttcccgtc

SEQ ID NO: 112761 - DNA, 1235 bp, Zea Mays
cacatacgtacgcgtcatccggtcaggtgcatggtccacggtgcccctgctcaacgattagccgccgccgccgtgtcgtcgtcatcgagttcggtggatccgggcgctctactccaacttcagcgagttcacggcggaccaggagcgcctcatctccctcggcagcggcggcggacgccggttcgactacgtggagggcttcgtcgtcgccgccgagggcctcatcaacaactggaggtcctccttcttctcgccgcagaaccccgtgaagctcacctcgctcaagcaccattccagcgtcctctactgcctcgaggtcaccaagaactacgacgacgaaaccgcagggtcggtcgaccaggacgtggatacgctgctgggcgagctgaacttcctccctggcacggtgttcactacggacctgccgtacgtggacttcctggaccgcgtgcacaaggcggagctgaagctgcgcgccaaggggatgtgggaggtgccgcacccgtggctcaacctcttcgtgccggcgtcccgcatcgccgacttcgaccgcggcgtcttccgtggcgtgctggggggccgcaccgccggcgccggcggccccgtcctcatctaccccatgaacaagcacaagtgggacccgaggagctcggcggtgaccccggacgaggaggtgttctacctggtggcgttcctgcggtcggcgctgccgggcgcgccggagagcctggaggcgctggcgcggcagaaccagcggatcctcgacttctgcgcgggcgcgggcatcggcgccaagcagtacctgccgggccacaaggcgcggcacgagtgggcggagcacttcggcgccgcgaggtgggaccggttcgcgaggctcaaggccgagttcgacccgcgggccatcctggcggcggggcagggcatcttcaggccgcccggctcgccggcgctcgcggccgactcgtaacgtaatccagctgcttatactaattattaggcgcgtttagtgtaaggtagaggtactagctacagcagtaaccatacaggattgtttagttagctccggttggttcatgtacaaatgtggggttgttaatcgcgtgctctgccatggctgctgtgatcggttctgtacaggggatgaggggagccaaatatgaacgtggcaaaatcgatacttcttataaagaaaaaatatctatggtaaatactggtgcctgcctctgtttcccgtc

SEQ ID NO: 112762 - DNA, 1224 bp, Zea Mays
ctgtgacttaaggcaattattggaatatcgaggatttgctgatggctggcactatcataatggatgattctgctgcaagcaccagtggtttgggggatcacaatgtctctgctgattccctttctgagtggcgctcctgcgaacatgttgataatgggatcccttcaacatcccctcccttttgggacaccgatagtgaagacgatgatcctgggcctagaccttcagatttatttgggcggtatacttggaaaatcgaaaacttttcaaaggagaagaagagagaaatgaaaagtgaaccgtttgaagctggtggctacaagtggtatattctagtttaccctcaaggatgcgatgtctccaatcacttgtcattgtttctttgcgttgctaatcatgaggaacttctcccaggatggggccattttgcccagtttactatagctgtgggcaatcttgatccaaagaaagttaaatattcagacacgctgcacaaattttggaagaaggaacatgattggggatggaaaaagtttatggagctatcaaagattcaagatggttttcttgttgatgatgttcttgaaatcatagctcaagttcaagttatcagagagaaagcagacagaccatttcgctgccttgatcgcccttatcgtcgagaacttctccgtgtctacatgacaaacatagagcaaatttaccgacgttttgttgaagaacgcagaaggaaacttatcaggcttattgaagacaaaatgaggtggtccagtttccgtgctttctggcttgcgattgacccaacaaccaaacatcgcatgtccagagagaagagtgacatcatattgaaaatggtggtgaagaatttttttgtcgagaaagacgtgacctcaacattagttatggatgctctatatacaggtttgaaggctcttgaggcctgtagcaatggcaagaaaggaatggtaacttcaattgacttggaggagctatcagcttctatggtccatgtcgatatggacatgtttgttttggctggtgacttcataactttgattgagagggcagctttagagcccttgtcttgtcaatctctgtcaccaaaaggtgacaaatgttcccaaacccgtgctaaggatggtggtactggagaaattaacaaagttcctattgagcttcaagaaaggcgtcttacggagcttggtcagaagatactgaaatatt

SEQ ID NO: 112763 - DNA, 2281 bp, Zea Mays
atggcggagcgggagcagcaagagcaggtggctagggacgacgcggcggagtggaagcaggtggcggagctgagggctgtcacccaggcccaggacccttcctgcaagggaaaaatgctgggactcactctattggtgtgggaagaaataccacccgttccaaggcgtgaccaggagactgctctactcaccttaaaagaccggcttcgtgagcttgggcagcgactacatgagaaagaaattgagggcagggaactgctcaaggcccatttggaaaagaaggcagctgctgaggctgcagtggattcatccttagcatcctcatccaactccttagaaaagactccccaggttctgaaggggccagatcaatcctcggtaattgttggtgatgcaaaaattaatgcaccacttccaaaggctgtacctgtagccataagtgacgacaacaatggagttattccagcaacggcaacatacaccataaacaccaaacctgtgcttgtcagtcccactccaagtaaacttgagccagttttgtgtgaagaacatgtatcaagttcaatccagcaaacaaataaagctatcctgatgccttcaagatcaccactagttgataatgaggctaatccaactcccccaaaatcacccgtgccacaggctgatacagttgctaaagctactccagctccacccaaatcaccaatgctacagattgatacaattgctaaagctacagcagctcctacaaaatcttctacttcacagcttgataaagttgctaacatccaagctgcccccaaatcacctgcaccccagcctgatgaagttgcctcacatcataactcagtatcgggacagattctgtccacatctatctccaagcctcgagaagatacggtttctaagagggctgcagtcgttactgtacctggaactcctacaccaatgtcaaggcctacaagtgcacctctgctacaggtaccaaaatcaactatgctacctacaccgtcagtccaagtttctccaatgctttcacgttcttggactatgtcagcccaagttcctccaatgctttcacgttcgcggactgtgtctgaacggccgaacaatgagccttcacctaccgccccaatgtatgtaacacagacatatcgaaatgcaattcttggtaagggccatcttgatacaaccccagcaagtcttgagcaatcaacttctgtttcgccgaatactgcagcttcacagccatggtcagcatatgcgatggcaacatctgtcatggcccctccattcgaaaggaatggccagttaccaggtaagcaaggcttcatgtttgggcctagcagggcagaaacccttgataactggcattcatggaaaggtaacactgatgttaacagaaatacgtggaaacatgattttcctaaccagcaaatgaccaattgtgatgctcatttacaccacttgaaagatatttcttatcagcaattgagcagcattgggacggaacagcacagattgggtggactacagtgtagggagttcctccagagggagatacctgctgcaacctttgtttcacgccagcagtatgggtcagtgggcgaagaattcccccacattgatattataaatgacttgcttgatgaagaccaaaacagtgcccatatgacagtctctcctcttcatgagtatcatacgtttggtttgccattttcttcaggaggcaatgtggctgactcagaaataccatccgtaagtagttctgtccggtttgacatgaccgacccttactatggcgagggttaccggagggcctataatacacagaatgctctgcataggttggatggttaccccaacgaaaggttggattcaactgcaccgccgaagcgttgggcatatagccatccaaatccagctgtgaaccttgcatacaattctaatgtatttccacagcagatgggagactactaatttagctagtgggagggatattcagactatatgtatcgccgtggcaatgggcaatggtgatgcctgtatactaataataatactttgtaaacaaaccatggtgccaagtctaaagttcgccatgttctttaatttgaattaatttaagttcaaaataggaaagaaagaatacactatgtaagcttttacatgcattcagcctatctcgtgcttgtatattatttctgtggttttaagagtataaaactgcagctaacaagccaagcatatatatcgcagcgctgtagcctgttgttcgcag

SEQ ID NO: 112764 - DNA, 762 bp, Zea Mays
gtgagagtaaccgtggatagccccaatagtacaaatgttgacgccctacaatttacgtctatgagatcgcaggagcaagattcaaagtgctgtgaagggattaatgttatgaacgaaggtaaagaagagtcagaaaactgttgcgtggataagctggaggacatggaagtggggaattgtcccaccagatgctgcaaggatgcttcccatagttcagcctccaggaaaaaagtcgtgcctagcatttcagaaaaccaggcttgctgtgcaaccactttctgcaatgaaagatcttgggaaactaatgcatggcgtgctcggttagtaaaggcagtttgtcagaaagaatctattttgccaacgaacacagagaatccaattttaccttcttccataggaatttcatgtgatgcagtagagttctcaggcaaattggtaggttcccaaggcaagtttcaaagcctgggtgtaagtagtaatgctctagaaattcattctcatgacaattgccaagatccggttctgcacgaaagccataaggatgagcctgttattgctagaggtgagtcagcatctggtgttaatattgttgcaagatgtgagtcggtacctggagttgattccagcaattttgtgagaggcaaagaaaaagttatgtacaatgacagcaattgtggtaacaatacaagggagggtgatgacagcaatgagagcatcgagagctgtacaagtacaaaagccccaaagcgcaagcatgcgcag

SEQ ID NO: 112765 - DNA, 278 bp, Zea Mays
catgggtagagaaactcttgatctggctactcagacttcagctgctgaaggatttcagatgatttctggtggctgtagaggaaatgttcagagtcaaattgatattttccaaatgagaccagaaagaaatatgaaactgcccagttccagtaagtttagctctagatctctagaagaaaaacaaaatcagtgcacagctgcctgctcaaatgatgcaacacaaaataaaggtggtttgagggaaagcttgtgggtaactcggcttttgccaaaagcat

SEQ ID NO: 112766 - DNA, 1354 bp, Zea Mays
atcgatagtctttctatcaccttcaacactttttcctgccgtggtcctcttgcagacgctttgccgattctgttgtcgcttctttggtggatacttcgccactactcctatcgcttctccggcgtatgatttgccgccaaagttccgttaatcttcggtggatgctttgccgccgatgccgttggttcttgctgagtgaatactttgccgctgcagttcccttctctggttgctttgtcgttgtagtttgactttcgtagtggcatccttcgccgctacaattgtgtctccttgccggggtaggcttggccatcattcttcatttgcggatgttttactgccgttgtcatgctggtttccttggtggatgcttttgtcggttaaggttgctttgttcttctctatggcggatgctttgctgccactgctgttggaagctcgtctcgtcttctatggatgcttcgtcaccatggtttgactgctttgcaggctaccactgcgttgatgttttctttgccacaggttcagtcagttggggtgtgtggaggccgagggttcttgcaccttttctcttgtttctctcttgctgtttcagtgtgtctctggggctactgtggtaatcctaggatttaccagagcgagtccttgaaccctttcaaactctacttccctcttgatgaaaaatattcgcaaaaaaagtactttacagttctcccagatctctttgcttccatcgtcaaagcttatagttttaaccacttttctccaataagcacctatttactagttacatgaaatggttttggtcccatcgcacgaattggattatgaaatggcttatatgatgaattatgtggtttcatttcctaggatgagctgaaggcatggtggtctgctgctatgaagggtgagtggaagctaccgtcgaaggaagaactgggtgtgaaactaagagaaaaagagctacttcgctcgtaggatggaacggttgcgaagtactaaaatatgaaggcttctattgtacccatcctactaggaaattatgagccagttgatgaggcatgaattatttcacgacttggccgcggttagtgtgaaaaggagacgctgctatatatggtcatcacccttggtttgtccgttcgccagatatcacgattatcatatttatcggttgtaacataagcttcttgtattagcatatggtttaatattttttttcagatgggatgaggtcctgcgtgatatcctatctgtaaataggaaggcactagcagatctcgacaaatgtacaactgtttttttttttttttttgagaaacttgaaataagatttatcgttcaccactgttaa

SEQ ID NO: 112767 - DNA, 1651 bp, Zea Mays
atgttgcgcgcggttgatctacccgatcgcttcgaccgcgtcgcgccaccgacggacaatggcgccggcagcgaggaagcggcggtgaaggacacgggcccgaagccggtggtgccgctgctcaacgtgtccgccggcggccgcgtccacgagatccagacgttcgcgcactacgtcgccacgcaaatcggtttcgaggatctgaacgagtgcccgcacctgtgcgcgctgtcctacgattacctcaagaagacggagggctacgagcagaacctgctcgccttcttccacaacaagatgaacccggacgccctgctcgtgcagctcatcgaggagatggacaagtgcatcctcggctacttctccttccactggaaatatgcgacccacataatcacgcaggttctgacccacgagcagcctagaagaaagctcagaagaatggtaatggaggccactaggaagatgaggttcgagagggtgacgagagagctgaaggttaccaggctgttcaccactctggtggaggagctcaaggccatcggtgtgcactgccagcacgaccacaaccgggcgggcacggacgtgatggtcccggctgcgcacagcgaccgcagcccggtgctgctcctgatgggcggtggcatgggtgctggcaagagcaccgtgctcaagcaaatcatgaaggaggtgttctggactgaggcggcggcgaacgccgtggttgtggaggccgacgcgttcaaggagtcggacgtgatctaccaagccatcagctcgcggggccaccacaccgacatgctgcagactgccgagctggtgcaccagtcgtcgacggacgcggcggcgtcgctgctggtgacggcgctgaacgaggggcgggacgtgatcctggacggcaccctgtcgtgggagccgttcgtgcggcagaccatcgcgatggcgcggtccgtgcaccggcagcgctaccgcatgggggtcggctacaaggtcgcgcccgacggcacgaccacggagaagtactgggagcccgtggaggaggacggcgagcagcaggcaggaagggcaggcaggacgaggaagccgtaccgcgtcgagctcgtcggcatcatctgcgacgcctacctcgccgtcgtcaggggcatcaggcgagctatcatatccgggagagccgtgcgggtgaactcgcagctcaagtcgcacaagcgcttcgccggcgcgttccgcaagtactgcgacctcgtggacaacgccaggctctacagcaccaataccatcgccggcgcaaagctgatcgggtggaaggacaaggacagccagctactggtggacgtggacgagatcgggctgctggaccgggtgagccggatcaatgatgacgccaactgcgtgcacgagctgtacccggacgggcaccccacgggcggcgctggctctgtgtgggatgagctgatggcgtcgccggtgagggcttccatacagcgggagctcaaggaggccatcttcgacagcgaggcgtgcttcccctccccgtagtagccacacgccgacctgatttgctggactactagttgtgtaattaagctagttatataatctcttttggatgaacccaagttttgaaccggaataagctagctaagagttatat

SEQ ID NO: 112768 - DNA, 679 bp, Zea Mays
tttcgtgtattcgccttttttaaaggaatcgccaccgactggcgcacgggagccacggagagcaaaggcagcacactcagctatccagcaaaagagatcgagacgcaggagtcatggccaccgtcagcgccgccgtggtgaccaccatcgttgcccgcgccgcgatcgccaggcccaatgctctagggctgcctgcgctgagggcgaggagcgagagggtgcggtgcagctacgccaaggacgcggccccagtcagcaccaagggcgcaggcgcgtcgctgctcgccgcagcgggcgcggtgaccgcgtcggcggggcccgcgctggcgctcgtggacgagcgcatgtccacggagggcaccgggctgagcctcgggctcagcaacaacctgctggggtggatcctcctgggggtcttcggcctcatctggtccctctacaccatctacacctctgacctcgacgaggacgaggagtccggtggcctctcgctctagatccaccctctcctgttaatgatctgaatgtaaacatggtggcggtcatcggtgtaaatttagacatggctatttgcatctaagatccatcctctcctgttaataatgtttggagactacgtacgcctgaagcaatgcaatagcaactttgcgagaaaacttgctgcacacattttttctta

SEQ ID NO: 112769 - DNA, 819 bp, Zea Mays
ttgcaagagactaaattatcaacaatcgataggttcacagcagatgctctaggagggccaaagctcaacaaattcagattcaagcctgctgaaggaaatagtggaacccagggaggcatccttttgctttgggatagtgacgtcttagacctgtctaatgtaactgttggggagttccacttatctgcaagtgtgacacttaaggatcgccgagcttccttctccctaacagtcgtctatgggccaacctgtagaagccgcaagcctgccttccttagagagatgaacgatcagagacctcctttgtcttccccatggctgatcctcggggatttcaattgcacatacaaagctagtgacaaaaataattctagaataaatcatcaccttatgcagttgttcagacaagctctcgataattgcgacctaaagacggttttactgggtttcaagcaggtggtggagcacgcttggtcgaagccgacccaacatcatgaacctttccatagactgtactataaactccagagcatagcccgggcgctcaggggatggagctccaggcttgttcctgattctaagctgttcatgcatatgaccatggaagttctccttaggctaaacctagcacaagaaaataggcggttgtcggacttcgagtcaagtctccgaagcagactgaagatgcgtatccttggctatgttgttattgaaagggcacggaaaaggcataattcccgtatgttaagccttagatttggtgatgccacccccttgttcttcaccgaaaagctagctccaggaggcgaaaaaaaatca

SEQ ID NO: 112770 - DNA, 743 bp, Zea Mays
gctggggcacgcggcgacagtttactcgtcggaccagggaccccccggggtcgaaacgccgacaagaatgatattgctaaatttacagtatgcactatagaggatcccagaacattgttgtatctgaggcctccagaaaatgtctgctcaattaatgaactggcagatctctgggaaacagaagagcagcttcttgaaggaatcgatggtaaattgaaactactaaaagttaggtggtaattatatttgttttgcttttgttaaagccctatcgtcgagtgtgttttcttgaaatttaatcaattcattttcaatttaagctttaagctactgtcgacagatataatgtagttcaagtttgatgaagttaccgatgcagttttctgatctgtccattttagttttttatgcgttcacctaaataactgtaagtatatttgatcatggagtagaagcttgctgctatgtctatggaaaacagagctggaaaaagcagtgaaaaaactattaaagctctctttcctagttgcaaattgcaaatcaatttctgaaagacttatgtttcttgcataaatcatctactctcattctttctttctcctcattgcagatgctccatttcccttgaagatggatttaatttttatatagtcaatatttgttaagagtgatcatacgtattttgaattcgacttgtcaatggaaggaactcaaccgtaaattacacaacagtgaacgagtag

SEQ ID NO: 112771 - DNA, 1291 bp, Zea Mays
gtcatctagtattatatacagtacattcattcgcttcgccacgtacgttcagcatcgtcgtctttcgaaaaatgtggttcggtggcggacccatcgacgcggcgggcgcgctgcgcggcttcgtgcgggaagcaggcgggtgcgcggtggtggacgggggtctcggcacggagctggaggcgcacggcgcggacctgcacgacgcgctctggagcgccaagtgcctcgcctccgccccgcatctcatccgcaaggtccatctggactacctcgaagcaggcgcggacgtcataatctctgcgtcctaccaggccacgatcgaggggttccagtcgaggggcttctcgcgggacgagagcgaggagctgctgcggcgtagcgtgcacgtcgcgcaggaggcgcgcagggtcttcgcggcggagggcgacaggtcatcgcgccgcggacgcccgccggcgctggtggcggcctcggtcgggagctacggggcgtaccgggcagacggctccgagtacagcggggattatggaaaatcgatgacgaaagaagatctgaagaacttccacaggaggcggctgcaggtgctggcaggcgcggggcccgacctcatcgccttcgagacgatcccaaacaaactcgaagcgcaggtctacgctgagctcctcgaggagaacggcatacggatcccagcctggttctccttcacttccaaggacggggtgaacgcggcgagcggagacccgatcaacgagtgcgcggccgtcgctgattcctgcccgagggtggccgcggtcggagtgaactgcactgctcccaggttcatccacgggcttatcctctccataaagaaggtgacgagcaagccgatcgtcgtgtatccgaacagcggggagtcgtacgtcgcggagacgaacgaatgggtggactcggacggcgccacggggacggacgacttcgtgtcgcgcgtcggcgagtggaggcgggcgggggccgcgctcatcggagggtgctgcaggacgagcccggccacggtgcgagccatcgcgcgggcggtgcgcgaggcggaatacgacgatatccctgccgtggccgtgctctaagcttttgctagttcttccattcccggcggagaaactgaagacggtcatcttcggcaataaagaacacacgctcgagtgccacattgtgcgcagttgtctttgatgtggagaaactggagacggcgattcgtcgtcatgctcacgttccttcggcaataaaatgcacgtgcacgagtgccacattgttcgta

SEQ ID NO: 112772 - DNA, 532 bp, Zea Mays
ttggcaaggaacaagtcgttagccagttagcctgatcttacttgcaacgcctgatccacgtggccaagcgtttctgtattaagacgacaactctgttcatgtcaaaaagatacggccatacagggggagtgagggaactggcacacaatacatgagtggcagaatggatttcttgcgtaagaaaacgttgaaagaatgggttgtacacctagtgactccagaaacagccaccatattttcccaacaaaatgttacatacacagctctgttcttagatacatgtgacaagcacctaatttgcctgtcacgatggatatacaaaatcaattttgtaagagaaggggacaatactgacaaggttatatgattttcctccagcaagagaatagaaaacagagtttcatcattagttgttacgtcagctgatgtagtcccagctccgaggaaatgagtctgagcagcacttgtacaagctcccgtaccctagcttctctgatggatcagcaggggcaataacaattaattaagttag

SEQ ID NO: 112773 - DNA, 1699 bp, Zea Mays
cttcagggtaaatctttgatagtgcaagatgaacttgcaaggctaggagaacagatggtacaaagtgctgaaggaacaagagctgttgctctggagctatgtcaagaatttgaagataaatttcttgctcatattacttctggtgaggggtccggttggaaaatagttgcaagttttgaaggcaagttgcctgataggattaagcaacttccattggacatgtattttgattggaacaacatgaagagggttgtgttggaagcggatggctacaaccttatttgatatctccagagaagggtttacgatcctaaataaaaggagttcttgaaatggccaaggagccatcacgactctgtgttgaagaagtacagagttttgttagacatagtaaatgctgctgcaaatgctacaccaggactaggaagatacactccattcaagcgggaggtcattgcaattgcatctaatgcattagatgctttcaaaattgatgccaaaaagatggtggttgcacttgttgatatggagcgagcttttgttcctccacaacacttcatccgattagtacaagggagaatggaaaaacagcgccatgaggatgagttgaaaaataacagagcatctaagaaagggcaagatgcagaacagtccaagatgaacggggcttcaagcccccaaatagtatcagatgaaggtggtggtaacctgaaatcaatgaaggataaatccaatcagcaagataaggatacaagagagggaccaaatttgcaggttgctgggcctggtggcgaaataactgcaggttaccttttgaagagaagagcaaaaaataatggatggagcaaaaggtggtttgttctaaatgagacgagtgggatgcttggatacactaagaaccaagaggagagacatttccgaggcgtcattatcctggaggaatgtaaccttgtagagatagacaaggaggagatctcaaagagttctaaggattcaaagaaggcgaatggacaagagaaaggcccaagtcttgtttttaagattactaatagggttgcctacaaaagtgtcttaaaagctcatagtgccgttatattgaaggctgagagtatggctgccaaaatagaatggatcaagaagataaaaggtgttattcaaagcagagggggctctgttaagggtccaactgaggatagttctatgagacaaagtcgttcagatggatcccttgatacaatgacccagaggcctgctgatcctgaagaacttcgatgcatgtctcaagaagttcgtggttatgttgaagctagtttggccgcaaatgttacaaagtgcacaaagcaatgcaaagatcgaagaactactccaagaggaccacaatgctaaacgtaggcggggaaaatatgaaaacaatcatccctctcgccaactcagcattcatgacaatagaacagcttcatatgtgaacgatagttctggagctgagagtagcccacggtctcctggccactctggtgaggactggaagtccaccttcgtctcagcagcaaatgactctgttaacgggtcgagttcacagcatgcgacaaggtcaagagatgctgacagaggccagtgccatgaaaatggcgatgccaactctggcagccgacgcacacctaactggttaccaccggcaccaccaagtgggaggagatac

SEQ ID NO: 112774 - DNA, 2823 bp, Zea Mays
atgacgacggcctcgtactctaaaggaggggcgaccataggaggcgccaaggaggctcgaggtagggagagccaagcaggcccggcggccacagccatcccctccccggcgtcgggttccttctctccctctccatcgtcgtggcctgctggccgttccaaggctcaacgatggcgcgatgatggtggtgaccaacctggggagctgccttcttataaggacgtgcttgtctcctcctccacttcgttggtccctcaccccgttgccggtgatggctgggtgaaggtcgttgatcggcgtgctcgctggcgtcgtcctcgccctttgaagcctccatccagacccatcccggtcgacctgcgtggaaagtgcttcaactgcttctcctcctcccatcgcgcggcggtgtgtcgtcacccggtgaggtgcttctcctgcaggctgtctgggcaccgtgctcacgtgtgcccgcgccggcgatcggcacctcccaggcctctgcgtgccaaggtgtggcggcctgtccctcacgtcttgcctcctatgggtgcctcgggatgcattgttgatggccacgagggtggcaacatcacatgctctagtggtggcactggcggcggcggacacaggcgtactcgtcgggggcatagacggcgaagacccactggtgcggctggtgttgtggacaccagcgtccctcccgaggtgctaccccaacccccaccggaggctgttcgcgccatttctctgccccctcccccgttccggcgctgcttcttcaaacgttctaggaggattgcccaggctgaggatgacctgcagagcgctattgtcatctccgttgtgggcatggggcgttctggctgtgccgcggaggtctccgatgcgctcgcttcgagatttgatctcgagggtaatgcgctcgaccttcgccgggttgcaccgaacactttcatcgccttgcttcccaacgtggagatggctgatcggtggctcagtggaggtcagtcactctacgttcctccccttcggatgcacatcaagaggtggtcccgtcaattcatggctattgggggagggacgctgcctcatcggcttgatattgagctccgtggacttccgtttcatttgtggggtttgcatacagccgagcagcttctcgatggacattgccttgttcatgaactacaccttgactctgttggcggttctgatctgtctacgttcaaattgagtgtttggtgtgataatcctgaagacctgccttcattattggatcttcacgtggaggagccttcggtcctgattggcgacgacccgtctcccccacgcacggtggtttacccaatttcaatccttatttcccgccccgggaacccgccggaagtgcttcctcctctccatttttcgccaacgccaccagatccagagcgtcagaatgaagaaagtgaccagaattccagaggtctgcagaagcggcgtttcaattcccagtcttcatcggaccgcgcaccggttcacgctcgcctggggccgcgcgtccaacactgctcggcggctggccgcgttttccctgctgatacggttactgctctggtgacgcctgcaatccagtcggtctcttccttaatggcagttgatgcctcgcttccgacgcggattgacccagctgatgatgcctcgtttccgacgctgagtgctccagttgatgcgccagctctccctgttacttcggttgtagggctggcggcgcctggacctgcctcgtttcctgcgatggaggggccagctaatgtgtcaatgctattggatgcttcgggtgttgtgccagcggcgtctggccctgttctcgttgttgttaatgctgcggattatccccatgaagactgttcggagtcccaagaatctgcttctgcgcctattcaagagaagtgcggccatttatgctcggcggctggcagaccagatattgtcccaattgatgttggggttaatgcgttggtggcacctgctaaatcctcggtttcttccttaatgacggtggatgactcgttttcgaggttggggggaccagttgatgcgccagctctccctgatgcttcggttgtagagctggtggcgcctgggactacctcgtttcctgctgagggattgtcagctgctgtgccaacactccctgtggcctcgggggcagggtcggatgttggtctggattctgcggattattcacgtttggattgttcggccatgatgaattgctcccgcatggggtctgctgcgccattggttcggcctgatatccttcctggaccctcttgccctcgatactgcaagcccattctggtttattctaggagggaccagagtctgcaacatgattttgattcattggctgataagtctgcccctaccagtggtaatgtcaatgtctgtgatgttgttaattccatgtcttcggaactgcattcccctggcacgctcagatcctctttcagtaacaaggtcgtgaaggcagctgcccacattttacctgctcctctggaagtcagacctgggaacccaatttctccagctgtgcctccacgtcgtagtaggcgcattgctgggattggtgttgaattccagtctgccttcagtgatagtcaattcaaatttaagaagaaaataatgagagcgctgcaggtgattgatgaaaacgaaggcatcagtcaggaggccctggataattattgtaggctttttgagcagcccctccctccatctcatgtccaggcccttgctgcccttttcggatggacaccccctggattggcggtgtgttga

SEQ ID NO: 112775 - DNA, 2133 bp, Zea Mays
atgaaaccttcggagaagaatgtctgcggtcgagatttggctgtggctggcgggtctggacctgtttcaatgattggtgaaggcgcgaagaagaggactcgccgtggacagaggaagaggaagtcgggcgctggggggcagttgccccatccgcctgccttcggcctggataagccggtgagctttgtcgggcgttgtggaagaattgatcgggctgaggaggaactccgtcgtgcactgatcgtcagtgttgttggcagggaggattctggctgcgccgtggaggtgcgtgacgcgatcgcctcgaggttttgccttgaagcagggtcgctccgcatacgtcgtgttgcgcctaattctttcctagtcttcttcccctcggttgccgtggctgatcgggtgattggcgaggggcaatctcttcatgtccctccgctcaggttgcatattcgaaggtggtcgcgtcaggcgttcgctcctggaggtggacagccgcttgtgcctgttgacgttgaacttcgtggaattcctgcgcatctctgggggattgaggctgctgaagctgttcttggtgctttctgtttgattcatggttttttgcctggcttggtcaaggaggaagatatgtctgttctcagactgaaagtatggtgccggtcacctgtgctgctgccggcggtggtggatctccttgctgaagagccgatggcgttcgctcctggaggtggacagccgcttgtgcctgttgacgttgaacttcgtggaattcctgcgcatctctgggggattgaggctgctgaagctgttcttggtgctttctgtttgattcatggttttttgcctggcttggtcaaggaggaagatatgtctgttctcagactgaaagtatggtgccggtcacctgtgctgctgccggcggtggtggatctccttgctgaagagccgatggtctgtggagaggatgggagctgggttcctagcacgttggtgttccctgtttctgtggtggttcttcattctgatggaagttcagattccggtgtggatccccctgcgccacccccttcgggctttgtcgacgaagatagtgatcatgagcatcatgtggagcggccggggcgccctgcgtcttctgttcgggttccaattcatttgcgtctgggtcagcgcagtcgttctgggcaggtggatgacatgtctgttgaggctgttcatcaggatttggtggagggggggtcagttgatgctccggctctcccgattgtttcggttgaggagcgggaggcgcctggtcaccctccagttttgggatcagttgatgccctggctctcccggaagtttcggtggcagagctggaggcgcctggtcaccctccaatgtcagcgttggatctggcagaggatttgggggtcagttgtcaggaggactggtcttcgcatgttgttatctcgccggctgggccttgcttagacaatcctttggtgggggcccttatgaccggcttggcagaggctgtctttgctgggcagcatggtcccgggtcctcctatttgctgaccgatggtgtttctgctaatgtggaggaggcagtcactgctgggcagcatggttccgggttctcccaattggtggctgctggttctcctgctgttgtctctgccagggtgcggaggtttgagtcttgtcagtcttcccgggctgagagatggagatcaaagccacccgtgttcaaagtttattccaggagaaaattatctcaggctcaggtagtccaggaagaccttttactgcaatctgtggtggaaatggttccacctttggaggagttcaagtctgcggttactaagccttctgatggcttgttaccaccccctccccaccgaaggaccaaaagcaggaaaaaggtaatgccaagtgattttcggccacggagaagtaggagggtggccaaattccctccagaacttggatccaatgcggctgcacaagtatgtagacatctgggtttttgtgatgaaacggagaatatttctctcgatgatgcctgcaattatgcaaagttattttattctgggctttcaagtgcacatgtggctgctttggcagctttgtttggatgggaggtcccttag

SEQ ID NO: 112776 - DNA, 770 bp, Zea Mays
gtcgtcgttggagatggccataaatgtcgtttctggcatggcacttggcttcatggagaggtgccacgccacttagctcccagtctctttgtgatgtccaggatgaaaaatggatttgactacatggagctccaagataatcactggatcgatgcacagcgcgaccgtatcaccactgcagcccagatacagagtttgtctccctttggatcagaacctaggatacccaccttacaccgggcatgagggattccattctctggagatggacgacagacggaacatactccactcgctcagcataccgtgtccagtttagaggttccttcaggaccttctaggctggcctaatctggaaagcacaagctgaaaacaagtgcaaggtgttcacatggacaacggcaagggagaaattactcatgaacaaattacaaaaaaggggttggcctcaccaagatcactgcactctatgtaatgggcatctggtgttcgatggaaggaccccctctatctccttccttcttcaagctgctgaggatgaacaggagacgtggcggctggctggtgccaaggggctttcctttttggccagccaaactacctagctcctagggctgtagtgtttttgtccagttttatggatagctttgtgtatgcttgtttctggcctccataaggagtgcttgtacctgggtcattatggccctttattttccctctactttaatatatgggtgcgcagtcctcctgcgctctttcgagaaaaaaaa

SEQ ID NO: 112777 - DNA, 465 bp, Zea Mays
atgacggaggaccaccaggcggacaacctcgtggcccgggcggaggcgtacctggccgaggtggcgctgtggagcctggacggggcgctggaggtgctgtgcaggtgcgacggccccgtggcggagcaggtcgggctggtggcccgctgcgtcgacgccgtcgccgccagcgcgggcaaggagcagctggtctccggcctggcgcacctggagacgtgcgactacgccgccgcacgctgccgggaagactgccaggtgaagggaaacagaagcaagacggttgtgcgggatgcagacggcggcgcggaagcaagacggctgcgcgggatgcagacggcggcgcgggtaccagatcctagttcagacggggccgcgggcaccagatccttgttcagacggggcgcgggcaccatgtggcagatggccgcgcggaatgcagacggcggcgcgggcaccttctgttga

SEQ ID NO: 112778 - DNA, 92 bp, Zea Mays
gtcgagtcggccaccaagcccagcacgacagcacactagaccccaggtcctagcccaacaaggcaacacggcaaggcaactagcagactagc

SEQ ID NO: 112779 - DNA, 363 bp, Zea Mays
atgggggacttcttcaaccttgtttccagcacgcacgcagggaggagacggggagctgcactaatggggaggccgagctgcaccatggggaaaagggcggtgcgggggaaaacagaaggaggtgcaggcgtccatggagcagggaaggggtaccatgctggggctgctgggaaggggctgaccatggatggaagatggagcaggagagcgccatggctgtcgggtaaagcagagtgccggccaaagtgcaggggctgcagtggtgtcttcgaggagaacgccgagtgggagctagagcaggggctgctcgggagagaaagagctcgaggaggaagaggtgtgtgggagaaaggagatgggtga

SEQ ID NO: 112780 - DNA, 3446 bp, Zea Mays
gaagctacgcaccaattcaattcccgagaaagtgattggggttttacatcttttatgcctttgttggatctgtatgattcaagtaaaggatatgttgtgaatgataaatgtatcatagaagctgaggttgctgtgcgtaaaactcttgatttctggaactatgactccaaaaggatgactggttatgttggcctgaagaatcaaggggctacctgttacatgaactcccttcttcagactttataccacattccttactttcggaaggctgtatatcatatgcctactacagagaatgatacgccttcagggaacattccattggctttgcaaagccttttttataaacttcagcatagtgataacagtgttgctacaaaagagctcaccaaatcttttggatgggatagctatgattcgttcatgcagcatgatgttcaagaattgaatagggtcctatgtgaaaagctggagaacaagatgaagggaaccactgtggaaggagcaatacaaaaattgttcgagggtcaccatatgaattatatcgagtgtattaatgttgagtctaaatctaccaggaaagagtcattctatgatcttgcactcgatgtcaagggatgttctgatgtctatgcatcatttgataagtatgttgcagtggagaggttagaaggtgataataagtatcaatctgaggaacatggtctacaggatgccaagaaaggaatgctttttattgactttcctccagttctgcaacttcagttaaaacggtttgaatatgattttgtgcgggatacgatgctcaagataaatgaccgttatgagttcccacttcaattggatcttgatagagatgatggaaaatatctttctccagacgcggatagaagtgtgcgtaacctatatactcttcatagtgtactggttcatagtggtggagttcatggaggacactattatgcctttattcgtccgaagctgtctgatcaatggtacaagttcgaggatgaacgagtgacgaaagaagacatgaaacgagcattggaggaacaatatggtggtgaagaagagctcccgcataccaaccctgggttggatactgcaccgcttagatttaccaagcattcaaatgcttacatgcttgtttacattcgagaaagtgacaaagataacattatctgtgatttggatgatgaagatatttcagaacaccttaaggttaggttgagaaaggaacatgaagagaaggagtacaagaaaaaggagaaggctgaggctcatatgttcactgcattgaaggtggcccgagactttgatattaaagagcaaattggaagacacatgcactttgatcttgtggactttgacagagttaatagcttccgtgcacctaagaacatgtcaatcaacgaagtcaaggaggagctttctaaagaatttggcatccctgtagaatgccaacgattttgggtatgggcaaaacgacagaactgtacctacagacccagtcgtccattaacctcccaggaggaaacatctactattggggttctcaaagatgcaacagtggcgaagttaccgaattctgaagtacgattgttcttggaggttcatttcagacaggagaaccaaccaattgctccttggaataccaaagaagatatattacttttcttcaagctctatgatcctgaaaaagaagacctaagatatgtcggcaatttttttgtgaaagcatcaggcaaaccatctgatatagtagaaaggctgaatcagattgctggatttctgtctgatgaagatattgagctctatgaggaaataaagtttgaaccagttgtgatgtgcgtacccattgagagtaatgcttcgttccgttcaagccagattgacaatggtgatataatatgctaccaaaagcactgtttgccagattcaatggatcgatatcgatatcctaccgtcccttctttctttgaatatattcataatagacagattgtccatttcagattgcttgagaaaccaaaagaagaaggcttctctcttgagctttcaaaatgctccacatatgatgatgttgttgagaaggttgctaagcaactacgtatggatgacccttctaaaatccggcttactcaacacaatccatcgtctcagcaacccaaacctcacttcatcaaatacaggagtcttaattatctttcggacatgctacataatcacaatcagatgtgtgacatattatattatgacatcctggatattcctttgcctgaactagaatctatgagatctctgaaggtcgctttccaaaatgccgcaaaccatgagatgtcgtttcacattatgcggttaccaaaaagtaactctctccttgatttgattgaagacttaaagtcaaaggttgaaatttcttgtaatgatgctgaatttcggttttttggagtctaccttcacaagatatgcaaggtgtatcaacctggagataagatagattcagttaatgaccatggacccttgtatattgaagaggttcccgaggatgaaaaaaatgccgggcctcatgaccgtttggttcatgtctatcattttgaatataatcatcatattcagtattttggtgaacctttcttcttcctaattcgtgatggtgaagctttgtcggatatgaaagtacggattcagaagagacttcaagttcctgatgagcagtttctaaagtggaaatttgctcatgttacattcagtaagccagaatacctccaagattcagatattgtaatgaacagattccatgtgagataagttttccttttggcgaaagaatcctttcgcaagaacattcattgtaacattgaagtattgtataagcttttcctggtattgttttagaaacagagacctgtttatggaggttgggaacaacaccttggattggagcatacagccaccaccccaaaaaggtcctacttaggcaacaaccagaaccgccattcttttgagaagcctgtgaggatttacaactaaagctaggaatactttttacatgcgatgaatgatgaacaggatatgaagcagtcttgttccaaaagcagtcttttggtgatgtacatggagcttttgcatagagtagtttatgtggcaattatctcaagaattttcatctggtggatgtacagggtccgtatagcaacatttccttgtagaaagttgaagctgtatatcgagggtggatttacatgtgttaatcttttcgaccccaagcctctgggaggctgtgaaccatagcctcatgaaatatgcctgttgttcattcagtgtttgtgtttttctcgtttgtcattattgtgcactcgcttttaatatgctcggtctattggaccgagcaggaaaatgatgttttaccttatagtggtctaactggttcattaggcgcgcaa

SEQ ID NO: 112781 - DNA, 3471 bp, Zea Mays
gaagctacgcaccaattcaattcccgagaaagtgattggggttttacatcttttatgcctttgttggatctgtatgattcaagtaaaggatatgttgtgaatgataaatgtatcatagaagctgaggttgctgtgcgtaaaactcttgatttctggaactatgactccaaaaggatgactggttatgttggcctgaagaatcaaggggctacctgttacatgaactcccttcttcagactttataccacattccttactttcggaaggctgtatatcatatgcctactacagagaatgatacgccttcagggaacattccattggctttgcaaagccttttttataaacttcagcatagtgataacagtgttgctacaaaagagctcaccaaatcttttggatgggatagctatgattcgttcatgcagcatgatgttcaagaattgaatagggtcctatgtgaaaagctggagaacaagatgaagggaaccactgtggaaggagcaatacaaaaattgttcgagggtcaccatatgaattatatcgagtgtattaatgttgagtctaaatctaccaggaaagagtcattctatgatcttgcactcgatgtcaagggatgttctgatgtctatgcatcatttgataagtatgttgcagtggagaggttagaaggtgataataagtatcaatctgaggaacatggtctacaggatgccaagaaaggaatgctttttattgactttcctccagttctgcaacttcagttaaaacggtttgaatatgattttgtgcgggatacgatgctcaagataaatgaccgttatgagttcccacttcaattggatcttgatagagatgatggaaaatatctttctccagacgcggatagaagtgtgcgtaacctatatactcttcatagtgtactggttcatagtggtggagttcatggaggacactattatgcctttattcgtccgaagctgtctgatcaatggtacaagttcgaggatgaacgagtgacgaaagaagacatgaaacgagcattggaggaacaatatggtggtgaagaagagctcccgcataccaaccctgggttggatactgcaccgcttagatttaccaagcattcaaatgcttacatgcttgtttacattcgagaaagtgacaaagataacattatctgtgatttggatgatgaagatatttcagaacaccttaaggttaggttgagaaaggaacatgaagagaaggagtacaagaaaaaggagaaggctgaggctcatatgttcactgcattgaaggtggcccgagactttgatattaaagagcaaattggaagacacatgcactttgatcttgtggactttgacagagttaatagcttccgtgcacctaagaacatgtcaatcaacgaagtcaaggaggagctttctaaagaatttggcatccctgtagaatgccaacgattttgggtatgggcaaaacgacagaactgtacctacagacccagtcgtccattaacctcccaggaggaaacatctactattggggttctcaaagatgcaacagtggcgaagttaccgaattctgaagtacgattgttcttggaggttcatttcagacaggagaaccaaccaattgctccttggaataccaaagaagatatattacttttcttcaagctctatgatcctgaaaaagaagacctaagatatgtcggcaatttttttgtgaaagcatcaggcaaaccatctgatatagtagaaaggctgaatcagattgctggatttctgtctgatgaagatattgagctctatgaggaaataaagtttgaaccagttgtgatgtgcgtacccattgagagtaatgcttcgttccgttcaagccagattgacaatggtgatataatatgctaccaaaagcactgtttgccagattcaatggatcgatatcgatatcctaccgtcccttctttctttgaatatattcataatagacagattgtccatttcagattgcttgagaaaccaaaagaagaaggcttctctcttgagctttcaaaatgctccacatatgatgatgttgttgagaaggttgctaagcaactacgtatggatgacccttctaaaatccggcttactcaacacaatccatcgtctcagcaacccaaacctcacttcatcaaatacaggagtcttaattatctttcggacatgctacataatcacaatcagatgtgtgacatattatattatgacatcctggatattcctttgcctgaactagaatctatgagatctctgaaggtcgctttccaaaatgccgcaaaccatgagatgtcgtttcacattatgcggttaccaaaaagtaactctctccttgatttgattgaagacttaaagtcaaaggttgaaatttcttgtaatgatgctgaatttcggttttttggagtctaccttcacaagatatgcaaggtgtatcaacctggagataagatagattcagttaatgaccatggacccttgtatattgaagaggttcccgaggatgaaaaaaatgccgggcctcatgaccgtttggttcatgtctatcattttgaatataatcatcatattcagtattttggtgaacctttcttcttcctaattcgtgatggtgaagctttgtcggatatgaaagtacggattcagaagagacttcaagttcctgatgagcagtttctaaagtggaaatttgctcatgttacattcagtaagccagaatacctccaagattcagatattgtaatgaacagattccataaacagagacctgtttatggaggttgggaacaacaccttggattggagcatacagccaccaccccaaaaaggtcctacttaggcaacaaccagaaccgccattcttttgagaagcctgtgaggatttacaactaaagctaggaatactttttacatgcgatgaatgatgaacaggatatgaagcagtcttgttccaaaagcagtcttttggtgatgtacatggagcttttgcatagagtagtttatgtggcaattatctcaagaattttcatctggtggatgtacagggtccgtatagcaacatttccttgtagaaagttgaagctgtatatcgagggtggatttacatgtgttaatcttttcgaccccaagcctctgggaggctgtgaaccatagcctcatgaaatatgcctgttgttcattcagtgtttgtgtttttctcgtttgtcattattgtgcactcgcttttaatatgctcggtctattggaccgagcaggaaaatgatgttttaccttatagtggtctaactggttcattaggcgcgcaagtgcacagttgaattactcctttggaagcttgaaacgagaaacataggaaatgtctatgacggtggacatgccaagaccccaagtcctcggtttcaaggcctcccaccgctggctttctag

SEQ ID NO: 112782 - DNA, 969 bp, Zea Mays
aagttattctcaaatgctaacatgtcttgcaaaaaaatggatggaacctccaaacattattttgatactccctccatcgtagtatataagacataaccactttttattgtagtcccacaatataagacacacactctctaaacatacgtacattgatgcagtatactagtgttgatagagagaactaaatatatttgttggtttttgaatcagaggtgttacaccttatatactaggatggagggagtatccaccaatcctggtggtttcgttaagatttcattttttatatttgttagtggtgttgattcacaattaaaacaatgttttctccttttcttcagattggggttctcaaagatgcaacagtggcgaagttaccgaattctgaagtacgattgttcttggaggttcatttcagacaggagaaccaaccaattgctccttggaataccaaagaagatatattacttttcttcaagctctatgatcctgaaaaagaagacctaagatatgtcggcaatttttttgtgaaagcatcaggcaaaccatctgatatagtagaaaggctgaatcagattgctggatttctgtctgatgaagatattgagctctatgaggttataagtgtttcttttttgctgtaacatcaggcctcatattctttgagcttagatgaccttacaaacaatcttgaaagtgtctgaccgctatagttatattatttaaatctttctaggaaataaagtttgaaccagttgtgatgtgcgtacccattgagagtaatgcttcgttccgttcaagccaggtttgtattttttccctatgagtactgctatacatacgaccatttgagtgcacctttttttattgaacgcgcaggggaactgcacatcttatatattaagaaaaggagatagaggtctaaagtagacccagaacaagttgccaataaaaaggcctagacag

SEQ ID NO: 112783 - DNA, 605 bp, Zea Mays
caaaccacagccaccgctagcaccaccgtcgctaccactactagcagcaaagcagcaggatcttcgaagtggtgccgtggcgctgccctgggtacatgttccaggagtcggggccggtgggcacgacgaaccagagccgcaccgaggtgcgcgtgctcatggcggagctcgccgctgacttcctgggaacgcctagaccaggacgacgactcggttcgcggacgaagccagccgtagtcctcccttctcagatctgcgcgctcgtggtgcaggagcgctcctggccccccgccgcgacggtggccagggccccctcgctggcgtcccgatcgcgtcaaccacctcaaccgcgctggcgtccgcctccacgatgtcaagaggtgtatcttgtttctgcagtgagttgctcatctggagacaatcgagcgtagattgttgaaggcacatctccaatattcctgcacaaaaacacaatgcgcatcaactaacagaagtgcaacaccctctcatctgagtgttcacatctttctttctttttttggctgattcgtttaaacctcactgtgtacagggcagaatcacagtccctgcatcgctggcttgcc

SEQ ID NO: 112784 - DNA, 867 bp, Zea Mays
gctattgcttccggttcagatggaaaaacacttgcatccataagatcattttatacaaacttaactgaaagacatttattttgttagtggcgaccatacagtgaaattaattgactgtcatatagggaaatgtttgaaagttttgagtggacatcataatacaaactgaactgaaatacgtttattttttttcagttatcagcctcatcaaactgtattgaaagacaccaaactgtattgaaagacaccaaactgaactgaaagacaacaaacatgccaggtaactgtattgcaaaagaatatggtacttatgcacctaaggagaaagggaagaagcatacttttttttggctttgggtagcatgtaaggaggccctaacgagttacaacagccttgataacccagccgcaggtgcaccagtagaacagctaaatgagctcgaggaagttttcaagaaggctgcaaagactgatactccagcagaacaatttagattaacaaggcagaacgaggagaggagcaagaaggtggccaatgacctcgccgcggcgctgttcgtggtcaccgtggaggtgaagcaggtcaaagcgtggctctccgatgcgcaggatgagctggaggccagcaacatcgaggccgacttgacgacttacattggcgcaggaatgatctgcccacatattgtcaacatctctgtcctgcttggaggaatcctctcgtggggactccaatgttacatccggagaaggttcttgttgaccggaaaggaaacatcaagatttttaagggtgatactcagatccgagagtggctttctcctggtgcatgaaatcttctttggaggatttttgaacccaacccgatga

SEQ ID NO: 112785 - DNA, 309 bp, Zea Mays
atgtcgtcatgcatccgtgccttccctgtcgtcatccaacccccgccctcgccacgaacggccgtcctcgaccaccacaccaatgtcatccttgtccttgagcccgttgtcaccatcatcacatcaccaaagatgcctccccctgctgctgaggccgagaccgacgaccagcagcggcaagctaccgagcccgacaacaagaggggcgaggagcggcccctcgtcgccttctccagatggatgcagctcggtgacacgcacgccatgctcggtcgcatggatggctccatcgcctgctaccttacatag

SEQ ID NO: 112786 - DNA, 797 bp, Zea Mays
atcctattacaactctagtgcccaccagccacccctaaaccctcgcttcgcccccaacgtttgctcacccagaccaagatgctccgccgcgccgcccctacgtcggctgcactctgccgccgcgcgctctctaccacgccatcctcttcccgcaccgcggcggaaaccgcggcggtctcctctgagttgaactccgtcctcctccgctcgctcaaggagcactacctcgaggtctgcaagatgacgccgccgcccaaggtcagcccgcccaagcccttcaccatcgtcaaaggcgccctggaccagccgtcgggccccgtgctgcgccgcgaatacggcgaagacggagaggagatctccatctccgtcgccaggctcgccaacatcctgcccgccggcgccgactctgactcggacggtaccggcgagggcggtggtatgagcgcgtccatcagccagctcctcctccacgtcgacatctccaagcccgggataggaaagtcgatgcagttcctttgcgggctgtacccggacgctcttgggatccattcggtctgcctccgatcgaagaacgccgacccgtttgatggggatatgacttcgaagggagagtaccgagggcgtattttccagtgagttgttcttccaaacgtttgagaatttcttgatttcaactttgaaggcttgagctcaaagatggtattttctatcttatacgttggattgtatgcaacacccccatagacaattcatgtagccagtgtgtcaagcttggtgaggacaccgatgctgtagac

SEQ ID NO: 112787 - DNA, 664 bp, Zea Mays
caaaaagttggatgaaaaggttcgggatgcacttcatctttactttgaaccccgcgccataaatgaaaagctcttcctttttctccaagcttggctttatgaaaaggatcaccgaattcttgtacgctggttcaaagcgttggttctattcatcaaggaccaaagccaaaacaagatgtcaagaaccccgcgctgaagatgatcatctgaaaggcggtcgtggagcagttttctccaggatggataattgtcctaggataaagtgaattatatgcaaagtcgcgccagcgaggagttttggtttatctttagtttttattcgccggggaatcagtggtctggtggttgaattagttatcattagtccttgtgatctgctaccctatcatgctgaggtgcttgtcagattctcaattattcaaactccacattttccatcgaagcgcaagaagcacgtattgagagaccctttttttttatctcatacaaagatcgccttttattgtcactttctaattatggggtgtagcgaggtcatgtgtccgtgttggtgcatgcagcactgccacgtttaggctctgtttgttttcctcctagatgttatttccctcttatgttatataatttatataagttagattatcttatagccattcaacagcca

SEQ ID NO: 112788 - DNA, 450 bp, Zea Mays
agcgtccgcttgggcacgcagagagctgagagcggcaggcaatcgaagcagaagcaagcggctgggcgccaagctgaggtgcgcgggcggcagcagccagcagggatggcgattgtgggcgcggagtactgcgaccccgaggaacgcgtgctgacggtgcgcaagacctcgcacttctcccccggcgacgggttcgcggcctacgaccaccgcacgggcgggctctccttccgcgccgacacctacgggcggggccacggcgggggcgcggcgtcggcgggcgagctcgcgctgctgggcccggccggggagcctctgctcaccgtgcggcgccgccgcccgtcgctgcaccagcgatgggagggcttcctgggcgcccgcgccgacggttgttgcatcttctcggcccggcgcccgtccatcctcggcggcgccgcgacgaatctctag

SEQ ID NO: 112789 - DNA, 2909 bp, Zea Mays
tgcctaccaagtcacctctttgcccggttggccgccgcgcccagtggccccctcctagcctaccgctccccgatccaatctgtgccgtccgttctcccgccgcaaccttcgtcttgtcctcaaggccggcggcggccactgcccgccttacaccatgaaaccaccacggctctttcccctcctccgccgccacctctcatccgccgccgacgccaccgccgacgccgcggagctttccagcgcgctatccgtggcgccctcctcagatgcgaaacgcgatcttgccatcctgctccgccgccttggcggccgcggtctcgcctccgccctctcgtcccttccggctccgcttcccgcctcctccgccctgcgcctccttcagcatattctctccgacacccacgcgtccgcctcccgccacgccgaggacctcctgtctcctcgcgtctctacgctcctcctaccatcgctcgtcgccgatggcgcctcgctaccgtccgcgcgccgcctcatctcacgcctcctcttcttcaaccctctttctgtcgccgcagcggctatcgcggactccgactgcactgccacagcggaccttctcgtccgcgcctgcctcaactcgcctgcccccggatctctgtcctgtgccgccgatgcctttctcgagctttccacacgtggtgcatcaccgtccatcaagacatgcaatatccttgtcgaagccctaggttgtggtggccaactggacctggcccgcaaggtgttcggagaaatgcgggatggcaacgctgttgctcctgatgtgtacacatacacggtgatgattaaggcactctgcagggctggagagattgatgctgcttttgtgatgcttgcggagttggaacggtctggtatccagccgacggttgtcacttacaacgtgctaatggatgcattgtgcaggagtgggagggtggaagaggcctttcagttgaaggggagaatggttgaaggcaggctgagaccaagcattgtcacatttggcatcctgatcaatggtcttgcaaggggccaacggtttggtgaggttgatgcagtgctgcaggagatggagggttttgggatcacccccaatgaggttatttacaatcagctgatcggttggcattgtagggaaggacattgctcagaggcgcttaggctgtttgatgaaatggtctcaaaggggataaagcagacagtggtgacttacaacttgattgcgaaggctctgtgcaaggaaggagaaatggaacatgctgagcagatattggatgagatgttgttggctggaatgacggttcattgcagcttgtttaatagtgtggttgcatggcatcttcgcggaactggaagactggatgtggtgctaaggcttataagagaaatggttgcgagatttctgaaaccaaatgatgctgtgatgacagcttgtatccaggagctttgcaaaagagggaaacacgaagaagcagctgaaatttggttcctagtattgggtaaaggtttgggtgtcaatattgcaacatccaatgcgttgattcatgggctttgccaaggtaacaacatgaaagaagctactaaggttctaaaggctatggtggatagcggggttgaattcgatagaatcacatataatataatgattcaattctgctgcaaagccagtaaaatggaggaagcaatacaacttcgtgatgacatgatcaaaagagggtttaagccagacctcttcacgtttaatactttcctacgcgcttactgtaatttgggtaaggtggaagacatccttcacttgctggatcagatgaaaagtgagggtcttaagccagatattgtgacatatggtaccataatagatggttactgcaaagcgaaggatgtgcataaggcgaataaatatttgattgaattgattaaaaatgggttaagaccgaatgcagtcatctataatgctcttattggtggttatggtaggaatggtagcatttctgatgcaattggtgttcttgacactatgaagcataatggcatacaaccaacaccaataacttacaacagccttatgtattggatgtgtcatgctggtcttgttgaagaggccaaagaaattttcgcgcaatgtatactaaagaacattgagcttggtgtaattggctacacaattataatacaaggtttttgcaaaataggaaaaattgatgaagctgtgatgtactttaaggaaatgcattacagggatatacgtccaaataagatgacctacaccactttgatgtatgcctattgcaaatgtggcaacaaagaagaagctttcaagctttttgacgagatggtgagctcaggcattgttcctgatactgtttcttacaatacactaatttcagggtgttgtgaggtggattcattggataagattgtagaaagtcccgctgaaatgtcctcatgagttttggaacaaggtggttgtttgtcaacgtttttgataatggataactacaccctggagccagagaagctgtgtctagtgttgaattatgtgtaaccaaggaagatgtaagaaaggagactcaaactttgagcttgatatatcaccctaatgtcatcaggtcttagcgctcatttgttgtgggtcaaaacctttgggtagtagtgctgttcatgctagaaggttcatgtttgcaccaaatgaaggttggatatctgatggttttgaggagccagttattgcctctattctaaaggaaacactcaaagctctagactacctccataggcaaggacatattttcaccatgatgtgaaggttagctctgtaggatttgttcatgatcagttttggcacagctttttatcaacatatcattgttgcaggcaggatatctttattg

SEQ ID NO: 112790 - DNA, 592 bp, Zea Mays
gtgcttaaatatgagtgcagcatatcatcaacatcaagttggaacttttactctgcccagagattagagctgatatggtctttggaataactgcactggaggtggcacatggacatgctccctttttgaagtaccctcctatgaagctaaaggattcagctagctttgaagagaatgccttcttcagaaatcagaacaagaaacacttttcatgggtgagtgttaataaggggtcagtgcatgaaactttgatattgaggatctaaaaagccagccatcactgatttgcaatgatgatgcacctgaaatagaagaacatgatgacactgctagaataactgacttcgataaagtttgtttgagtcctttgtctttattttaaaaatgccttcgagtcctttgtctttattttaagaaatgcattagtcatgtgtactaggaataatgacataaatatgatgtaagcttcacagagtgatagaagaaatcatatataagatcatcatctgtcactaggtgagtacccgtgcgttgcaacggggacatataataacataataacttatatataaaatgtgtcttatattgttat

SEQ ID NO: 112791 - DNA, 903 bp, Zea Mays
atgcccccgccccggcgcgcccttcccccacctcgcgcgcgatatgcggtgccccggtcccgtgccctccctcacaccgctgagacgatcgccatctccgccccgcccccgtcatccgtgccccctttccccagaaacgtcctgccccacctctgtcaacccgggcgactgccccaccatactgcatgtcctatccaaggcctcgccgccgcccgaggtgccgcagttcatgtgatcgctcgagggggagcgcaattccggctcagcgacatcgagtggaccacgaccggcaccagcgacgccgacgccgacgacgcgtccacgcgggccacgcgcaacacctcctacgacagcttccggccccacaacacggccgacagcagcgacgattacttccccaccctctcatccgctgcgttgttgcgcccaattttgaaggatatggttgttctatatgattctttgcaacttgctcacaagtgcatattgaattctttttatggatatgttatgcacaagggagcaagatggtactctatggaaatggctggtgttgtaacatactggtgcaaagattatccaaaatgctcgattacttgtagaaaaaattggaaggtcactggaactggatacagatggcatttggccatgttcttacctgcctctaaagaggaagggattctaataaagaagaggtatgatgtcttcaatgaagatggcactttggcagaacttaaaggttttgaaatcaagcgtagaggtgagctgaagctcataaaagtttttcagatattgatgaatgtaaggaaaggattgtgtcaatgcaaagaatccaaatgcaaaaacacatggggaagatatgagtatggctgcagtgaaggcttgctacctgaaggagcatga

SEQ ID NO: 112792 - DNA, 1288 bp, Zea Mays
ccccagcaagtcagccccgccccgcgccgacgcctctccccgatcccgatctgtgtgcctggctgcctgcaacctccgtgggatggaggcggcgcggcagcagcaggaggagtgcccgtgcggcggggccgaggccgctgaccagttcgagcggctccacgacgcggtgctgctcgacgtcctcaatcgcatcggcgacgtcaaggcgctcggccgctgcgccctcgtctcgcgccgcttccatgcgctcgtgccgctcgtcgactccgtcttcgtccgcgtcgactgcgtcatccctgacgacccgccgccctcgtcctcctcttccgccgcaccaggcacctcgccgcggcaggcgccagccccggccgcgcgcgggcgcggcgcgctcgcgcacatcgcgcgcgtcctgctcggcggcatcgccaggcccatccacgcgctcggccagatcctctcccccgccgccgcggccgtctcccggcgctccgaggcactgcccgcttccccgcgcgcgcccgtcgcggacgtctctcaccactccccctccgaggtgctccgctccttcaaggagctgcggcgccttcacatcgagctgcccacgggcgagctcggcattgacgacggtgtgctccttaagtggaaggccgacttcggctccaccctcgtcagctgcgtcatcctcggcgcctcgtcgatctcgtccaagccgccgacagggtacactcaggcggaatcggaaactgctgcggccgccactcccgataccagtcgggagactgaagagccggggagcctacctgattctctttatacaaatggagggctcaagcttcgcgttgtctggaccatcagctccctgattgccgcgtcggcgaggcattacttgctgcagccgattatctgtaatcacgaattgctggagagcttggacctgacagatgctgacgggcaaggggtgctcaccatggacaagaggcagctgcaggaactgcgggtgcggcccgtctttccgtcagggagctcgcaccgcaccctcatgccggctctcagtatgcgtctgcactacgcaccgctcattgagctgcctgggggaacgctgctgaagggtgcgacactagtggcgatcaaaccaagcgaagatgccttgagggagggccaaggggccggggctgcaggtcctgttggtacatgctggatttcagaggcctttgaggagccatatcggactgcggcaaaggtgcttctcaagagaagggcatattgtcttgaaatgaactcgttctga

SEQ ID NO: 112793 - DNA, 216 bp, Zea Mays
atggcacatatcgttgaattgcaaataaaatatgaactcttgacaaaggccctaaccgtgaacttccaaagttatgttaacactatgatggtaaatctagcagtggatgacgcacaatttccagattctcataagctgctggatgactttgttgaatccctcaggctaattagagctgcagcttcaagccttgggaagaatcaaagaaatgattaa

SEQ ID NO: 112794 - DNA, 455 bp, Zea Mays
atgcttcagaatgtacacgccacaaccaacaaaaaatttctctagtcaaaggcaagctccacctccatgcagtcaagtcatcactgcatacgctggatcagtcaggccctggtttgcatttgcatttgcattgcatccactgcatcagctcggctcatcagtcatcaggaactgtatacaaccttggagatcaccgagaatgggatgatcgcccggtggcctttgttaccctggaacccaacgttcccgaagctcgcagtggagctgtttatggtggcgttcacaacaaaggtcacgagctgcttctgtccgcttggaatgaaaaattgcgtcggcaccacggaaactgcagttccattaggggcactgtaattgacagagtagctctcgtcagcggccacgttgatcaccgttctcgttatggttcttgtttggttgagcacggctatggtgat

SEQ ID NO: 112795 - DNA, 264 bp, Zea Mays
tgctatgccactgaaatgactgaagcacattaccctgcccggggatccctcacaaccctctgtagactcctcacagtttcaatgttgtgtgcataaacatctaggccagagtttgccaaagatgagatagcctccaggtcacctcgaaaatccgaggttaagcactctaccagtattccaggtttgagctcctgaagaactttcactgtctgagcaaaatggctacttccaccatcaggtaagtcatctctatcgacactggtt

SEQ ID NO: 112796 - DNA, 1327 bp, Zea Mays
agccccgccactcgtcgcgcccccacagcagtccacggcccgagctctcccgatgataaaccgcggctcccagcttcggatctcgctacccgcacacccaccatcagcacgctcccggactctgatggcgctgagccccacgcccacggccgttgctgcaccgccgccggagccgggccccgagcccgcgccgtccgctgagctgccgctgccggacgccatcgcggccgcgctgccgccggacccgtacgagcagctggaggtggcgcgcaagatcacggccgtggccgtggcgtcccgggcctcgcgcctcgagctggaggccgcgcggctacggcagaggctggccgacagggaccgcctcgccgccgagctcgccgacagggccgccaagctcgagcaggcgctccgcgacgccgacgcgcggctccgcagcgcactcgacgacaacgccaagctggccaaggagcgggactcgctcgcgcagacgtccaagaagctggccagggacctcgccaagctggaaaccttcaagcggcacctgatgcagtcgctgggcgatgataattcccaaactcatcatcaggaaacagtagacataagaacctacgagcaatcggtggcaaaagcgaattcctggaaagacgggctagagaagaacagccatcctgtatcctctctatccgacgagtccgtcgaagccgacagcgtaaatcaggaagtgacgacgaggccatttgagcagaaactgaccatcacgcacatcactccacgcctcacctcggatcctgcgccgaagctgagaaccgccgcgacatccccgagaaggtactccacggcggtgtcgcccaaactggcgtccggcgccacctcgccgcgattggagggccacatggcgatgtcgccatggctaccctcgagcaagatgtcctctgcagccaactcgccacctcgtggacagtctatctcaggacgcggtacaagagtagatggcaaggagttctttcgtcaagcaagacaccgcctgtcatacgaacaatttgcggcttttctttccaatatcaaggagctcaacgcccataggcaatctcgagaggagaccctgaggaaggcggacgagatcttcggtgcagaaaacatggacctcttcaggtcgttccaagggctgcttagccgcagcctatcgtagtaaaaaggaaaagaagcttgcccattctatcaattactactccttgttgcggttgttcatgattcatatggacagggccgacagcaggtatacgctttgtgtataataaataaaaaaacgacgtggaccgtactaaga

SEQ ID NO: 112797 - DNA, 3442 bp, Zea Mays
agaaaagcagggtcgtgacaggacggggggaagagagacctccactcacggactcagcccccgccggaaagcactgagcttccgagcggcccgccgcgaggaacgcgtgacctcgccgcgcgctgttgcggctgggcgggcggcgcattcaggatctgctagggttccccgccggtggggtcctggccatggcgagcccgcgctcggccggcggtgacgaggcgatctggatgaagctgcgcgaggccgggttcgacgaggacgctgtcaggcgccgcgacaaggcggccctcatcggctacatctcgcggctcgagtccgagatctatgaatatcagcacaatcttgggcttattttattggagcggaaggagttgacgtccaaatacgaacaactcaaagcttcttttgaagccactgagatcatactcaagcgagagcgagcttcgcagcagtctgctttatctgaaacaagaaagagggaagaaaacctaaaaaaaaatctagccattcagaaggagtgcatatcaaatcttgaaaaggcacttcatgatatgcgcggggaaacagctgaaataaaagtttcatatgaagcaaaactggctgaatcccttcaaatgatggagacggcacagaaaaagtttgatgaagcagaagagaaacttctcactgcaaaatcattagaagcagactgcattcgaactcgcaacacctctctgagaagactgcaagacattgaagatcgcgaagatcagctaagaagataccaaacatcttttgaacttgagaatgcatcgaaagagaaagagattaacctcctgaggaaatcgttggatgataccaaaaaaattttgcatgaaaaggagcaatgtttactgaaagaacaagtacttcttaatcagagggatgacagcatccttgagagacttgcgtacataactagctcagagaaaaggttggaggaggaaaagttaaatctcgaagatgaaagaaaggttcttttggaagagaaaaataagctggatctgaacatgcaggcaattatatccagggaggaagctataattcagaaggaatccatacttgacaaacgtgaaagtgaactattgattctccaagagaccattgcaagcaaagaaagggctgaaatagaaaggctccgtcaagaggaagaaattgccttggtgaggaggaggcaggaatttgacactgacatggaaattaagctcacttcttttgaggaagagattgatgcaaggaaagccttgctcgatcaaagggaaaccaccatcaatgagaaggaggatgcagtggcgcaaagggaacagaatctcaaccttaggtttgctgagttagcgaacaaggaagaatctttggtgaagaaatcagatgagttaagggaggaagagaaaaggctctcctctgagagagagacactgcacattgatctgcaaaaagaaaaggaggaaattcataacatgaaattggatttagagaaggaaaaatctttctttgaggaggagaagcgtgaagcgattcaagctcaggagaatctagcaataacccaaaatgagcgagaagatttacaaagtttgcaggtgaaacttaaagatgaaattgatagtctgagagcccaaaaggttgacctaatggctgatgcagaaaggctattatcagaaaaagaaaggtttgagattgaatgggagttgatcgatgagaagaaggaggaactacaaaaggaggcagccaggattgctgaagaacgaagagtaatagatgagcatctcaagagcgaatttgatattatcaaacaagaaaaggaagatctccgtgttcagttaaaaattagtacagaatcccttgctcatgaacatgctgaattcatgaataagatgcagcaagagcatgctagttggcttagcaggatacaattagaaagagaagatctgaagaaagatattgatatccagagaaccgagttactgaattctgcaaaggctaggcagatggaaatagattcatatttgagggaaaaagaagaggagtttgaacagaaaaaatccaaggaacttgaatacatcaattctgaaaaggaaactatcagctcaaaactagaacatgtcaggcttgaattgcaaaaacttgaggaggagaggaaaaggtctatgctggagcgagagagaagagaggaagagctgtctgaaacaaagaagactatagacgcgcttaatgagcaacgcgagaagttacaagagcaaagaaaactgcttcattcagaccgaaaatcaattacacagcaaatgcagctgcttaatgagttagaagagctgaagattgaatctgagaacaggcaactgtctttgagacagtgtgggaaatcaaagcatgctggtgtggaaaacctggaagacaacggtgttcacctgtctcctgatgaggatcaaaatgctagtccaaaacaaactactgtaaagaaattggaagtgtccccttcagtctccacaccaatttcttgggttaaaaaatgtgctcaggtgatattcaaacgctctccagagaagagtgctgatcccaacaatgatatacctccaaagttgggaaatgtcaatgactgtacctccttagctactgcctattcagatggattgtttgcttgtcacctggaaaatggtgctgagaaagtaccacaagctatcgacggtctgaaagttgggaaaaagaggcttaataatgcactctctcatggtgactccgaaatttcacagccaaaacgcaagcagcaaaagagcgctactcagattttgagagtgattggaggagaaattgattccaactgcagcccatcagttctagaagaaaaatgttcaaagaatgaacatgatgcagtcccagttggtttgtgtgggaagggaccacaaaatccccaagcagagcattcagaggatatttcagtgtctgcatctgaaccgtcgaacggacctggtgttgtggactctgaggacaaggatggagcagatgaggagtctgacgatgaaggcgaggacgaggaggaagagaagacgtcatcggcgaagaagctgtggcgtttcctcatcacatgatttatttatctttgtcgtacgataaaaaatagcacggctaactgtaggttctatatgatggtaggaggccacttaggcatccaaagctctactagtttcattggctttgtcatggcgtgtcctctggtgtgtagtagaggtggaagaaggtactggtttggttgtgtgcttcgggtgttgtgagtagcgcggtggctttggaaggcgctgtggactgtctctcccccacctactaccacccatgccttttttttcttcctgtttatcttgtccgcaggaagacgtgtgtaaagtgattgacagtttccgggttggtgtgaaaatgagcctgcgtggttgct

SEQ ID NO: 112798 - DNA, 2532 bp, Zea Mays
tttgtgcgagtgtgcctcgtcattcacctcggccacaggcggtctcattgatgaggtgaggagctgtgctcagggggagcctaaaagcggcggcgtctacgcttgccgcgaggtgccaatggtgcagtggtggggccgtgaggcgtcgggtggccgggggacgtcggtggtggtgaagatggagagcccggaatggaccatcccggcggaatcggaggtggcggcggggggcaaggccggccgcggcaagaacgcccgccagatcacgtgggtgctactgctcaaggcgcaccgcaccgcggggaagctcacgggcgccgcctccgccgtgctttccatcgccggcgccgcgtggaggcgggtggcggcggggcggaccgacgaagacgaagacgaagacgccggcgccgcgccgcccggggagagccccgcgctgcgcagcaggttctacggcttcctccgcgcctccctcgtcctgtccgtgctcctcctcgccgccgacgtcgccgcacacctccagggctggcacctcgccgtcgacgtccccgacctgctcgccgtcgagggcctcttcgccgccgggtacgcgtcctgggcgcgcgtccgtctcgagtacctcgcgccggcgctgcagttcctggcgaacgcgtgcgtcgtgctcttcttggtccagagcgccgaccgccttatcctctgcctgggttgcctctggatcaagcacaggggcatcaggcctgtccccaaggctggtggcaaagggtcagacgacgtcgaggccggcaccgggaacttccccatggtgctcgtgcagattccaatgcgcaacgagaaggaggtgtaccagcaatctattggtgctgtttgcggtctggactggccaaggccaaacttcttggtgcaggtgctagacgattctgatgacgctgccacttcaacacttattaaagaggaggtggagaagtggcaacgggaaggcgttcgcatattgtaccgacaccggttaattcgtgatggctacaaggctggaaatctcaagtcagccatgaactgcagctatgtaaaggattatgagtttgttgttatctttgatgctgattttcaaccccagccagacttcctgaagcgaactgtgccccatttcaagggcaatgaggacgttgggttagttcaggcaaggtggtcttttgtgaacaaggatgagaacttgctaactaggctgcaaaacataaacctttgcttccactttgaggtggagcagcaggttaatgggatcttcctcaatttctttggattcaatggaacggcaggagtgtggagaataaaggcactcgaggattcaggtggatggatggagaggacaacagtggaggacatggatattgctgtccgagcacacctcaagggttggaagtttctgttccttaacgatgttgagtgccagtgtgaattgccggagtcatatgaggcatatcgaaagcagcaacaccgatggcattctggtcccatgcagttatttagactctgctttgtggatattatcaagtcgaagatcggattctggaagaaagttcaacctcatatttcttttctttctcctccgcaagctcattctgcccttctattccttcacccttttctgcatcatccttcccatgacgatgtttattcccgaagccgagctccctgcctgggtcgtgtgctacatcccggcgaccatgtccctgctgaacatcctcccagccccgaaatcgttcccgtttatcgtgccctatctcctgttcgagaacaccatgtcggtaaccaagttcaacgccatggtctccggcctgttccagctcgggagcgcccacgagtgggtcgtcaccaagaaatcaggccgttcttccgagggcgatctcgtcgtcgagaagcagcctagacagcaaagggcagggtccgcatccaaccttggttcccttgcaaaggagccttcctccagtctcagaaaggactcccaaaggaagaaacacaataggatatacaggaaggagctggcgctctccttccttctcttaacagcagctgctcggagcctgatatcggtgcaaggaatacacttctacttccttctgttccaaggggtatcgtttttggtcgttgggctcgatctgatcggcgagcaagttgagtgacgggaatacaagggagagtaatggcggtatttgtttttgctgcgagcggtggcaatgcgaacagggagcacttcaggtaaaggcaggcacggtatatgattcaacgcaaacacgagaagatttggttccggattaagaggggttatagatggttagggatacttgaaacggtgtactgtggattgtagatatatggcttgagactgtggactggggtctgattcttttgtaagaaaatctttcagtggggtcattttgctttcttgacagtttaccttcaaagggggatactgtttgggatccatgtaatttggccagttagtacgaatgcatactgaatgatacttgttcgtttcttgaa

SEQ ID NO: 112799 - DNA, 847 bp, Zea Mays
cgcctcggctcgtatcgtactcatcacacatacacaatagttcgcagcttgtagtgctcgtccttgccttgtccctctctctccggggaatcgtagccaagtccacgcggcgcgcgtgcatgaagaagaagggcggcggcggcggcgggtgcctcggcgcgccgatgcgcgcgctgtcgcgggcgtgcgactcggcctgcgacctctacgtgcgcggcatgtccgggtgcgcgcgcggcgtgccgcgggggtcgtccgcgggcatcgtggggcggggcttcggcggcggcggctccggcgccgcgaccctgcgcctccgggtcagctcggacaaggccgacgacgacctcgtccgcgccgcggcagcggccgcggccgccaggcgccagcgccgcgtcgcggccgagccggacacggcgacagcagaggcccgtaaggtgggcagcgccggcggaggactgcccgtcagggcgccgcccgcgcggaagagggccgctgcggccaccatgggcaccatcgccgaggacgcgccgtgcgagttcgtcggactggacggcggcggtggcgcctgcgctgctcctgtcccctcgctcaacccgccgcgccgcgggggtttcgtcgccgtcaaggcggggggcgacgtctttgcgcgctgacccattcggctacgatcgccctgccactgcagaatcagcttcgagtcatcccttatgtcatggcgccacttttctccctccttctctcgtctctctgtctatagcttgacgtgtaaattactctagggataactacgagagcagtgtatctttacgaaatctatgcatgagtgtgatttgattaccagaaa

SEQ ID NO: 112800 - DNA, 718 bp, Zea Mays
ctccaattttgagggacaactagggacaacactaggataatcctgtcccaacccttgatcctaaaccaaacaaccttatttgagggatcgtcccatcccatcccgtcctgtcattgcaaccaaacgcaccctaagacatatccgagaccccgagagcgattcgtgacgatatccaaaggaatattgaagataaaaaaaccctggtttttctttctggaaagacaatattttttcatccttttgcattgaaataacgaatggaaatcaaaataatatgattcaacctcaagcccttttaaatgtagcagataacagtggagctcgaaaattggtgtgtattcgagtcataggagccgctggtaatcagagatatgctcgtattggtgatgttattattgccgtaatcaaagacgcaatgctccaaatgcctctagaaagttccgaagtaattcaagctgtaattatacgtacacgtaaagaatttaaaggcgacgacagtataataatacgctatgatgacaacgcaacagttatcattgatcaaaaaggaaatccaaaaggaactcgagtttttggcgcggttgccgaagaattaagagaattgaattttactaaaatagtttcattagctcctcaagtattataaatactagtagacgagatatagatcaaagaaacattagtagattttgtctcacgtattagattagtaacatca

SEQ ID NO: 112801 - DNA, 1336 bp, Zea Mays
gtgcattagcctggaacaacgctagcgagtgctgtctgctgtcacgaaattgaattgcacgcgtcggtgaacggggaagcgaacacagacacgctacatatgatccacgtccgaagcgggccaacccctcacgttcacggttcaccagtctcgtcgtgtccgttcgcgatcgggcaaacctgcaaccctttcctcttcgtccccccgctatctcgttgccccaagccggagtacggagtacggcagtcgcacccccgtcgtcccgttccttgctcgccccaacttcgccgccgcatccccctcggctgctcgctcctcgtctgcccctagtgatgtctggtggtaacgcgtggtcgccgctcccttcgcacggatttgaatccgactccggcggcatggggagccgcgcaggcgagcctgtggcgaggaccaacagcggcggcggcagcagcagcaaggattcgggcagcttcgagtgcaacatctgtctggacctggcgcaggatcccgtggtcaccctctgcggccacctcttctgctggccatgcctctacgagtggctccacgtgcacgcgcactcccaggagtgtcccgtctgcaaggccgtcgtcgaggaggggaagctcgtccctctctacggccgtggtggcaactccacctcaccccgtgcaaggtcggtggccggtgtggaaatcccgagcaggccgaccgggcagcggccctccactgccccgcagccagaccacagtaatcattacccgccccagaacccctggttcatgggcgctggcgccccccctgtggctggtggtcggtgggggaattacactttctcggcggccattggagggttgttcccgttgctgagcttccaggtgcatggattcccgcaggtgtctgcctatgggcctgctgcagggtttccctatggatacggccattctttccatgggtggcatggacatggctatggcttcccgcgccaggcaccacaaggccagcaggttgatgcgtacttaaaggtgcttctactggtagttggtgtgcttgtaattgccagcctgatcgcattttaaattatgtaaggctggcgatattgctgatccgttggtgtgtaccatagttctagcatcattgcatcttagatagctcccaaagtttgatgtcagcgtggagataagtagacaagttgtgataattggtggcagctggtattcattgtgtaaagttgctatcgaaaattataggtgcatttgttgtgttcttgcgttgaacattctccatgttcatgtttcttccaagaaatttgcctgcaatgttctcttcttcattgcta

SEQ ID NO: 112802 - DNA, 826 bp, Zea Mays
atcaacgctaggtcacccgggcttccctcctcctcggacaccagcgccgacgccgacgccgccacccaggcctccctccacggacgtgggcctccctcctcctcggacgccagcagctggcgccaagtctccaccctctccttcccccgccataacccccgccgacgtggctaccggtgtcccttccactctccaccctttccctcccttcaacgccaagtccatccacccttccgaatcttcgattgcctccgtccatgtaacgactccaatcaccctagagtccggactctagtctggtcagatccactagcctgcgcttccacgcctagctcacgccttcttggaccctgttccctttttcttcgcgcaaaaactccacggatttgcccatgttcttcgctcctagatagactgcttcgcgatcccgcggactggtggttccggttcgttggggttccagatcttaacgaataggccggggttttcctgtggttggtgtgtcaaatagttggtcagtacggtgataccctcatcaccaccagcagcagatgttgggaggtttaggtggtcatgggtgtaaggattggatattggactgcagtactgggtcgtggcataggaaatgtcctttaaggaacctctggaacaaaggcttgtcccaaaaaatgttcccattgattttctattttctctggaattaagggaaccttactatctgttgattttctgcgatctcaagttagttattttctctgtaaacttaatgtgcactagcaacactttaaatggtccctactgaaagcataacatattccaatgacaa

SEQ ID NO: 112803 - DNA, 1439 bp, Zea Mays
cgtctcctagtcctaacccaccaccaacgcaataatctacagcagcggaggaaagcactacagctcttggtcgagcagtgtataaatattagcaatcactcatgctcaccgtgtgcacgccacaaatcatccaaattaagctaacaacgaacgacaactccacgcagagcaacaatggcgccgccgatgaaggtgtacgggtgggccgtgtcgccgtggatggcgcgcgcgctggtgtgtctggaggaggccggcgccgactacgagatcgtccccatgagcaggtgtggcggcgaccaccgccggccggagcacctcgccaaaaacgtacgtggctagctctctccgccgtcgcatcgtcgactgacattccgacccttaactttgagtttccagcagcaactttaatttgcccagttaactgttcgctaacgttagtttagcgagcaggataataagtagagaacatatctaatgcacatgaaagattgatacacatggtgcatatattaaatcatcaccactcattttagatctaacgtctctagttgtttggtatattttgctaaggacaccctccaacgtggtggtgtgtagtggtggaaggtgttatttgtaaattgaatgatcaactagagacattagatttaaaatgagtgatggtgaattaatatgtgcaccatgtgcaccaatcctccatgtgcaccagatatgtcctctaataagtaatagctcttcgatgttctgcgctgcagccgttcggtgaaatcccagttttagaggacggtgacctcacgctctaccgtaagctatctaactactttgtactaacaactcgagctgtttaatttctctaacgctcctaattccagaatcacgcgccatcgcacggtacgtcctccgcaagctcaagccagagctcctccgcgaaggcgacctcgaggggtcggcgatggtggacgcgtggatggaggtggaagcccaccacatggagccggccctgtggcccatcatccgccacagcatcatcggccagtacgtcggccgcgaccgcgaccaccaggccgtcatcgacgagaacctcgacaggctgaggaaggtgctgccggcgtacgaggcgaggctgtccgtctgcaagtacctggccggggacgtaatcagcgccgccgacctctgccacttcggcttcatgcgctacttcatggccacggagtacgccggcttggtgcacgcgtacccgcacgtcaaggcctggtgggacgccctgctggcgaggccctcggtgcagaaggtcatggcaggcatgccgccggattttgggtacgccagcgggaacataccataggctagagaggtgggcgtccgtcactccagatctgaggtctctgaacctcaacgtttccgataaacatgcatgctttatctactgtttaaaaacc

SEQ ID NO: 112804 - DNA, 1799 bp, Zea Mays
cgtctcctagtcctaacccaccaccaacgcaataatctacagcagcggaggaaagcactacagctcttggtcgagcagtgtataaatattagcaatcactcatgctcaccgtgtgcacgccacaaatcatccaaattaagctaacaacgaacgacaactccacgcagagcaacaatggcgccgccgatgaaggtgtacgggtgggccgtgtcgccgtggatggcgcgcgcgctggtgtgtctggaggaggccggcgccgactacgagatcgtccccatgagcaggtgtggcggcgaccaccgccggccggagcacctcgccaaaaacgtacgtggctagctctctccgccgtcgcatcgtcgactgacattccgacccttaactttgagtttccagcagcaactttaatttgcccagttaactgttcgctaacgttagtttagcgagcaggataataagtagagaacatatctaatgcacatgaaagattgatacacatggtgcatatattaaatcatcaccactcattttagatctaacgtctctagttgtttggtatattttgctaaggacaccctccaacgtggtggtgtgtagtggtggaaggtgttatttgtaaattgaatgatcaactagagacattagatttaaaatgagtgatggtgaattaatatgtgcaccatgtgcaccaatcctccatgtgcaccagatatgtcctctaataagtaatagctcttcgatgttctgcgctgcagccgttcggtgaaatcccagttttagaggacggtgacctcacgctctaccaatcacgcgccatcgcacggtacgtcctccgcaagctcaagccagagctcctccgcgaaggcgacctcgaggggtcggcgatggtggacgcgtggatggaggtggaagcccaccacatggagccggccctgtggcccatcatccgccacagcatcatcggccagtacgtcggccgcgaccgcgaccaccaggccgtcatcgacgagaacctcgacaggctgaggaaggtgctgccggcgtacgaggcgaggctgtccgtctgcaagtacctggccggggacgtaatcagcgccgccgacctctgccacttcggcttcatgcgctacttcatggccacggagtacgccggcttggtgcacgcgtacccgcacgtcaaggcctggtgggacgccctgctggcgaggccctcggtgcagaaggtcatggcaggcatgccgccggattttgggtacgccagcgggaacataccataggctagagaggtgggcgtccgtcactccagatctgaggtctctgaacctcaacgtttccgataaacatgcatgctttatctactgtttaaaaaccaaacttgattggtgcaggggtattttggttttctcttataatttatttattgtgttttgaatacttttagtcactaaaaccaacaagatagacaataaaatttagtctactaactaaactttagtcactaggctaaagaaaccaaacatgttttaaattagggtcattgctgatgtggtttctcgttttttaccatataatgtactacatccgttctcgaattttttgtcgaccactagtttatttttaactaaaacacgacaaataaaaaagaacgaagaaaataccaatttcgtaaatagttttttataaaaatcatttcttccttttatacggtagaggtgaagccaaaagaaaaagcttccctagctttgactcatgctatttttgaagaaaaaaactcctactatatatataaaaaataggat

SEQ ID NO: 112805 - DNA, 1359 bp, Zea Mays
ctaacccaccaccaacgcaataatctacagcagcggaggaaagcactacagctcttggtcgagcagtgtataaatattagcaatcactcatgctcaccgtgtgcacgccacaaatcatccaaattaagctaacaacgaacgacaactccacgcagagcaacaatggcgccgccgatgaaggtgtacgggtgggccgtgtcgccgtggatggcgcgcgcgctggtgtgtctggaggaggccggcgccgactacgagatcgtccccatgagcaggtgtggcggcgaccaccgccggccggagcacctcgccaaaaacccgttcggtgaaatcccagttttagaggacggtgacctcacgctctaccaatcacgcgccatcgcacggtacgtcctccgcaagctcaagccagagctcctccgcgaaggcgacctcgaggggtcggcgatggtggacgcgtggatggaggtggaagcccaccacatggagccggccctgtggcccatcatccgccacagcatcatcggccagtacgtcggccgcgaccgcgaccaccaggccgtcatcgacgagaacctcgacaggctgaggaaggtgctgccggcgtacgaggcgaggctgtccgtctgcaagtacctggccggggacgtaatcagcgccgccgacctctgccacttcggcttcatgcgctacttcatggccacggagtacgccggcttggtgcacgcgtacccgcacgtcaaggcctggtgggacgccctgctggcgaggccctcggtgcagaaggtcatggcaggcatgccgccggattttgggtacgccagcgggaacataccataggctagagaggtgggcgtccgtcactccagatctgaggtctctgaacctcaacgtttccgataaacatgcatgctttatctactgtttaaaaaccaaacttgattggtgcaggggtattttggttttctcttataatttatttattgtgttttgaatacttttagtcactaaaaccaacaagatagacaataaaatttagtctactaactaaactttagtcactaggctaaagaaaccaaacatgttttaaattagggtcattgctgatgtggtttctcgttttttaccatataatgtactacatccgttctcgaattttttgtcgaccactagtttatttttaactaaaacacgacaaataaaaaagaacgaagaaaataccaatttcgtaaatagttttttataaaaatcatttcttccttttatacggtagaggtgaagccaaaagaaaaagcttccctagctttgactcatgctatttttgaagaaaaaaactcctactatatatataaaaaataggat

SEQ ID NO: 112806 - DNA, 1157 bp, Zea Mays
ggggacgatcacatcgcgatcgccaattgaacgctggacggagagatccttccgagctccgacagaaagaacgaaaaaacaaaaaagagccgtgaagcttccctcgctgcccggtggacgtcgtaaacactgccccgcgcgcgcgcgcgcgcaccggaccctcacccgccctctcgtccctcctcgtctatatatatacgtgctcgcgctgccacgttccacaggcacagtgcccaccagctccctgcttcagcttgcacactcagtcacagacaggccaagttcagagatggggagcatggaggtgtccaagccgtcgaagcgcctgtccccgaagcgcagcagcagcttcaagctgagcctgttctgcggccagtgcaaggccacggcggtgtcgtcgccgccggactcccccacggcggccgccgctggcgcgaggtcgctgtcgtcgtcgtccgcgtccgcgtccgcgtcgtcctcgggcacgtcccgcgggcgcgaccgcaccgcggagctgcgcgagatctttcgccacttcgaccgcgacatggacggccgcatctccggcgcggagctgcgcgagttcttcgcgtccatgggcgacggcggcagcctgcaggcgctggggctgaaggacggcggcggagccggaggggccgtcgacctcacgctcacgctcggcttcgacgacttcgtgtgcgtcgtggagagcaagggcggggaggaggaggagcgcgaggacctgcgccgcgccttcgaggcgttcgaggccgtcaaggggtccggccggatcacgccgcgcggcctgcagcgcgtgctcagccagctcggcgacgagccgtccgtcgccgagtgcgaggccatgatccgcgcctacgacgacgacggcgacggcgagctcgacttccacgacttccaccgcatgatgagccagggctagctagtctaggcaagccggccggccggtcggtccatcctgtgatacgtcatatcttgttccagccaacaatgttttcattagctaggaagttttttaatttccgcgttgccttcggttcgtgtgcttgtgtttgatggcgggcgagcgtgtgcacagcacgcatacgtgcgcgtgactttagaatgtggtgcctgtgtgcttcggagtctgattttat

SEQ ID NO: 112807 - DNA, 249 bp, Zea Mays
attatatttttatttttatgtttgagttttataatttttaatttttgacagaagaactgagctgacctactgtataataatgctaacaccgcatagtagccaacaattatgcacagtttttacatgactgctatggagcacaaagctccacaaaaagcttacaccgacaaagctaacatacatacatgtagcacacaaaattgttatgatgcttcgactgttgtttccttgggcaaagttacaacaatc

SEQ ID NO: 112808 - DNA, 1689 bp, Zea Mays
cagattcattaacatgcctatcctaccactataaaggtacacaaagcttccgaagggaagaagctcttgagaagatactgcaatgatggctcctctgtctcctagactggtagtgcccgtagacgtgaagaagctgccgcgggagcaaaaggtccctctccacaaccgctggcacccggatatccctcctgttgctgatgtaaccgaaggggaattgttccgcgttgagatggtcgattggagtggagggcgggttagggatgataactctgcagatgatctgaaattcatggatttcacaattgctcattatcttagtgggcccctaagaatagttgattctgaaggggttccagcttcaccaggtgatcttctcgcggtagaaatctgcaaccttggcccacttcctggcgacgagtggggttacaccgcaatacttgaaagggagaatggaggtggattcttaactgaccacttccctagcgcaagaaaagccatctggtatttcgaaggaatttacgcatgctccccgcagataccaggtgttcgttttccaggattgactcatcctggtgttgtgggaactgcaccgtcacttgagctcctaaatatatggaatgaaagagagaaaagtttgtctgagacaagcctagagactattaaactgtgtgaagttctacaccagaggccccttgctcatttaccgacccctgaaaattgcttacttgggaaggtccaagaagggactgctgaatggcacataattgcaaacgaagcggccagaactattgctggaagggaaaatggcgggaattgcgacataaagaacctaagcagaggctccagaatttatctaccagtgtttgtcgaaggagcaaacctcagcactggtgacatgcacttctcccagggggacggcgagatttcgctgtgtggagcaattgaaatgagcgggttccttgagctcaagtgtgagatcataagaggtgggatgaaggaatacttgactccagttggtccaacaccactccatgtgagccccatctttgagataggtcctgtggagccacgtttctcggagtggttagtgtttgagggcatcagcgtagatgagtctgggaagcaacattttcttgacgcatctgtggcctacaagcgtgcagttctgaacgccattgagtacctttccaagttcgggtactctaaggagcaggtgtatcttttactatcatgctgcccatgcgagggtaggatatctggaatagtggactctcctaatgctgtaacaactcttgccatccctacagcgatatttgatcaggatataaagccaaaacgcgtgaaggggagaccacttggaggaccacagttgagaagacttccagatcttctaagctgctcaaatcatggacgccttcctgccacccaagacagaagtggtacaagcgcgccctagtatatggaaacagatgcagtatcaatcgacatgcaactgtgccaaggctataatcaagaatgcgtttgtctttttttttttattttcttcgtctaataaaaattacgataaagcttttgccgttctttagaaaaaaataatcaagaattatcctcgattcatcaggttgtcatcgtgaatgagagtgagccttttggttttataccagccaggctctttttaaatggtactgc

SEQ ID NO: 112809 - DNA, 840 bp, Zea Mays
cccaggtcccacagcccacgccggagtcgcctccaagttcccctctttctcatcctccttttcggaaaactactcgaagagtttgcgaactccatatccagctacgctccaagctcctcgtcgtcctcaacgacgccgcctctctcgagcacgcgcctgcgtccatctcgcgtacgacggcgcgtctctttttcccagcgccgcgaggtgagtggtaccttcactgatgcagcgacgcggctctgctactcagcgttgcaaggcgatagttcgctcccgttggccatgtctcccatacgcactgcgcgtcccgagatgaagggatgcttcggcggccgggtgctggcgtgcaagcaaggcaatgacatccccgatgcccgcgcacatggaaggcaacgacgactgtagaggcccgcgtgcgagcgaggctccgactgcccgatgcgtgggagacaaggtcgcaactatttttccgactgctcgcacgcgtgggagaacactgtgatggaggcccatggcggcactggagagaggcgatggtggctactagctatcgtgcagagcagataaaatcagtacaatttgtatctacggggaagagtagaataatgtacatcgctagctgccaccgccacggaggttcatgtggaggaagacgccgcgcggagggacgctgccctcgtcatgcggactacacccaagatggacgagtctcgcaccgagggagatccggacccaactggaagtggaagcggcatcttggggccaagcgccgccgaaagatagctacggagaagaaggggatcgcgacagcaacgagtcagcaggtccagcacccat

SEQ ID NO: 112810 - DNA, 198 bp, Zea Mays
atgtcgtacacggggatgtgcgactacttccactacgtcgactactttcactgcacgaggatgtacgactacttccactatgacagagcatcatatcatgtcctccgctcccctcctcgcttgattctggtgaatcttgttcttacatgtggggcgattcccctagtgtgtgagtctgagtccctcgaccgattctaa

SEQ ID NO: 112811 - DNA, 296 bp, Zea Mays
gcagagcagcaacgcaaagaagaagaggcggcaagccgaccaagtagtagctaccgaaaccccagaaccagattcaggcgacatcattcatggcgagggcgagcgggagcgggaggggaacgaatcgaagcgacaaggagaggagacgagcgcgaggcggtgtgaccttgagaggcacgaatacgatggggcgctccccggcgccgcgcgccacccagatcagcctgacgccgcccgcggcctcggaggcgggacgcggaggagccgccacgacgcgccggcggatcttagagtag

SEQ ID NO: 112812 - DNA, 262 bp, Zea Mays
cgcaggtggagcggcgattaccaacaagggcgagctggagagcatcaacgaggagaacctacggttggcatgtgcgcagctgcggcatgccatgtccgaagctaacggcgatggcgctatggagaaggttctgagaatggactggagtaggaagcccggagatccgtccgacccggccgtggacacggagtggattgcggggatgactgggctgggtctcgatactaacttcatcgtcgtgcacggcgccggtatcgttcgc

SEQ ID NO: 112813 - DNA, 1380 bp, Zea Mays
caaataaacccccggcatttcctggcctaacacgctctcagtctcactcccacggtcccactcctcaggagcgtccagagtttaggtgctcgtggagtcgtggtggaggtggtaggtgtcgatggccttcaagctggccaccaaggccgcggcggcgtcgcccgctgctgctcaccgcgggggtctcgcccgggggccggagggtacgagccgcgttgccttcggaccagcgcctagaaacaaggggctccgcgcggccaacaactccgcgacgcccgtggctaaggaagagagggttgatcgaagtgaaatattgacattggatagcattagacaagttttgattagactagaagacagcatcatatttggccttttggagagagcacagttttgttacaatgctgatacatatgatagcaatgctttccacatggatggttttggcggctctttggttgaatatatggttagagaaactgaaaagctccatgcacaggttgggagatacaagagcccagatgagcaccctttctttcctgaggatctgcctgagccccggttgccacctatgcagtacccaagggttttgcatcccattgctgattctatcaatatcaacaaagagatttggaaaatgtattttgatgaacttcttccaagattggtgaaaaaaggaagtgatggtaatgctggatccagtgctctttgtgacacgacctgcttgcaggcgctctccaaaaggatccactatgggaagtttgtggcagaggctaagtttcaggagtccccggaagcttacatgccagccataatagctcaggaccgtgatcaactcatgcaccttctcacatatgaaacggtggagcgtgctatcgaacatagggtggaagccaaagccaagatcttcgggcaagaggtgaacatcggtgtggaggacaacggcagcccaccggtgtacaagatcgttccgagcttggtcgccgagctgtacagctacagaatcatgccgctaaccaaagaggttcaaatcgcgtatttgcttaggaggctggattgagtatgtttatgtagatgtaaattgccagatcagaactcctggcgttaagccagaacattggtaaataccggttttggtgtcaggatgcaaaatgtaccatgtgtggaattgtgccaacaaacaagcataatatcatgtggagttgtcgagtagtcgcgcctcgtgcgtactgccaatggacaatgtttgtagactgtatggaatgatgggtcacttcctttggcgggtgcccttttgaaagggagtaaaattctctcattgtcgttgaaatttatacagatccgctcaagtgccatcgaaattttcaacttactttgatt

SEQ ID NO: 112814 - DNA, 779 bp, Zea Mays
agcacaaaaatcaattgaacgttttgagaacgaaaataacacccgccgatactataccataaataaagttcaagaaatccacccctgcccgccgccgcctcttccttccggccggtcttcgtttcgacatccaggaaatggctaccgcggcgcgcctcctcctcgtcgtggtgcttctctccgcggcgataccgatcccgtccttcgcgacaagcttcgtcgtcggcgacaagaggcatcgctgggctcccaacgtcaactatacagactgggcggaccgtcaccagttccacgtcggcgactggctcgaattcaggtacgagagggacaggttcgatgtggtgcaggtgaacgagacggcatacgcggcgtgcgacgccagcagccccatcctcagctacagccgcggccacaacttcgtcttccggctcaaccacacgggccggttctacttcatctgcagccgcggctactgctggagtggcatgaaggtctccgtgctcgtccagccgccgccgccgcccccgtcgctgccgccggcgtcccactcccacgcgtcaagcgccagtgcgcgtgtgcggccggcggccgggctttggtgtgcggctctctctaccttgctgggctgggcggtgctcacgccgccgctgtcgtttcgggtctggagttctggacgtccaggcgcgcacacgagtctaaactctaaagctgtttgctaatgtactacccatttcttcttttttagtatggaaataagagttccggctttagcataaaga

SEQ ID NO: 112815 - DNA, 101 bp, Zea Mays
gtatttgtggtttattagttgaattaactaatcaagttaacgtctcgtatctagtatggaggaggatcgtcgatggatgtatgaaggttgaaagaaaagag

SEQ ID NO: 112816 - DNA, 965 bp, Zea Mays
cagctccttccaaagggagacagccagcctgcaggatggccgaaatgcgcagaaaaatggacgcggccgtcggtggctaccaataaatggactcccacgccacgccgcgctcctactagcacaaggttgaaaccagcgttgccgagcgagagaaacagagcgccccctgtccaagtggtcaggtccaggacaccctccacgcacgcactgatggaacccctggtgttcgtgctgctcttggtggccatgccactcagaggatcagatggcgcgtggtgcgtgtgccgcccggacgtgtccgatgcggcgctgcagaagacgctggactacgcgtgcgggcacggcgcggactgcgccgccgtgctcccgaccgggccgtgctacagccccaccactgtgcgcgcgcactgctcctacgccgccaacagctacttccagcagaacagccaggccaacggcggcgccacctgcgatttcggcggcacggccaacctcaccgacacagacccgagctctggaacttgcaaataccctgcaacaccaagcgaagcagggacaagcggcaacgccaccggcacgggcacggcaccgccaggctcgacgagtaacccagctacgacgcccagcatgggagggagcgtcacgacgacacctgtcggcgcgtttggtcccgcgcctagcaccttcagcgcggccaccgccactgccgccgcgtttggtggtcgccgtgccctcctcctcgccgtcgtctccgtcctgtctttcttggcgcgctaacttgctcgatcagaagaaatccgtagcatcgtcaccctatgtgtaattggcggccgcacaggacagggctttttttttggtgtcatgccgtcatcgtgaatatttcacaattgttcgttcttctctctcatgtttctcgcggttttcattacttccgctcatgaaaaatggatcgagttttacctgaa

SEQ ID NO: 112817 - DNA, 873 bp, Zea Mays
tggactcccacgccacgccgcgctcctactagcacaaggttgaaaccagcgttgccgagcgagagaaacagagcgccccctgtccaagtggtcaggtccaggacaccctccacgcacgcactgatggaacccctggtgttcgtgctgctcttggtggccatgccactcagaggatcagatggcgcgtggtgcgtgtgccgcccggacgtgtccgatgcggcgctgcagaagacgctggactacgcgtgcgggcacggcgcggactgcgccgccgtgctcccgaccgggccgtgctacagccccaccactgtgcgcgcgcactgctcctacgccgccaacagctacttccagcagaacagccaggccaacggcggcgccacctgcgatttcggcggcacggccaacctcaccgacacagacccgagctctggaacttgcaaataccctgcaacaccaagcagggacaagcggcaacgccaccggcacgggcacggcaccgccaggctcgacgagtaacccagctacgacgcccagcatgggagggagcgtcacgacgacacctgtcggcgcgtttggtcccgcgcctagcaccttcagcgcggccaccgccactgccgccgcgtttggtggtcgccgtgccctcctcctcgccgtcgtctccgtcctgtctttcttggcgcgctaacttgctcgatcagaagaaatccgtagcatcgtcaccctatgtgtaattggcggccgcacaggacagggctttttttttggtgtcatgccgtcatcgtgaatatttcacaattgttcgttcttctctctcatgtttctcgcggttttcattacttccgctcatgaaaaatggatcgagttttacctgaa

SEQ ID NO: 112818 - DNA, 544 bp, Zea Mays
gcacgcaccccctctttgctcccgatcgacgtcgttcgtcggcatgatcgcttctagtatctttccactgacatctgttgccggttgcaggctctggaacttgcaaataccctgcaacaccaagcgaagcagggacaagcggcaacgccaccggcacgggcacggcaccgccaggctcgacgagtaacccagctacgacgcccagcatgggagggagcgtcacgacgacacctgtcggcgcgtttggtcccgcgcctagcaccttcagcgcggccaccgccactgccgccgcgtttggtggtcgccgtgccctcctcctcgccgtcgtctccgtcctgtctttcttggcgcgctaacttgctcgatcagaagaaatccgtagcatcgtcaccctatgtgtaattggcggccgcacaggacagggctttttttttggtgtcatgccgtcatcgtgaatatttcacaattgttcgttcttctctctcatgtttctcgcggttttcattacttccgctcatgaaaaatggatcgagttttacctgaa

SEQ ID NO: 112819 - DNA, 3286 bp, Zea Mays
ggccctactgccggaatttgatcggcatgggctgggccagctctacaagcccattgtgttgtgacggcaatggtcgcgtagcttttgccgtttggtgcggcccacgttctcgcccaacagaaacccgagccccatcgccatttccagcgtcttgtctcgctgtaccggccgatctccccattctcccctcttcgccggtcccaccaccgcgccgatcctgatggcctccgccgcctcatcggccgtcggcgctggcaaatcgctgttccaggggctccgcaggttcctcaagaagccgtgggagatcacaggcccctgcgcctctcccgagtaccgcagcgcgctgcctggcgcgctcgagtaccgcgtcaagtgcccggccaccgtgcgcgacgaccgcgacaaggccatcgtgcccacatccgatccggagacagtctacgatatcaagtacttcacccgcgaccgccgccggagccgcccgcccgtgcggcgcaccctactccgcaagcccgatctcgagagctacatggccaccaagcagttcgaccccaccaatgacttccccgtaccatacgtcaacaccaccgtcgaggaggatgacaacactgtcggcggtggctaccagaagtgactcaggaaagcttgctggttaatttggtaggtatcctttgattggacttcatcagaagcggcactattttcattccagctattaaatatccccttttcttttgttcctagtggaagttttttggatgtaaaagatgacggtgtcaaataatatggcacctgtggagctcacaggatgcacatatcttgtaaattgtattctaaaactgtctacctgataccattgttactgtttaatgcaaaatttaaggtttctattccaatgtgcacatcaccaattagttaggaacttatgctgatttgacaaaagaacaaaattttgaactttttgtacgattaaaacattatgtgtgacttgcgatcctcatacttgtatgtagcgatgtgaagtcaattttacgtgctcgtgcgttgtgggtacgtcgatgtgattatatgatagagctggagtgcttgcatgtgaatatgtgatctattggttgagccttatcatgggcgattcgatggatctaggcaactcggcttatctttttttttatatagaaaaactaagaccactttggatggctaaataaagaggcgctaattgcaggaattttttttatcgacacacattgtagtcattagcacattatctggtcaatggggcaaatttgagctaattttaaccagctaattattagcccatctggtcataagtgaccttatgcccttattatccatgcgtgaagccattctctttgctttcgtctctactctactctcgtgccagcggttgctttgcgcctatgcctgcaagaaggttaccaagtatgtatccacgagctaggtttgttttccattgttcctaggccattgttcttatgccatgttggccatatttgtttctctcctaaattatatataagttagattatgataaaagagtagtagagtaacatatcataaataatctgaaataagctatttaggtagcttatttcagtttatttatgatattttacccttctaccgttccaccagaatcacaactaggtttgttttccattattcttagtctggttgtgctcttgattttggctgtgacggccggtgacatacgactacgcatacagaacattataggtcacaaattcacaaacaattaaatttctctgtgattcgattgttatgcacacagaacattattgttcctcgaccttacatccattaggttggtggacgacactgatgttagggtgtgtcctatacacgagatggttaacgggaattaggttagagttaattctaaccgtccatccgcacccttaatcgggaggctatcctaaccgttggatgcaggccccggtcacacgtctccatataaacagattaaggggaccaatgggtttagccaacgctaatcgctcgaccacaaaccctaatcgacatccacacagaggtttccatcacctagacaatgcgtagtgactggaagagttgtgatccatgacgacgagccccgtgattgtcccaacgggcacgggatccgagcctccacctacatgcgccactggaggaggagatccaccatctatcggtgacaggaatccccaacctcatcctggacagaacacgcaaggaggtggaggccacagaggaggcgagtctacggtgtaagacgtcaccgccattgcagccgtgcccataaacaacaacaatgatgatatgcctacatataccttttagcagattagatctactcatcattgaggttttcctactcatattggtattctagggtcttaagaattgatcctaggcaccacatgacctaacaatggtatcaaagccacctaagtaacctagatctcctaattcgtatgatttgagatcaaataagggattctcaggtcaagtgattaacctcagttttacctcattggttaatcacctcgagaatagacaaaaccgagaagatagagaaagtcaggaatatgtttgtgatctctggttaaggtttttctaaccctaagttcttggatttaggccatagtaagagacacaaaggtctcaaccatgaacccatgaacaaaccgagtaagagggaaacaaagcaaagggatttcagtttattgaaaccctaatccccaaaatccgagtcatagtgactgcatagggctcatgatccatggatccgcgtccaaggcaacagaaaagagagtaaaagaacacaagaaatagattagggatagaacctaactgtttcccccataaccgagcagataaagtgcataaagggcattgtccaagcacataggttagttttggaccgaatccttcaatagatcaatgcatggggcccggatctacgcgtttcacctcaagaacacgattccaaccatataagatatccatttcatacattcattcacacagaaaagagaatcaagttattgagggctaaatccgggtgtaaatcaatagagacggttgagaggctgtcggttcttaccatgccgccgatagggacagtcgctggagcaccgaccgacggcagcacgccctcccaaggggacaaatagcagagatagtcggccggagtaagcaaagaaatggggaggcgaggtgaattttagagagacaaagaaataagacaaatagcagagatagt

SEQ ID NO: 112820 - DNA, 755 bp, Zea Mays
ttccagcgtcttgtctcgctgtaccggccgatctccccattctcccctcttcgccggtcccaccaccgcgccgatcctgatggcctccgccgcctcatcggccgtcggcgctggcaaatcgctgttccaggggctccgcaggttcctcaagaagccgtgggagatcacaggcccctgcgcctctcccgagtaccgcagcgcgctgcctggcgcgctcgagtaccgcgtcaagtgcccggccaccgtgcgcgacgaccgcgacaaggccatcgtgcccacatccgatccggagacagtctacgatatcaagtacttcacccgcgaccgccgccggagccgcccgcccgtgcggcgcaccctactccgcaagcccgatctcgagagctacatggccaccaagcagttcgaccccaccaatgacttccccgtaccatacgtcaacaccaccgtcgaggaggatgacaacactgtcggcggtggctaccagaagtgactcaggaaagcttgctggttaatttggtaggtatcctttgattggacttcatcagaagcggcactattttcattccagctattaaatatccccttttcttttgttcctagtggaagttttttggatgtaaaagatgacggtgtcaaataatatggcacctgtggagctcacaggatgcacatatcttgtaaattgtattctaaaactgtctacctgataccattgttactgtttaatgcaaaatttaaggtttctattccaa

SEQ ID NO: 112821 - DNA, 1571 bp, Zea Mays
atttatgccgccgtgtaaatacccaccacaagcagctagcttcgcaggtcggcttccacatctctctcattctcgtctccccccactgctagctgctgcagctctcaagctagctggcagctagggtttacaccgatccggggtccggtcgccgccggccggcggaagcgggcaatcgagctccgcgacgtcgagatctgcttaattgctaggtggtcgccgcgccggcagccccggcacagagaaagtcaattgctctttgcaggggttgctgctcgttttaaaagagatccttggatgatacaccgacacgcagctagccagcagggacaccgcgagatggcgggcgccgtcgggctaacaagacgatgataaggggcggcaaccaccagcaggcggcggacgtcgaggaggagctagcccggaacagcaggcacgccgccgccgtggcgacgtcgcggcaatggtcggcgcagacggagtcgcgcatcgtgcgcgtctcccgcgtcttcggcggcaaggaccgccacagcaaggtgaagaccgtcaagggcctgcgcgaccggcgggtgcgcctctccgtgccgacggcgatccagctctacgacctgcaggaccgcctcggcctcaaccagcctagcaaggtcgtcgactggctgctcaacgccgcgcgccacgagatcgacaagctgccgccgctgcagttcccgccgcaggacctcatggttgggcacctgacgccccacaacatgccgctgatggtgcacgacgagaagttcggacacctcgccgcggccgcggcgctcgcgagcggcggcggcggcggcgccaaggtcagccagcagggcaacgtcgtcgacgtcgacgggaccggagcccaccacttggtggggaggttccccggcggctaccaccggttcatggagctgaacagcgcgttgggcatggtcagtggcgcaatggcgccgccgtataacaacaactacaccggagaggcatggaataacagcggcggcggcgtgcatgacagcggctcgccgcagatcgtcgccgcagccgctcaccactcgccgttcccatcgttgctctccttggctccacgtccgcatcagctggcgttctactcctcggaagctgatcagcagtttcaggtggagaaccttggctcgcaaagcctgtccttgagctcggcgagggcttaccatgatcaggctagctagcggactgcgtactggaacgactcttcgatcgagattaaggtagcaataatgctcactgatcccaaaattcccaagtacaatatactatctagctgtgcaagagtgtgcatgtcagagtttccaagtgccttttaaggatcggatcggaggcagttaagcttgtgatgatttcataattagtagtagacctgaaacagaataaaatgtgcggggcttgatcttgaagcgtacgtgtgtgtgccatacgaatttgttacttctttcaatacacaaaggagtaatattaatctgtatgctggcttgtagaataacaatatatggtttgctaatattacggttttagttataaca

SEQ ID NO: 112822 - DNA, 1549 bp, Zea Mays
atttatgccgccgtgtaaatacccaccacaagcagctagcttcgcaggtcggcttccacatctctctcattctcgtctccccccactgctagctgctgcagctctcaagctagctggcagctagggtttacaccgatccggggtccggtcgccgccggccggcggaagcgggcaatcgagctccgcgacgtcgagatctgcttaattgctaggtggtcgccgcgccggcagccccggcacagagaaagtcaattgctctttgcaggggttgctgctcgttttaaaagagatcctctagccagcagggacaccgcgagatggcgggcgccgtcgggctaacaagacgatgataaggggcggcaaccaccagcaggcggcggacgtcgaggaggagctagcccggaacagcaggcacgccgccgccgtggcgacgtcgcggcaatggtcggcgcagacggagtcgcgcatcgtgcgcgtctcccgcgtcttcggcggcaaggaccgccacagcaaggtgaagaccgtcaagggcctgcgcgaccggcgggtgcgcctctccgtgccgacggcgatccagctctacgacctgcaggaccgcctcggcctcaaccagcctagcaaggtcgtcgactggctgctcaacgccgcgcgccacgagatcgacaagctgccgccgctgcagttcccgccgcaggacctcatggttgggcacctgacgccccacaacatgccgctgatggtgcacgacgagaagttcggacacctcgccgcggccgcggcgctcgcgagcggcggcggcggcggcgccaaggtcagccagcagggcaacgtcgtcgacgtcgacgggaccggagcccaccacttggtggggaggttccccggcggctaccaccggttcatggagctgaacagcgcgttgggcatggtcagtggcgcaatggcgccgccgtataacaacaactacaccggagaggcatggaataacagcggcggcggcgtgcatgacagcggctcgccgcagatcgtcgccgcagccgctcaccactcgccgttcccatcgttgctctccttggctccacgtccgcatcagctggcgttctactcctcggaagctgatcagcagtttcaggtggagaaccttggctcgcaaagcctgtccttgagctcggcgagggcttaccatgatcaggctagctagcggactgcgtactggaacgactcttcgatcgagattaaggtagcaataatgctcactgatcccaaaattcccaagtacaatatactatctagctgtgcaagagtgtgcatgtcagagtttccaagtgccttttaaggatcggatcggaggcagttaagcttgtgatgatttcataattagtagtagacctgaaacagaataaaatgtgcggggcttgatcttgaagcgtacgtgtgtgtgccatacgaatttgttacttctttcaatacacaaaggagtaatattaatctgtatgctggcttgtagaataacaatatatggtttgctaatattacggttttagttataaca

SEQ ID NO: 112823 - DNA, 1739 bp, Zea Mays
ctttaatttcaaagagagagcagaagaaagaaaccaatccgtgtacggtgtattcatagttttgcctgcaaaagctagcagagatgtggaggctgctcaatcatggaatcatcccttgcacagcggcgcagcgcatcatgtgtatgtgcatctagtgccgctgccagccgctgccagccaccgatccagagctcgctggcgctcacctgcactgtttcataccgctatcttgctgttccatggagagcgaataaagctgcagcgctttccctattccccaatggaacagttgcacacatgaaccggtagaccctctgccgtgcttgcatgcacagtgtgctctcaatcatggcgccccaccccatttcatgcgaatctgttatgtttgcattcattactgcgtacgatgctacaattagcatgcatgccgttaataatctgagagaggctgaccagttgcagtggatgatacaccgacacgcagctagccagcagggacaccgcgagatggcgggcgccgtcgggctaacaagacgatgataaggggcggcaaccaccagcaggcggcggacgtcgaggaggagctagcccggaacagcaggcacgccgccgccgtggcgacgtcgcggcaatggtcggcgcagacggagtcgcgcatcgtgcgcgtctcccgcgtcttcggcggcaaggaccgccacagcaaggtgaagaccgtcaagggcctgcgcgaccggcgggtgcgcctctccgtgccgacggcgatccagctctacgacctgcaggaccgcctcggcctcaaccagcctagcaaggtcgtcgactggctgctcaacgccgcgcgccacgagatcgacaagctgccgccgctgcagttcccgccgcaggacctcatggttgggcacctgacgccccacaacatgccgctgatggtgcacgacgagaagttcggacacctcgccgcggccgcggcgctcgcgagcggcggcggcggcggcgccaaggtcagccagcagggcaacgtcgtcgacgtcgacgggaccggagcccaccacttggtggggaggttccccggcggctaccaccggttcatggagctgaacagcgcgttgggcatggtcagtggcgcaatggcgccgccgtataacaacaactacaccggagaggcatggaataacagcggcggcggcgtgcatgacagcggctcgccgcagatcgtcgccgcagccgctcaccactcgccgttcccatcgttgctctccttggctccacgtccgcatcagctggcgttctactcctcggaagctgatcagcagtttcaggtggagaaccttggctcgcaaagcctgtccttgagctcggcgagggcttaccatgatcaggctagctagcggactgcgtactggaacgactcttcgatcgagattaaggtagcaataatgctcactgatcccaaaattcccaagtacaatatactatctagctgtgcaagagtgtgcatgtcagagtttccaagtgccttttaaggatcggatcggaggcagttaagcttgtgatgatttcataattagtagtagacctgaaacagaataaaatgtgcggggcttgatcttgaagcgtacgtgtgtgtgccatacgaatttgttacttctttcaatacacaaaggagtaatattaatctgtatgctggcttgtagaataacaatatatggtttgctaatattacggttttagttataaca

SEQ ID NO: 112824 - DNA, 355 bp, Zea Mays
acgatgcagccacgttttccagtcgtagcgtgaaaggttttaagggcaaaagccctcggagcgtcactgggagaagagaaacgcccggcggcgcgaagcggagggtgagaatatcggagttcggcgatgtcgaagcggcagggaccgccgaaacaccagaaccgctacgcgtggaagccgaaccttggtcagaagatcaacgaaaccgagcccgggggcaggttccgacctctgtcagaaatcaccggcgtctgtcagcgctgccgggatcaaatcgactggaaacgcaggtggggaattgtcatccctcatcggttgtctaagctcatttagctagtgtgtagcttcgattgtc

SEQ ID NO: 112825 - DNA, 2482 bp, Zea Mays
acgatgcagccacgttttccagtcgtagcgtgaaaggttttaagggcaaaagccctcggagcgtcactgggagaagagaaacgcccggcggcgcgaagcggagggtgagaatatcggagttcggcgatgtcgaagcggcagggaccgccgaaacaccagaaccgctacgcgtggaagccgaaccttggtcagaagatcaacgaaaccgagcccgggggcaggttccgacctctgtcagaaatcaccggcgtctgtcagcgctgccgggatcaaatcgactggaaacgcagatacggaaaatacaagcccattgttgagccagcaaaatgccagaagtgtaataagcgaaacgtccggcaagcataccataacgtatgcagagattgctccaaggacctcggcatatgtgctaagtgctgcacatgtgttaatgagcttgtcggaagggatgcgaatgaggaggaaagtgaacgcaagtcactagaagaggctgtcagaggtgctagggagagggaacgacgtacacttcttcgtattgttattgagatgcaagtggaatgtgactttggttccttattatgaacaaaggcaaaggtggggagagtgggccgtcagtcccaaagattgctgacagaagtcgagaaggtgatatctttcctgctggatcacttgatgaatacgccgaacaaactagagagcaagaggaagatgactcagatgtagaggctggagattttgtggaagattaagtttggaatgctttatgctgtaaagacgatactttctgtgatgcctatggtaggattgtcgcgcatttccttatgtttgttcgaaagtttggaattggaagatgttaaactgcgttgatttaattaaaaaaaatgcttgtgtctgtattacgtagcaacaggagtttgaaagttggttccggatccatttggatagtaataataagaggaaagtaacatttggaacagttgttcctacggcaacgttgcaaattaccgatatgcaaagcaaagcgttacgcaggtaaagccagatcttgtccgtaggctgccgatccaacagcccttcagccggttcactcggcagctcgctcaacacagcaaaggctgccgttcctttccccggcggcggcaagcattcacacacagggctcccgatccgccatccaagagcgccactctacggtcctcgtcgatttccccggccggctgacgcgtggagcgtccctgtgtcagtattcagccgcaggaagatgacaggaactgatcaaacaattgccgagctggaccgtcgtcggcgctggcccaatggacgctatccggccaatacttagtacacttagcaatcgcgtgtgcagcctatataaagagggggctgaagcttgtagaaggttacggaagatactactaccaaattcgtattagcttcctgtcattgtagaactagtagtactagcttgcttattaatccagttagcatcgggcagctaacaagtggtatcagagttggttgagcgtttccttcggctgatggcgggcgcagcggagtccagtttgtctgctgccacctggcatggaggaacaagcgaagactctggagacgcaatctcgcttgctgcagcagatttgcgatcgcttggatgcacaggaccaccactggcagacgttggagcgggtggtgtcgaccaacgcccagtccatcaccgcgttgacggccaagatgaacaacatcgatgtctcgatggtgcgatcggacctcgccaggtccttctcacttcagatcgatgcacatgtcgccgaaatccaagcaacttcatgggaatgcatcgatgctgttgatggagccttgtccacacgcgtggctgcgctcgaagcaacgaccgacgcaatcacttcgtggaggccttacatcgaacagtccgtgggcgtcgtccattcgaacattgaagggcttcgatcggagcaacagcggtcttccggtcgctgggagcatgagcgtcgagcgccaactccactccaggccgccgtgtttggctcgacgatgggatgtccacctgctgccacaaggaacgtcgaaggcccttggaggcaccacgacgcaaacccagcacgggagggaggtttcgggtatcctcatacccataacttcctcccgaccaatggcccactaccgttaccattgcctattcgccaacctcagacgtcgaagcctgaaggatctgcagccgttcaagggagcaagctctccaccatggatgacaagttgacatctctaatggcttatcgcaaggccaaaggattttgctataaatgtggtcttccttatgctcgtggccatcgctgtgcggactcagtacaactgcatgtggtggaggaattatggcaaacattgcagattccagatcagtcagacgatgttgaagctactgaagaactcaactcgatgtgtctgtccaaggctgctgttgatggcg

SEQ ID NO: 112826 - DNA, 2441 bp, Zea Mays
acgatgcagccacgttttccagtcgtagcgtgaaaggttttaagggcaaaagccctcggagcgtcactgggagaagagaaacgcccggcggcgcgaagcggagggtgagaatatcggagttcggcgatgtcgaagcggcagggaccgccgaaacaccagaaccgctacgcgtggaagccgaaccttggtcagaagatcaacgaaaccgagcccgggggcaggttccgacctctgtcagaaatcaccggcgtctgtcagcgctgccgggatcaaatcgactggaaacgcagatacggaaaatacaagcccattgttgagccagcaaaatgccagaagtgtaataagcgaaacgtccggcaagcataccataacgtatgcagagattgctccaaggacctcggcatatgtgctaagtgctgcacatgtgttaatgagcttgtcggaagggatgcgaatgaggaggaaagtgaacgcaagtcactagaagaggctgtcagaggtgctagggagagggaacgacgtacacttcttcgtattatgaacaaaggcaaaggtggggagagtgggccgtcagtcccaaagattgctgacagaagtcgagaaggtgatatctttcctgctggatcacttgatgaatacgccgaacaaactagagagcaagaggaagatgactcagatgtagaggctggagattttgtggaagattaagtttggaatgctttatgctgtaaagacgatactttctgtgatgcctatggtaggattgtcgcgcatttccttatgtttgttcgaaagtttggaattggaagatgttaaactgcgttgatttaattaaaaaaaatgcttgtgtctgtattacgtagcaacaggagtttgaaagttggttccggatccatttggatagtaataataagaggaaagtaacatttggaacagttgttcctacggcaacgttgcaaattaccgatatgcaaagcaaagcgttacgcaggtaaagccagatcttgtccgtaggctgccgatccaacagcccttcagccggttcactcggcagctcgctcaacacagcaaaggctgccgttcctttccccggcggcggcaagcattcacacacagggctcccgatccgccatccaagagcgccactctacggtcctcgtcgatttccccggccggctgacgcgtggagcgtccctgtgtcagtattcagccgcaggaagatgacaggaactgatcaaacaattgccgagctggaccgtcgtcggcgctggcccaatggacgctatccggccaatacttagtacacttagcaatcgcgtgtgcagcctatataaagagggggctgaagcttgtagaaggttacggaagatactactaccaaattcgtattagcttcctgtcattgtagaactagtagtactagcttgcttattaatccagttagcatcgggcagctaacaagtggtatcagagttggttgagcgtttccttcggctgatggcgggcgcagcggagtccagtttgtctgctgccacctggcatggaggaacaagcgaagactctggagacgcaatctcgcttgctgcagcagatttgcgatcgcttggatgcacaggaccaccactggcagacgttggagcgggtggtgtcgaccaacgcccagtccatcaccgcgttgacggccaagatgaacaacatcgatgtctcgatggtgcgatcggacctcgccaggtccttctcacttcagatcgatgcacatgtcgccgaaatccaagcaacttcatgggaatgcatcgatgctgttgatggagccttgtccacacgcgtggctgcgctcgaagcaacgaccgacgcaatcacttcgtggaggccttacatcgaacagtccgtgggcgtcgtccattcgaacattgaagggcttcgatcggagcaacagcggtcttccggtcgctgggagcatgagcgtcgagcgccaactccactccaggccgccgtgtttggctcgacgatgggatgtccacctgctgccacaaggaacgtcgaaggcccttggaggcaccacgacgcaaacccagcacgggagggaggtttcgggtatcctcatacccataacttcctcccgaccaatggcccactaccgttaccattgcctattcgccaacctcagacgtcgaagcctgaaggatctgcagccgttcaagggagcaagctctccaccatggatgacaagttgacatctctaatggcttatcgcaaggccaaaggattttgctataaatgtggtcttccttatgctcgtggccatcgctgtgcggactcagtacaactgcatgtggtggaggaattatggcaaacattgcagattccagatcagtcagacgatgttgaagctactgaagaactcaactcgatgtgtctgtccaaggctgctgttgatggcg

SEQ ID NO: 112827 - DNA, 779 bp, Zea Mays
atccccatgtccggccgcgctgccgatccggcggccttggcggcgaaggggaagctaggggagctaatgtgggagcaccgggtgcaggcggccgtagcggtggcgctggtggccgcggccgccgtctcgatctccgtcgtggggcccaggctcagcgccctggtgtccttcttctggccgctgctcctctccacgggcttcttcctggtggcggtcgccgtgctgctccggatctcgccgccgcccgcgggcgacgacgacgagtccggcaaggagctcgtcgacttcgtcgcctggtgccgcccggagcacctcgtcccggacgcggcggccgtggaggctccgctggagccggagacctgacggaatgccggaggaggagtcggagaggaggccgacggcagccgagctgtgccatggcgatggcgatggcgatggcggggctccgttgccggggtgaccacttccagtggcacgggtgggggcaaccactgtgtgggcgtgtccaggccggcgcgcggccttggctctgtagcctaggactcctccattccattgtctccctctgctccggtgtaagataccgtggatggattacaataatgaatcatgtcgtaaaaaaaaacagtccgaacgtctttctttgtcaaggcggctgtggatgtggctttgcgctttcgctatcctcagtcagtcagcatcactccgtttgatcatgccaggaaagcgaaaggtgaagacctgtctttctttcggggtatgatagtatgtactttaat

SEQ ID NO: 112828 - DNA, 1094 bp, Zea Mays
ttctttttatctttttcgctttattcttctgacattggtcatgtcctgcaaaatataaccgcatggcactctattattgatgtccaccatttgattataaatgcttttttgttacatgctcacaaattgttattattgtacttgagctttgcatgttgcagacttaagcatagttcgagatgaaaggactgtgttgaatccacatggagtaatgcatgctttgagtttgtatgttggtcgcttcaatctgaccagacagcaggatgcttcagaagcttttctccatcttctgatctcattgagggatgaatttgcccattgttatgtaccacataggagttctctggcaaacatcaccctttctgactccaaagtatacaagcaaagggaaggtaacctgcctgaatgcaagcgctggaaacaaaacctatttggcccctttgatgtgacagttggcatcatattgtcttgcagaaactgttcttctgtggtagattcctaatttcctatgcttcttattctgtcactgttgaattgtggcttataaaaaagtaacctactgttgtctttcatatatgaatgcattttgttccggatataccactggatacatagatattgacacgatgtccagtgcatgcccctacctttcctagccgtggtaaaattaaagaattattattatggaagtaatttagccaacaacaagtgatgctattttcatattgccaataagttattttgcgcattttgacagttagcttaaaatactcctgttttgttaattttaatgttctcccttgttacatatctcacagctgtcattggacttcgagaatttccactgcttgcctctttcgccagtccttaatgcaaatggagatattgtatatccgcgtcaaccttcctaaatttcattggatgattcaagttttttttaaaaaaaattattcattcgctgtccattttatgctcattaatggtatttttgtttgttacatttatcctatgtcatgacactagaccagtgggtgtagcttggtggattgcctaaagtacttcactgtggtggagcatcttgacaactatcgttg

SEQ ID NO: 112829 - DNA, 2161 bp, Zea Mays
acggtttgcgtataaataagtagtcagtcgctcatcttgttccttgtgaacatcgcagtgctgtagcctccttcgtcttgagcgagcatggagatgtcagccatggaggaagccctccccaaggcgatggagaggaggaagggaggcctcagaaccattccgttcatcatcttaaacgagatattcgagaaggtggccacgttcgggctgtcggccaacatgatcctgtacctcaccgagcggtatctcatgaccaacgcctttgccaccgtcgtcctctacttctggcatgccttctccaacttcctgcccatcttaggcgccgtgctcgccgacgcccgcctcggccggttccgggtcatcaccctcggctcctgcgttagcctcttcgggatgtgcctgctgtggctgacggcgatccttccggtgtacaagaacaccccggagtgcgcgccggggcggccggtagggtgcgcggtgctgccgtggcagctgccgctcctcttcacgtcgttcgcgttcatgtccctcgggtcgggcggcatccggccctgcacgctggcgttcggggccgaccagctggacaagcgggacaacagcgccaataacgtgaggacgctgcagaccttcttcaactggtactacacggtgctgggcctctccatcgtgttcgcgtccaccgtcatcgtgtacatccagcaggccaggggctggggtcgtcggcttcgccgtgcccgtcgtgctcatggtcaccgcgctcacgctgttcctcctgggctcgcccttctacatcaaggcggcggccaacagcagcgtcgtcatcggcttcgtgcaggtgctcgtcgccagctacaataaccgccacgagcccttgccgccggagactgccgactcctcgagcttctacaacaaagcaggctgcaaacctaggactcccacgaacaagctaatgtacttgaaccgggcttgcgtgctcaggaacccgagcaaggagatcagccccgacggggcggcgtgcgatccgtggaggctgtgcacggtgcagcaggtggaggacaccaaggccgtcatccgcgtgcttccgatatggtcgacggggatcatgccgggcgtggtcgtcgggcagcagatgttcccgacgctgcaggcgaagacgatggagcggagggtgggcaagctggagatcccccctgcctccttcggcgtcttcgccatcctgacgctcaccgtctgggttgccgtgtacgaccgcgtgctggtgcggcccctgtcccggctcaccggccacgcgcgcgggctcagcctgcggcagcggatgggcgccggcctggtgctcttcgccgtggccatggccgtggccgcgcacaccgagagcgtccgccgagccgccgcgctcgccgaggggctccgcgactccaacccgctgacgggggagcgcccggtgcgcatgtcggccatgaatctggtgccgcagcactgcctcacggggctcgccgagggcctgaacctgatcgggcagatcgagttctactactccgagttccccaagaccatgtccagcataggggtgtccctgctcgcgctcggcctcgggtttggcgccgtgctgggcagcgccatcgtcggggtcatcgacgcggggacccggagcggcggcagccacgacggctggctgccgagcaacctgaacagggggcactacgactactactacttggtactggcggtgctatgcgccgccaacgtgctgtacttcgcagtgtgtggctgggcatacggcgacgaggggcaaaaccgggtggtggccgccgacgccgcggtggacgacgtcgacgacaaggaggaggagcaaaaggcggtaatcatctaggcttaggccacggtggactttgagcagagcactaggaacagtatagcgttgatctgggatgatctcttgctctagtgtgtacctcgtacatatgctaatcaatatggtgacatttcaagagtagataatcttgaaatgttaatatggacagtaagtactgtcgtgtagcgtgtcaaaaatgccgcatgcattctctcttccgaattaggaggtagagagaacttcagtgatccagtattccagtggtcgcccactcgcccatacgttaacccactttgactttctcattcc

SEQ ID NO: 112830 - DNA, 2214 bp, Zea Mays
ggcctggctgtgctcagtacaggtgcagtggtggtgctccgatcgatcctcccgccggccagcatttgcgtttggttcgggctgcaccgccgacatggagcgctctcttgctaccgggacgactgaatcgccacaagaggagtgcttcaagggcaacaagggcgggttcagagccctccccttcatcttctcaaatgagatgctggagaaagttgctggattcgggctcaacaccaacatgatcacgtacctgaccgacaagtaccacctcagcaccgtcagctcccagacgatgctgttcgtgtggagcgcgatctccaacttcacgcccatccccggcgccgtcctcgccgacatgtacctcggccggttcatggccgtcgcgctaggctccgtggcgtgcctgattgggatggtcttcctatggctgagcgccacggtccctggagcgcggccgcctccgtgcagcggcgaccagtgcgcgccgccggggacgaggcacctcgcgtggctgctcgccggcttcgcgttcctgtccctcggcgccggcggcgtccggccgtgctccatggcgttcggcgcggaccagttctccaggcaccccaggcagcgccgggccagcatcctgcaatcctacttcaacgcctactacgcgtccatcggcgtggccttcacggtcgccgtcacggccatcgtctacctgcaggacaacgtcgggtggagcgtcgggttcgccgtcccgatgggcctcatgctgctctccgcggtcagcttcttgctgggatcgagcctatacatcaaggagaagggcgagaggcggatgttcgccgggataggcaccgccgtcgccgcggcgatcaggaaccacggggcgcggttgccggacaagaccgtcgatggcgtgtaccatcacctcaaggactgcaagctcgctgtccccacggacaagctgaggttcttgaacaaggcgtgcttgctccgtgccaccaaggacgacgcgccctgcaacggctcggacgcggcggcggcggcctccgagcggcacggccacgacgggacgaggctgtgcacggtggaccaggtggagcagctcaagtcggcgatccgcgtcctgccgatctggtcctccaccatcttcctcgcccttgccatgaaccagagcttcgccgttaagcaggccgatgctatggaccggcgcgtcggcgcgggcgggttccgcgttcccagcggctccttggccgtcttcaacatggccaccatgtcgctgtggtcggcctgctacgacaggtgggtcgcgccggcactgcagcggtacacgggcaacccgcacgggctcaccatgaagcagcgcatcggtgggggcctgctcctcgccaccgcgtcgacggctgtctccgcggcggtggagggcgagcggaggcggctggcgcagcgcggggtcaccatctcggcgttctggctcgtgccgcagttcgcgcttgtggggctcgccgaggcgttcggcgtcatcggggagatcgagttcttgtacaccgagctgcccaagagcatggccagcttcagcatgtcgctgctgtacatggccttcggagtgggcaacctggccggcgccctcatcgtgaaggtggtgcaggtggcgagcgggcaaggggtgggaacgggctggctcgtcgacaacttgaacgtcggccgctacgactattactactggctgctcacgggctacggcgtggcgaacttcgtgtacttcgcttggtgctgctggttgtatggcgaggaggggaagaacgtggagtgggaagaggaggacaacacggagcagccctagtcctgtatggctgggactcctgtgagccctgtagggctgaaacaatgaacttctggaggttgaatgttcaatgcatgtggtagtataaaacatctagttaactttactagcctattagttactgttgtttagacttgtcagggtcaccagcagaggaggtttattagtcttcctacaagtcaatgcataacatcgatactgcgcagtgtgactagaaacttttctgataaataaatgtgtgtgcagtctaactcaggccgtttcgaagattattggtccatggtaacgaaagcacttattcgctaatcaatataatgagcccgacttgctaaactttaagaaggaaatgaagagataaatacatctatacacatggctaagctcct

SEQ ID NO: 112831 - DNA, 640 bp, Zea Mays
gtcgcccaccgccatcgatctcgagcatgttactcgacatcagcatcaactacaatgtcatctacatcttggactatgtggcctagccaggaatgtgataccaaggggacgcctccccgcgtcgcttctcggtcattccatgtgcatgtctgcgtcatcagttcgtcatcatcacaacagatcgaacgcctcaacctacttcttccatcgttgctccatcccgcatgttctcagttcgtacaatcaattgtgtgatccactcggctctcgtgacgtccattgtcgagtactatgtgcatcttctctaagcaacaaggttgtcgttgcatcacctcgtcaggccacaacaccaccgcccatgtgcccactttgcagttgcatctacaacatcgttccacgtgcatcgacaagtatgttgtgcaatctttgttgtgtcatccgtccacataaggtctttgtcttgttgatcaggtcttcatcgtcaattgagtgctagcagtgagtggggccaccgctgctcatctgccaccacactctgtgtcctgactgctcactctcaaacatccactactgtctgaactacttgccttcgagtttgagttcgctactgcattgcttcttcgtccaacacaaccacatt

SEQ ID NO: 112832 - DNA, 924 bp, Zea Mays
gtcagaaaacgaaggaagagagggtcggcgagaaggaagatgaaatcggagggcagaaggaagatgacagggtaggttccctagcattgacaaaccatgatagagaaggaaataatcaagatcaagatcaaaaagcaccaattgatgaccattcaagcagaggaactcatacgggcaaagctattatagaagaatccagacctaactgcgttgatgatcataagacccatagacctatgtctcctggaacactagcactgatgtgtgatgaagaagcatttgagaaaatgtgtgacgaacaagatacaatgtttacgacttctcaaaatgctgctcctcagcagacagtaattgtcaaccataaccaatctgcactgtatgcagaacaagaaaacgttgtgctgacagaattccgggattgcctccgcaagtttgtgagatacggaagaatgaaagaggaaaggtactccatggcaatcaaatctgaaacatctggtcatcctggacaggtaaatggtgtttctcaagtaccatattcaaaagtagatgtgcctgctgtaaaaacatatccacagagttccagcagtcatcttgttgctggaaaacctgttactggccttttggacaaaaactgaagccttggcgttccagatttttacttggggtgttgcaaggatcaagggaatagtattttcaccctattaacatgttgatcagatacatgtatcagtcttgatagataatttagatgttagagaattccaattttttctcattggtcagaataagtgtaatgctggaatctggatagttagtttagtaataaatgccaaccttgtaatattttcttcattgtattttctctcttttcttttcccattttccacccacctggttcgagccaagatgtagcttggtgggtgc

SEQ ID NO: 112833 - DNA, 413 bp, Zea Mays
tagacagttacattgcataattgcattcggcgcttgcagagagtcctttactttacagagcgcttgctgtctactgtcgcctgcaaaggttattacagtcccaggatccgagatactgagctgttgatgttattcagaaattctttcactcgaagccaaaaggtgtgtcaaaaacttacccatgcaactaataccccaactagttcaaagagaagaggaaggacatggagcttatcgatgatctaaaggtgaacgaaaacatggacggactagattagccttatgttaggaattgaaagcgcaacatgtcatttggaatgtatctcaacgaggttgaccgatgcccataacgcagctactgcaataaagccgataccagctagagcaaaaacgtctttcgcagtgctgaactg

SEQ ID NO: 112834 - DNA, 2163 bp, Zea Mays
cacgcgctcgtaggcagtaggcacgcacacgccgccacgtcgcagccacgagcccacgccacgaggccacgaccccaaaaacagccgtccacgtcgcttccccggtccggcgaccgcgcccgctgttttatacgcgacccggcggccgcacccggcttgcgcacgccgttcacgtcccccggcccccgctctcgtttcccccgcccgcaccaggcacgctcacgcgctgcgcaccggatggcccctgctaacgtgcgcgcggcgcaggcgcaggcccccagcgccgaccgcaggttaagtacgctagtggggcacctgctgccttcctccccacgaagagcagcagcagacacctccgccacctccaccctcgaatcgttccccaccatggcgtcgcagggatcctccgtcttcgccgcactcgagcaggccccggaggaccccatcctcggagtgaccgttgcctacaacaaggatcccagccccgtgaaggtcaacctcggggtcggcgcctaccggaccgaggaagggaagcccctagtgctgaacgtggtcaggcgcgccgagcaaatgttgatcaataatccgtcacgtgtcaaggagtacctaccaatcaccggtctggctgaattcaataagctgagcgctaagcttatctttggcgctgacagccctgctattcaggagaatagggttgctaccgtgcagtgcctatcgggtactggttctttaagagtcggaggtgaatttcttgcaaggcactatcacgagcgcactatctacatcccacaaccaacctggggaaatcacccaaaagtcttcaccctatctggcttgaacgttaggagctaccgctattatgatcctgcaacatgcagccttcacttcgaaggactcctggaagacctcggttctgctccttcaggttcaattgtactgctgcatgcctgtgctcacaaccctactggagtagatcctaccatcgaacagtgggaacagattaggcagctgatgagatcaaaatcactgcttccgttctttgacagtgcctatcaaggctttgcaagtggaagtcttgacaaagatgctcagtcagtgcgtatgtttgttgctgatggtggtgaacttctcatggctcagagctacgctaagaacatgggattgtatggagagcgtgttggcgctttgagcattgtatgtaaaagtgccgatgtagctgttagggttgaaagtcaactcaaacttgtcatcaggcctatgtattcaaaccctcctcttcatggtgcctctatcgttgctaccatactcagggacagcgagatgttcaacgaatggactctggaactgaaggccatggctgataggatcattaacatgaggcaacaactatttaatgcgctgaaatccagaggaacccctggtgattggagccatatcattaagcaaattgggatgtttactttcactgggctgaatagcgaacaagtcgcattcatgaggcaggaataccacatttatatgacatctgatgggaggatcagcatggccggtttgagcatgaggactgtgccccatcttgcagatgccatacacgctgcagttactcaactgaaatgaggatagtatcgcagctttcgtgaataaaacctgaatcacccacaacaatgttctaagtactcagccagtggtatttactggttgacctactgtagtttgcgtcggaatagatatgtttttttactcttcgtggggcagttttgtactggtggattcataaggactctgattatggtgcgttcggaacttataataataagcacatgaaattttgcttcaggtgcagtgatgctgtctcattaagttattagttattaggttgctgtcttattaagttatcaggtcgcagctgggttgaagcggagcacctgtcttgatttatctcttctcttttctagagagcttctgtcattcgtgtgcccttttatatcattttgctctatcaatgattatcctacaatctgcagtagttttgattccgttttgttctttgcctgctgtactggctcagaagtacggtaatgctcgcaagctttgcggttgttgatttagggactgaaaggatctgtttagaaaggtgtcgatttggagactcaaaaggaacga

SEQ ID NO: 112835 - DNA, 645 bp, Zea Mays
acccggcttgcgcacgccgttcacgtcccccggcccccgctctcgtttcccccgcccgcaccaggcacgctcacgcgctgcgcaccggatggcccctgctaacgtgcgcgcggcgcaggcgcaggcccccagcgccgaccgcaggttaagtacgctagtggggcacctgctgccttcctccccacgaagagcagcagcagacacctccgccacctccaccctcgaatcgttccccaccatggcgtcgcagggatcctccgtcttcgccgcactcgagcaggccccggaggaccccatcctcggagtgaccgttgcctacaacaaggatcccagccccgtgaaggtcaacctcggggtcggcgcctaccggaccgaggaagggaagcccctagtgctgaacgtggtcaggcgcgccgagcaaatgttgatcaataatccgcttaaagctcctgccctcagcccaagtggaaacggaaggggatttagatagttgctggatctaaaatctggataacacgcctcttaatttgactaatactttcattcgcatccataataattattgacttgtcctctgtaattgtaggtgacctttctgttcaatactagtttttaaataaattttcttctacgtttaggactagt

SEQ ID NO: 112836 - DNA, 757 bp, Zea Mays
acccggcttgcgcacgccgttcacgtcccccggcccccgctctcgtttcccccgcccgcaccaggcacgctcacgcgctgcgcaccggatggcccctgctaacgtgcgcgcggcgcaggcgcaggcccccagcgccgaccgcaggttaagtacgctagtggggcacctgctgccttcctccccacgaagagcagcagcagacacctccgccacctccaccctcgaatcgttccccaccatggcgtcgcagggatcctccgtcttcgccgcactcgagcaggccccggaggaccccatcctcggagtgaccgttgcctacaacaaggatcccagccccgtgaaggtcaacctcggggtcggcgcctaccggaccgaggaagggaagcccctagtgctgaacgtggtcaggcgcgccgagcaaatgttgatcaataatccgtaagtgtcatgtgaaatccatatgacccgcttgatttcgtgatcgtgcctctgtggttattgaactttcaggcttaaagctcctgccctcagcccaagtggaaacggaaggggatttagatagttgctggatctaaaatctggataacacgcctcttaatttgactaatactttcattcgcatccataataattattgacttgtcctctgtaattgtaggtgacctttctgttcaatactagtttttaaataaattttcttctacgtttaggactagtcttttttttgcgactgtatctgctctgtcccactgccgtc

SEQ ID NO: 112837 - DNA, 2093 bp, Zea Mays
cgttcacgtcccccggcccccgctctcgtttcccccgcccgcaccaggcacgctcacgcgctgcgcaccggatggcccctgctaacgtgcgcgcggcgcaggcgcaggcccccagcgccgaccgcaggttaagtacgctagtggggcacctgctgccttcctccccacgaagagcagcagcagacacctccgccacctccaccctcgaatcgttccccaccatggcgtcgcagggatcctccgtcttcgccgcactcgagcaggccccggaggaccccatcctcggagtgaccgttgcctacaacaaggatcccagccccgtgaaggtcaacctcggggtcggcgcctaccggaccgaggaagggaagcccctagtgctgaacgtggtcaggcgcgccgagcaaatgttgatcaataatccgtcacgtgtcaaggagtacctaccaatcaccggtctggctgaattcaataagctgagcgctaagcttatctttggcgctgacagccctgctattcaggagaatagggttgctaccgtgcagtgcctatcgggtactggttctttaagagtcggaggtgaatttcttgcaaggcactatcacgagcgcactatctacatcccacaaccaacctggggaaatcacccaaaagtcttcaccctatctggcttgaacgttaggagctaccgctattatgatcctgcaacatgcagccttcacttcgaaggactcctggaagacctcggttctgctccttcaggttcaattgtactgctgcatgcctgtgctcacaaccctactggagtagatcctaccatcgaacagtgggaacagattaggcagctgatgagatcaaaatcactgcttccgttctttgacagtgcctatcaagtatgcagatgtgcagagcaaaagtgacttgacattgcaaaaaacacatctggatcctatacactcatcattcacatttttttgttaacctgacagggctttgcaagtggaagtcttgacaaagatgctcagtcagtgcgtatgtttgttgctgatggtggtgaacttctcatggctcagagctacgctaagaacatgggattgtatggagagcgtgttggcgctttgagcattgtatgtaaaagtgccgatgtagctgttagggttgaaagtcaactcaaacttgtcatcaggcctatgtattcaaaccctcctcttcatggtgcctctatcgttgctaccatactcagggacagcgagatgttcaacgaatggactctggaactgaaggccatggctgataggatcattaacatgaggcaacaactatttaatgcgctgaaatccagaggaacccctggtgattggagccatatcattaagcaaattgggatgtttactttcactgggctgaatagcgaacaagtcgcattcatgaggcaggaataccacatttatatgacatctgatgggaggatcagcatggccggtttgagcatgaggactgtgccccatcttgcagatgccatacacgctgcagttactcaactgaaatgaggatagtatcgcagctttcgtgaataaaacctgaatcacccacaacaatgttctaagtactcagccagtggtatttactggttgacctactgtagtttgcgtcggaatagatatgtttttttactcttcgtggggcagttttgtactggtggattcataaggactctgattatggtgcgttcggaacttataataataagcacatgaaattttgcttcaggtgcagtgatgctgtctcattaagttattagttattaggttgctgtcttattaagttatcaggtcgcagctgggttgaagcggagcacctgtcttgatttatctcttctcttttctagagagcttctgtcattcgtgtgcccttttatatcattttgctctatcaatgattatcctacaatctgcagtagttttgattccgttttgttctttgcctgctgtactggctcagaagtacggtaatgctcgcaagctttgcggttgttgatttagggactgaaaggatctgtttagaaaggtgtcgatttggagactcaaaaggaacga

SEQ ID NO: 112838 - DNA, 1707 bp, Zea Mays
atggcgtcgcagggatcctccgtcttcgccgcactcgagcaggccccggaggaccccatcctcggagtgaccgttgcctacaacaaggatcccagccccgtgaaggtcaacctcggggtcggcgcctaccggaccgaggaagggaagcccctagtgctgaacgtggtcaggcgcgccgagcaaatgttgatcaataatccgtcacgtgtcaaggagtacctaccaatcaccggtctggctgaattcaataagctgagcgctaagcttatctttggcgctgacaggtattctctgtttgactggtttacccattttcctcatttgtgggtcaactgttcctaatggtgatgttgtcaactgtgaattcttagtgttgaagtttcattacataaaaataagttccctagctactggttctggtttattcaggttttattacttcattagggagctgattttttttttgaatcgaatagccctgctattcaggagaatagggttgctaccgtgcagtgcctatcgggtactggttctttaagagtcggaggtgaatttcttgcaaggcactatcacgaggttaaacttttcttgctcctatctgttttgctgcttcctgattataatgcatgactgctaaatcatacaaatatattccagcgcactatctacatcccacaaccaacctggggaaatcacccaaaagtcttcaccctatctggcttgaacgttaggagctaccgctattatgatcctgcaacatgcagccttcacttcgaaggactcctggaagacctcggttctgctccttcaggttcaattgtactgctgcatgcctgtgctcacaaccctactggagtagatcctaccatcgaacagtgggaacagattaggcagctgatgagatcaaaatcactgcttccgttctttgacagtgcctatcaaggctttgcaagtggaagtcttgacaaagatgctcagtcagtgcgtatgtttgttgctgatggtggtgaacttctcatggctcagagctacgctaagaacatgggattgtatggagagcgtgttggcgctttgagcattgtatgtaaaagtgccgatgtagctgttagggttgaaagtcaactcaaacttgtcatcaggcctatgtattcaaaccctcctcttcatggtgcctctatcgttgctaccatactcagggacagcgagatgttcaacgaatggactctggaactgaaggccatggctgataggatcattaacatgaggcaacaactatttaatgcgctgaaatccagaggaacccctggtgattggagccatatcattaagcaaattgggatgtttactttcactgggctgaatagcgaacaagtcgcattcatgaggcaggaataccacatttatatgacatctgatgggaggatcagcatggccggtttgagcatgaggactgtgccccatcttgcagatgccatacacgctgcagttactcaactgaaatgaggatagtatcgcagctttcgtgaataaaacctgaatcacccacaacaatgttctaagtactcagccagtggtatttactggttgacctactgtagtttgcgtcggaatagatatgtttttttactcttcgtggggcagttttgtactggtggattcataaggactctgattatggtgcgttcggaacttataataataagcaca

SEQ ID NO: 112839 - DNA, 1361 bp, Zea Mays
atggccgcccccgacgtcctcccctccgcgccgcgcccgcccgatccaatgatgaaagcggtgtcgctgccacgggtggaaaaagggagcgtctttgggaagaggttaatgctggcgtacctgaaatgcggcgacctgggcgaggcaaggacggtgttcgatggaatgcctcctcaagctgctgatgtccgtgtccggacttcgctgatgagcgcgtacgccaaggcgggtgatttacagaaagttgttttgctgtttaggcagatgcaagtgctgcggggtcagtccagatgcacatgctgtttcctgtgtcctcaagtgcgttgccagtttgggcagccttacgaacgagcatgcgcggttgcaaatgctctgatcgccgtgtactcgaggtgtggacggatggaggatgcgaagcgggtatttgacagtatgcatccctgggatgccatctcttggaattctatgattggtggatgcttttcaaacggatggcatggtacagctgttgattttttcagcaaaatgtggtctcaaggccttgattctgtacaaagtgggatagatgatgctgctcttggatccaaactggtattcatgtatgtgaaatgtggggacatgggctctgcaagaagggtgcttgatgcgatgtcatcaaaaggtaatgtgcacgtatggaatctgataatgggtgggtacgcaaaggttggtgaatttgaagaaactctcgcttttttgtgcaaatgcatgagcttggaatcgcccccgatgaacatgtcatttcttgccttctgaagtgcatcacttgtttgtcttgtgccagggatggcttggtggctcatggatatatagtaaaattgggtttcagggcagagtgtgcagtttgcaatgcactgatatcattctatgcaaagtccaacatgattggcgatgcagtcttggtgttcgatataatgcctcgtcaagataccatttcttggaattatgtgattagtggatgctcttccaatggactaaacagtgaagctattgagttgttcataagaatgtggacacaaggacatgagctggacttagttacattgctaagtgtttttgccagcttgtgcagtcacgctattggtttgcaggaagggtggttcatggttactcggttaaaactggattgattggggaaacatctcttgcaaactggattcattgttcatgttgctaatgctagcaatttttcctaccagatttcttggtatatcttttaggaagcctgctaaatctacattggaacttatctttaaaatttgtatgtcatcaagtccaattttatttgtgcaataaaagcagggaggcttttatctataaca

SEQ ID NO: 112840 - DNA, 1720 bp, Zea Mays
atggccgcccccgacgtcctcccctccgcgccgcgcccgcccgatccaatgatgaaagcggtgtcgctgccacgggtggaaaaagggagcgtctttgggaagaggttaatgctggcgtacctgaaatgcggcgacctgggcgaggcaaggacggtgttcgatggaatgcctcctcaagctgctgatgtccgtgtccggacttcgctgatgagcgcgtacgccaaggcgggtgatttacagaaagttgttttgctgtttaggcagatgcaagtgctgcggggtcagtccagatgcacatgctgtttcctgtgtcctcaagtgcgttgccagtttgggcagccttacgaacgagcatgcgcggttgcaaatgctctgatcgccgtgtactcgaggtgtggacggatggaggatgcgaagcgggtatttgacagtatgcatccctgggatgccatctcttggaattctatgattggtggatgcttttcaaacggatggcatggtacagctgttgattttttcagcaaaatgtggtctcaaggccttgattctgtacaaagtgggatagatgatgctgctcttggatccaaactggtattcatgtatgtgaaatgtggggacatgggctctgcaagaagggtgcttgatgcgatgtcatcaaaaggtaatgtgcacgtatggaatctgataatgggtgggtacgcaaagggatggcttggtggctcatggatatatagtaaaattgggtttcagggcagagtgtgcagtttgcaatgcactgatatcattctatgcaaagtccaacatgattggcgatgcagtcttggtgttcgatataatgcctcgtcaagataccatttcttggaattatgtgattagtggatgctcttccaatggactaaacagtgaagctattgagttgttcataagaatgtggacacaaggacatgagctggacttagttacattgctaagtgtttttgccagcttgtgcagtcacgctattggtttgcaggaagggtggttcatggttactcggttaaaactggattgattggggaaacatctcttgcaaactggattcattgttcatgttgctaatgctagcaatttttcctaccagatttcttggtatatcttttaggaagcctgctaaatctacattggaacttatctttaaaatttgtatgtcatcaagtccaattttatttgtgcaataaaagcagggaggcttttatctataacattttccttttatcttttctgtagagatttttctcacaactagctgttaggcaacttctatgttttcctgtagtgtatgtgcgcaaccatgggtcggttcctagggcggactggtccacctggaccgtggaggtggcggggctcgtgagacgcctcgccaagttgaccatggagcagctagtgacggagttcgagaccttggaactccccgtgacgctggtatgcgtggccaaccgacacaaggagcataacatggtgtgccaaaaggtgggcttcaactagccccgacgccatctccatgtccatgcggtgcggcacgcgcctctacgacgtgttgtgtcactgcggtgtcatgggcaccacggatgacgttgtcaacgtgtgcttcaatactgattctttagaaatactttgtgccatattataatattggttgcacattagtccattctatttaatcacacggatttcacaaatt

SEQ ID NO: 112841 - DNA, 1793 bp, Zea Mays
acaaaacgagcagccggaaaatatccccacccaagcagggccataaaacgcaagcagcgcagctgcacagaattgttatcgcagggggcattaagctgcctgcctccgctgccggccgtgctacctaatcgccgcgcttgttttcccaccgcccgatggccgccatcacgccgccgacgcagtcggagccgtcgccgcagacggggcgcccggcctcgtctgccgccgccgcggccaagcgtggagggggcggggctggtgccgccggcgggccgctgatggggaagtacgagctggggcgcctcctggggcacggcaccttcgcgaaggtgtaccacgcgcggcacgtcgacacgggggacaacgttgccatcaaggtgctcgacaaggagaaggccgtgaagagcgggctcgtcccgcacatcaagcgcgagatcgctgtgctacgccgcgtgcgccacccgaacatcgtgcacctgttcgaggttatggccacaaagactaagatctacttcgtcatggagctcgtccgcggcggcgagctcttctcccgcgtctccaagggccgactcagggaggacaccgcgcgccgctacttccagcagctcgtctccgccgtggggttctgccacgcccgcggcgtcttccaccgcgacctgaagcccgagaatctactcgtcgacgagcaggggaacctcaaggtatcggattttgggctctccgccgtcgccgagcagttccgtcccgacggcctgctccacaccttctgcggcacgccggcctatgtggcccccgaagtgctcggccgccgcgggtacgacggcgccaaggcagacgtgtggtcgtgcggtgtcatcctctttgtgctcatggccggatatctccctttccatgacaaaaacatcatggccatgtacaagaagatttacaagggcgagttccgctgtgcgaggtggttctccaaagaccttaccagcttgctgatgcgcattcttcacactaatcccaacactcggatcactttgccggagatcatggagtcccgctggttcaagaaaggattcaagcctgtcaagttctatatcgaggatgaccagctgcataacgttatagatgacgaagatggcctgttagatatgggacctgctggtcctgttcctccaccattgccacctccaccgccacctctacctccaccaaaggttgatggtgatgaatcagggtctgactcagactcgtcgatctcatcctgccctgcttcaatgttatctgatgagagccaaaggccccgtggctctctaccacgtccagcaagtcttaatgcctttgatatcatatcattttcaaggggatttaacttatcagggttatttgaggagaaaggggatgaagtgaggttcatctcggctgagcccatgtcagatatcataaccaaattggaggacatagcgaagctgaagagcttcaagttgcggaggaaggactggcgcatctgcctggagggtacaagggaaggagttaaggggccattaacaattggcgcggagatatttgaactcacacctccccttgtaatggtggaggtaaaaaagaaggcaggggataatgaagagtacgagaacttctgtgacaaggaattgaagccagggatgcagcaccttgtccaccatatggtccgagctccaagtatgctgcttactgatgccaagtagatcgaaaggtagtaatttccactcactttttcttcttatgatgtcactgatgccattctgaataatatttttaataatatt

SEQ ID NO: 112842 - DNA, 2062 bp, Zea Mays
acaaaacgagcagccggaaaatatccccacccaagcagggccataaaacgcaagcagcgcagctgcacagaattgttatcgcagggggcattaagctgcctgcctccgctgccggccgtgctacctaatcgccgcgcttgttttcccaccgcccgatggccgccatcacgccgccgacgcagtcggagccgtcgccgcagacggggcgcccggcctcgtctgccgccgccgcggccaagcgtggagggggcggggctggtgccgccggcgggccgctgatggggaagtacgagctggggcgcctcctggggcacggcaccttcgcgaaggtgtaccacgcgcggcacgtcgacacgggggacaacgttgccatcaaggtgctcgacaaggagaaggccgtgaagagcgggctcgtcccgcacatcaagcgcgagatcgctgtgctacgccgcgtgcgccacccgaacatcgtgcacctgttcgaggttatggccacaaagactaagatctacttcgtcatggagctcgtccgcggcggcgagctcttctcccgcgtctccaagggccgactcagggaggacaccgcgcgccgctacttccagcagctcgtctccgccgtggggttctgccacgcccgcggcgtcttccaccgcgacctgaagcccgagaatctactcgtcgacgagcaggggaacctcaaggtatcggattttgggctctccgccgtcgccgagcagttccgtcccgacggcctgctccacaccttctgcggcacgccggcctatgtggcccccgaagtgctcggccgccgcgggtacgacggcgccaaggcagacgtgtggtcgtgcggtgtcatcctctttgtgctcatggccggatatctccctttccatgacaaaaacatcatggccatgtacaagaagatttacaagggcgagttccgctgtgcgaggtggttctccaaagaccttaccagcttgctgatgcgcattcttcacactaatcccaacactcggatcactttgccggagatcatggagtcccgctggttcaagaaaggattcaagcctgtcaagttctatatcgaggatgaccagctgcataacgttatagatgacgaagatggcctgttagatatgggacctgctggtcctgttcctccaccattgccacctccaccgccacctctacctccaccaaaggttgatggtgatgaatcagggtctgactcagactcgtcgatctcatcctgccctgcttcaatgttatctgatgagagccaaaggccccgtggctctctaccacgtccagcaagtcttaatgcctttgatatcatatcattttcaaggggatttaacttatcagggttatttgaggagaaaggggatgaagtgaggttcatctcggctgagcccatgtcagatatcataaccaaattggaggacatagcgaagctgaagagcttcaagttgcggaggaaggactggcgcatctgcctggagggtacaagggaaggagttaaggggccattaacaattggcgcggagatatttgaactcacacctccccttgtaatggtggaggtaaaaaagaaggcaggggataatgaagagtacgagaacttctgtgacaaggaattgaagccagggatgcagcaccttgtccaccatatggtccgagctccaagtatgctgcttactgatgccaagtagatcgaaaggctttgaacttaacaacagcacttcgcacggagctactggtaacaggcgtgacattctgagcggcatgaggctagaggagacagttgagcacagcacagttgaccagaagagatagtcgccggaacaaaaaccttgaccagttccacagcgctgtagtttcgcagatgatgagcagctcggcatctcatgactgaataaacgcaatgcccgccatggagggagactccggtgtctttcttgtacctgaggtggttaagttgttactcgaatgctgtatcacgagtggtgtagtcctgctattcgtaatatttcgattaaccatcatgctattctgtctcgaa

SEQ ID NO: 112843 - DNA, 1286 bp, Zea Mays
agacacggtaaaggcacaacgaagaagagagatcaactactcatgcaagcactgcggtatttaatttaggttcttaggaacaaaaacaccaagcaccaactttgtacatattaatggacgccatgcacatggtgatcgatcggtctatatagaaagacaggcgggtactagagaggttgtgtggtgtccaagctacacacgggatgctactaactagctgcaggcaagggcgaggaatggcaagcctttcatgtgctcgggcggacggtgttgtccgttccggcgctctgcccgccaagctgttgctgtgcgccagctgctgcttccctacggcggctccagtcgcggacggagaggtgcaggtgcttgcctgccgccagcatctccaccgttgccgaggcgtcaggatctccgtcgccacgcccgcgccgtcgccatcctcagctcgtcggcctccaccagcaccgacagcgcggccttgtagctgtccaggcgcgtccacctcgcgtcccggctcctagccgggccgccctgagccgccgccgccgcgccgtcgcacttccgctggcagcagctgcagctcccaaccgtgccgcggcagcgagctcgcgctgccgcacgatgggcaggagcgggcggtcggcgatgtcctcctgcagggtggcgagccggtccgacagggcgttctcctggtgcaccgtccggctgtggaggtcgttgatgagcaccagctgagcggacgtgatccccagggccccggtcgggatgacgccgttgctgaggccgccgagcagctcctccacctgcgcctccaggccctccccggagaggttgtagagcaggcggacggtgagcgaagggcggcagcccccgagccagagcacggagttctcgaaggcggtgcaccagggcggggcgaagaaggcgacgccgtcctcccgcgacagcgcgcgcctgcgggtggcgtagtcctggtacccgagcatgcaccgctccaccacggtccgcagctcggcgtccgttgcccggcccgcggcggcattggccgacgccgcctcgagctcggcgaggcctgcctcctgcccggcgatccagtgccggtagcatgactcgtaccgcgccatgtccatcccgtccgtccaagcctctgcagtgtgaggccgtgacgagagagtggagtaagcacatggcctatatgttcgcactacatgttgtattcatgcacatatgccttttttgaccctttacctcgtttcagttttcggcaggccctgttgtgtgacttg

SEQ ID NO: 112844 - DNA, 2006 bp, Zea Mays
agacacggtaaaggcacaacgaagaagagagatcaactactcatgcaagcactgcggtatttaatttaggttcttaggaacaaaaacaccaagcaccaactttgtacatattaatggacgccatgcacatggtgatcgatcggtctatatagaaagacaggcgggtactagagaggttgtgtggtgtccaagctacacacgggatgctactaactagctgcaggcaagggcgaggaatggcaagcctttcatgtgctcgggcggacggtgttgtccgttccggcgctctgcccgccaagctgttgctgtgcgccagctgctgcttccctacggcggctccagtcgcggacggagaggtgcaggtgcttgcctgccgccagcatctccaccgttgccgaggcgtcaggatctccgtcgccacgcccgcgccgtcgccatcctcagctcgtcggcctccaccagcaccgacagcgcggccttgtagctgtccaggcgcgtccacctcgcgtcccggctcctagccgggccgccctgagccgccgccgccgcgccgtcgcacttccgctggcagcagctgcagctcccaaccgtgccgcggcagcgagctcgcgctgccgcacgatgggcaggagcgggcggtcggcgatgtcctcctgcagggtggcgagccggtccgacagggcgttctcctggtgcaccgtccggctgtggaggtcgttgatgagcaccagctgagcggacgtgatccccagggccccggtcgggatgacgccgttgctgaggccgccgagcagctcctccacctgcgcctccaggccctccccggagaggttgtagagcaggcggacggtgagcgaagggcggcagcccccgagccagagcacggagttctcgaaggcggtgcaccagggcggggcgaagaaggcgacgccgtcctcccgcgacagcgcgcgcctgcgggtggcgtagtcctggtacccgagcatgcaccgctccaccacggtccgcagctcggcgtccgttgcccggcccgcggcggcattggccgacgccgcctcgagctcggcgaggcctgcctcctgcccggcgatccagtgccggtagcatgactcgtaccgcgccatgtccatcccgtccgtccaagcctctgcagtgtgaggccgtgacgagagagtggattttcggcaggccctgttgtgtgacttgatctgtctctatggttcctccgattttgcttttttttttgtttctgcggtatgtcaccagacggggacgacggagcacgaggctttcgatagcgtgatggtgatgtgctggtcggccgcggatgcatgcgtgcgtgtagaacctatctgatgtggatccctatcggatcacggcgacgaaacttttgggaagcaaaaagacacggaaggtgtcacgcaagattggccatggaacggcgcttcccctcggcccgcggccctgcgtttaaccttttccgtgggcaggtgtgaagggaatcggaggccggaccgcggacgaggagatggatggtgcatccttgtgcgacggagagctcccggtgagtccagtgcatcctttcgttcgtgcgtacgcgtgccatggctcctttgtgtgtactgtcttgtcgttagcgccagaagcccagactagctgacattcatatgagttatccgtattcatatttgtttccgagacactatccacgtgattggttcgtttcactggtccgcctggctcgcatcagtcagccaggctatatatagcctgattgagtgtatgcaaaggtttagtgtttggttacttggctcaattgaatctggctgtattgagacagcgtttggttgtatgtatcaaagcatgtaccagtgaagaatgcacaaataaatctttaaatattatataacatatatggtctagttttaatcgaaaaaatgttagggacacaaatataaaatttgttcggtgattaaattttttaattagaagatataacaaaaaaa

SEQ ID NO: 112845 - DNA, 102 bp, Zea Mays
tatgtgacagcctgacgggatctctcacaagtcgcaaaacaaaaacatatcctctctcttttttcgcatgctccgctagcgtcaaaaaatccgagtgtaagc

SEQ ID NO: 112846 - DNA, 834 bp, Zea Mays
atgctagccactgtttccatcctgatcagtctccactctgtaacaacgcgtagttacgagaaaactacaaaccttgttgcagtagactgcagtcatcaggagtcacgacagctccatttctaccatctgagagctgcctacttgatcaaaagaaccgtcgctgtcagaatctgccggtggcggtaccggcggaggagcaatccggcctgcgccccatccgagcagcaggccgacggagtcggcgaacgcgcggtgcgccagcctccacttggtccgggcgatcgacccggcgtgctgaacgagcgcggcgcatccggcaaacctcttgcccagcctggcgccgctcccctcgcacaccaggcacaggaagtgccccttgtcccgctccgcctcgtagaaccccctcagcgccgcgtcgctgcccagcagctcgctgaagaatcgagccgcactgccctcgttctcctcctcctcgtcctcttcgaactgcgattcaaagaacgcgcggcaggaccttacggcgacgacctgagggtgcaaggggaccgcgcccgccacgtcgactgtgggttgcgtcggcgtcggcgagggtacggcgggcgggccccagctccaggagtcggcttccgcggggtccggaggcggcggcgggtcacacggccaaggcgtatcgggctgcgcttgggagggggacacggatccggtggcggctgggaggggcgtcggggcgccgagaggttgccaccgcacgagctcgtcaacgaggtgcctctgccgcttgcggtccttgcgcttgcggcgctcctcccgcttgaacgccgtagacttgactaa

SEQ ID NO: 112847 - DNA, 2601 bp, Zea Mays
gcagaaattgcttacagaagagaaatgacccgtttcgagccaaggcatcctcgcgtctcgctctcacccctcctcggcgcctccccgaccacagtgtaaagcccctgtcccttcctccccgactcgcccctcatggcgaggaggcgctgctgatgcctcgcggcgtcggatcggacgcggcggccacgacacctagccgcttgcggtggcgctcgcctacgcgcccaatccgccgacgctgctcctcggatcccccgagagattcaggccccgtctcgcctcgtcctgcctagtgcctaggtgaggctctggcctccaaaggtgcgtgggtgggatctgctgcctcggtttgcgttattcccaagtgccctgcccatactccaacagcggtccagtcgacttccccaagtgctcgacccctacaaggcagcgcgcgtgcgtcacctcaaccccttgcatgcgctggcgctaaccctatctaggagacggagcggcgggccagcggctacgcgggcaaagagaggacgagagcgtgcaagaagagaaggcccgtgtcaggcggcggctatagcctttcagttgaggattaaagtggaggtttaagaagcttgagaattggcatcatctcaagaatacattgaagtgcaagatgccaaaaataaagagtctatctaatgcatgccgagtatcattttctccagaaggtcccatatctgaagaggcgcttgagagagtccgtgcactgttagatatgataagacctctagatgtcggcctagataatgaagcccaaattgcacgcaattggagtagttctacgcgtccatcaaatgggagacgaggacgcaatggggctaaccagttcgcggctccaatcaaatatttgcacattcatgaatgtgaaagcttctctatgggtatattttgtatgccaccttcttcagttatcccacttcataatcatcctggaatgactgtacttagcaagcttctttatggacgtctgcatgctgaatcttatgactgggttgacatacctgatcatccaattgatcaattacaaacaaggccagccaagcttgttaaagattgtgaaatgactgctccagagacaactattctttaccctaatgcaggtggtaacatccacactttcagagccattacaccttgtgctctctttgacgttctttctccaccatactccgctgaggatgggcgacactgttcatacttccgaaagtctcagatgaatcagccacctgttgttttgcctgctgagatagatagctctcaggtagtttggttggaggagttggaggaccatcagcccccagaaggctttgttgttgcaagaggtctgtataaaggccctgtaattaggagataatttgctttggagcgcagaatcaaccaagctgcaaatcagctgaaagacgatgcaggcttgtagtgcctagtgcaagcatcgtcaggtcatgtgcagcctacggtttatttgtacatctcaaagtgatctttgataatttaacagcagttttacagaacaggaacggatgttttttgtttggctgccattttaactttgtcccactgctggagtatctctgacctagttatggagctcttatcagatcaagaccatggtacttttgatgtaccagcatagctattgtcatgatgtaccagggaagatcaagacaagtgtttccatttggtgatttcagaaagaatttggtgtggggctaccattttgtctgtgtaatagcagcattactattttggagcaagactgtaaattacgggagaggaactataataatatcattaggtttatcatgaaatatattttcatggtgtatctatttaggccttgtttggaaggagatctttttctgcattattgtcactgtgttccaaataggccgttaaagtttggtggtgacctagattgctgttagtctggtggggacctagaaatgaaagcgagtacagaagtccctcgctgccttagcgaatcctggtgttgtgataagtcgcgcggtaaagtcctttttcatctcagaaaccatataggcacgttttcatctcagaaaacataagggtacttaggtttttttattcaactaatcttgaggaacgaaatgtgaggactacattaagtgtccaaaccaaaccatgcatcatctgatctagctaagataaaactatcctgatctagctaagataaaactctccttgatctagctaagataaaactctccttgatctagcctgggtcgctatgagcaggtggcctgaacggtgagcgcgccggattggcaccctgcgccggcaaacgcggccgtgtacttgaccgtgcacgactccctgccgacgcacgcgtccgtgaacgccttgagcgcggccttggactcgcagcctcccttgtaggcgccgcagctgcccctggcgacgccgaagctggccacgtcgacgctggcgacgacgcggccgtggccgccgcatgacagcgtgacgtcgtcgccgagctcgacggccgccacgcacacggggcccacggcgacggtgtggaacgcggcgcgtgtcgggtcgccgccg

SEQ ID NO: 112848 - DNA, 2663 bp, Zea Mays
gcagaaattgcttacagaagagaaatgacccgtttcgagccaaggcatcctcgcgtctcgctctcacccctcctcggcgcctccccgaccacagtgtaaagcccctgtcccttcctccccgactcgcccctcatggcgaggaggcgctgctgatgcctcgcggcgtcggatcggacgcggcggccacgacacctagccgcttgcggtggcgctcgcctacgcgcccaatccgccgacgctgctcctcggatcccccgagagattcaggccccgtctcgcctcgtcctgcctagtgcctaggtgaggctctggcctccaaaggtgcgtgggtgggatctgctgcctcggtttgcgttattcccaagtgccctgcccatactccaacagcggtccagtcgacttccccaagtgctcgacccctacaaggcagcgcgcgtgcgtcacctcaaccccttgcatgcgctggcgctaaccctatctaggagacggagcggcgggccagcggctacgcgggcaaagagaggacgagagcgtgcaagaagagaaggcccgtgtcaggcggcggctataggtgcaaggataggcaacaagtgttcaaaaacacgtctgtggatcaattgacttgtatttcagcctttcagttgaggattaaagtggaggtttaagaagcttgagaattggcatcatctcaagaatacattgaagtgcaagatgccaaaaataaagagtctatctaatgcatgccgagtatcattttctccagaaggtcccatatctgaagaggcgcttgagagagtccgtgcactgttagatatgataagacctctagatgtcggcctagataatgaagcccaaattgcacgcaattggagtagttctacgcgtccatcaaatgggagacgaggacgcaatggggctaaccagttcgcggctccaatcaaatatttgcacattcatgaatgtgaaagcttctctatgggtatattttgtatgccaccttcttcagttatcccacttcataatcatcctggaatgactgtacttagcaagcttctttatggacgtctgcatgctgaatcttatgactgggttgacatacctgatcatccaattgatcaattacaaacaaggccagccaagcttgttaaagattgtgaaatgactgctccagagacaactattctttaccctaatgcaggtggtaacatccacactttcagagccattacaccttgtgctctctttgacgttctttctccaccatactccgctgaggatgggcgacactgttcatacttccgaaagtctcagatgaatcagccacctgttgttttgcctgctgagatagatagctctcaggtagtttggttggaggagttggaggaccatcagcccccagaaggctttgttgttgcaagaggtctgtataaaggccctgtaattaggagataatttgctttggagcgcagaatcaaccaagctgcaaatcagctgaaagacgatgcaggcttgtagtgcctagtgcaagcatcgtcaggtcatgtgcagcctacggtttatttgtacatctcaaagtgatctttgataatttaacagcagttttacagaacaggaacggatgttttttgtttggctgccattttaactttgtcccactgctggagtatctctgacctagttatggagctcttatcagatcaagaccatggtacttttgatgtaccagcatagctattgtcatgatgtaccagggaagatcaagacaagtgtttccatttggtgatttcagaaagaatttggtgtggggctaccattttgtctgtgtaatagcagcattactattttggagcaagactgtaaattacgggagaggaactataataatatcattaggtttatcatgaaatatattttcatggtgtatctatttaggccttgtttggaaggagatctttttctgcattattgtcactgtgttccaaataggccgttaaagtttggtggtgacctagattgctgttagtctggtggggacctagaaatgaaagcgagtacagaagtccctcgctgccttagcgaatcctggtgttgtgataagtcgcgcggtaaagtcctttttcatctcagaaaccatataggcacgttttcatctcagaaaacataagggtacttaggtttttttattcaactaatcttgaggaacgaaatgtgaggactacattaagtgtccaaaccaaaccatgcatcatctgatctagctaagataaaactatcctgatctagctaagataaaactctccttgatctagctaagataaaactctccttgatctagcctgggtcgctatgagcaggtggcctgaacggtgagcgcgccggattggcaccctgcgccggcaaacgcggccgtgtacttgaccgtgcacgactccctgccgacgcacgcgtccgtgaacgccttgagcgcggccttggactcgcagcctcccttgtaggcgccgcagctgcccctggcgacgccgaagctggccacgtcgacgctggcgacgacgcggccgtggccgccgcatgacagcgtgacgtcgtcgccgagctcgacggccgccacgcacacggggcccacggcgacggtgtggaacgcggcgcgtgtcgggtcgccgccg

SEQ ID NO: 112849 - DNA, 2313 bp, Zea Mays
cctccccgaccacagtgtaaagcccctgtcccttcctccccgactcgcccctcatggcgaggaggcgctgctgatgcctcgcggcgtcggatcggacgcggcggccacgacacctagccgcttgcggtggcgctcgcctacgcgcccaatccgccgacgctgctcctcggatcccccgagagattcaggccccgtctcgcctcgtcctgcctagtgcctaggtgcaaggataggcaacaagtgttcaaaaacacgtctgtggatcaattgacttgtatttcagcctttcagttgaggattaaagtggaggtttaagaagcttgagaattggcatcatctcaagaatacattgaagtgcaagatgccaaaaataaagagtctatctaatgcatgccgagtatcattttctccagaaggtcccatatctgaagaggcgcttgagagagtccgtgcactgttagatatgataagacctctagatgtcggcctagataatgaagcccaaattgcacgcaattggagtagttctacgcgtccatcaaatgggagacgaggacgcaatggggctaaccagttcgcggctccaatcaaatatttgcacattcatgaatgtgaaagcttctctatgggtatattttgtatgccaccttcttcagttatcccacttcataatcatcctggaatgactgtacttagcaagcttctttatggacgtctgcatgctgaatcttatgactgggttgacatacctgatcatccaattgatcaattacaaacaaggccagccaagcttgttaaagattgtgaaatgactgctccagagacaactattctttaccctaatgcaggtggtaacatccacactttcagagccattacaccttgtgctctctttgacgttctttctccaccatactccgctgaggatgggcgacactgttcatacttccgaaagtctcagatgaatcagccacctgttgttttgcctgctgagatagatagctctcaggtagtttggttggaggagttggaggaccatcagcccccagaaggctttgttgttgcaagaggtctgtataaaggccctgtaattaggagataatttgctttggagcgcagaatcaaccaagctgcaaatcagctgaaagacgatgcaggcttgtagtgcctagtgcaagcatcgtcaggtcatgtgcagcctacggtttatttgtacatctcaaagtgatctttgataatttaacagcagttttacagaacaggaacggatgttttttgtttggctgccattttaactttgtcccactgctggagtatctctgacctagttatggagctcttatcagatcaagaccatggtacttttgatgtaccagcatagctattgtcatgatgtaccagggaagatcaagacaagtgtttccatttggtgatttcagaaagaatttggtgtggggctaccattttgtctgtgtaatagcagcattactattttggagcaagactgtaaattacgggagaggaactataataatatcattaggtttatcatgaaatatattttcatggtgtatctatttaggccttgtttggaaggagatctttttctgcattattgtcactgtgttccaaataggccgttaaagtttggtggtgacctagattgctgttagtctggtggggacctagaaatgaaagcgagtacagaagtccctcgctgccttagcgaatcctggtgttgtgataagtcgcgcggtaaagtcctttttcatctcagaaaccatataggcacgttttcatctcagaaaacataagggtacttaggtttttttattcaactaatcttgaggaacgaaatgtgaggactacattaagtgtccaaaccaaaccatgcatcatctgatctagctaagataaaactatcctgatctagctaagataaaactctccttgatctagctaagataaaactctccttgatctagcctgggtcgctatgagcaggtggcctgaacggtgagcgcgccggattggcaccctgcgccggcaaacgcggccgtgtacttgaccgtgcacgactccctgccgacgcacgcgtccgtgaacgccttgagcgcggccttggactcgcagcctcccttgtaggcgccgcagctgcccctggcgacgccgaagctggccacgtcgacgctggcgacgacgcggccgtggccgccgcatgacagcgtgacgtcgtcgccgagctcgacggccgccacgcacacggggcccacggcgacggtgtggaacgcggcgcgtgtcgggtcgccgccg

SEQ ID NO: 112850 - DNA, 168 bp, Zea Mays
gatctccgcaacttgaataggctgcgtgactcagcactgtggcatcttcgtggttgtaggctactaaggaaactaaggcttccaagaaacgcattcaggtattgccccacttcccctgatttttattgactgatccaaatttgaagtgcttcattactaagcagaatt

SEQ ID NO: 112851 - DNA, 1083 bp, Zea Mays
accaaaaggacccaacgaagtccagccagctgagctgagcctcgtgaaccagagcatttgctccttcctcgtcctcctcgatcgacctctctccttggtgccgctgccgccatatatgaactgctagcacgcgcagcagccagcagctgccgaccggcctataatcagaaggccagaaaggatcgatggagaccatcaagtgctgcatcgcgtgcatcctgccgtgcggggcgctggacgtggtgcggatcgtgcactccaacggacgcgtggaggagatcagcgggggccccgtgctggccggggagatcatgaaggcgtaccccaagcacgtcctccggaagccgccgtccacgtgcccggccgacggcggcatcgtcgtgcagaagcccgtcatcctgccgcacaatgccgagctgcagaagggcaagatctacttcctcatgccggtcatggccaccccggcgcccgagaagcccgccgcgaagccacagccgccgcccgccgccggccaatccgcggcggccgcttcggtggcgaggagacggcgccggaggaaggaccacgccgccgcacggccggacggaggaggagcggcgcccgcctgcagcagcggggccggggcccggccgccggagggcgagaaggagcggctgctggccaacgagaggtacctgtccgagatcatgaaggagaaggcctccacggccagggaccggcggcgaggccgcgtcgccgtgtggcggccgcacctggagagcatcaccgaggatgacttgtaatcaagcaaggtgtcttcgatttttttttcctcccaccttttgtttctctctccatttctttagttttagcagcgtggtagtttcgtggcgctctcttttgttaattcctcctgctttgcctctccttgccctttggccttttatttttgttgccatcttttctccggcccgtctcctttagagcaccatcattatcatcttcgtctaccctgctctcctctctcttacgagatgaactgctgtgaagaaaaaagatagtacgatttttgccatgttctttctctttacagcaattgatgat

SEQ ID NO: 112852 - DNA, 309 bp, Zea Mays
atggcggtgcgtggagcgctacaatctacgagtctctgtgtcgccggaaggtttggccgcgtcgtggtcattggatccggctaccacgacggcgatcagactgtgtacatacgtcgcgaggaggccggaaaagggcacgtcctggacatgcgcatcgccaccaccggagttctccagacatgtgcaagcctcctacttgtgaaatccgaggtgtgcatgtcaacattgcttctgtcactactcacggttgtatatagcaagtcaagagaaatgttaatgacaactttggatgtctttgtccgatcataa

SEQ ID NO: 112853 - DNA, 2547 bp, Zea Mays
attttggattctgtgccaaaagaggggttaaaggaacgaattctgattcccgtggaccgacaaggagcagctgggaaacggagcgccacaagcccacaactctcgcgcaggcttctctcccatctccgcccttcccgaagcagcacggtgcaggccgcggacccgcggtttctccacagaatcccgctccacgcacgtcgcccccgtcgccggcgaggcggctgtgctgctgcgtactcccctggttccaactctgaaccggccaccctctcctgctccgcgacctcgagtaactttttgagtaccagtgatgcaaagggacacaagctctagcgatgtttctgcttctcatgtaggacgtgtaagacgtcgcaaacatccaactgaggctaccacagatgggaatagagctaatggacagccattgcttgtcaatgatcagaacaaatataaatcaatgcttacccgtacgtattctacagtatggatgattggaggctttgcctttattatttatatgggtcatctatatatctgggctatggtggttgtgattcaaatatacatggcaagagaacttttcaatttactcagaaaatccagtgaagagaaacaactgccagggttcagggtcctgaattggcacttctttttcacggcaatgctgtacacttatgggcgctttcttagtcgtcagctggtgaatacagtgacttcagatcacttgctttataaggtcgtcagtggcctaattaagtatcagatgtttatctgctatttcctttatattgcagggtttgtatggtttattttgactctcaagaaaaagacatacaagtatcagttcaaacagtatgcctggacacacatgatacttttaacagtttttgcacagtctgctttcactgtggcaaacatatttgaagggatattctggtttcttttgcctgcttcacttattgtgatcaacgatatttttgcttatttatttgggttctttcttgggagaacaccattaatcaagttgtctccaaagaaaacttgggaaggttttattggtgcatcagtgacaactatcatctctgcgtttctgttagcaaatgtaatgggccattcgcaatggttgacatgcccaagaaaggatctgttgactgggtggctttattgtgatcctggtccaatgtttaagccagagcattactcattgggagagtgggtgccgcattggttcccatggaaagaactagctattatgcctgtgcagtggcatgctttagccctaggtttatttgcatcaataatagcaccatttggaggattttttgcgagtggcttcaagagggcttttaaaattaaggattttggtgacagcatacctgggcatggtggaattactgacagaatggattgtcaaatggttatggcagtgtttgcatacatataccaccaatcattcattgcacctcagaacttctctgttgagataatcttggatcagattataagaaacctaacctatgaggagcaaaaatatgtatatgaacaacttggggaaatgttccgtgagaggcaattggctcattggctgaaagctgagagttagcgtgcttatgaaatgcatgatatgttgtgcatttagttcatgtatggcagcatgccagcatgttatgaatgtatacggagcccttgcccaaaccattgtatagaatggtagaatggagagaatgaatgggttgtaggtgctttattcactctctagtctccactgacgctgcctataattcactccccctgtcatcgtttctgcagtctgtgtaaaagggaacctggaaagttttattctttccacttcgtggtgctgggctcagatcaaatattcgaggattcacaatatatccccgatgttttaccacttcatgaaaattcaactaccccaactagccctatttacatctagacaacttcaagctaaatacatcctatcagttccttggatatggatccttattggataacagatagacgacatgtgtcatctagagagagacaatcactacaagcatggtaaaaccaacatttgaagcaatcattacaaggaaaatactcactttaactaacaatttgaagcaatcactgcaggaaaataatcgctttagtccaaacaatccatgcttgaccgatgaagatgatggagatgactgagaggtactcatgctaaataatacaaaatgtacttgcattcactatccaaggtaccgaaggatcgaaaaggctaccaaagccaattaaattctgttgttcaaaactgaaatttgagcagttagcttcaatggagatgaagaagtcgctcaaaacaaaagcacattaatcaactagtgatttcatgtttcaaaaatattcctagaatcacatgataccaacaaaatgaacgggtcacaaattggacgctgaaaagtctgaatcggcccaaaaccgtgtcgttatctagtgttgttttcaacggctcaaaatgcagttttcaaatgtcaaactgattcaaacggactc

SEQ ID NO: 112854 - DNA, 2344 bp, Zea Mays
gttgcgccgatcattagcgttgtatagacgcgggaagccgcgaacaaggcaacgccagtagacttgacaaaatacttccgtgccacataactttttgagtaccagtgatgcaaagggacacaagctctagcgatgtttctgcttctcatgtaggacgtgtaagacgtcgcaaacatccaactgaggctaccacagatgggaatagagctaatggacagccattgcttgtcaatgatcagaacaaatataaatcaatgcttacccgtacgtattctacagtatggatgattggaggctttgcctttattatttatatgggtcatctatatatctgggctatggtggttgtgattcaaatatacatggcaagagaacttttcaatttactcagaaaatccagtgaagagaaacaactgccagggttcagggtcctgaattggcacttctttttcacggcaatgctgtacacttatgggcgctttcttagtcgtcagctggtgaatacagtgacttcagatcacttgctttataaggtcgtcagtggcctaattaagtatcagatgtttatctgctatttcctttatattgcagggtttgtatggtttattttgactctcaagaaaaagacatacaagtatcagttcaaacagtatgcctggacacacatgatacttttaacagtttttgcacagtctgctttcactgtggcaaacatatttgaagggatattctggtttcttttgcctgcttcacttattgtgatcaacgatatttttgcttatttatttgggttctttcttgggagaacaccattaatcaagttgtctccaaagaaaacttgggaaggttttattggtgcatcagtgacaactatcatctctgcgtttctgttagcaaatgtaatgggccattcgcaatggttgacatgcccaagaaaggatctgttgactgggtggctttattgtgatcctggtccaatgtttaagccagagcattactcattgggagagtgggtgccgcattggttcccatggaaagaactagctattatgcctgtgcagtggcatgctttagccctaggtttatttgcatcaataatagcaccatttggaggattttttgcgagtggcttcaagagggcttttaaaattaaggattttggtgacagcatacctgggcatggtggaattactgacagaatggattgtcaaatggttatggcagtgtttgcatacatataccaccaatcattcattgcacctcagaacttctctgttgagataatcttggatcagattataagaaacctaacctatgaggagcaaaaatatgtatatgaacaacttggggaaatgttccgtgagaggcaattggctcattggctgaaagctgagagttagcgtgcttatgaaatgcatgatatgttgtgcatttagttcatgtatggcagcatgccagcatgttatgaatgtatacggagcccttgcccaaaccattgtatagaatggtagaatggagagaatgaatgggttgtaggtgctttattcactctctagtctccactgacgctgcctataattcactccccctgtcatcgtttctgcagtctgtgtaaaagggaacctggaaagttttattctttccacttcgtggtgctgggctcagatcaaatattcgaggattcacaatatatccccgatgttttaccacttcatgaaaattcaactaccccaactagccctatttacatctagacaacttcaagctaaatacatcctatcagttccttggatatggatccttattggataacagatagacgacatgtgtcatctagagagagacaatcactacaagcatggtaaaaccaacatttgaagcaatcattacaaggaaaatactcactttaactaacaatttgaagcaatcactgcaggaaaataatcgctttagtccaaacaatccatgcttgaccgatgaagatgatggagatgactgagaggtactcatgctaaataatacaaaatgtacttgcattcactatccaaggtaccgaaggatcgaaaaggctaccaaagccaattaaattctgttgttcaaaactgaaatttgagcagttagcttcaatggagatgaagaagtcgctcaaaacaaaagcacattaatcaactagtgatttcatgtttcaaaaatattcctagaatcacatgataccaacaaaatgaacgggtcacaaattggacgctgaaaagtctgaatcggcccaaaaccgtgtcgttatctagtgttgttttcaacggctcaaaatgcagttttcaaatgtcaaactgattcaaacggactc

SEQ ID NO: 112855 - DNA, 1407 bp, Zea Mays
accacatcatcattggttttgcattatctttctagagtttctagatgtttgattttgtactctgtttgaatacatcgtttcttaacagttcccatggaaagaactagctattatgcctgtgcagtggcatgctttagccctaggtttatttgcatcaataatagcaccatttggaggattttttgcgagtggcttcaagagggcttttaaaattaaggattttggtgacagcatacctgggcatggtggaattactgacagaatggattgtcaaatggttatggcagtgtttgcatacatataccaccaatcattcattgcacctcagaacttctctgttgagataatcttggatcagattataagaaacctaacctatgaggagcaaaaatatgtatatgaacaacttggggaaatgttccgtgagaggcaattggctcattggctgaaagctgagagttagcgtgcttatgaaatgcatgatatgttgtgcatttagttcatgtatggcagcatgccagcatgttatgaatgtatacggagcccttgcccaaaccattgtatagaatggtagaatggagagaatgaatgggttgtaggtgctttattcactctctagtctccactgacgctgcctataattcactccccctgtcatcgtttctgcagtctgtgtaaaagggaacctggaaagttttattctttccacttcgtggtgctgggctcagatcaaatattcgaggattcacaatatatccccgatgttttaccacttcatgaaaattcaactaccccaactagccctatttacatctagacaacttcaagctaaatacatcctatcagttccttggatatggatccttattggataacagatagacgacatgtgtcatctagagagagacaatcactacaagcatggtaaaaccaacatttgaagcaatcattacaaggaaaatactcactttaactaacaatttgaagcaatcactgcaggaaaataatcgctttagtccaaacaatccatgcttgaccgatgaagatgatggagatgactgagaggtactcatgctaaataatacaaaatgtacttgcattcactatccaaggtaccgaaggatcgaaaaggctaccaaagccaattaaattctgttgttcaaaactgaaatttgagcagttagcttcaatggagatgaagaagtcgctcaaaacaaaagcacattaatcaactagtgatttcatgtttcaaaaatattcctagaatcacatgataccaacaaaatgaacgggtcacaaattggacgctgaaaagtctgaatcggcccaaaaccgtgtcgttatctagtgttgttttcaacggctcaaaatgcagttttcaaatgtcaaactgattcaaacggactc

SEQ ID NO: 112856 - DNA, 1104 bp, Zea Mays
ctctctctctctctctctctctctctctctctctctctctctctctctctctctctctctttctagcagtctagtagctgcgactagcacttccacctactggtgttggtgtttgcttgccttgacgaacgaaggagttggttcgttgcgttccaccttccaaatgctgtcccacgtcgagatggcccccggcgggttcaagctgttcggcaaggtcatcacgcagtgcgccgagagcgccccgccggcgccgccggaggctgctgccgcggcgtcgagggccacggccttcgcgcgggagagggacgacccggacgagcgcgaccagccgatggtgaagcgggaggcggcggcgtccgaccacgacttcgccgccgtggacaagcaccaccagcactccggcggcagcggcgggccgggaccgggaccggacgagagcgacgacagcaaagggcagcagcagcagcagcaccacccgcgcccgcggcatcatcagcatcaccatcagcagcagcaggacaccgtggaggcgcgcgccgcggcggccgcgtcctcggcgccgccgctgccgtgcccgcggtgccggagccggaacaccaagttctgctacttcaacaactacaacgtcaaccagccgcgccacttctgcaaggactgccaccgctactggacggcgggcggcgcgctgcgcaacgtccccgtgggcgccggccgacgcaagaaccggccgctcggccccgtcgtcgccggagccgtgcccgtgcccgtgcccgtgccggcgcaccaccaccaccaccacctgcaccccgctgctgctgctgctgcggcggcggcgggcttcgtcctcgggttccccggccagcagcacccttcgtcgccgacgtcgccgtcgccgtcgccggtctacgccgaccggtggcctgtatgtccggaccggcggttctgagttctggttagggtggtttgacttgcgtaatttgctggtgatgaggcggggaaggctgccttgtctgtctgtacgtgggtgtgcgtgcgtgagaggctggttgatggaggacgccggcatggaaatggcatctgtttccttctcttttctctgcctcg

SEQ ID NO: 112857 - DNA, 518 bp, Zea Mays
atgacgctcgtggagatgtgcgtgcacatggactgccccgggtgcgagaagaagatccggaaggcggtgcagcggctggaaggcgtgcacgacgtggaggtcgacatggcgcagcagaaggtgacggtgagcggggacgtggagcagaagaaggtgctcaaggcggtgcggcggacgggccggcgcgccgtcctgtggccgctcccctacgccgcgggcgcggccgccggcgccgcgcacgtcctggcgcagcagcagccagcagcaggcgcaggcgcaggcgcaggcccggcgcacgccagccacgcggcgcggcccacgtcctcgtacaactactacaagcatggctacgacgactcgagcctgtacggcgcctactaccaccacggcgccaactcggccgtcgccggcaccaggtccaccgactacttcagtgacgagaacgcgcaggggtgctccgtcatgtgattggcaggatcacatgcaggcatgtaaaacttcagaggtataattgaagt

SEQ ID NO: 112858 - DNA, 1876 bp, Zea Mays
aaataacattgaaagataaatccttgggggattgcaagctttcgctgtgcggttgcggtcgctccccttcccgactccggccagaagcagcgacggtgccggcagccggttactccactcggcggcggcccatcctttcatgttttctcctccagtcctacaaatacaggacacaacacgcttgctcttgtgatactctattaagtttttcgctaatatatattaaagaatgttttgcttgaggaactactggtcgcctgcatttgcttcagtaaaggaggggcctgttcgacatcatataaagtttaattgtgtagtggtttgtggtgccaggggtccaagaccgagatatccccgtgtatggaaaactcgtaagaaaattgggactatttccaagtcacagaagcttgttgaatgtattaaaggtctgtctaatgtaaaggaggaagtttatggagcgcttgactcttttgttgcatgggaactggagtttcccttgatagtagtaaagaaggcactgaagaaacttgaagacgaaaaggaatggaaacgaataattcaggtcattaaatggatgttcaacaaaggtcaggggaagacaatggggagctattacaccttgttgaatgctttgatcgaggacggacggattgaggaagcagaagagttatttagaatggtattctcacgatatatggagggtttgcctcgtacatttttcatgagaattatttctttctattacagtgctggagagcatgataagatgttcgagatttttgctgatatggaggaactaggcgtaagaccagatggttctattatcaggatgctaggtgatgtatttcaaaagatagagatgatggacaaatacgaaaagttaaaaaagaaatacccaccaccgaaatgggaatatcgatacatcaaaggcaagcgcattagaattagagtttaccctgatagtaaaactgaagagacggcaaaaggagaccatgacaatgatgaactcggagaggtagaaagtatacagcttgataatgaattggaagaagaagcaagctcaggcctcgacaggagtgtattggacgatgcaacttgtggagaccttgaatatatataattcagagcttccatttggttttttttaatgcctgcttaatcaaagcggcctggagcaaattgaaccggtaacatcctagaacccatgccgttgtacttctaaaacacgggcatcgatatcttcagatctattttacttggattgactagaaactatgtgtcatgcgttttcccatcagcagtccttttcatgacattgtggtgattttaccacgagatgtgttcttcagagttcggttacttgatttatctgattcacaagcatgaggctcatgcttttcttgaaagcttccaaccatgttaaaattgtagcaatggtattaggtacaaacagttatcgtttttcctagtgcttatgatgcgtccatattcctgctttcctcggttgtgctgcagattgagatttttggtgtagccaatttgctactgctgccatgttaggaaatataaaagatcagccctcgtgttcaatggatttacggcagtttatcctcgcgtattctgtcaaatggtctggtaatcctattccattggtacacctacatctgactgcattcctgaacatgtggttgattgttggaggcaatatcctggacatgagagcagcaaccattatatcattcgtatggccctggcatggaaagacaccgtttctgacagagacttgtgttatctgctctagccatatccagtgtgggggcgaaaaccttcgcaggacatttgcgtggtcgattaccaaattaattagggcagggga

SEQ ID NO: 112859 - DNA, 1853 bp, Zea Mays
aaataacattgaaagataaatccttgggggattgcaagctttcgctgtgcggttgcggtcgctccccttcccgactccggccagaagcagcgacggtgccggcagccggttactccactcggcggcggcccatcctttcatgttttctcctccagtcctacaaatacaggacacaacacgcttgctcttgtgatactctattaagaatgttttgcttgaggaactactggtcgcctgcatttgcttcagtaaaggaggggcctgttcgacatcatataaagtttaattgtgtagtggtttgtggtgccaggggtccaagaccgagatatccccgtgtatggaaaactcgtaagaaaattgggactatttccaagtcacagaagcttgttgaatgtattaaaggtctgtctaatgtaaaggaggaagtttatggagcgcttgactcttttgttgcatgggaactggagtttcccttgatagtagtaaagaaggcactgaagaaacttgaagacgaaaaggaatggaaacgaataattcaggtcattaaatggatgttcaacaaaggtcaggggaagacaatggggagctattacaccttgttgaatgctttgatcgaggacggacggattgaggaagcagaagagttatttagaatggtattctcacgatatatggagggtttgcctcgtacatttttcatgagaattatttctttctattacagtgctggagagcatgataagatgttcgagatttttgctgatatggaggaactaggcgtaagaccagatggttctattatcaggatgctaggtgatgtatttcaaaagatagagatgatggacaaatacgaaaagttaaaaaagaaatacccaccaccgaaatgggaatatcgatacatcaaaggcaagcgcattagaattagagtttaccctgatagtaaaactgaagagacggcaaaaggagaccatgacaatgatgaactcggagaggtagaaagtatacagcttgataatgaattggaagaagaagcaagctcaggcctcgacaggagtgtattggacgatgcaacttgtggagaccttgaatatatataattcagagcttccatttggttttttttaatgcctgcttaatcaaagcggcctggagcaaattgaaccggtaacatcctagaacccatgccgttgtacttctaaaacacgggcatcgatatcttcagatctattttacttggattgactagaaactatgtgtcatgcgttttcccatcagcagtccttttcatgacattgtggtgattttaccacgagatgtgttcttcagagttcggttacttgatttatctgattcacaagcatgaggctcatgcttttcttgaaagcttccaaccatgttaaaattgtagcaatggtattaggtacaaacagttatcgtttttcctagtgcttatgatgcgtccatattcctgctttcctcggttgtgctgcagattgagatttttggtgtagccaatttgctactgctgccatgttaggaaatataaaagatcagccctcgtgttcaatggatttacggcagtttatcctcgcgtattctgtcaaatggtctggtaatcctattccattggtacacctacatctgactgcattcctgaacatgtggttgattgttggaggcaatatcctggacatgagagcagcaaccattatatcattcgtatggccctggcatggaaagacaccgtttctgacagagacttgtgttatctgctctagccatatccagtgtgggggcgaaaaccttcgcaggacatttgcgtggtcgattaccaaattaattagggcagggga

SEQ ID NO: 112860 - DNA, 1752 bp, Zea Mays
agccgtgcggttccgttccgttcgaaccccgccgctcgccgcggctcgggcacccgcatttacgccggggcgggcggcatacaccaaccaaccaacgctagccccgagcaagagtaacgtttgtctagtggcaccgctcgccgctcgcctatggacgacgtgccgcccgggccggctgccttctcacgccgggagggttggggaacgagcgccgcagccgccgccgccaccacgaactcgcggaagaccatgccgagatccaggggcaacgagccgccgctgcggacgtcgcagcgcgcgccgctgcacctcaagacgacggcctgctccgaggcgaatggcgcgcaccaccgccccgtcgccgaccggagtagccccagggtctcgccgcgcagccctctgcccgagaagaagcgtgcggcgggaacacgtgttgcggagctggagggcaagctggggaaggtgcaggaggagctcaagaagctgcgggagcagctcgcgtccgccgaggccgccaagaaggacgcgcaggtcgcgctcgaggaggccaagaagcgcgtcggtaccaagggaagcccagcctccaccaccaccaccactcctctctcccccccttcgcctggggtcgaaatcgccaagaagaccgaggagctgaagctgcctcagccggcagccgaggaggagagcagcataaacgtcccggcgaccgatgtgtttgaggtcgtccgggccgagtcgggggacaaggagaaccagagcgcggctgaggtctgcgaggtcgttagctgcggcggcggtaaggcggcggtggacgtggccgagaatgaggagacggaggaagaggagactaagaaaatgatcggggaggacaacagcgcggcggtggaatctgacggcgccgacaaggagagcccggaggtcgtggagctgaaggcgaagctggcggagaaggacacggagatcgctgccctcacggcggaaaacgctgagctgaagaagcaggcagaggaggccgcggaggcggcgaagaaggccgaagaggggcccgcgtcgagggcggccaaggccgagcacgaactgaaggagggcgcagcgcgggaggcccgggtgggcgagcagctgcgggcgtcggaggccgcgcgggaggcgctggacggcgagctgcggcgcctgcgcgtgcagaccgagcagtggcgcaaggcggcagaggcggcggccgctgtgctcggcggggacaaccacctcaccggactggccggcaacggctggggctcccccgccacgatgcccgacgacggcgacgacgagggcttcggtggcaagcggaagggcgccggcatccgggtgctcggcgacctgtggaagaggaaggggagcaagtgaaggcctgccgcctgccgcggaatgggacccgtgtcccaaatttcgcaacggtgagctcgctcagcccgcccgcttgccagcttgaacaactccatcccttgcactagcttagctccatcgttttaccgcgttttggttcggagtctacttatgtttgtatgatgatgatgacgatgatgagacgatgctcgtgaggttaaactatgtctgtaacgcttgatcccgctgctgcctgctacctccgcgtaaggagcaaccaagatggcttggtgcttttactgcattgcggcggtgctgttgacgagggagtagatggtgtttattttcatggtggaattgaggaatgcttgattgcagcatcaagaaatg

SEQ ID NO: 112861 - DNA, 1541 bp, Zea Mays
agccgtgcggttccgttccgttcgaaccccgccgctcgccgcggctcgggcacccgcatttacgccggggcgggcggcatacaccaaccaaccaacgctagccccgagcaagagtaacgtttgtctagtggcaccgctcgccgctcgcctatggacgacgtgccgcccgggccggctgccttctcacgccgggagggttggggaacgagcgccgcagccgccgccgccaccacgaactcgcggaagaccatgccgagatccaggggcaacgagccgccgctgcggacgtcgcagcgcgcgccgctgcacctcaagacgacggcctgctccgaggcgaatggcgcgcaccaccgccccgtcgccgaccggagtagccccagggtctcgccgcgcagccctctgcccgagaagaagcgtgcggcgggaacacgtgttgcggagctggagggcaagctggggaaggtgcaggaggagctcaagaagctgcgggagcagctcgcgtccgccgaggccgccaagaaggacgcgcaggtcgcgctcgaggaggccaagaagcgcgtcggtaccaagggaagcccagcctccaccaccaccaccactcctctctcccccccttcgcctggggtcgaaatcgccaagaagaccgaggagctgaagctgcctcagccggcagccgaggaggagagcagcataaacgtcccggcgaccgatgtgtttgaggtcgtccgggccgagtcgggggacaaggagaaccagagcgcggctgaggtctgcgaggtcgttagctgcggcggcggtaaggcggcggtggacgtggccgagaatgaggagacggaggaagaggagactaagaaaatgatcggggaggacaacagcgcggcggtggaatctgacggcgccgacaaggagagcccggaggtcgtggagctgaaggcgaagctggcggagaaggacacggagatcgctgccctcacggcggaaaacgctgagctgaagaagccgcggaatgggacccgtgtcccaaatttcgcaacggtgagctcgctcagcccgcccgcttgccagcttgaacaactccatcccttgcactagcttagctccatcgttttaccgcgttttggttcggagtctacttatgtttgtatgatgatgatgacgatgatgagacgatgctcgtgaggttaaactatgtctgtaacgcttgatcccgctgctgcctgctacctccgcgtaaggagcaaccaagatggcttggtgcttttactgcattgcggcggtgctgttgacgagggagtagatggtgtttattttcatggtggaattgaggaatgcttgattgcagcatcaagaaatgcctcttgtgactctaacgaatcctaagatatcattgcagcgcgtaggatctccggtggcctttagagagagagagagaatcgctggaatcctaaagaggttcatcgtgatacttgctgattgtatggtggctgttcatgatacttccagcctatgaattatgattgcatccgatggatgcaaccaga

SEQ ID NO: 112862 - DNA, 2028 bp, Zea Mays
gttccgttcgaaccccgccgctcgccgcggctcgggcacccgcatttacgccggggcgggcggcatacaccaaccaaccaacgctagccccgagcaagagtaacgtttgtctagtggcaccgctcgccgctcgcctatggttggttccgcgtccgctggcttgcctctctctactagtgattttcgaatttgaatcgcgcactggtccggtcaggtccggtccatcgcgtcggctcctgggagtctgggactggcagccggtgcgtctcgcggtcgcaacctcgcctcgcggtcgcagcctcgccccgatttattaacaggcaaacaaatgtcccgtccgttccctcgagaaaaggccacttctgcctgtgtgcatcgcttgccagcttccgcctttccatgaccacgccgctcctgctgtgattctaggacgacgtgccgcccgggccggctgccttctcacgccgggagggttggggaacgagcgccgcagccgccgccgccaccacgaactcgcggaagaccatgccgagatccaggggcaacgagccgccgctgcggacgtcgcagcgcgcgccgctgcacctcaagacgacggcctgctccgaggcgaatggcgcgcaccaccgccccgtcgccgaccggagtagccccagggtctcgccgcgcagccctctgcccgagaagaagcgtgcggcgggaacacgtgttgcggagctggagggcaagctggggaaggtgcaggaggagctcaagaagctgcgggagcagctcgcgtccgccgaggccgccaagaaggacgcgcaggtcgcgctcgaggaggccaagaagcgcgtcggtaccaagggaagcccagcctccaccaccaccaccactcctctctcccccccttcgcctggggtcgaaatcgccaagaagaccgaggagctgaagctgcctcagccggcagccgaggaggagagcagcataaacgtcccggcgaccgatgtgtttgaggtcgtccgggccgagtcgggggacaaggagaaccagagcgcggctgaggtctgcgaggtcgttagctgcggcggcggtaaggcggcggtggacgtggccgagaatgaggagacggaggaagaggagactaagaaaatgatcggggaggacaacagcgcggcggtggaatctgacggcgccgacaaggagagcccggaggtcgtggagctgaaggcgaagctggcggagaaggacacggagatcgctgccctcacggcggaaaacgctgagctgaagaagcaggcagaggaggccgcggaggcggcgaagaaggccgaagaggggcccgcgtcgagggcggccaaggccgagcacgaactgaaggagggcgcagcgcgggaggcccgggtgggcgagcagctgcgggcgtcggaggccgcgcgggaggcgctggacggcgagctgcggcgcctgcgcgtgcagaccgagcagtggcgcaaggcggcagaggcggcggccgctgtgctcggcggggacaaccacctcaccggactggccggcaacggctggggctcccccgccacgatgcccgacgacggcgacgacgagggcttcggtggcaagcggaagggcgccggcatccgggtgctcggcgacctgtggaagaggaaggggagcaagtgaaggcctgccgcctgccgcggaatgggacccgtgtcccaaatttcgcaacggtgagctcgctcagcccgcccgcttgccagcttgaacaactccatcccttgcactagcttagctccatcgttttaccgcgttttggttcggagtctacttatgtttgtatgatgatgatgacgatgatgagacgatgctcgtgaggttaaactatgtctgtaacgcttgatcccgctgctgcctgctacctccgcgtaaggagcaaccaagatggcttggtgcttttactgcattgcggcggtgctgttgacgagggagtagatggtgtttattttcatggtggaattgaggaatgcttgattgcagcatcaagaaatg

SEQ ID NO: 112863 - DNA, 2025 bp, Zea Mays
gttccgttcgaaccccgccgctcgccgcggctcgggcacccgcatttacgccggggcgggcggcatacaccaaccaaccaacgctagccccgagcaagagtaacgtttgtctagtggcaccgctcgccgctcgcctatggttggttccgcgtccgctggcttgcctctctctactagtgattttcgaatttgaatcgcgcactggtccggtcaggtccggtccatcgcgtcggctcctgggagtctgggactggcagccggtgcgtctcgcggtcgcaacctcgcctcgcggtcgcagcctcgccccgatttattaacaggcaaacaaatgtcccgtccgttccctcgagaaaaggccacttctgcctgtgtgcatcgcttgccagcttccgcctttccatgaccacgccgctcctgctgtgattctaggacgacgtgccgcccgggccggctgccttctcacgccgggagggttggggaacgagcgccgcagccgccgccgccaccacgaactcgcggaagaccatgccgagatccaggggcaacgagccgccgctgcggacgtcgcagcgcgcgccgctgcacctcaagacgacggcctgctccgaggcgaatggcgcgcaccaccgccccgtcgccgaccggagtagccccagggtctcgccgcgcagccctctgcccgagaagcgtgcggcgggaacacgtgttgcggagctggagggcaagctggggaaggtgcaggaggagctcaagaagctgcgggagcagctcgcgtccgccgaggccgccaagaaggacgcgcaggtcgcgctcgaggaggccaagaagcgcgtcggtaccaagggaagcccagcctccaccaccaccaccactcctctctcccccccttcgcctggggtcgaaatcgccaagaagaccgaggagctgaagctgcctcagccggcagccgaggaggagagcagcataaacgtcccggcgaccgatgtgtttgaggtcgtccgggccgagtcgggggacaaggagaaccagagcgcggctgaggtctgcgaggtcgttagctgcggcggcggtaaggcggcggtggacgtggccgagaatgaggagacggaggaagaggagactaagaaaatgatcggggaggacaacagcgcggcggtggaatctgacggcgccgacaaggagagcccggaggtcgtggagctgaaggcgaagctggcggagaaggacacggagatcgctgccctcacggcggaaaacgctgagctgaagaagcaggcagaggaggccgcggaggcggcgaagaaggccgaagaggggcccgcgtcgagggcggccaaggccgagcacgaactgaaggagggcgcagcgcgggaggcccgggtgggcgagcagctgcgggcgtcggaggccgcgcgggaggcgctggacggcgagctgcggcgcctgcgcgtgcagaccgagcagtggcgcaaggcggcagaggcggcggccgctgtgctcggcggggacaaccacctcaccggactggccggcaacggctggggctcccccgccacgatgcccgacgacggcgacgacgagggcttcggtggcaagcggaagggcgccggcatccgggtgctcggcgacctgtggaagaggaaggggagcaagtgaaggcctgccgcctgccgcggaatgggacccgtgtcccaaatttcgcaacggtgagctcgctcagcccgcccgcttgccagcttgaacaactccatcccttgcactagcttagctccatcgttttaccgcgttttggttcggagtctacttatgtttgtatgatgatgatgacgatgatgagacgatgctcgtgaggttaaactatgtctgtaacgcttgatcccgctgctgcctgctacctccgcgtaaggagcaaccaagatggcttggtgcttttactgcattgcggcggtgctgttgacgagggagtagatggtgtttattttcatggtggaattgaggaatgcttgattgcagcatcaagaaatg

SEQ ID NO: 112864 - DNA, 2029 bp, Zea Mays
ccccgagcaagagtaacgtttgtctagtggcaccgctcgccgctcgcctatggttggttccgcgtccgctggcttgcctctctctactagtgattttcgaatttgaatcgcgcactggtccggtcaggtccggtccatcgcgtcggctcctgggagtctgggactggcagccggtgcgtctcgcggtcgcaacctcgcctcgcggtcgcagcctcgccccgatttattaacaggacgacgtgccgcccgggccggctgccttctcacgccgggagggttggggaacgagcgccgcagccgccgccgccaccacgaactcgcggaagaccatgccgagatccaggggcaacgagccgccgctgcggacgtcgcagcgcgcgccgctgcacctcaagacgacggcctgctccgaggcgaatggcgcgcaccaccgccccgtcgccgaccggagtagccccagggtctcgccgcgcagccctctgcccgagaagaagcgtgcggcgggaacacgtgttgcggagctggagggcaagctggggaaggtgcaggaggagctcaagaagctgcgggagcagctcgcgtccgccgaggccgccaagaaggacgcgcaggtcgcgctcgaggaggccaagaagcgcgtcggtaccaagggaagcccagcctccaccaccaccaccactcctctctcccccccttcgcctggggtcgaaatcgccaagaagaccgaggagctgaagctgcctcagccggcagccgaggaggagagcagcataaacgtcccggcgaccgatgtgtttgaggtcgtccgggccgagtcgggggacaaggagaaccagagcgcggctgaggtctgcgaggtcgttagctgcggcggcggtaaggcggcggtggacgtggccgagaatgaggagacggaggaagaggagactaagaaaatgatcggggaggacaacagcgcggcggtggaatctgacggcgccgacaaggagagcccggaggtcgtggagctgaaggcgaagctggcggagaaggacacggagatcgctgccctcacggcggaaaacgctgagctgaagaagcaggcagaggaggccgcggaggcggcgaagaaggccgaagaggggcccgcgtcgagggcggccaaggccgagcacgaactgaaggagggcgcagcgcgggaggcccgggtgggcgagcagctgcgggcgtcggaggccgcgcgggaggcgctggacggcgagctgcggcgcctgcgcgtgcagaccgagcagtggcgcaaggcggcagaggcggcggccgctgtgctcggcggggacaaccacctcaccggactggccggcaacggctggggctcccccgccacgatgcccgacgacggcgacgacgagggcttcggtggcaagcggaagggcgccggcatccgggtgctcggcgacctgtggaagaggaaggggagcaagtgaaggcctgccgcctgccgcggaatgggacccgtgtcccaaatttcgcaacggtgagctcgctcagcccgcccgcttgccagcttgaacaactccatcccttgcactagcttagctccatcgttttaccgcgttttggttcggagtctacttatgtttgtatgatgatgatgacgatgatgagacgatgctcgtgaggttaaactatgtctgtaacgcttgatcccgctgctgcctgctacctccgcgtaaggagcaaccaagatggcttggtgcttttactgcattgcggcggtgctgttgacgagggagtagatggtgtttattttcatggtggaattgaggaatgcttgattgcagcatcaagaaatgcctcttgtgactctaacgaatcctaagatatcattgcagcgcgtaggatctccggtggcctttagagagagagagagaatcgctggaatcctaaagaggttcatcgtgatacttgctgattgtatggtggctgttcatgatacttccagcctatgaattatgattgcatccgatggatgcaaccagattttgatttg

SEQ ID NO: 112865 - DNA, 1810 bp, Zea Mays
ctcgagaaaaggccacttctgcctgtgtgcatcgcttgccagcttccgcctttccatgaccacgccgctcctgctgtgattctaggacgacgtgccgcccgggccggctgccttctcacgccgggagggttggggaacgagcgccgcagccgccgccgccaccacgaactcgcggaagaccatgccgagatccaggtgcgtgccgagctggccgagatgaatgccacctcctcagtggcggactggcggtgctgcgggtttcgtttctgacacatggtttgtgcgtttcaggggcaacgagccgccgctgcggacgtcgcagcgcgcgccgctgcacctcaagacgacggcctgctccgaggcgaatggcgcgcaccaccgccccgtcgccgaccggagtagccccagggtctcgccgcgcagccctctgcccgaggtaagtttcgttcctccccaccaccaccacacacacacaaaccgtttgttctcggtgctgtggttcacgggttcgccggtggcaatgcaacctgcagaagaagcgtgcggcgggaacacgtgttgcggagctggagggcaagctggggaaggtgcaggaggagctcaagaagctgcgggagcagctcgcgtccgccgaggccgccaagaaggacgcgcaggtcgcgctcgaggaggccaagaagcgcgtcggtaccaagggaagcccagcctccaccaccaccaccactcctctctcccccccttcgcctggggtcgaaatcgccaagaagaccgaggagctgaagctgcctcagccggcagccgaggaggagagcagcataaacgtcccggcgaccgatgtgtttgaggtcgtccgggccgagtcgggggacaaggagaaccagagcgcggctgaggtctgcgaggtcgttagctgcggcggcggtaaggcggcggtggacgtggccgagaatgaggagacggaggaagaggagactaagaaaatgatcggggaggacaacagcgcggcggtggaatctgacggcgccgacaaggagagcccggaggtcgtggagctgaaggcgaagctggcggagaaggacacggagatcgctgccctcacggcggaaaacgctgagctgaagaagcaggcagaggaggccgcggaggcggcgaagaaggccgaagaggggcccgcgtcgagggcggccaaggccgagcacgaactgaaggagggcgcagcgcgggaggcccgggtgggcgagcagctgcgggcgtcggaggccgcgcgggaggcgctggacggcgagctgcggcgcctgcgcgtgcagaccgagcagtggcgcaaggcggcagaggcggcggccgctgtgctcggcggggacaaccacctcaccggactggccggcaacggctggggctcccccgccacgatgcccgacgacggcgacgacgagggcttcggtggcaagcggaagggcgccggcatccgggtgctcggcgacctgtggaagaggaaggggagcaagtgaaggcctgccgcctgccgcggaatgggacccgtgtcccaaatttcgcaacggtgagctcgctcagcccgcccgcttgccagcttgaacaactccatcccttgcactagcttagctccatcgttttaccgcgttttggttcggagtctacttatgtttgtatgatgatgatgacgatgatgagacgatgctcgtgaggttaaactatgtctgtaacgcttgatcccgctgctgcctgctacctccgcgtaaggagcaaccaagatggcttggtgcttttactgcattgcggcggtgctgttgac

SEQ ID NO: 112866 - DNA, 1085 bp, Zea Mays
aacgagccagctcgagctcggtcgagccgaggggtcgatatccacccctagctgcctggtgcccacgataacccagagacctcgagaacggctggaagaaccgagagcgctccggaaatgtcggcgggtgagctgcggttggagctggacgagctgcggcggctggagagcctcgccaagcacccccgcgtccagatcctcctcgccaacgaaatccgcaacgttgaagcgaagttggcgaaggcaaccgaaccatcgcctgagccactggcggcggcttctgcgccagcgcccgcgcccgctgcgcgtcctgttttaagctacgtcactcttgggtcgttcagctgggagcaggacaacgagaagattaggatatatgtttcccttgagggagttgagcaagagaaggtggagactactttcaagccaacatcagtggatataaagtttcatgatgtcaaaggcaagaattaccggtgtgctataccaaagctgaacaaggaaattgttcctgagaaatgtaaggttgtggtgaaaccaaccagggttgttgttactcttttcaagggttctaaaggcaactggttagacttgcacttcaaggaagacaagttcaagccaaacatggacaaggaaaaagatccgatgtcaggaattatggacttaatgaagaacatgtacgaggagggcgacgaggatatgaagcgcacaatagccaaagcttggtctgatgccaggtctgggaagacgactgattcgatgagcggattacgttgagctggtataatcagttgatgggcttaagttttctgcgctagcccctgcagccgaagtgtttctgatggttcaaatagcgttgcagtgccttgttggtgttagtccttgtttatcttacatttgtgagtgaagttggacgtgccaaacatatttaaatatatcctcttgaacgggggaaagatcatatcaagtccaagaggttttgtgcttttgtggaattaccacggcgtttctgtttgctacgaaacgatggtagtaacagcttgagccttgccagaaatttcctgtttgtgacgctgtttttaaaa

SEQ ID NO: 112867 - DNA, 1155 bp, Zea Mays
atgtcgcagaggcgcgtgccgcactgcatggacgtggagatggcactgaggccagttcaagcccactttctggcacaccctgttatgctccttgtgttggttggccgcgcataccagcgtcacggggagttccaaggcctcgaactccgtcaccagctactccatggtcagcttggcggggcgtctcacgagagtcacgagccccaccaccactcgtgcgccatcagccacgacaccaaaggctctaagttgaaggggtgcttgcccgtgagccggacaagcgccgggtggcgccgcacccacgcgtcagatgtggcctcgccacgcgagtcgcagacggctggctccacctcgaggcacaggaggtacgatgatcgccagtctggcgggaatgttgtatttttccatggaatcaaaatcggggcgggtcacaactcacaaggcaaaaaggaacaagagcaggcggccaacccaatgccaacgcggtccagccaagtccaacccaccacacccaccacgtcgtcgacgccgacgcgtcgccaacggaaacttctcaaagcgccgacggggttccacggccgtaatttcaaccgtccccaccgccgcgggctcctcctgacggaccccgaaggtcgccttgactctcgcccctcgccggcgacgcccggcatgccgtcctcccgcctcgtccacctcatcctcctcgcgacgctctcgctcctcctcgcgcaaaccctagcctcctctgcccccgtgcccgccgccgggtcggcgtcggcggagtccggcgacccctgcgcggccaccgtagctgacggggaagctgacgttccgctgtgccccgtgcggtgcttccgcccagacccggtctgcggcgccgacggggtcacgtactggtgcggctgccccgaggcgacctgcgcgggcgcccgcgtggcgcgacgcggctactgcgaggtcggctcggggatgggggttgcagatccccggcatcacggacgcgcgcagcgtgggggagcaggggcgggggctggacagcagctattgtgcaggggtttgcggcgtgctgccgtgcggtgcgggaggccgttgctggacgggagcgggggcagtctacaaatggctcttaatagttgtagagatttgttttggtaa

SEQ ID NO: 112868 - DNA, 816 bp, Zea Mays
tttttttttagattttttatgatcttcgaataattctgacatctcatattacaagctagggcaaacaagccacacaataccatacaactgcatgtcaccaatgaagtaacacaagcaataccatgtaggttctcgtagctttttaacctaagctcatatcactcaacaaacttcaagcttactaccaaaactagtaagcctccaactaacagaagaagttatacatccatacttcccaagaccactggcaccgagagattcagatttcagaacaacaccatgccaacgacaccaacaatgccaagaaccagcccaatacttgccttcaacccagccgcggcgttcaatgcccatacccggacatcgtcaatcaccgggccacacagcgagctgtggtcgtcactcctcgtgttgtaatacacgctatagaacgccacacgtgttctctcagcgcgtgcagtgaacgtcacattcgcagcctggctggtggcgttgcccattggggagtagtggaagttctgggcctgatcccccgcgaatgccatgacggccattggtggttggcacgagtcccccgccgtgcccagtgtgaacgtcaggctgtaaaccttctgaggggtggtctcaaccatctgggagatgataccttccttgcctgacagaagctcaatggcacgctttccctggggaaccttgtactcatcagagtctatgtagcggacggcgcggtttgactcgatcatccaaccaggtatggcagacgtttgctcgtcaaggttagttgggagcagcacgccgaagctcgtgttggggaac

SEQ ID NO: 112869 - DNA, 3914 bp, Zea Mays
tcctcctccccaaattcctctcctcgtgtcctccctcgctaccacgcttgggtgaaatgccctcgccgcctctccctgtgctcgcccaaatcgtcgcctctccctccctgtcgcccctgcgccacggtgcttcacgccgttgaagtcacttcactcatcccgccgatgcagtcgcccacaccgcctcctcccctcctccgctcaagccgcaccgcgacagctacacgccgcgatgtcagctgccagcagcgcccccctcttaacaacgtcgcgacgtcctcgtgggctaaaccccctccatcacttcttcccgtcgagatgcacaacaccgcgagatccatccaccttctccagcacccccacccccgctcaaatggtgtcgcgatgtccgccaccaacagcgccccttcccccctctcaaacaacgtcgcgacgtctgcgagttctagtaccggctgacagcggctgcggcgaagctatctgagcggtagcggagtactaaggggtggagagagggagcactgtctcatgcatgaaataaagtctccaaaacaaaagatttggtccagagcgcggccacacgggcccaacaatagcaacgtcacatggtggttgccattgtcacgtcgagctctccctctccaccaactaacagttcctgacggtggagcagaaattcattaagagcatatagggattcacaagtgattttgagcccaacaatcttgctgccatcgatactcctggttcgtatatttggttactcaaaacatgagatgatcctctgaagtagaaagggaaacaccgaatatgctcttgctgaaatattctatagaaagacacaattccattttggcagatgcaagtgtatggttattctactcatggaagatctacagggaagaaattgaggtagcatataactgccgcaagggaaaatatggtgtagcagatgaggatataatcttatatggtcaatgtgtttgaattggtccaaccattgatatttcttcgcggttgctagacttgagagtcgcagttttgcatagtcctatattctatctgcactaagagtaatatatacagccaagcggacgtttggtttaacatttacaaggtatgtttggtccttttgttttttggaattaatggttgtccgatgcttgtcattcatatgagttctaatatcatgcccccttaaagtactcatcatcaaaagtttccatgtgaatgttttaaatgtagatttaaagggttgaaagacatcaaacagttattcaaacatgatcttaagtgtcgtgaaagactacaagtgaggttcaacttggcaaattgtttttctagtaactaaggagcaacaatgctatgtattttagcttgacttatatatctaagtacttacatttttggaatcgggcaaacagtgatagtttgaatcacatgttttgccaaaaggaattattagaactgttcaaaagttaggaaaaaatacatatttatgctttcttatgcacgggtaaattgctctgttcatatataaaaaaaataattgtagtattattgcttatattgattttaaatgatgaccttattagatgtgccatcgagaccacatatattagcattttgtaactaaatacaatgcatgaatatatatagatagcctttacatcgtgctacatgcttcctagaaataaggaaccattacaacatatatatttttgatgatgtacaacttcgtcatcggatataccgttccttcttttttacatacattttgataagaatgtcaaaatgttaaaaaaatagcgcgcgcatggcgcgcgttagacactagtagatttcagaactatcatgaagcgcgtgctcgctggttgttagttgttacagagcaacagcccagggaggccaagatgctacttagctactaaaaccaactgacaacaagtgcacagcccagtgggccgctaagctgcaagaaaaccctcgcccctcgttctggattgagattctctgcagaggctgcgatgttgggccgtcctgccctgcccggtgggtatatgtaagctcagaccgccaccggaaccttctcgagcccgcggccgcacacctccgcccgaagccgccagtcggactacgaacggcggcggcgcctcggctcccctgatctccctcaccggaatggacggccaggctccgccgcttctcgacgccgtcgtgctcgagccccttgcagttggcgacgagctccatccgcggcgtcctgtcgaggtggaggacgctccggccgccgctccgccctccggtatggacggccaggttccacctctctacaacgtcacgcgggatcctctgaccgtatccgacgagctgcagcccacgggcgaggtggtggatgacgccctactcgtcgcgcccgatatcgtcaagggcgaggtgatggaggacgacatcctacccgtcgcaaccgacatcatcaacgacgccgcctcggagtgccccgaggctggcagtgatggcgtcgtgctcaccgacgagctccgcaatcgcatcgtcaagcaggtggagtactatttcagcgatgagaaccttcctacggacgagttcctgctgaattatgtgaagaagaacaataagggctttggatgtgaattttatgattattatagtggtgtcagggacaatgtatttggtgttcctgttcttagtttttttagccgagactcaaattttacacaagcttatgcttttattgtgtgtgtttctgcattagatattggtgcatttcctattgagatcatcgcatcatttaggagaatgaagaaactcgttcaagacctctcagtaattgaagctgcactcaggacatcatcaaagctggttgtaagttcaaatgggaaacgggtcaggaggttacatccattgccacacaaagaattgaaagattcaaagaaaagcactgttttggtcgaaaatctacctccagatttctcaatggagagtattcaggaaaaattcgcaacagtgggcaaagttgtgaacataacaattaatgatccagaatcagtgaaagaattttcaactgctaagaagcctgacttcaatttaagttttaaggttactgccctaagtgatgagagcaactggagaactgggatgaaagtcaggcttctgtctaaacaaagtgtaatgggaccaggaaagtataaaaaaccttctaaagaaaatcaagatgcagtttccaaaatgattgatcagaatcaacattcaaaagaagaccagcttaaaaccttggaaaagatctccggtgctgatgcagtggggattaccaaggacagagataatttgaaacctgtttttatcactgagactgagcaccaagatcagaagccaaatgctagaggacgaaaaggatggtacaaaggtcaaggtcagatgcagcaaaatgcaaacaaacaaggcagttgtggttccgagtcattaaacaagcctatttctggaccgaggatgccagatggaacaaggggcttcacactgggacgtggtagatctcttccactacagaagtctgagaaggctgaagagtagagctaccaaaaaaggcctgttaagaaccttatccaaagaagctgggtaaaatctaacagaaaacctttgcttttttttttttgaaacttaagatcatcgaagccgttctttgcatggaatgggacacagaagaaagggaatcttggaatggctttctctctgcaagaaatggaacacaaaagggaatctgggaatgacttgtacagaaacacaattgtctgggggtagttccgagttcactcgtatggaacacagtagaacctttgcatgtttcctgacttgcattgtgtcatatactcgtatcatgctgcatgcagcattgcagc

SEQ ID NO: 112870 - DNA, 1475 bp, Zea Mays
acatgccctgccatgcatggtcagtgatctcctcctcctccttttcctctctctctctctctctttctctcactcccgcgcgtacctgttgggaaaaaaaagtacctactacagcttggctacagttttgataaactacacacacatggacagcagtcagcagcagcagaaacaagacgacgtcgacgtcgacgtaatggaggtcccggaggtccacggcgacctcctcatggagctcctggacgcgtccctcgccgccgagaacgctgcccaccaccaccaccaccaccaccaccaccaacagcttggtctagcgcccgacggcgacggcgacggcgactgttggatcgacgacaaccaagagaactacgacaatatgcacgcgcaccagggctgcgaggactgccgcggcctcctcgacggcatactgtccgacttcgacgactacgacgggggcccatcacggccgaggtccccgccggcgccgtaccgcgtcgtcttcggccacgacgacgacaccctgctggagctggagtgggcggaggaggccgccatggacccgttcgccaccagcgagtccgcggggggctggtacatggacggcctggtcatggccatggcgtgggacgagcagcaggacggcggcggcttcccgttcgagccctgctacggatacgaaggggaggcgggcgccgccgggcagctctatgatgccagcccgctgtgggagtgagagtgaagtagtgtacccggttacgtcgtcgatcacacgtgtccgcgtcgtctgggccgtgccgcgctgccgcgccggcctaactactcctccgtactttacttttgcgccgcttttgcaaatttttttgaggatatgaatttgctgaagagaactggacttgtgtgcctcttgtgctcattagtgttgtgtggctcagattatcagaagcattctagtttttgttctttgttttattttttttgtttgaaagctttgtgctaaatgaagtgcattgtctacattcaggtttgctttactgcctgcaggatgcgttcggatggtttatgctctcgaatcaaaaacagaggtcgtggagaatgtactgcatatacgagcactgttgttccgtgtttcaggcggagaacagctaaaaaccgggcatacagagagcctgcaagaataacagtgaccctcttggccttggagcatgcggagaatagcttgaccccggtcactggaaactgcgccgtctgcccccaccgcgcgaatcattgtacgtcgtcgtcctgattccgtcgacaggaacaggcgggtgatcgcgggtgaatgttgtttctgctcttgatgacatgggtgccgctcgctctctgccgtgcgtgaggggaagctgcgacataagcctagttattacattgtacatgttctgaataaacatcttaaaagattggagtcctaatataatatacggccatttctcttt

SEQ ID NO: 112871 - DNA, 1531 bp, Zea Mays
tgcatggtcagtgatctcctcctcctccttttcctctctctctctctctctttctctcactcccgcgcgtacctgttgggaaaaaaaagtacctactacagcttggctacagttttgataaactacacacacatggacagcagtcagcagcagcagaaacaagacgacgtcgacgtcgacgtaatggaggtcccggaggtccacggcgacctcctcatggagctcctggacgcgtccctcgccgccgagaacgctgcccaccaccaccaccaccaccaccaccaccaacagcttggtctagcgcccgacggcgacggcgacggcgactgttggatcgacgacaaccaagagaactacgacaatatgcacgcgcaccagggctgcgaggactgccgcggcctcctcgacggcatactgtccgacttcgacgactacgacgggggcccatcacggccgaggtccccgccggcgccgtaccgcgtcgtcttcggccacgacgacgacaccctgctggagctggagtgggcggaggaggccgccatggacccgttcgccaccagcgagtccgcggggggctggtacatggacggcctggtcatggccatggcgtgggacgagcagcaggacggcggcggcttcccgttcgagccctgctacggatacgaaggggaggcgggcgccgccgggcagctctatgatgccagcccgctgtgggagtgagagtgaagtagtgtacccggttacgtcgtcgatcacacgtgtccgcgtcgtctgggccgtgccgcgctgccgcgccggcctaactactcctccgtactttacttttgcgccgcttttgcaaatttttttgaggatatgaatttgctgaagagaactggacttgtgtgcctcttgtgctcattagtgttgtgtggctcagattatcagaagcattctagtttttgttctttgttttattttttttgtttgaaagctttgtgctaaatgaagtgcattgtctacattcaggtttgctttactgcctgcaggatgcgttcggatggtttatgctctcgaatcaaaaacagaggtcgtggagaatgtactgcatatacggtatcgccagtcttttttagacattttagttgcgccttggtacagttgtacatgtgcgttgagcttcaaaattctggtttccattattgcagagcactgttgttccgtgtttcaggcggagaacagctaaaaaccgggcatacagagagcctgcaagaataacagtgaccctcttggccttggagcatgcggagaatagcttgaccccggtcactggaaactgcgccgtctgcccccaccgcgcgaatcattgtacgtcgtcgtcctgattccgtcgacaggaacaggcgggtgatcgcgggtgaatgttgtttctgctcttgatgacatgggtgccgctcgctctctgccgtgcgtgaggggaagctgcgacataagcctagttattacattgtacatgttctgaataaacatcttaaaagattggagtcctaat

SEQ ID NO: 112872 - DNA, 2031 bp, Zea Mays
ggagtggcgccccttccttcccacgtcccactcggccattcccccacccaatctcttgttcaaatcaatcaactgcctctctcactcgcctctaacctctttgcgcaaaaaaccccactccggcagctcaaaaccccaatcttccccggcctccccacccaaccctagcaccagaacacccgatgcggcatctgaagcgcggccgtggcggctttgaccccggcgacgcggtggttctcgacgtcgtggggctaggggagttcgcgcggttgtccctccctgagcccccgcccgacgagcttgggctatccgccgcctacgacgacgcttcaggccgcattatggtttctatctgcggtgacgctgtctctgcctcccccgccgacctcgcggtcgccctcgggctgccgctgggcccggtcggcctcctcgcgggatgggatgcggctgtgttctccacggcggaggcgatcggagccgtgagaaggtttgtctgcgatcgcgtgctgctgggatggggagagagcggctttacggtgtcgatggaggtcgctgccgcgttaaggttggtagaggaaggcaaggcgtacgaggtcgactgggctggcttgatttgggcaacggtgaagagggaggtagtagctggcacgacacggcgatacgcaccgtacctcctccatctgatggtgcgccaaaggccggagcgtttcgttgagggtaatgggagcttggcgcttgagaaggggttgaaaggtcaggtattgcagcaatgccagttggaggacgaagaagaaacctctttggttttttggggcacccaaaactttggtgacttagaggaaatgccaatttttggcagccaaaacataagttttttccctcaaccgcaggaggtggggggcaattgcagttaccaaactatttcacgtttccaagccctcatgcaacggatccaaggttatgtgtctgacatggagagtaaatacctggataaggaaaagacttgcagggacactcaacatgaggtggagtgcattaagaatatggtgatggaaaaggatcaacaaattgaagctactgtcaatgctatacgacaggaacttttagaaaggagtgttgtaatgcgaacattggaagcagacaaggatcaattgagccgcagtgttcaacaatacgataagttactcaagaagtctttagctaaatttcaggagtatatgaatatggtaacacgtggggaaggtgttgactcgtatttggagaatcttggtttaactggtgggcagaatctcacttgggtgtgccaaatgcgttatcagtgccagatgactaggattcaggaaacatgcgattcaaattctttgaagcttctcgagaatattacagaaatggacaggagcattgcaagcctcaatcgtgaagtggaagggctaaagaattgtagatcaattccagacctcaacaatggtgtggaagacgatggtgagggcaaagcatccctagccatgacattgggtgcatcttggacaggtgaaggagatcatgttagcaacaccacacaaggaggaaaacagcttgttggtttggtaggaaagcctgataaaaggaacgacatcagggagagcatggatctcgatggagttcggtcaggggcgaagctccgcaaatgaagcatgccatgacggtgcagcctcgcagggcccaagatatttggttaatggttgatcttgtgccagtatcatgcaaaagtgctgataaggctgcaccagtgttttgtcatgtggacctaacgtagtggtattattatacaaggttatcctaacttagtagcgtgtgtaaccagtggcagtgatggtgctatggttggacatgaataagaagtttctgcaacatgctatctacctctctttagctctgtttagtattgacaagcaatgcgtcctaggcacctggcattgccatctatattggtgaaatatactttatcatatgagtggaagcaggaatgcactagctttgttcttttggctt

SEQ ID NO: 112873 - DNA, 91 bp, Zea Mays
tgatggtgctatggttggacatgaataagaagtttctgcaacatgctatctatattggtgaaatatactttatcatatgagtggaagcagg

SEQ ID NO: 112874 - DNA, 259 bp, Zea Mays
atctgcaatctccttatctcccttccagttccagaacacaagtctccagcctacatgctccgggatcctgctttcgtgtgcgccagccagctagctagctagcttctctgttgatgcgccacctgtggtggtgagtgttagtacatttgtgcagtccacctctcgtttcagataaactctggttgctagttgttcagcgtaacaagctattgtgccgtctttaacatgttgcttttaactttaagaaaaaaaaaagaga

SEQ ID NO: 112875 - DNA, 354 bp, Zea Mays
atggctgaaaaaatcaacagggcgacgggattctcttccacgagcttgagcggtgcagggataagccccacggcagcggataggatcacggggaagagagaacgcctgaaaacagcggcgcagaggagctgctctgccgggagatgcgcgctgtcggtgaagaagacgagggagagagataacgtcgagaggaaaaaaaatctccacgccgcaggagagctccagggcgtgcggcgctggaagataaggctgctgctgggcggccaaaatatcccaggacaggaagcgctgcgcagaaaaatcaacgctacgcgcagcaaaaaagaaccagcgagagagagagtgacgaggtga

SEQ ID NO: 112876 - DNA, 2777 bp, Zea Mays
tttctaacgtattaccccctttttccttgaatgtggtctgagtttgttgacagtatggacgaatcacgaaaaagagctgtctctactgcaaatggtaaaaatataagttcatcccttgatgaagactttggaaatgacttcctttcatcttggaagttaccaaaatcaggaaaagacacgattgacttcagtgttgactcagttcccaagagtagcaagaaattcagctttgacaacctagatgattttgggcttaatggagcctttgacaaattaccgtcctttcaaatgggcatgtctgatctggatttttctagccctgacaagaaaaaagtgaagcacaccagttcaaatgcagatctttttgaaaagaaaaaggaaactgacaaggacaatttctccttttcttttgatttcaatgagttgggaaagtttagtcttgatggaaagctaggaattgaagaaaagagtactaatagatttaatggcaaatctgaccctgtctcctcagaggttaaaaaggatacacaaagaggccttttagccaagggcaatgctatccttgaagagaataatagtaaggataaaatgcatacacttgatactcgcacttcaagaccttctcatctgacgaatcatgagaatgtgaagaatgccagtcaaccaacttcaaatatcgatgttgctgattcatctgacaagatgcaagaacataccagtgtcaatcctgcaacaatggaacaaactaaagtagactcagtgctcaatgacaatcctggagagcatcctaaagagatatatgcaatgaaggcagctgttaacataccttctcaggatttctcctgcggtgccatatctagtgaagatccaacacaagggccagcagatcatgtgaacagtaaagatgcacctatagtgaactgtggtaaagttcatgtatcgagggagagtaatgatgatgagcagtcgaatggtttacaatccagggacaccagcattattaattccaatgtgtcaagaagaccgtcgggccaatttaactcccagaatgaggttcttgaggaaagtgtttcgcttaatgaaggaagtcaagacaaccaaagttttagtggcgctcctaagaagtttttaaagaagacatcacatgggacaacaaataccgaggaagagatttcaggtcccaagattctctcttgttcagtgcagagggaaatcagaagtgttgaacctgcaccgatgaaggagagaggaagcttctctcttttatccaagtctgtacatatgaaagcaaccagggttgaactaacttcagaaacagccttaaatcaatcatccagtgcaagtaaagtgataaaaaagatgactacacatcctacagacttgaagagggaacacatgcaagctaatgcagtccctcacaaatctaaaactgctttatcaaaaacatacagcaagctagcatcaaatgggctattggccacctccatgaatgccaaagttgacacgaatgccaaattaggccttgagcctcctatctcggggaagtcgtctctactgaatgctcgaagcagcacaccacatagcgctggacataaagttgttgcaagtcatgtgcttctaaaagctagcaatacttctgattcattgcaaggtgttccttccaaagataataaatcgtcaacaatttctcaactgacaggagcaagaatcacaaaattaggaatcagaagtctgaaatctgacatggccctagagaaagaatcagtacaagtgagtgggacaaagtgttccccggtaacaacatccagaatccttgactccattcctgaaggaaaacctgcattgcctagcccatccataatgcagaaagttcctgaggaatcagctctaaatccaaaagctcctaaagtgctcaaacacatcatgagatctccagctgtaagaaaatcacctagaactgttccggagttgggaaatgaaatgattctgggaagtggaactccaaaagctcatgtggataatgcaatctcctcacgtatgccacctgggatgggagccatttcagatctagagttgcctgtgttagaaaatgatggaaacatagaaaaagctgaggcttgtagaaaggagcttgaggatatatgcattctattgaaaaggaaacatgcagaagctaaagagctagcagttcgggctatcgttaacaacaatacgatgctgatgttaaaccacccgatgattgaggagaaaatttactctattcagaaatttgcgaacgacctgaaatccaagaagtacttatttgaggaagttggcaccattaactctcactgacgtgggacaaatgcagggagcaaatgacttatccagcggagcatgggtaatgtaaatgcaacaaaagagctcaggcgtccagcgtaaatgcaatcttgaagtaacttgaataactaccttcctcgtgcattctgctacatggttggcttctgtagatgcgtccgtttacactttacacagcgtagcaactgttgagtgacctaatacttctagtagtgagatatgaccttgtggactaaatgactagatgggcactgctgtactaggtaatacctggttccatctattccaattgcagttggtgacaaaacgttcacattggatttatgataggtagaagttgcaagagcacagtgtagacaaccatggtggttgatgactaggccgccctttctaccctgagtttgacgtatgcggtcaaaagctatagtaatttttgttgc

SEQ ID NO: 112877 - DNA, 828 bp, Zea Mays
gtaatagtccgtgaaagctatcccataaccttgcactaatgtaaatgcgggtttaacactagtgagtggaaagccattcaagctacaatggtgcatgaccactcgttgtccaggtcgtctcgactaaatgctctccacgaaatgcccatacgtctttatttggtttgccatcagtaacagtaatggtgtggggcatattgctgtgattgtgatggtctgtgtaatgcagtaatggaaacttgcatcttgtaggtgacttcgtatgatcttgtatagtttcacatgacaaaactagcgttgtgggttcccatatgggatatgaagaggaaccgagacaagtcttagatgttgcttcgaatctaggacctttgtcttagttgaaaggcttcacaccactgcgctagatctattcttctaatacttatagtttttttttttaaaaaaacacattctatatgttggaggccttctatgtcgaagatcactcgtttaaccttttacttcggtacaaactagtgtgtttcaggaatatctctactgatggacgaagcgaaccttcggacgaaaaggcgtgtagagaagcttcgcacatgcgtgcgagtgaaagggtgttagctaaagttgatagcttcggcgacaatagagaggcttcgggtgcaagccaaaggaaaaggcgacgaaggccttaacccgcgcagccgaagatggagaaaatacgctactgccctaatgacgtctgtaaacattgaatggcacaattgtaatcctgtactaggtcggttcgtctcggttcgtctctcctataaatagatggacagtacctcgtat

SEQ ID NO: 112878 - DNA, 2017 bp, Zea Mays
ccgcttgctcgagctcgacgggatgccgcgtccaagcccgccgctctccgagtccctcttcaactccctcatcgcctcccgctcccgcaccggtcgcgttgtcgacgccctctcgctcctcacgcgcatgcttgctgccggcgtcgccccgaccgcgttcaccttctcaccgatcctcgcctcgccttccgccaccgcctgctgtgccgcgcagctgcacccgcacattctcaagaggggcctgctccactgcgagccctactcggggacctcgctagtggggttcttcgggcgaagcgggcgcttcgacgaggcgctcaaggtgttcggtgaaatgaccgtaaggagcgttgtcacctggaattgtctcatctattcgtttgtgcagtttggacacagccgcgctgcagtgtcctggttcagggagctcgtgagaagtggcgatggcttgtcagatggctcgtttgttgccatattgccttcgtttgggttgccagagcaagttcatggtgtaatgaacaaaattggaatgggttccctctcagcagttgcaaatgcattgctgaattcatactgtacttgtggtgcaatagatgtggcagagaagctattcaatgagataatgtttagagatgtggtttgttggaatacaatgataactggttttgcaaggagtcatgtcccagagagagcttttgagcttttcttgagtatgcaacgtcagggcatttttccaaatgaaattacatttgccagtgttctgtatgcttgcaccgttatagatggacacaaacatgggagatttgttcatgcgaaaattatcaagcacaatctcagcacaagtgtgtccgtgaacacttcattggttggtttctatgcaaattgtagtaggggtgatgctcataaagtgcttgaaggggttcatggaaatagcaccacgtgttggaatgctctgatttctggtcactctgattgtgatgatccaacttatttggttattgtgagacacatgctgcaatcagggattaaaccaaatgaagttactttgtcatctctcaaggatccatcactattggatctccagcaggttcactcattggtcataagattgggtcatggtggtaatgactatgtttcaagtgctatcatatcatcgtatgcttcacatggcattatttttgatgccttatcttatggagctgcactggatccagactcatgtagtgtttctatgaatgttttagctggtgtctgtaacaaagctcacatgtaccaagaaactaaggacctacttctacataagcgagatcgagatactatttcatggagcatactcattactgcttgcgcacggaatggtgatttcattgaagcttttggatttttcaggcagatgaggatctttgggcaccgttttgatagttatgtatgtgtgagcttgctgggcatttgtaccaaaaacaatagcctttatcttggtaagttgattcatggacttttcatcaagaccaattccagttgctctgacagttatgttgataatatgttgctagatatgtatgctaaatgtggtagaattgaagactgtctcagagtctttgaggaaatggaagacaggaaccttatatcatggacaactgtgatttcaggacttggacttaatggtttttctcgtaaggccttggcattgtttaaagccatggaaaaggatggctgcaaacctgacaaagtagcaattctagcagtcctgtcatcttgtagacatggtaggcttgtgcaggaggggatgaagatattcaaaaatttgaaagctgattattcaattgaagctgatatggagcattacatttgtgtggtggacatgctatgcaagtgtggttatttgaaggaagctgaggtcgtgattagaggcatgcctttccaaccaagcactgccatatgtcgcacattcctccaaggatgcaagacatatggtgttacagaggcacaagtttttagccagccgtggatcaaatag

SEQ ID NO: 112879 - DNA, 431 bp, Zea Mays
caaagacgataaagcacaagtctagtacagacacacctactgacaccctgaggtacctggggcttttgacgaagcatgcacattggcaagtcaatcgagcaataacggtcactaggacacaggtcctgtttggaacggctgaaactattatgaaaaagctggcttgcgtctggctgtcctgaaaaactgttatctggagaagcacctgtctgaacgagctaggtatttaacagtctgattttttgatgggttgaagagatgctaaagatgtgtatcgaagccgaagccggagcctccttcacccgagccggagctgcaaatcgtggtcccgcctcatatatggaaaagaactctggcttctccaagtaaacaaaagcacttctccttgactccttgcatggtcgttcggtgtggctcctccggctttgccg

SEQ ID NO: 112880 - DNA, 261 bp, Zea Mays
atggcggcccgcgtcggcattgttgtgctctgcagcctgctgctgctgctgatcgtcggcgcggcaacggcggccgaagctcgcgtcgtgccgccaggctatgctgccccggacatcgacgtggccagggcggcgggcaccggcggtggcagacggggcggcattccaagagggagcaggtggaatgtgcagagcgtgcaaggcgactccgcccgcaagcgggaggtgccgggtggcccggacccccagcaccatggctag

SEQ ID NO: 112881 - DNA, 6115 bp, Zea Mays
aattattgtaaaatacttttaatattcaaaaacctaattgaacagtcagacgagtgtgcggcaaaagctgaagcaaacaaacgcaaacggctcatcccattcccatcacatgattcccaactcagcgccgcatcgcgtcaccgcaatctcgcagtcatccccccaaattcccatgtactgctcttgctcctgataatggcttgatttctcagtccgcactcgtcactgaggctgggcgctgacgccttccccgtttttgcagctccgcgaccgctagccgtgaggatgagcctcctccgcaaccgccgcgccgccgccgccgcggctgcagcggcggcggcggcgggaggaggggggtacccggagccgccggcttacaacatcatcccgatccacgacgtggtgatgcacggggagcacccgtcgctgcggttcccggaggtgcgcgcggccgtggaggcgctggcgcacgcggcggacctgccgccgcctccgctagcccgcgcctgggacgccttccgtgccgacctcttcgactggctcggcgccaccttcggcttccagctcgacaacgtccgcaaccagcgggagcacctcgtgctcctcctcgccaacgcgcagctccgcgcaggcggcaccctccccaccgaccaccccgccgacgtgctgcaccactccatcgcgcgggacatccggaggaagctcctcaagaactacaagacctggtgctcctacctcggcaagaggccgcacgtccatgtgcccagcggcggacgccgtgtcgctcagggggtcggccctgacacacgccgcgacctactgtacaccgccctctacctcctcatctggggcgaggcggccaatttgaggttcatgccggagtgcctctgctacatcttccactacatggcactcgatctcaaccatgtcatcgaccagtcgattgatatcgagactgggcgaccatcagttcctgcggtgcacggtgtggatgctttccttgacaaggttgtgaagccgatatatgacgtgctcgaggctgaggtgaagttcagccggaatgggaccaagccacactcggcctggaggaactatgatgatgtgaatgagtacttctggagccgcagagttttcaggcggctccagtggcccctgtcaccagcgaggagcttctttataaagccaggaaaccccgggcgtattggcaagactggttttgttgagcagaggtcgttctggaatgtgtaccgcagctttgatcgggtatgggtgatgctcattctgttctttcaagcagcaatgatcgttgcatgggatggccacactccgtggtttagcctacgctaccgtgacatccagatccgggtgctgtctgtgttcatcacctgggctgcgctgcgcattgtgcaggcagtgcttgatgcaggcacacaatacagcctcgtgaggacggatactatatttctcgcagtacggatggtgctcaaggtgcttgttgctgttgggtggactatcacattcattgtgctctatgttcgaatgtggaatcagaggtggcatgaccgcaggtggtctttttctgccaattccagggtgttaaactaccttgaggcagctgctgtgtttctcatcccacaggtgcttgcacttgtgctcttcatcgtcccatggattcggaattttctggagaaaaccaattggcgaattctatatgtgctcacctggtggttccagacccgtacatttgttggacgtggtgtgagggagggccttattgataacattaagtataccacattctgggtgtgccttctcactgctaaatttagctttagttactttctccagattaggccgatggtgaagccaacaaagactattctcagcctccatgacattcggcgtaactggtttgagttcatgcctcacacagagcgaattgctgtaatctttctgtgggctccagttgttcttatttatctcatggatattcagatatggtatgcgatcttctcatcacttactggggcacttatcgggctgttctcacatctgggggagattcgcagtgttgagcaactgcgcttgagattccagttctttgcaagtgcaatgcagttcaatttgatgccagaggaacacctggatgctgtgcacggtggcctccgaagcaagctgtatgatgctatcaatcggctgaagctgagatatggctttggtcggccgtataggaagattgaagctaacgaggtggaagctaagaggtttgcgctgatatggaatgagattattcagacatttagagaagaggacatcattagtgacaatgaagttgagcttcttgagctaccaccagttgtgtggaaaattcgtgtggtgcggtggccatgcttcctgctaaataatgagctgcttcttgctcttagtcaggcaaaagagctagtagctgatgacaggacacactggtcaaggatacgtaacaatgagtacaggcgttgtgctgtcattgaagcttatgacagcatacgtcacttactgctggagatcattgaggatggaactgttgagcacataattttcagtcagctgttctttgcatttgatgctgcaatggagaatgggaaattttgcgaagaatataaaatagaactgttgcctgaaatccattcatctgtaatcgccttagtggaacttctactgaaagagaagaaggatcagaccaagatagtaaataccttgcagactctttatgtctttgcaattcatgattttccaaagaacaaaaaggatatggaacaactgaggcgagagaggctagcaccatcaacactagaggattcccgtctcctctttgaggatgtcataaaatgcccaggcaatgatgatgttagcttctacaaacaggtgaggcgcctccatacaattctcacctccagggattctatgaacaatgtcccaaagaatcctgaggctcgacggcggataactttcttcagcaactctctattcatgaatatgcctcgcgctccaacagttgagaagatgatggcattcagtgttttaaccccatactacaatgaagatgtgatgtacaacaaggaccaacttcgccgtgagaatgaagatggtgtctcaattttgttttatcttcaaaagatatatgaagatgattggggaaactttttagaacgtatgcagagggatggaatgactgatgacagtgaaatttgggctgggaaatatcaggaactccgactctgggcctcgtatagaggacagaccttagcacggactgttaggggaatgatgtactaccacagagctctcaagatgcttgcttttcttgataccgcctccgaggtagacatcacagagggtactaaacatcttgcatcctttggttcagttaggcatgagaatgatgtgtatcccatgaatggtggtttccggcggcaaccacaaaggaggttagacagaggaaccagtactgtaagccaactgtttaaaggtcaggaagatggtgctgctctcatgaagtacacctacgttgtcacttgccagatatatggaaagcagaaaattgctaaagatcaacgcgcagaagatattttaactctaatgaagaaaaatgaggcacttcgtgttgcttatgttgacgaggtccatcaacgaggctatactgaatactattctgtcctggtaaagtttgaccagagcttacagagggaggttgagatataccggattaggttaccaggtgaactgaagcttggggaaggaaaacctgaaaaccagaaccatgccatcatattcacaagaggtgatgcagttcagacgattgacatgaaccaggataatttttttgaagaggccctcaaaatgcgtaacctgttagagcagtacaactattatcatgggagcagaaaaccaacacttctgggagttagggaacatgttttcactggatcggtctcttcgcttgcttggttcatgtctgcacaggagacaagctttgttacccttggtcagcgagtcctagctaatccgttgaaggttcggatgcattatgggcatcctgatgtatttgatcgcctctggtttttgactcggggtggtttaagtaaggcatcaagagtgatcaatatcagtgaggacatctttgctggtttcaactgtaccttacgtggtggcaatgttagtcaccatgagtatattcaggttggtaagggccgtgatgttggcctcaatcagatatcaatgtttgaagcaaaggtttctagtggcaacggtgagcagacccttagtagggatgtctacaggcttggtcatagactggatttctttcggatgctctctgtgttttatacaacagtagggttctacttcaacacaatgctggtggtcttgacagtttatacatttgtttggggacgcctgtatctagctctcagtggtcttgaggctggtatccagggcagtgctaattcaaccaacaacaaagccttgggtactgttcttaatcagcagttcatcatacagcttggcttcttcactgcattgccaatgattatagagaactctcttgaacaaggtttcctacctgctatctgggatttcttcacaatgcaaatgaatttttcatctgtgttctacacattttccatgggaactaagagccattactatggccggacaatccttcatggtggtgcaaaataccgtgctactggccgtggttttgttgtgcagcacaagagttttgctgaaaattacaggctgtatgctaggagccacttcataaaggcaatagagcttggaataatattgactgtgtatgctgcacacagtgttattgccaagaatacacttgtttacataattatgaatatatctagctggtttctggtggtatcatggattatggctccatttgcttttaatccgtctggttttgattggttgaaaacagtgtacgattttgatgatttcatgaactggatatggtatcctggtggtctcttttctaagcctgagcagagctgggaagtgtggtggtatgaagagcaagatcatctacggaccactggtctttggggaaagattttggagatactgttagatctcaggtacttctttttccagtatggggttgtataccagctgaagatagcaaacaatagcagaagtattgctgtctatctgctttcctggatatgtgtggctgtgatttttggtctgttcgtgctaatgtcctatgctcgagacaagtatgccgcaaagcagcacctttactaccgggttgttcaaactgctgtcatcactcttgtagtgctagtgctggttttgtttctgaagttcacggaatttcaaatcattgacatcttcactagtcttttggcatttattcctactggttggggcttgatttcgatcgctcaagtaattcggccattcatcgaatccactgtggtctgggacagtattatttctgtggctcgtttgtatgagatactgcttggagtgttcattatggcaccagttgcattgctgtcctggttgccgggatttcaagaaatgcagacaagggtacttttcaatgaaggtttcagcaggggcctccagatatcccgtattcttactgggaaaagaacaaatacagtttgaggttctgacccagattgttgcggcggtgaaggtgaagcagcggtgctctatctcctatgtacagcttagcaattcagtgtggaagggctttgtgcttactgatatagcttagatccatattgaactcttccagtagcttttatagctatctagtttaggagtccagatttgtgattttggcgatttaggtgttcagttcttttgtacattggttgagctagttgtgtgtagctgattctattgcagcaccaccggtgagctctagtgacctatttgttgacctctgctggaagttgcatcttttgtgctagcaactgtgtcgtgactcgtgagtgctattgctctgctgaaggtataaaagttgctggaaaggatgttcctggatgtgaccgatcagatgagcgatccattttttttagtatttcactgaaggtaccgcttccaaatttat

SEQ ID NO: 112882 - DNA, 1183 bp, Zea Mays
atgaatagtaggtggatatatagtgacatttttatctgcaatacagtttacattgtacacacacagtcacacacacaccttattcactcattgcttgtgtcaccagtggtgcgcgtagacgtccgcgaaaccaggcaggcagctggttctgcccacgattaagttacaagtactcaatcgcatcgacccatgggagattactcggagatggagcacacgatagtaaccacgctagcaacacacgacgacgactgagtgtatctctgacgcatgacacacgatgcaagctcatggagtgtatcgtcgtccgttttggcctgcttcctcctggaaggcgccgttcgtgttctgatccatggctccgtccccgaactcctcgtcgttgccgtaccgctgctggtaacccgccgcgtcgccgtagctactgccgcgcctgccaccggcggggccgcggggtcggccgtacccggagccgaactctccctcgtcggggcgcgtccgcatggggttcgactcgcggccgtagccgtacctgccggcgtccacgtcgtagtagtagcggccgttctggtacagcctcgtgtcgctcatcccgaagtcccgctgctcctgctcctgctgcctgccgcggtggaaggccgtgtagtaccacggcgggcggcccctgccgctgccgttttccgggtacggccggacgccctcgaggtctcctccggcgcctcccccctcttcctcggtggcgcccggcacgtcggtgggcggccgacccctgccgctgtcttcggggaacgtcgtccggacgcgctcgccgccggtcgtcgtcgtcagcttctcggtgttgcggtgcacgccacggcggaagtagtccgccgggtacttctcctcgaggcggccgtagagcccgtacccgcggccgccgctgccggcggtcgaggggcgcgagaacgccggcgcggcaacggtgtccccgccggcggccttcttgtcgggctcagcagtggcttcggcacgcgtggtcttgctgaagaagaagcggccaccgccccacgcgtccgccgagcgaggcgccgcgacggccaccaaggcggcgagaaagaagaggtggcgagcacgagcagaggaacccatcgggtccgaaaccgtcggtggtgtgtttttctagcgagccacggtccggcactgc

SEQ ID NO: 112883 - DNA, 920 bp, Zea Mays
cacacagtcacacacacaccttattcactcattgcttgtgtcaccagtggtgcgcgtagacgtccgcgaaaccaggcaggcagctggttctgcccacgattaagttacaagtactcaatcgcatcgacccatgggagattactcggagatggagcacacgatagtaaccacgctagcaacacacgacgacgactgagtgtatctctgacgcatgacacacgatgcaagctcatggagtgtatcgtcgtccgttttggcctgcttcctcctggaaggcgccgttcgtgttctgatccatggctccgtccccgaactcctcgtcgttgccgtaccgctgctggtaacccgccgcgtcgccgtagctactgccgcgcctgccaccggcggggccgcggggtcggccgtacccggagccgaactctccctcgtcggggcgcgtccgcatggggttcgactcgcggccgtagccgtacctgccggcgtccacgtcgtagtagtagcggccgttctggtacagcctcgtgtcgctcatcccgaagtcccgctgctcctgctcctgctgcctgccgcggtggaaggccgtgtagtaccacggcgggcggcccctgccgctgccgttttccgggtacggccggacgccctcgaggtctcctccggcgcctcccccctcttcctcggtggcgcccggcacgtcggtgggcggccgacccctgccgctgtcttcggggaacgtcgtccggacgcgctcgccgccggtcgtcgtcgtcagcttctcggtgttgcggtgcacgccacggcggaagtagtccgccgggtacttctcctcgaggcggcgagaaagaagaggtggcgagcacgagcagaggaacccatcgggtccgaaaccgtcggtggtgtgtttttctagcgagccacggtcc

SEQ ID NO: 112884 - DNA, 3006 bp, Zea Mays
agcagcagctcacgaaacaggagcgtcataaagacatggtcgtcgcaggatagcctcagacccagcgacgcagcggcagcgacccaggaagcaacagcgaccggcatcgatcgcggcagccgaggcggggggacgggaggagggagggagcggtcgccgcaggagcagagcggcacggcatggggtcctgagtgactgactgactgacgactgagtgtctgactgagaaggagatggctggagcgcgacggccccggagccattaatggggcgctcatcctcctcgtcctcccactcctcgcctcccccccgccaggtcgcggtcggctccgctttttaaccggcttgtcctggagcggggcgaacggcgaacctcacgggcgccggaacacgaaccggaaccctagtggtggtggtggtggcgcgccccatgggcatcgacctcaacatggcggacggcgagagccaggagcgccgcccgccgccggcggtgtgccgggagctgtggcacgcgtgcgcggggcccgtggttgcgctaccgcggcggggcagcctggtcgtgtacctgccgcaaggccacctagccgcggccggcggcggcaacgtcgctgtggacctgccgccgcacgtggcgtgccgcgtcgcggatgtcgagttatgcgcggatgcggcgacggacgaggtgtacgcgcggctggcgctggtcgcggagggcgaggcatttgggagaaatctgcgtggtggtggagtcgatggggacgatgacatggaggattttgatgttgaaaggaagtcccggatgttgcacatgttctgcaaaacgcttacagcctctgacacaagcacacatggagggttctctgttcctcgtcgtgctgctgaggactgtttcccgcctctggattataatcagctcaggccttctcaagagctggttgccaaggatttgcatggagccaagtggaaatttcgtcatatatataggggtcagcctcgtaggcatctcttgactactggatggagttcatttgtcaataaaaagaaactggtttctggggatgcggtcttatttctccgaggtgatgatggtgaactaaggctgggcgtacggagggccattcagcttaaaaatgaggccctttttgacgatttcagttgcgacagtacaaaacggcatacattgttggctgtagctgattccttgaagcacaaaagtgtttttcacatttcttacaatccaagagctactgcttcagaatatattataccacaccataagttcctgaagagcctaaatcttccattctgtattggagcaaggatcaacttacagtgccataatgaagatgttagtgaaaggcgatctggaatggttgttcatgtcagtgaaatagatcccatgaaatggccaggctcgaagtggagaagcctgctggtaagatgggaggatggtgttgaatgtaacggccaagatagagtatctccatgggagattgagatagctggtggctctgtctctgttgctcattctgtgtccgcatctagctctaaaagaaccaagttgtgtcctcagggaaatttggacgttccaacaatgtatgttacagggaatgggaatggttgtactgactccgtggaaactggaaagtttcccagggtcttgcaaggtcaagatttgatgagttttaggactcgtcatgttccgtctgctcctcaaactgttgaggctgcaaaacttcaatcttctggtgctagtaggttcctcagtaatgcacgtggctgcgcattgggtggtccaacaagcagactcgcagtgcataactctgattttacctaccaatctgtaggcttcaatgaatctattggattctcagaggtcttgcaaggtcaagaaatttctcgggcagttcctatgttccaaggaatgatgtctgaggcttgttcactaaaaggaggatatgggctgcatagttatatgcgtaccccagttgctgttactggattgtcagccacaactcaagagtgttctctcacactatctactccgccaggagcacaagttccttctgtctaccctgataatatttttaaccgaactgtggttcgacagcttggactggcaagcaagtttgatggtggagctacaaatgcccagcagtctgtcccatttgataggccgagggaaatttggagcaagccacagcatgaaatatctgatcaaacgaaaatggatcactttgagactagaagagcttcagcacctggagatgatgctgctaagcatgggtctggtggagaggtggttcgcaaaactagctgcagactttttggtttctcgttgactgagaagatcttgccagcagatgatgatggcatcaaggaagtgacctatgagcctgagtgccagaatccacggatgctggacctgttcgggtacaactgctcagccccaagtgctgctcttccagctctgtgtgctgccccctttggaatgtgatgctacttcaataacgctgctgagtatttccatgtactcttagaagttttactttcctaatacccaagtgtatgtcataagctgccttttgacatcattccccctgttggtctgcctcaagcgaagcagtcatttgcacaagtaaacaaaggatcgttgatgatccacttctcgccatgcctcaccctatcgctaagatattgtaattagtcttaggatacgaagaggcagtacattgtaactgactaacttctgtggctgatccttcagaaaagttgtgcgatgaagcaaacaattttctttagaagttcttcgctggcagattttagattcatgtggggaggtttgtcagctcagctttaatgtactggttatgtatctttaaatcagctgctgtacgactttttttttagctccaagccctggttgcagtcgcctaggccgtgtgattgtatcagtatgtaagacatgctatattttaatattcttatcgatatttattctgatgc

SEQ ID NO: 112885 - DNA, 623 bp, Zea Mays
gtagctagacgcacagccacataggccacgtcgttcaaatttttgtaagccatccgatacaagatcgttggttaccaggcgcgggagcaaaggtagccaaccacacgacgggactcttccagatggagacgaaacaccacatggcgggggaaggaaaagagcgatcagatctcagacgccgtcgtccgtctccgccaagctgcatcgcctcaaacgctttgtcccggccatcacgccggccatggccgccatgtcgaagaaggcgactctccatcccttccgagttccgagttcatgctcccctccgcccctggcatcatgccacgtcccgcggaccgtactatcgcctccacagccgtggtcgctcggccacacgtaccggtcgcttcgcctgccgtcgctgttgcgacagccgtgatacctgccttcatcagcaacacgtcccaaaccgactaagcgtcccgggccaccgcgatacttcatttccgaaatcgctgcggtggcagcagttatgcctgccttgctccaaatatatagcactgtgagacgagtagcaaatcaagttgaagccatcggaaattgtcaaacctcttttttctctctctttttggtatgttttgagt

SEQ ID NO: 112886 - DNA, 1380 bp, Zea Mays
tgcttacacaaaattcccgctcactgtcttacgcctccaaaaccctagcccgtgctcggccggcgacgaggatgcctggtatgccgacggacggtggcggcgcaatggtaccttttacaggggagcctggccaaggggcgcccccgccggcacccgtgcggccaatccgccacggcgtggcgccgcccatcttccgcatctacgtctcctggtccagcggcaaccttctgcaggtcgcgtgcctccgcccgccgaattcggacggtggcggcggcacggaggaggtcgttgggagtgtggtggaggtgaatctcggcgacggtggcagcggtggctcggaggccgaggagaaaattgacgaggcggagatgcggaggatcgagtacgggtcagtgccggccttcgcgctgctgcagagcaggaagaacaccctcgcagatgttgctactatgtcgcacgtgccctcagtccctgatcatgcagaatggtggcaatatgtgcttgaatacagcaaaaccattggcagtctccttgggaacccagacccttctggtttcatgattgaagaacccaagacaattcttaaggttagggagaaacccacaagtttaagggctgcttgggagttgctggagatattctatgttgataaacgtttgcaaggctggcttcctgagcgtcttgttgattggttagccgattttgacagcctgctgtcaacgatggcgagcacggtgtactctaagctcagcaatttccagaaaaaactcgttaacttacagattgttgaagacgatcctgattactggaatggtttgtcagcagcactttcggttggatggcttgatattgtggtgaatatgctacggtttcatggatcgtaccaattagatcagatggatagccgtgagacagaaaatggattggtcgaggctgttgctgttcttgtatcaatgatgccccgcatgagaccgaatttgccaactggtaaattaggccagtgctgcaaaacaagacctgattttatcaaggcatgggaaaagtggcgaggtcaagtaactaaactggagtgcagtgcattttggatccagtgcggccaccaaaaaacccgtgatggtttgaagaatttgcttcatattatgatggggaacataaaggaaattactgctgctacttcccattggctggagctgtttgcttctcattttctttacataaaaccatttactgtggttagttctcttattataatctattgcgctttgtgattcctctgcttaattaagttgttaatagcagatgattgcatcacttaatgaccatttctcaagaatagatgtgtcatgggccttttctctttaacacagaaaaagtttgaaa

SEQ ID NO: 112887 - DNA, 2834 bp, Zea Mays
tgcttacacaaaattcccgctcactgtcttacgcctccaaaaccctagcccgtgctcggccggcgacgaggatgcctggtatgccgacggacggtggcggcgcaatggtaccttttacaggggagcctggccaaggggcgcccccgccggcacccgtgcggccaatccgccacggcgtggcgccgcccatcttccgcatctacgtctcctggtccagcggcaaccttctgcaggtcgcgtgcctccgcccgccgaattcggacggtggcggcggcacggaggaggtcgttgggagtgtggtggaggtgaatctcggcgacggtggcagcggtggctcggaggccgaggagaaaattgacgaggcggagatgcggaggatcgagtacgggtcagtgccggccttcgcgctgctgcagagcaggaagaacaccctcgcagatgttgctactatgtcgcacgtgccctcagtccctgatcatgcagaatggtggcaatatgtgcttgaatacagcaaaaccattggcagtctccttgggaacccagacccttctggtttcatgattgaagaacccaagacaattcttaaggttagggagaaacccacaagtttaagggctgcttgggagttgctggagatattctatgttgataaacgtttgcaaggctggcttcctgagcgtcttgttgattggttagccgattttgacagcctgctgtcaacgatggcgagcacggtgtactctaagctcagcaatttccagaaaaaactcgttaacttacagattgttgaagacgatcctgattactggaatggtttgtcagcagcactttcggttggatggcttgatattgtggtgaatatgctacggtttcatggatcgtaccaattagatcagatggatagccgtgagacagaaaatggattggtcgaggctgttgctgttcttgtatcaatgatgccccgcatgagaccgaatttgccaactggtaaattaggccagtgctgcaaaacaagacctgattttatcaaggcatgggaaaagtggcgaggtcaagtaactaaactggagtgcagtgcattttggatccagtgcggccaccaaaaaacccgtgatggtttgaagaatttgcttcatattatgatggggaacataaaggaaattactgctgctacttcccattggctggagctgtttgcttctcattttctttacataaaaccatttactgtgggttttgaagggatgcaccatttagcacagaaatgcatacagcttatgccatcctctggcactaatggattaacaggcctcattatcggtgttatgtcagaaaatccagaggttgtcttggcagaatgcacaaaaaattttggcccttggctggtcacacatgctatggaacttctgacagctgataatgactatgcggatattatgttgcatgaagagcgacctaacttaggcggtataagcatagaggaacttcaccgattagtctatgctcaagttttatgttgtcatcctttaacttggcagatcgcgccgacttatctgtcctcatgtctaaaccaaggcctaggactcttggagattctacttcttaagcaacccatacaagataattgcctagtactcaagactttggaaatttgccgattgtacgaactggagaatgttagtacaatcatcatgaagattgctggcatttatcgttggaagcatggacgaaaaggaactggtgtatactggttccagcaagctcgtgataaagtttgtcttgatagaattgctcaacagttattcgaacacattgggaagtcagtgacagacgatagttttaagcaatgggaagggctgctcgagctccttggttctgacattggtagtgcaggcggtcttgagttccttcacaggtaccgggatttcaagaggtctctgcaacaagctctagacagaaggtgtggtgaggctgctcgacaaactgtggattttttaatacagcttatgaaaaacccatccacacctcaacgtttctggctaccccttctacatgattcggtggagctacttaatagcaaactcagccctcttatggatgttgctgagacgacattgttgctcaacaagctgcaagagctgtcaatggccaagctgcgccctgatttttccagtaatcacctaccaagccatgcgatgagctctgtgagattggctctggcatcaaatctggcacgtgccgttcttgaagaccgtagtccaagcacactttagcacaggagtatgacgtccagtttgctggtggattgtgaccatgtttgcttggggcctcctgacaattcaaatgatcgggtttgagaaagattgaccatgtaacatacattgtactctgcttgcttgcttagtgcatttgtgtcgcgaatgcatgcatcatgctgagcgctgtggtttgaaggaaagaaataaaggatcgacatgttgcttgaaaacatctcttcacgggagcgttttcttgaaaaagaatataacaaaatggcctgaccagtcgattgcttttctccgtttgcaaacagtataagagcaacttcaagaggctctctatattatttctaatatatataaatatatatttaaaaaaaatacttttcaacaacttatctaaatatagccatattctattctggatttctcctagtcaaatatatagaatgtgaatgtgtctctagagtgtacacaagatatagaaacacggttagagattaaaaaaatatagaaaatggtttttatgtaaatgattctaaatgataatttatagtatgtttggtttaaagaatg

SEQ ID NO: 112888 - DNA, 2333 bp, Zea Mays
gaaaaaaaaaactgccggcaaaaacaaattgtacaatctcctcgcggcggacgatgctaggtggtcgatgctgcgctcgcggtgtgtccgactgcccgagccaatgccggagccccagtcctctgtggcgtcaagcggaagcgtagatcgcctccgcaacgccttcggcggagtgctgtgcatcttcaccctccttctcatcggcgtcctcgccttctccatccgactattctccgtgatcaaatacgaaagcgtcatccacgagttcgatccctacttcaattaccgcgttacccagttcttgtcaaagaatggcatatatgaattctggaactggtttgatgaccgaacatggtatcctcttgggcgtgttattggtggcactgtctatcctggtttgacacttactgctggtacaatatggtggttgttgaattcccttaacatcccattgtcggtggagactgtctgtgtattcactgctccagttttctcagtcaatgcgtcctgggcaacttacctattaaccaaggaaacaaagggccccggtgctggtttgatggcagcaactattctagcaatgggctgtttgttttgctgctgcagcaatactcattgcattgattgcatctagcccaacaaaaggctggagtggtcgcagtttgagtctgctggatccaacctatgcaagcaagtacatccctataattgctagtgtgagcgaacaccaaccaccaacctggccttcttattttatggatatcaatgtgcttgcctttttagttcctgctgggatcgtatcatgcttcttaccattatctgatgcaagctcatttttggtcctgtacttggtaacctcagtgtatttctctggagtaatggtccgacttatgctggtccttgctcctgctgcatgcattttgtctgggattgctctgtctgaagcttttggtgtccttacaagatcaatgaaatttcagcgtccaacactggatgatggctcttttacagccggggatgggagttctgatactcctacgaactctgaaatgggtttgaaggaaaaaacatccaagaaaaatcggaagaaagacaaagagtcagagggaagttcacctgttgatcatagaaccgaagaaaagcttttagtactgccttgtgggccatctgctgtgggcataatgctgctgaccatactttctggtttttacgtgatccattgtgtgtgggctgctgcagaagcatattcagcaccttcaattgtgctaacatctcgttcacatgatgggtttcatgtttttgatgatttccgcgaagcttatggatggctgcgccataacacagatgcagatgacaaggttgcatcttggtgggactatggttatcagacaactgcaatggcaaacagaactgttattgtggacaataatacatggaataacacgcacattgcaacagttgggactgcaatggcatctccagaaaaagtagcatgggagatcttcaattctttagatgtcaaatatgtgcttgttatctttggagggcttattggctacccaagtgatgatattaataagttcctctggatggttcgaatcggaggtggtgtattccctcaaataaaggaagcagattaccttaaggatggcaactaccgtgttgatgctcatagtaccccaaccatgttgaattccctcatgtacaagctttgctattacagattcgtcgaaactgatggtaagggctttgatagagtgagaagatatgaaatagggaagaaacattttaaacttacgcattttgaggaggttttcacaactcaccattggctggttcggatttacaaactgaaacctcagaagaacagagtcagagggaaactgaaatttaaatctagtttaaaagcaagttttatgcgtaaaactggtggaaagaagagcccatggaaatagagactacaaaggcagggtgctggagtcactagtcagcacagttactatcctgagaaaaccatgaattcatcaaaaggagttagattaaaagcatagcattggtgtgttctttgttattgtcatggagcagattataggggtgcttcatgttttttttggcatttgatctccttaatggcattataggggtctgatgaaatttgtggtaggttctcgagtgaggttttatccccattttaaacaaaatggactttgtttataggaacctgactgagcgcctggccgtttggaaacatctttaaaggttgtttggtttgaagaaatggtggcctatcttttcttttaggctaccttttggaaggaaggattttttcccct

SEQ ID NO: 112889 - DNA, 682 bp, Zea Mays
caaagtgcaaacgccaaacacgaaaaaattcgataaacctccgcctcccggccgccggccttccccgtcttcctctgacccaaaactcttcttctcagcagcaatgccggagccccagtcctctgtggcgtcaagcggaagcgtagatcgcctccgcaacgccttcggcggagtgctgtgcatcttcaccctccttctcatcggcgtcctcgccttctccatccgactattctccgtgatcaaatacgaaagcgtcatccacgagttcgatccctacttcaattaccgcgttacccaggttttttcccgtggtgcctctgtgtttgtccacagcctgttattgtcttattgggatgcatcaggattcaggtgttgagttcgcttaggagtcatgttctcttcaacgagttatggggttagggacttcagtagacatgcgagctccatttcttttgggtcactaggtcgacacaaaacttggtatgcaattaatttgaaaatggcattgccactgtatttaattagttagctgaccaggaaaaatctgggtaccacttgcatccctagacttctttgcaaattgtctattgtaatatacactgttgtatagtctcaggtgacatgtgggtgtattgaatggtcccaacatttgggtgaataaaatggcaggaatgttttccaa

SEQ ID NO: 112890 - DNA, 3245 bp, Zea Mays
caaagtgcaaacgccaaacacgaaaaaattcgataaacctccgcctcccggccgccggccttccccgtcttcctctgacccaaaactcttcttctcagcagcaatgccggagccccagtcctctgtggcgtcaagcggaagcgtagatcgcctccgcaacgccttcggcggagtgctgtgcatcttcaccctccttctcatcggcgtcctcgccttctccatccgactattctccgtgatcaaatacgaaagcgtcatccacgagttcgatccctacttcaattaccgcgttacccagttcttgtcaaagaatggcatatatgaattctggaactggtttgatgaccgaacatggtatcctcttgggcgtgttattggtggcactgtctatcctggtttgacacttactgctggtacaatatggtggttgttgaattcccttaacatcccattgtcggtggagactgtctgtgtattcactgctccagttttctcagtcaatgcgtcctgggcaacttacctattaaccaaggaaacaaagggccccggtgctggtttgatggcagcaactattctagcaatggtcccatcatacatctcaagatctgttgctggcagctacgataatgaagctgtagctatatttgctttaatattcacattttatctatatgtaaagacactaaacactggatcactcttttatgcggcacttaattctctctcgtacttctacatggtttgttcttggggaggctacacattcatcatcaatcttatcccaatgcatgttctcttgtgtattgtgactggtcgttactcttcacgactttatattgcttatgctccccttgttgtgcttggaacacttctggcagcatcggtacctgttgttggttttaatgcagtaatgacgtcagagcactttgcatcatttctggtatattgattgtgtatctactagggatgcgagttgcacttcttttgagtcatggggtcaacccaagacttgctaaaatgaataagaatgacattacacataattatttagggagagaaatgaactaaattagctgacctagaaagcaccatttggtacccatttgcatccctgatctacctacgtgttaccctttacttcctagcttctcccatttcagtaaaaccttggctgcaaactaattcatctcccccctatcctctctattatttcaaaaacaggtgtttataatcctccatgtggttgctcttgtttattacatcaaaggacttttaactccccgactgttcaaagtggccatgacatttgttataaccgttggattgtaagtttttgattttggaaggtggaactagtggaaatgcataataaatgttgtatctatgagcaaagaaagatgtgttccataggagtcaaaatgaagcagttggtcatatttaggtcgctgaactgctagctatccacttgacacatctaacagtaaaaatcctgcagggctgtttgttttgctgctgcagcaatactcattgcattgattgcatctagcccaacaaaaggctggagtggtcgcagtttgagtctgctggatccaacctatgcaagcaagtacatccctataattgctagtgtgagcgaacaccaaccaccaacctggccttcttattttatggatatcaatgtgcttgcctttttagttcctgctgggatcgtatcatgcttcttaccattatctgatgcaagctcatttttggtcctgtacttggtaacctcagtgtatttctctggagtaatggtccgacttatgctggtccttgctcctgctgcatgcattttgtctgggattgctctgtctgaagcttttggtgtccttacaagatcaatgaaatttcagcgtccaacactggatgatggctcttttacagccggggatgggagttctgatactcctacgaactctgaaatgggtttgaaggaaaaaacatccaagaaaaatcggaagaaagacaaagagtcagagggaagttcacctgttgatcatagaaccgaagaaaagcttttagtactgccttgtgggccatctgctgtgggcataatgctgctgaccatactttctggtttttacgtgatccattgtgtgtgggctgctgcagaagcatattcagcaccttcaattgtgctaacatctcgttcacatgatgggtttcatgtttttgatgatttccgcgaagcttatggatggctgcgccataacacagatgcagatgacaaggttgcatcttggtgggactatggttatcagacaactgcaatggcaaacagaactgttattgtggacaataatacatggaataacacgcacattgcaacagttgggactgcaatggcatctccagaaaaagtagcatgggagatcttcaattctttagatgtcaaatatgtgcttgttatctttggagggcttattggctacccaagtgatgatattaataagttcctctggatggttcgaatcggaggtggtgtattccctcaaataaaggaagcagattaccttaaggatggcaactaccgtgttgatgctcatagtaccccaaccatgttgaattccctcatgtacaagctttgctattacagattcgtcgaaactgatggtaagggctttgatagagtgagaagatatgaaatagggaagaaacattttaaacttacgcattttgaggaggttttcacaactcaccattggctggttcggatttacaaactgaaacctcagaagaacagagtcagagggaaactgaaatttaaatctagtttaaaagcaagttttatgcgtaaaactggtggaaagaagagcccatggaaatagagactacaaaggcagggtgctggagtcactagtcagcacagttactatcctgagaaaaccatgaattcatcaaaaggagttagattaaaagcatagcattggtgtgttctttgttattgtcatggagcagattataggggtgcttcatgttttttttggcatttgatctccttaatggcattataggggtctgatgaaatttgtggtaggttctcgagtgaggttttatccccattttaaacaaaatggactttgtttataggaacctgactgagcgcctggccgtttggaaacatctttaaaggttgtttggtttgaagaaatggtggcctatcttttcttttaggctaccttttggaaggaaggattttttcccct

SEQ ID NO: 112891 - DNA, 2638 bp, Zea Mays
caaagtgcaaacgccaaacacgaaaaaattcgataaacctccgcctcccggccgccggccttccccgtcttcctctgacccaaaactcttcttctcagcagcaatgccggagccccagtcctctgtggcgtcaagcggaagcgtagatcgcctccgcaacgccttcggcggagtgctgtgcatcttcaccctccttctcatcggcgtcctcgccttctccatccgactattctccgtgatcaaatacgaaagcgtcatccacgagttcgatccctacttcaattaccgcgttacccagttcttgtcaaagaatggcatatatgaattctggaactggtttgatgaccgaacatggtatcctcttgggcgtgttattggtggcactgtctatcctggtttgacacttactgctggtacaatatggtggttgttgaattcccttaacatcccattgtcggtggagactgtctgtgtattcactgctccagttttctcagtcaatgcgtcctgggcaacttacctattaaccaaggaaacaaagggccccggtgctggtttgatggcagcaactattctagcaatggtttgttcttggggaggctacacattcatcatcaatcttatcccaatgcatgttctcttgtgtattgtgactggtcgttactcttcacgactttatattgcttatgctccccttgttgtgcttggaacacttctggcagcatcggtacctgttgttggttttaatgcagtaatgacgtcagagcactttgcatcatttctggtgtttataatcctccatgtggttgctcttgtttattacatcaaaggacttttaactccccgactgttcaaagtggccatgacatttgttataaccgttggattggctgtttgttttgctgctgcagcaatactcattgcattgattgcatctagcccaacaaaaggctggagtggtcgcagtttgagtctgctggatccaacctatgcaagcaagtacatccctataattgctagtgtgagcgaacaccaaccaccaacctggccttcttattttatggatatcaatgtgcttgcctttttagttcctgctgggatcgtatcatgcttcttaccattatctgatgcaagctcatttttggtcctgtacttggtaacctcagtgtatttctctggagtaatggtccgacttatgctggtccttgctcctgctgcatgcattttgtctgggattgctctgtctgaagcttttggtgtccttacaagatcaatgaaatttcagcgtccaacactggatgatggctcttttacagccggggatgggagttctgatactcctacgaactctgaaatgggtttgaaggaaaaaacatccaagaaaaatcggaagaaagacaaagagtcagagggaagttcacctgttgatcatagaaccgaagaaaagcttttagtactgccttgtgggccatctgctgtgggcataatgctgctgaccatactttctggtttttacgtgatccattgtgtgtgggctgctgcagaagcatattcagcaccttcaattgtgctaacatctcgttcacatgatgggtttcatgtttttgatgatttccgcgaagcttatggatggctgcgccataacacagatgcagatgacaaggttgcatcttggtgggactatggttatcagacaactgcaatggcaaacagaactgttattgtggacaataatacatggaataacacgcacattgcaacagttgggactgcaatggcatctccagaaaaagtagcatgggagatcttcaattctttagatgtcaaatatgtgcttgttatctttggagggcttattggctacccaagtgatgatattaataagttcctctggatggttcgaatcggaggtggtgtattccctcaaataaaggaagcagattaccttaaggatggcaactaccgtgttgatgctcatagtaccccaaccatgttgaattccctcatgtacaagctttgctattacagattcgtcgaaactgatggtaagggctttgatagagtgagaagatatgaaatagggaagaaacattttaaacttacgcattttgaggaggttttcacaactcaccattggctggttcggatttacaaactgaaacctcagaagaacagagtcagagggaaactgaaatttaaatctagtttaaaagcaagttttatgcgtaaaactggtggaaagaagagcccatggaaatagagactacaaaggcagggtgctggagtcactagtcagcacagttactatcctgagaaaaccatgaattcatcaaaaggagttagattaaaagcatagcattggtgtgttctttgttattgtcatggagcagattataggggtgcttcatgttttttttggcatttgatctccttaatggcattataggggtctgatgaaatttgtggtaggttctcgagtgaggttttatccccattttaaacaaaatggactttgtttataggaacctgactgagcgcctggccgtttggaaacatctttaaaggttgtttggtttgaagaaatggtggcctatcttttcttttaggctaccttttggaaggaaggattttttcccct

SEQ ID NO: 112892 - DNA, 1460 bp, Zea Mays
cccacaaacacacacacacagaccatggtgatggaggagacgatagacgacagtgagatgagtttgtcgaacatggtgctgggcttcctggaagatttcgagagggacgagcgacggccggagaacgacgacgacaacaacgaggaagagggctccagcggcggcgacaccgccgagagcaaggccttctggcagacccaacacttgcagctgcgcgtaagtcctccgtccttacattcgacgatcaattctgttccgactacgtgtgtgggtggagatcgagcgcgcagatcttctctctctctctctctctctctctctctctctctctctctctctctctctctctctctctctccggtcagaagctagacgacgaatcgaacatgaattgcaactcatcagcatgcagcagctagtaccccggctgttctgttctgttctgtccgctagtgtcgtcttctgctggtgagcgaggcaaactaatatgcgtgcgtggatgtggatggtacaggaggcactggccaagggcagcccagccgagagcaggatccgcgcggacacggaggaggccgtcaagagcatgcgcgccgcggcctgctcctgctcctgcacggggcggcccgccgcccgggactgccggccgtgcatgctccggcacgtcgccgaccggctgcgcgacgccggctacgacagcgcgctctgcaaatccaagtggacgcgctcgccggatatcccttcaggcgagcacagctacgtggaggtggcggtgcagacgaggagcggcaagtccgtgcgcgtggtggtggagctcagcttccgcgccgagttcgaggtggcgcgcgccagcgccggctaccgcgcgctggtgaccgcgctgcccgaggtgttcgtcggccgggccgaccggctgcgcggcgtcgtcaaggtcatgtgcgccgcggccaagcagtgcatgaaggataacaacatgcacatgggaccctggaggaagcacaagtacatgcaggccaagtggctcggcacgcccgagcggggagcggcggcggtggcggcggcggagacgccggtggtggcggttccgtcggtgacggtcggctcgccagagaagcagaccaagttcagggcgtccatgctgaccttcgactttggccggaccgcgctggaggtcgcgtgatgaacgcacatacgctgccggtcgagcggcattagtagttctctaaatatagacagaggaggtaactttcgagaagaaaaaaaagttatatagagtgtacctgggttttaggtttttgtcaggattcagaaagctgaatctgtaatatcaatcgagctaggtgtaaacagataaggcgagcttgtcacgcgtactccgatcgcgtcactgtaatggaaatgaagctaaaagatcatgggtgtcggttcacatgtcagtaacgaaatggataactgataacgtt

SEQ ID NO: 112893 - DNA, 1167 bp, Zea Mays
cccacaaacacacacacacagaccatggtgatggaggagacgatagacgacagtgagatgagtttgtcgaacatggtgctgggcttcctggaagatttcgagagggacgagcgacggccggagaacgacgacgacaacaacgaggaagagggctccagcggcggcgacaccgccgagagcaaggccttctggcagacccaacacttgcagctgcgcgaggcactggccaagggcagcccagccgagagcaggatccgcgcggacacggaggaggccgtcaagagcatgcgcgccgcggcctgctcctgctcctgcacggggcggcccgccgcccgggactgccggccgtgcatgctccggcacgtcgccgaccggctgcgcgacgccggctacgacagcgcgctctgcaaatccaagtggacgcgctcgccggatatcccttcaggcgagcacagctacgtggaggtggcggtgcagacgaggagcggcaagtccgtgcgcgtggtggtggagctcagcttccgcgccgagttcgaggtggcgcgcgccagcgccggctaccgcgcgctggtgaccgcgctgcccgaggtgttcgtcggccgggccgaccggctgcgcggcgtcgtcaaggtcatgtgcgccgcggccaagcagtgcatgaaggataacaacatgcacatgggaccctggaggaagcacaagtacatgcaggccaagtggctcggcacgcccgagcggggagcggcggcggtggcggcggcggagacgccggtggtggcggttccgtcggtgacggtcggctcgccagagaagcagaccaagttcagggcgtccatgctgaccttcgactttggccggaccgcgctggaggtcgcgtgatgaacgcacatacgctgccggtcgagcggcattagtagttctctaaatatagacagaggaggtaactttcgagaagaaaaaaaagttatatagagtgtacctgggttttaggtttttgtcaggattcagaaagctgaatctgtaatatcaatcgagctaggtgtaaacagataaggcgagcttgtcacgcgtactccgatcgcgtcactgtaatggaaatgaagctaaaagatcatgggtgtcggttcacatgtcagtaacgaaatggataactgataacgttaaatt

SEQ ID NO: 112894 - DNA, 841 bp, Zea Mays
ccaaggatgcatgttacctgcccaacatcctaaaaaaatctgaacccagatattcgatgccgaacaggttggttcgttcgtttgctgacgtgttctcttccgatccgccgaaacgcgtgtgcaggcgagcacagctacgtggaggtggcggtgcagacgaggagcggcaagtccgtgcgcgtggtggtggagctcagcttccgcgccgagttcgaggtggcgcgcgccagcgccggctaccgcgcgctggtgaccgcgctgcccgaggtgttcgtcggccgggccgaccggctgcgcggcgtcgtcaaggtcatgtgcgccgcggccaagcagtgcatgaaggataacaacatgcacatgggaccctggaggaagcacaagtacatgcaggccaagtggctcggcacgcccgagcggggagcggcggcggtggcggcggcggagacgccggtggtggcggttccgtcggtgacggtcggctcgccagagaagcagaccaagttcagggcgtccatgctgaccttcgactttggccggaccgcgctggaggtcgcgtgatgaacgcacatacgctgccggtcgagcggcattagtagttctctaaatatagacagaggaggtaactttcgagaagaaaaaaaagttatatagagtgtacctgggttttaggtttttgtcaggattcagaaagctgaatctgtaatatcaatcgagctaggtgtaaacagataaggcgagcttgtcacgcgtactccgatcgcgtcactgtaatggaaatgaagctaaaagatcatgggtgtcggttcacatgtcagtaacgaaatggataactgataacgtt

SEQ ID NO: 112895 - DNA, 1161 bp, Zea Mays
tccaaacgaagcattaggggatgaaatttagaggacgttgttggagacagcctcactcctcaccaccacaagtgaagtcaccgacgcacgcacggctgcagcgcgctcctactctcccgcgatcgccaccggggaaggggcaatagaataaagtgagggcagccaatgcaggccgccgtcaacaccaccactgtcggcgctcacccgcacccaacaaagtcctcgttcctccgtccgtcccctccttgccgcgtctacttccacgcttctccacgcccgaaccttagggcgatcgccatggccagcaagtcgcagctgcaggaccaactgatcatcactcgccccgacgactggcacctccatcttcgcgaaggcggtgtcctcgaggctgtagtgccacacagcgcgaggcattttgggagggccatcatcatgcccaacctgaagccgccggtgaccacaacggcacgggccgtggagtacagggaggagataatgagggcgctgccgccagggagtagcttcgagccgctcatgacactatacctcacagacaacacaagcccagaggagatcaagctcgcaagaaagagtggtataatttttgctgtgaagttgtatcctgctggagcaactaccaattcccaagatggtgtcactgatatatttgggaagtgcttgccggtcctcgaggagatggtcaggcaggaaatgccgttgcttgttcatggagaagtcacagatccacatgttgacacatttgaccgcgagaaggttttcattgacaaaatattagcaccacttgtacaaaaacttccgcagctgaaaattgtcatggaacatatcacaactatggatgcagtgaacttcatagaatcatgtgaagaaggtcatgttgctgcaacagtgactccccagcatctcctcctcaataggaatgctttatttcagggtggcttgcagccacacaattattgcttgccagtactgaaaagagagactcatagtatgttgcgatggcctcctataagaaatgctaccatttgttataaaaatgcagaatcatattccttttggttcaccaaataactagagtttcttcagaaattatgaaacagcttcttaaacatgatgataatgatgttttgtcttacataacaa

SEQ ID NO: 112896 - DNA, 1822 bp, Zea Mays
gacagcctcactcctcaccaccacaagtgaagtcaccgacgcacgcacggctgcagcgcgctcctactctcccgcgatcgccaccggggaaggggcaatagaataaagtgagggcagccaatgcaggccgccgtcaacaccaccactgtcggcgctcacccgcacccaacaaagtcctcgttcctccgtccgtcccctccttgccgcgtctacttccacgcttctccacgcccgaaccttagggcgatcgccatggccagcaagtcgcagctgcaggaccaactgatcatcactcgccccgacgactggcacctccatcttcgcgaaggcggtgtcctcgaggctgtagtgccacacagcgcgaggcattttgggagggccatcatcatgcccaacctgaagccgccggtgaccacaacggcacgggccgtggagtacagggaggagataatgagggcgctgccgccagggagtagcttcgagccgctcatgacactatacctcacagacaacacaagcccagaggagatcaagctcgcaagaaagagtggtataatttttgctgtgaagttgtatcctgctggagcaactaccaattcccaagatggtgtcactgatatatttgggaagtgcttgccggtcctcgaggagatggtcaggcaggaaatgccgttgcttgttcatggagaagtcacagatccacatgttgacacatttgaccgcgagaaggttttcattgacaaaatattagcaccacttgtacaaaaacttccgcagctgaaaattgtcatggaacatatcacaactatggatgcagtgaacttcatagaatcatgtgaagaaggtcatgttgctgcaacagtgactccccagcatctcctcctcaataggaatgctttatttcagggtggcttgcagccacacaattattgcttgccagtactgaaaagagagactcatagacaagctattgtgtctgctgtaacaaatgggagtagacggtacttccttggtactgacagcgctccccatgataaacggaacaaagagtgttcctgtggatgtgctggaatatatagcgctcctgttgccttgtctctttatgtgaaggtatttgaagaggctggtgcccttgataaactagaagcatttacaagcttcaatggccctgatttttatggcctcccaaggaacacttcaaagattatcttgagaaagaatgcctggaaagttcctgctacttataaacacagttcaggggagattgtgcctatgtttaatggcagcacccttgaatggcttccatctgatcagcctaaagagtaaacagtatacattattggacccagcacttgggggaatcaataggtggagttttctagttctttttcccgtttccactagaatcagcatagcgaaactattctgcttgttgaaagcaacggtggaggatctgcttgttgagttgttatatccatttgcattgcagtgcaattctggaagtagctaaaaggccatattgtatgtttatcaaggctagtctactgatctagacaccatagcatctgtggtttctaaggtgacaaggcgaccaggcaagagctgggtgtgtctggacgcctagatggcacaaggtgctacttttccccaaggcgagctgggtatgcttggacacctagcctctgaaacatgctaccacatccataataatgtaatgaataaatatcagcatttcagttacatagccgtataaccttctagtccggacataatatttctatgtttttgttactctgtgtctgaataaatagatttctacttt

SEQ ID NO: 112897 - DNA, 1972 bp, Zea Mays
actcctcaccaccacaagtgaagtcaccgacgcacgcacggctgcagcgcgctcctactctcccgcgatcgccaccggggaaggggcaatagaataaagtgagggcagccaatgcaggccgccgtcaacaccaccactgtcggcgctcacccgcacccaacaaagtcctcgttcctccgtccgtcccctccttgccgcgtctacttccacgcttctccacgcccgaaccttagggcgatcgccatggccagcaagtcgcagctgcaggaccaactgatcatcactcgccccgacgactggcacctccatcttcgcgaaggcggtgtcctcgaggctgtagtgccacacagcgcgaggcattttgggagggccatcatcatgcccaacctgaagccgccggtgaccacaacggcacgggccgtggagtacagggaggagataatgagggcgctgccgccagggagtagcttcgagccgctcatgacactatacctcacagacaacacaagcccagaggagatcaagctcgcaagaaagagtggtataatttttgctgtgaagttgtatcctgctggagcaactaccaattcccaagatggtgtcactgatatatttgggaagtgcttgccggtcctcgaggagatggtcaggcaggaaatgccgttgcttgttcatggagaagtcacagatccacatgttgacacatttgaccgcgagaaggttttcattgacaaaatattagcaccacttgtacaaaaacttccgcagctgaaaattgtcatggaacatatcacaactatggatgcagtgaacttcatagaatcatgtgaagaaggtcatgttgctgcaacagtgactccccagcatctcctcctcaataggaatgctttatttcagggtggcttgcagccacacaattattgcttgccagtactgaaaagagagactcatagacaagctattgtgtctgctgtaacaaatgggagtagacggtacttccttggtactgacagcgctccccatgataaacggaacaaagagtgttcctgtggatgtgctggaatatatagcgctcctgttgccttgtctctttatgtgaaggtatttgaagaggctggtgcccttgataaactagaagcatttacaagcttcaatggccctgatttttatggcctcccaaggaacacttcaaagattatcttgagaaagaatgcctggaaagttcctgctacttataaacacagttcaggggagattgtgcctatgtttaatggcagcacccttgaatggcttccatctgatcagcctaaagagtaaacagtatacattattggacccagcacttgggggaatcaatagtgcaattctggaagtagctaaaaggccatattgtatgtttatcaaggctagtctactgatctagacaccatagcatctgtggtttctaaggtgacaaggcgaccaggcaagagctgggtgtgtctggacgcctagatggcacaaggtgctacttttccccaaggcgagctgggtatgcttggacacctagcctctgaaacatgctaccacatccataataatgtaatgaataaatatcagcatttcagttacatagccgtataaccttctagtccggacataatatttctatgtttttgttactctgtgtctgaataaatagatttctactttaaaattgtctttaaataaatcaatctctaggaggctaaacggtccatcagcctatctatttttcttgaagtctcctcgtgtttactgcacctcccatctcctaatctaatattgagtttctgcagttagatgtgtgtagtatatgctataattagtgtgcaattggaacgtttttcaatcaatgtgcactctagtcaatgaaggttagtatgattttttctctatcatactaatctcttctaaacttattagaaatctactctctccgtccaaaaataaa

SEQ ID NO: 112898 - DNA, 322 bp, Zea Mays
ttctcctttacattttccatatcaaaatttcttcgtggtcaacacaaacctcctgatagtgtttacaattattttctgctcttctttccatacactgaccccagaaacaatcacttggatcaacataaaacaatctcatcagagcaatattctgtaaatcactcggtcctgactaaaatttggaatagagtgacatagaccagctcaccatctcatctatttaatctgaagagagaagtaacattcaaatgcatcataattcataggccaaatatcctgcaataacatgcaaatacagttttggaggtcagtgctgtgatcc

SEQ ID NO: 112899 - DNA, 1223 bp, Zea Mays
tctccccgagcgctcctcctctcctcgacgacgctggagctctcctcgacgaccctggggaagctggccatgtgctgcgtggtgttcgacttcgcggacccgaccaaggacgtgcgggagaaggaggtcaagaggcagacgctgctcgagctggtggactacatcacctccgccaccagcaagttcccggagcccgtcgtgcaggaggtcgtcaggatggtgtctgtgaatctgttcagggtgcccagccctgccccgagagagaacaaggcgctcgagtcgttcgacatggaggaggaggagtccgtcatggaccctgcgtggtcacacttgcagatcgtgtatgagttgttcttgaggtttattcagtcgcccgagacgaacgcgaagctggccaagagatacattgaccacggcttcattatcaggcttcttgatctctttgactcggaggatcctagggagagggagtacctgaagacgatccttcacaggatatacgacaagttcatcaggaaggcaatcaacaatatattctacaggtttatattcgagacggagaagcataatggtatcgcagagctgttagagattctggggagtataattaatggctttgctttgccgctcaaggaagagcacaaattgtttctagtctgccacttccacatgagtagtcggattgaccattctaggctgccacttccacatgatggaatgttagtactgtgggaacttcgttcggtgcccattttatttgttttattttcatcgactccagaatacaacagttattttttcttctaataaaatcgtggttggaactgtttatttgttctgtttgtttctcgtagagttaggctttaattctaactggtatctaaattttcctttgtacttgtttgtattcgatgccatagtcacaaaattagtctttcttcaagtatcttgagaattatacttatttgatttgaagaaacttgggagacggttgatgagaaaatactgtaaataaaaaaatgggtcctgctgaaacaagtccagtttgctatatgataactaatcttcttgctaagtcataatttaatttataccattacgtcacatctcttttagactgttagtgtcaaacaatttgctctgctattttaaatgatggctaacatgtttctcattcggactgttcagtagcattgtatgctttctaggtaggatgccaaaac

SEQ ID NO: 112900 - DNA, 1361 bp, Zea Mays
cacggccacagtaccacacagaacagtagcaccgggctccgggcaccagggcaggcgaattcctaggttcgctggagcctggtccgagggatggccgccgcctcgctcgcgttggcgagtcctctccggcttctcctccgcgtccgtcacccgcgcggagccatcgccgtcccgtgctacttcatctcgcgaggacggtatagcaccgccattgccgttgcagcagcgagggatttggcggtgaaaggaagcgtggacaggaattcagcggaggaagtcaggaacattctgaatatggcagaaagggcttcccaacgaagaaatgtttttcacaccaattttcttactccacctatagtgaaagaggctatgctggcacttgaaaagtttgcagataccaaagcagtagctcagggtggctaccctcaggctgagaggtgccgaatatctgttggacacccggacgtcatgacaagtaacccagatgtggttgctgctttgagcatctcagggaatttccggttggaatcttgttctcatggtgactttcttggtgctattcttgggacaggaataacaagggagaaagttggagatattcttttgcagggggaacgaggtgcccaggtccttgttgacccagaacttgttgactatctgatttctacccttgaaaaggtggggaaagttggtgtttcatgcactcagattcctttgcttgctctagaatatgaaccaccaaggaccaattcatttaaaactgtagaatcatcgctcagggttgatgcccttgccagtgcaggatttaaaatctcacgcacgaagcttgctagcttgataagttctggtgatgttcgtgtgaattggacaccaacaacaaaaaatggagttaccctcaaatctggagatgttgtttctgttagtgggatgggaaggttaaagattggggaaattgtgactacgaggaaaggaaaatatgcggttgagttgattcgctatttgtaatcatggaactggtctactttcatgtctgaaactctgaatttaacggttgaagcaaaagtcccgtggctcctgtgtttttttgggtcaaattattagctactatctcacgaaaaacatactcagaatccttgtacactgaagtattgctgtatttttagctaaatattatctatatgtcgctgtgtttggttagatgtaggaatgggagtttagaggtttgtttgtttggtggggataagagttttgactggatggggatgggagaatagggggtaaactcccaccaaatttttacgtggaaggtggatgcccccgcactgtccatcatgatttatgacgcaattttttactctcaa

SEQ ID NO: 112901 - DNA, 1551 bp, Zea Mays
cacggccacagtaccacacagaacagtagcaccgggctccgggcaccagggcaggcgaattcctaggttcgctggagcctggtccgagggatggccgccgcctcgctcgcgttggcgagtcctctccggcttctcctccgcgtccgtcacccgcgcggagccatcgccgtcccgtgctacttcatctcgcgaggacggtatagcaccgccattgccgttgcagcagcgagggatttggcggtgaaaggaagcgtggacaggaattcagcggaggaagtcaggaacattctgaatatggcagaaagggcttcccaacgaagaaatgtttttcacaccaattttcttactccacctatagtgaaagaggctatgctggcacttgaaaagtttgcagataccaaagcagtagctcagggtggctaccctcaggctgagaggtgccgaatatctgttggacacccggacgtcatgacaagtaacccagatgtggttgctgctttgagcatctcagggaatttccggttggaatcttgttctcatggtgactttcttggtgctattcttgggacaggaataacaagggagaaagttggagatattcttttgcagggggaacgaggtgcccaggtccttgttgacccagaacttgttgactatctgatttctacccttgaaaaggtggggaaagttggtgtttcatgcactcagattcctttgcttgctctagaatatgaaccaccaaggaccaattcatttaaaactgtagaatcatcgctcagggttgatgcccttgccagtgcaggatttaaaatctcacgcacgaagcttgctagcttgataagttctggtgatgttcgtgtgaattggacaccaacaacaaaaaatggagttaccctcaaatctggagatgttgtttctgttagtgggatgggaaggttaaagattggggaaattgtgactacgaggaaaggaaaatatgcggttgagttgattcgctatttgtaatcatggaactggtctactttcatgtctgaaactctgaatttaacgatacatccaacaatatctaacgagctgctacatgtgaagttgtcatgcgaaaagcaggatgtcacatgtttgtaaaggtaggttttgtgatgtatccatccttgtggaactttggatgcactatgttgacagccagcgaggagctgtttattgtttgtttgatctttgaagcccagcaattaattggccaggcacaatagctacagctaccttacagttttctttggagatgggagcacgagcagcgaaacccaacggtgcttgaaatgttttcggtgagttgaatcaatggaaaaggttaagggcgaactgcactttccggaaaagattcatgctcgtttggacacttccacgagaagtttactttgagccggtgcgaagatatactaaactagagccttgtccctgcactgtcaagtcccagtttgcttgctccagctgcttgggtacctttttgtatctctcgcagtccaactagtggaaaataacacttgttttttt

SEQ ID NO: 112902 - DNA, 657 bp, Zea Mays
gaggttatggccacactttctcaatattgcatgaacttagatatcaaggttcaaagcatctaaggatttcctaactaaatgagaaggaaaatgaagattacaagctaggaagatgttagagagatagttcaacggttcaactctctcctcctatttatatagggttattcatatttcataaactattcatagatacataaagtctatccactcatacaggatcaaaatggaccaaatcttggatttctttatctgacgaccacacactcttcacgaagttggttcacctcaacgcaacctttcgcgctgacaccacatgcgccttcgatttcctttagaaccgtgttgtcgggttttgaggctcaaattcggtgaaacccgtgaattgttgtgttgtctggttttgaggctcaacgaccaaaatcctcatgggtaccgtacgcaccccacatccttgacatgtgccccaccgcccccaaccacgttgacgatatatgatccacttctccatgtccttgcgtctgtcattgttcctaggtgtcagtcgccatggctactcatctggcttctctaggtcctcgatcaagacccaatgttcgtccttcatcgcttttgatccctcgacatgaacccatatgaacttcgtcattgaccatt

SEQ ID NO: 112903 - DNA, 1551 bp, Zea Mays
aggagtagtagcaaccaagctaccctatctataagtactacggctcgaatgtgtcggccgacggcaatcaccattacatttgatccgccgcgcgcggcccgatcgacgagcgagagcctcattcacaccccgatctagctagctagctagtttacgaaaaaaaaatctggccacagggatgcggtggcggctgcagccggcgccggcgccgacgctgctcctcgtcctgctggtggccaccgtcgccgccgtcgtcgtggtggtgcgggcggagccccaggtgccgtgctacttcgtgttcggggactcgctcgtggacaacggcaacaacaacgacatcgcgtcgctggcgcgggccaactacccgccctacggcatcgacttcgccgccggccccaccggccgtttcagcaatggcctcaccaccgtcgacgctatatctcggcttctgggcttcgacgattacatccccgcgtacgctggcgcgagcggcgatcagctcctcaccggcgtcaacttcgcttccgccgcagccgggatccgtgacgagaccggccagcaactggggcaacggatcagcttcggcgggcagctccagaactaccaggcggcggtgcagcagctggtgagcatcctgggcgacgaggactccgcggccagccacctgagccagtgcatcttcacggtgggcatgggcagcaacgactacctcaacaactacttcatgccggcggtctactccaccagccagcagtacacgccggagcagtacgccgacgtgctcatcaaccagtactcgcagcagctccggaccctgtacagctacggggccaggaaggtggcgctcatgggcgtggggcaggtcgggtgcagccccaacgagctggcgcagcgcagcaccgacggcaccacctgcgtgccgcagatcaacggcgccatcgacatcttcaaccggaagctcgtcgccctcgtcgaccagttcaacgcgctgccgggggcgcacttcacctacataaacgtgtatgggatcttccaggacatcctgagagccccagggtcgcacggtctgacggtgacgaaccaagggtgctgcggcgtcggacggaataacgggcaggtgacgtgcttgccgttccagacgccgtgcgccaacaggaacgagtacctcttctgggacgctttccaccccacggaggcggccaacatcctcgtcggtcggagggcgtacagcgcggcgctgccgtccgacgtccaccccatggatctgcgcacgctcgccaggatctagctgtatggatcatgtgaactcgtgaagagaagcaaagcttacagcgtcttccttttttttgttctttgtttcccctcgtgattgtattgcttaccactcgcaaagggacgtatggtccctccatctaaactatatatataaacatgatatatactccctcgctcccgcccaatatatatactgttcgttgtacctttaaaattatgtgtccatattcaaatagatgacaatacatctagacacgtatataaattaaaacacat

SEQ ID NO: 112904 - DNA, 870 bp, Zea Mays
gtactgtgagagtaaggctaaagtcgccggataatataagaccagcaataacaagctagtttgccctcgttctccaacaaaatgtctgatgtggagccgctggttctggctcatgtcatacgagatgtgttggattcatttgcaccaagtatcgggctcagaataacctacaacagcaggttacttctatcaggtgttgagctgaaaccatccgcggttgtgaataagccaagagttgatgttgggggcaccgacctcagggtgttctacacattggtattagtggatccagatgccccaagcccaagcaatccatcactgagggagtatctgcactggatggtgatagacattcctggaacaactggagccagctttggtcaggagctcatgttttacgagaggccagagccgaggtccggcatacaccgcatggtgttcgtgctgttccggcagctcggcagggggacggtgtttgcaccagacatgcggcacaacttcaactgcaagagcttcgcccgtcagtaccacctggacgtcgtggctgccacgtatttcaactgccaaagggaggcaggatccgggggcagaaggttcaggccggagagctcgtaaggaatgaagcatgcacagaagaagactgcagcgctttcgcatgcatatgatctatcgtcgtcctgcggaatatatatatagtaaccgttgttatatggaataatgtgcatgaaattggtatcagatgcaccgacccgtacgtacgtaattaatgtttgttattacacgcagacatataatatacatactcattcacatgtatccgtatatgtatctatggcacgagaacaaggattgatatttactggtccttta

SEQ ID NO: 112905 - DNA, 114 bp, Zea Mays
taacgctaacccggcttgtagttgtgtttatatttgtaaatttcagtttcgccctattcaccccccctctaggcgactatcacatgtatttgtctatgagtaagatgtttgaag

SEQ ID NO: 112906 - DNA, 2253 bp, Zea Mays
aaagaaaagccagtcaaacccaaccacctcagctcagcatcgaggtcgccttcccctcctccagttgtccccagaaaccgtgtcccctactctctctctctctctctatctctcttctcccctcgatcaacagcaacagcggcggtcagaagcttccgtcgcgacagctcccgacctcctgccggtcttcccctctcctagtcggcgcgaatcccgaggcggaggaggaagaggggagcggagtgggggtgggccccatcagccatgagtctcacggggtccgccctggaggcggcgctacaggcggtggggcgcggcctcgacgcagctggagaccaccggctgctctactgcaagggaggtggaaggctcgtcgcgctcgaggaggaccgtgcgcgggacctcccgctccccgacggcggcgtcctcccgagcgtgccccccgatgtcgaggtcgagcagtgccgcagagaccccgagcgcatccgccccttcccctctggcccaagctctgccgcagcggatgggccctttgtctgcagcttcgataagatggctgagtatttcaacaggaagtcatgcttgtccgagacagtaccgctgggttccttcaactctctgttcagcttcaccggttcatggaagaatgatgctgcggctacgaaggcccttgcgattgatggctattctctgcctctgtttcgagtgaaaattaggagttctgaactgacgctgcttgagagcgttaagcacgcgatcccaaatgtttgggatccatcagcattggctagctttattgagaattacggtacccatattattatttctgttacggttggtggtaaggacgaagtatacattaagcagcattcatcgtcccaattgtcagggttagagttcaaaaattatgtgagggaaattgggagggaaagattctcagatgtggaaaacaagtcaaatgcaactcctatcaattacagcgagaaggatattacagtaatattcagaaggaggggtggttgtgatcttgttcaaagttttagtgattggaaaggaactgttgcctcagcaccagatgtcataggcatgacctttctttcaattgtctctcttgttgacgatgtaccaggaaagaagcaccttgctcgtgcagttgagctatacttgacctacaaacctccaattgaagaattacagtatttcttagattttcaagtcccactagtttgggctccagctccaccaggtattgctagtcaccataggaaggaacctgtctgcccatcgcttcagtttagcttaatgggcccaaagctcttcattagcacagaacagatctctgttgggcgccgaccagttgttggcctcaaactgctcttggaaggagctaaacagaatcgtttggctattcacttgcagcaccttgtctcattaccaaaaatattcctacctcattgggactctcatattaccattggacctccaaaatggcaaggccctgaagaacaagacagccgatggttcgagccaatcaagtggaagaactttgctcatgttagcacagcacccatagagtacactgaaacaaatattacggacctatctggtgtttatattgttacaggtgcacagttgggagtgtgggattttggtgcaaagagtgttctccacctcaaacttttgttctccagggttcctgggtgcacaattagaagatcagtgtgggaccacagcccatcaagttcttcaattcataaagcagatgaatcttcatcgtcctcgagtgataatgctaaacttctgaagattattgacatgacagaaacattgaagggcccacaagatgcacctggccactggctgatcacaggtgctaagttgggtgtcgagaaaggcaggattgtagtgcgtgcgaagtactccttattgaattattaaccaaatgtttaaagcattcattcactcactctgatattgagcactgtgttttaaggtagcatttgttcttttgtttttcatgtatgactttccttcccccttgtaacttgatgtggatccatgcttcttgttgatgcggtgagtgaagtagcatgaagatgtttatgctcagctcaaaagtgtttgatctggtctcggtcatcgcttccagagccatctggttttgacagtgaaaatggtgcgttcctaagttttggcactggtgttttgcactcggaaattcatcagtggaacataattagtatattcgctctg

SEQ ID NO: 112907 - DNA, 2261 bp, Zea Mays
aaagaaaagccagtcaaacccaaccacctcagctcagcatcgaggtcgccttcccctcctccagttgtccccagaaaccgtgtcccctactctctctctctctctctatctctcttctcccctcgatcaacagcaacagcggcggtcagaagcttccgtcgcgacagctcccgacctcctgccggtcttcccctctcctagtcggcgcgaatcccgaggcggaggaggaagaggggagcggagtgggggtgggccccatcagccatgagtctcacggggtccgccctggaggcggcgctacaggcggtggggcgcggcctcgacgcagctggagaccaccggctgctctactgcaagggaggtggaaggctcgtcgcgctcgaggaggaccgtgcgcgggacctcccgctccccgacggcggcgtcctcccgagcgtgccccccgatgtcgaggtcgagcagtgccgcagagaccccgagcgcatccgccccttcccctctggcccaagctctgccgcagcggatgggccctttgtctgcagcttcgataagatggctgagtatttcaacaggaagtcatgcttgtccgagacagtaccgctgggttccttcaactctctgttcagcttcaccggttcatggaagaatgatgctgcggctacgaaggcccttgcgattgatggctattctctgcctctgtttcgagtgaaaattaggagttctgaactgacgctgcttgagagcgttaagcacgcgatcccaaatgtttgggatccatcagcattggctaggtcagtagctttattgagaattacggtacccatattattatttctgttacggttggtggtaaggacgaagtatacattaagcagcattcatcgtcccaattgtcagggttagagttcaaaaattatgtgagggaaattgggagggaaagattctcagatgtggaaaacaagtcaaatgcaactcctatcaattacagcgagaaggatattacagtaatattcagaaggaggggtggttgtgatcttgttcaaagttttagtgattggaaaggaactgttgcctcagcaccagatgtcataggcatgacctttctttcaattgtctctcttgttgacgatgtaccaggaaagaagcaccttgctcgtgcagttgagctatacttgacctacaaacctccaattgaagaattacagtatttcttagattttcaagtcccactagtttgggctccagctccaccaggtattgctagtcaccataggaaggaacctgtctgcccatcgcttcagtttagcttaatgggcccaaagctcttcattagcacagaacagatctctgttgggcgccgaccagttgttggcctcaaactgctcttggaaggagctaaacagaatcgtttggctattcacttgcagcaccttgtctcattaccaaaaatattcctacctcattgggactctcatattaccattggacctccaaaatggcaaggccctgaagaacaagacagccgatggttcgagccaatcaagtggaagaactttgctcatgttagcacagcacccatagagtacactgaaacaaatattacggacctatctggtgtttatattgttacaggtgcacagttgggagtgtgggattttggtgcaaagagtgttctccacctcaaacttttgttctccagggttcctgggtgcacaattagaagatcagtgtgggaccacagcccatcaagttcttcaattcataaagcagatgaatcttcatcgtcctcgagtgataatgctaaacttctgaagattattgacatgacagaaacattgaagggcccacaagatgcacctggccactggctgatcacaggtgctaagttgggtgtcgagaaaggcaggattgtagtgcgtgcgaagtactccttattgaattattaaccaaatgtttaaagcattcattcactcactctgatattgagcactgtgttttaaggtagcatttgttcttttgtttttcatgtatgactttccttcccccttgtaacttgatgtggatccatgcttcttgttgatgcggtgagtgaagtagcatgaagatgtttatgctcagctcaaaagtgtttgatctggtctcggtcatcgcttccagagccatctggttttgacagtgaaaatggtgcgttcctaagttttggcactggtgttttgcactcggaaattcatcagtggaacataattagtatattcgctctg

SEQ ID NO: 112908 - DNA, 1151 bp, Zea Mays
aattgcagttctagtttaacacctgcgaggctaaagtctgttctcaccgatccacttcatccaatacacacgcatccataacacatgcgtactgccgatttgaacatcatgaactgaaaaacaaataaacgcgtgccattcacgagttcggacggagacgcctgctggatcgtttggttttattacacatgcgccactgtaaaacaccggttggtcacggctcacggaaacggcgcgtgacgcttcatctcgtgcggcacgacgtccaccgcgaagcccttgcggtggcggagccagtagtcggcctggcccgggtgctcctcggcgggcgcctcgacgtcggccctagcggcgcggagctcctccgtggagaggccgtacctgtcgtctcgcttccggaccaggtcggggcgcacggctgcggcggggtcggcctgcggggacaccatgagcgcgggggcgcccagcggcaggcggtcgccgcggtccacctgccaggtgcaccagaacttgccgaacgtggcggccatgtggtccagctccgccttctccagcagccccgccacgtgcgggctcgtccacaggcctgacttgatctcgtgcgcgtgcgagtgccacagccgctgctcctccgccggcagcgagtcgaagatcttcctcgacacgatgtactccacgcctgcatgcagttaaaagaaaagatccatgtagatgcagtgtccttcttgggcgtgagcacatgccaaagaatcaattgaagatgacagtaagatggggtgcacggtgcacgcaccgatgagacgcgcgtcggctttgtcggagtcatagacggcgcactggaggaagtcctggttgaggcgggagacgtagtggtgcgtctccacctgccgcttcgggtcgtgcgcgtacagcgcgaacgtgcacatgtgctgcttcgcctgcttcacggggcgcaacgactgcatcgccgccgcgcccatgtccagcaccttggacgctaccgtggtcggctgcccgggcggcgcggtgctgctgccgccgccgccgcccacagaggccggggttggcagtggtttcccgtcgctggacgccatcgtcgggtcggctagaccgaacaaaaattcagccttgtgttacggcatcagatgagt

SEQ ID NO: 112909 - DNA, 1704 bp, Zea Mays
ctcgccaccgcttccttcccgatgccgtcgtcgacgatccgaagcatctccatcaccgtctccgacgacgacggtgctgcggcggcaccgtcacggcggccgcgcgctggaagacggaaggcggtggcgcgtagcttggggcagcgggcggtgcggctggtggcgcggtggtggcccgttctcctgctcctcccggccgtcgcgctcctcctcttcgaggcgtcgcggctccgcgcctcatccccgggcccctccccaccggtctccagcctcggacggctcgacccgaccacacgtctcgtccatggcgtgcgcgagccttgcttgaagctccttagccccaaaagtttggcaaatgtggtgttcccggagggtacaagactcgattctgtggtgagcagaatcacgtacaaaactgatgacgatgactatgacacataccactccgaagcaaactctacatatttactgcaacatgcggaagcaacaaggttcgacctgtttacaggatttcagacacttgctgaaagagaagatagcttcaaggtgaatgagactgttagtgtgcactgtggtttctacagcgacaatggtggcttcaaaatttctgaggaggacaggagatacatgagagcctgtaaagttgttgtgtctacctgtgcatttggtggtggggatgatctatatcaacctattggaatggccaattcttctattggcagggtttgctatgttgctttctgggatgaagtgacactagcagctcaggaagctgaaggaaaggtaattggtgatgatagcatgataggaaggtggcggatcattgttgtcaggagcctcccttttgtagatcaacgattaaatgggaagataccaaagatgttgactcatcgccttttcacagaggcaaggtactctatatgggttgactctaaataccaattacgaagagatcctataggaatgcttgaagctcttctttggaggacaaactctacatttgctatctctgaacatggagcacggagtaacatatatgatgaggggaaagctattgttcaaaagcacaaggctacccctgaagaggtagaggtacaattgactcggtatcgtcaagatggaatgccggacacaaaaagattgcacggactgaaagctctagccgaagcctctgttattgtgagggaactcacccctgcaacgaaccatttcatgtgtgcttggtttaatgaagtggttcgcttcacatctcgtgatcagctcagttttccatacgttttgtggcggctaaacatgcatggattgagcatgtttcctgtatgcactcgcagggatcttgtgaatagtttgggtcacacaaggaaagtaaaacctcttacacagacaaattcagggtcttctactacttcgtaaccttcctcccagttcatttgctggtagccaactaaccattgatttacatatggttctaatcgtcgatactcgacatctctggttcacaattttgttgttgtatattatcatctttgcgttcttcctgcgagggaatcctggatctgaaccagaaacacgttaagctgttgcttcactgcaacgcaatcacacgatgttgccactatatatgtaaaagatatgctttctttggttagaagagaatgaacacttttctgcctcctttccgtttcctgatggaacatgtgaaaa

SEQ ID NO: 112910 - DNA, 1575 bp, Zea Mays
tccccttatccgcttgacgctccccactgcgcctaaaaatggccgcgtcccactgaaccaaccgtctgcacatcctcctcctgttgccgctcgctcgccgtgccgcaatggctacggccgtcgcctcccatacgttgctctcctccgccttcgccccgcgccactaccaccgccgcctgacccggaccgcgtccgtggggccgcgccgggccgccccggtgggactggccgtgcggtgcgagaagagcgacaagcagaagaggcagccgctcgccgcgctcgtgccccgcgagcagcgcttcatgttcgagggagacgagctctgcggccccgattgtaaccctggactgacagtgtccatcctattttgttcatgtttcaccgtggccatcttaatccacctcagaggcttcgactatccttttatgtgcatgatgaagggcaatcaagttacaatagaactgcgtacattatatatgttatctgccatgtgccatcatatccaaaattacccatgggctgtttgtggtgagagagaattcattaaaaatgagcttaattggacatgcaagtcaaagtgaactgatggttgccaaccagcctgttcataattgtgacttgtttaggatcagttactaatactatgggtacaaagtgaatggtttgtttgtactatgccttgttctttcttctaatgaattactccacaagtaattgtgtctactgaaatctgattcagtgatttaatttgcaggacatatggaatacaacctggtatcctaaggctgcagatcatgtaactaccgagaagacatggtatgttgttgatgcaacagacaagatcctaggcaggctagcatccaccattgcagtacatatcaggggaaagaatgaacccacttacactcctagtgtagacatgggagcttttgttattgtggtcaatgcagataaggttgctgtttctggtaaaaagcggtcacaaaagctttataggaggcactccggaaggcctggagggatgaaagaagaaacttttgaccaacttcagaaaagaattccagagagaatcattgaacatgcggttcgtggcatgctccccaagggaaggctgggaagaagattatttacccacctcaaggtatacaaagggacagaacatccgcacgaggctcaaaaacctgtcccactcccgatcagggataaaagaatacaaaaaactggatagagaattcatcgactgaaaaggatgcagtggcgaattcctccccagaaggttttgccctttgtttggaatgctatcctcataaccatgcctctgatcggggaggggggggggggagtataaatcctctttgtaattttgatgtttaccaatgcatgaaattcagtcaaatttctgtcaatgagtagtcatgtaatatggtacggtttaaatcaacctaaaatctttattttccagttgaagtttgtaattttgacctcgtatggtatgaagtggcagattgtttcaatgttcggcctgccatctggatatacgaaattgatcgacagttttcataaccaattttcttg

SEQ ID NO: 112911 - DNA, 1309 bp, Zea Mays
tccccttatccgcttgacgctccccactgcgcctaaaaatggccgcgtcccactgaaccaaccgtctgcacatcctcctcctgttgccgctcgctcgccgtgccgcaatggctacggccgtcgcctcccatacgttgctctcctccgccttcgccccgcgccactaccaccgccgcctgacccggaccgcgtccgtggggccgcgccgggccgccccggtgggactggccgtgcggtgcgagaagagcgacaagcagaagaggcagccgctcgccgcgctcgtgccccgcgagcagcgcttcatgttcgagggagacgagctctgcggccccgacatatggaatacaacctggtatcctaaggctgcagatcatgtaactaccgagaagacatggtatgttgttgatgcaacagacaagatcctaggcaggctagcatccaccattgcagtacatatcaggggaaagaatgaacccacttacactcctagtgtagacatgggagcttttgttattgtggtcaatgcagataaggttgctgtttctggtaaaaagcggtcacaaaagctttataggaggcactccggaaggcctggagggatgaaagaagaaacttttgaccaacttcagaaaagaattccagagagaatcattgaacatgcggttcgtggcatgctccccaagggaaggctgggaagaagattatttacccacctcaaggtatacaaagggacagaacatccgcacgaggctcaaaaacctgtcccactcccgatcagggataaaagaatacaaaaaactggatagagaattcatcgactgaaaaggatgcagtggcgaattcctccccagaaggttttgccctttgtttggaatgctatcctcataaccatgcctctgatcggggaggggggggggggagtataaatcctctttgtaattttgatgtttaccaatgcatgaaattcagtcaaatttctgtcaatgagtagtcatgtaatatggtacggtttaaatcaacctaaaatctttattttccagttgaagtttgtaattttgacctcgtatggtatgaagtggcagattgtttcaatgttcggcctgccatctggatatacgaaattgatcgacagttttcataaccaattttcttgggtggcgaggtgtgatattttcttctgagtttgtagaatagacatgtgcttcctcatgtgacctatatcttttggtaaaattgttgtggatgtaactgaatgctggaatgcgtgggaataaacatggaaacataaaataaaataccacacatacag

SEQ ID NO: 112912 - DNA, 1875 bp, Zea Mays
tccccttatccgcttgacgctccccactgcgcctaaaaatggccgcgtcccactgaaccaaccgtctgcacatcctcctcctgttgccgctcgctcgccgtgccgcaatggctacggccgtcgcctcccatacgttgctctcctccgccttcgccccgcgccactaccaccgccgcctgacccggaccgcgtccgtggggccgcgccgggccgccccggtgggactggccgtgcggtgcgagaagagcgacaagcagaagaggcagccgctcgccgcgctcgtgccccgcgagcagcgcttcatgttcgagggagacgagctctgcggccccgacatatggaatacaacctggtatcctaaggctgcagatcatgtaactaccgagaagacatggtatgttgttgatgcaacagacaagatcctaggcaggctagcatccaccattgcagtacatatcaggggaaagaatgaacccacttacactcctagtgtagacatgggagcttttgttattgtggtaagcgttctctcaatacctatagtgtttggaatccctacagttaacaggtagccagctaacaaattgttagctgggttgagccagctaatgaactaattgttaactgtgagttagctaacaattagttgtgggtgtttggaacctgtatagctaattttagcagctaactattagctgtagaggttccaaacagggccttagtatacatgctttacttccctcagattatttggtactgaggtgagtaaccttcctcaaataatcttcaactgtagttgtgtttaatgtttatgttagcatagtccttttgtgactggtgcatctctaaaggctcattaccacgtattccctcagttccaagttataagactttttggattttttttggatccattacttttgctacgcacttagacataattcatgtccagatatttagtaacaactatgtatctagaattaccaaaacatcttataatttggaacagatggagtagatgatatgcattattgtgttacactacaatgctgagagtcattaacaaccttttctattcacataggtcaatgcagataaggttgctgtttctggtaaaaagcggtcacaaaagctttataggaggcactccggaaggcctggagggatgaaagaagaaacttttgaccaacttcagaaaagaattccagagagaatcattgaacatgcggttcgtggcatgctccccaagggaaggctgggaagaagattatttacccacctcaaggtatacaaagggacagaacatccgcacgaggctcaaaaacctgtcccactcccgatcagggataaaagaatacaaaaaactggatagagaattcatcgactgaaaaggatgcagtggcgaattcctccccagaaggttttgccctttgtttggaatgctatcctcataaccatgcctctgatcggggaggggggggggggagtataaatcctctttgtaattttgatgtttaccaatgcatgaaattcagtcaaatttctgtcaatgagtagtcatgtaatatggtacggtttaaatcaacctaaaatctttattttccagttgaagtttgtaattttgacctcgtatggtatgaagtggcagattgtttcaatgttcggcctgccatctggatatacgaaattgatcgacagttttcataaccaattttcttgggtggcgaggtgtgatattttcttctgagtttgtagaatagacatgtgcttcctcatgtgacctatatcttttggtaaaattgttgtggatgtaactgaatgctggaatgcgtgggaataaacatggaaacataaaataaaataccacacatacag

SEQ ID NO: 112913 - DNA, 100 bp, Zea Mays
ggttcaggagccccgatcttagagcatctgcatttcttctagatccgttgtatcgctcggcattcaaagacctagacaaaggctgtggatcaggtattta

SEQ ID NO: 112914 - DNA, 801 bp, Zea Mays
ccctgtgggtccgcccctgctcgaccagaggcggagagcactatagtcacgagctccacagtccaagctcgcactcgcaagtgctagcatctctcggtaatggcgaagtcgcgtggcttcgtgatggcggctgtgatggtggtggcggtggtggtggccgtggtatcggtggcgccgcgcggcgcggaggcgaagacgacgatcgagccgtgctcggggtccgactcctgcccggcgctgctgggttacacgctctacgccgacatgaaggtgtccgaggtggccgcgctcttcgccgtcgacccggcggcgttgctggccgccaacgcgctcgacttcggcgccccaggggcggcgcaccgcatcctgcccatgggcctcttcgtgcgcgtgcccacccgctgctcctgcgccgacggcgtccgcaagtccgtctccgtccgctacgccgcgcgcccggccgacacgctcgccaccgtctccgacgtcgtctttgcggggctcgcctcctccgaccagatccgcaacgagaacggcctcacctccgccgaccccgacgcgccgctggacgccggccagaagctcgccattccgctgccatgcgtctgcttcaactcatccgacaacaacctccccgcggtgtacctctcctacgtcgtgcaggtcggggacaccgtgcccgccatcgctgcaagctacgagaccaccgtcacggatgtcatgaatgtcaatgccatggggagtcccgtcgccgcgccaggcgacattctcgccatcccattgccaggtaggagtacatga

SEQ ID NO: 112915 - DNA, 1538 bp, Zea Mays
ggtgaagagccagccaaagcgcccaagctacgaaacgccaactcgtcaagaaccccagttgttgcccggccgcgcagccatgaggtggggacttagaagcagctgtaagcaacggcacaaggaatccctgcaaccactggagcaagagagcaaggggaagagcaaggccagcttctcgtccttcttgcccctggcatggcttgccaagctcacggccaggaacggcgtgcccgctaccaaggtcgtgcatgcgacgtcgtccgcggcgaagaacacggctcaggccgccaccgcattcccgtcctgcttccacaagcccgccagccccagcaccgcgtcggcgtcgcgaagcagcctgagcctggcctcttcgtcatcatccgccgccgacgcagaggcagccggcattgtcccttgccgtcgcgacgacgctaccggcggggacacggtggcaggcatcgccccgcgccgccgctcggtgggcaacgatgacgccaggaccgaggccgcgaccgcgaccgcgcggcagctgtaccacagtcgtcgccactactcggtcggtggcgaccgcgaccttcctcacctcggccacctcgtctccctctccccgaacccgaaggcggcgccgccgacaccggcgccggtgcggacgctgacgccgacgctgcccccactgccttccgattccgacacggacgaggagaagcggacgacggcacggaaccgccggcgccggcgccggcgcgccgtcagcgggcggcggtcgttctcctcggcgaaggccacggtgcgtgtgcgctcgcctaggccgcctgccgcggcggtgtcggagctggagcggttcgcggtggtgcggcggacgcgggacccgcatcgcgcgttccgggcgtccatggtggagatgatcgcgagcaagcgcatggtggggcgtcccgacgagctggagacgctgctggcgtgctacctgtcgctcaacgccgacgagcaccacgactgcatcgtcaaggtcttccggcaggtctggttcgagctcaacaacgcctcccgtgccactgccaccgccccgccgcagcgcactgcgcacctgagcggctgagcctgctggctgctgccgtgctaccagaccaccaaccggctcggaatccgcaccgcacccctgcgggcgtcggcatccatcatggcgtgtccggagccgacgtggacgctgatttccacgcgttatttttctgggcctacgtgccgacgtggccttttcacgcgtggccgcggaaaagctgtggcctgttgctgtgagggcgtacccgccctcgcttttgaggtgctctgttgtttgcgggcgtgcgcgcactgcagtattgcgtgcttcttgagtcttgagtattgtgtgtttgtcagcccagcttcaggtagtgaaatgcatgaaagggacaaaaataacgctactcgtttcatgcacttggaaccgtatgctccagtcctgtaatttggcggcatgtatcgcatgcaaaagattccaagatctccagtttctagagttc

SEQ ID NO: 112916 - DNA, 2276 bp, Zea Mays
ggcccacgctcggaaatcgccgcgacgaggtgctggattttgacttgctaccagaaaccggagctaaccaaatctgccgcaaaacccctcgcctgcggcttcgcgttggccggcaaccgccgctgttgccgacacttcaacgcgtacctcgcgcccccgcgctgctgatgcgatcagcgacgcacgccagatccgagcttctgtaggaccttcagccgtccccgtcccatgggggactgcgtcgtcgaggacggccacgtgcaccatccctcggatgaggtggagggcgcggttccattgacggtagccgtggagctcgatgagcgggcgggagagtcacgggaggagggtggtgggcagcggaagaaagtgggcgggatccgaagggagccgtcgttctcgcggtggtgcagggacacctctgtcgccgccgcctccaatactgccgttgctgcggcgatcagcgacagcgacagcgacgactcagaggagttcgacctaccgctcctgccatcctcctcgggcggcgggagctcacctatggacattgaggcgggggcgacggtgagatctgatgatctgccgatctcaccgaggttgcttgcgaaggtcattgggttgatagcgtgttggtacacgctgagcacatgcttgactctgtacaacaaggagatgctggggaagcacatgtggaagttcccggcgccattcctgatgaacacggtgcatttcacgatgcaggctgtggcgtccagggccatagtgtggttccagcaacgtggcctggagggagggccaaacaaaatgtcgtggaaggattactgtttacgagttgtcccaacagctttggctactgctcttgatataaatctgagcaacatttcacttgttttcattactgtgacatttgctacaatgtgtaaatctgcttctccaattttcattcttctctttgcttttatgttcaggcttgagaaaccaagctttagccttcttggaatcatgctggttgtttcgtttggagttctactaacagttgctaaagagacagaatttaatctgtggggatttatatttattatgcttgctgctgttatgtctggtttccgctggtccatgactcagattcttctccagaaagaggaatacggattaaagaatccttttaccttgatgagccatgttaccccggtgatggcaatagtaacagcaattatttccattgtgatggatccatggcacgacttcagagcaagtcacttttttgatagttctgctcacataataagaagcagcttgttgctgcttttaggtggcgctttggcctttttcatggttttgacagaatatgtccttgtttctgtgactagtgctgtaacagtgactgtagcaggaattgtgaaggaagctgtcactattctggttgctgtgctattcttcaacgatccatttacatggttgaaggcgcttgggctagcaataataatatttggtgtcagtctattcaatatttacaagtataaaaggttcaaaaaagggcattacaatgaaaatgctgggacaaatacccaatcttccaattggacttcaaaatacgtcatccttgatgaagatactgaagctcaagatgatacaggctgatctgaatgtgatagaatgcagactatatatggcgcttccagagaagcaagatcatctgtgcctgcatagtcttactttcacaggctaactgacttcatattctttgagttcatcaattactctggtcagccatgcacgaacatgacgcttgcagccgtgtggcaagttgggaagattacacatacatggaacatacaagatacaacctggtatcagtacatatgttttgtcctttcattcaaaacaaagaacagtgcatatatctgaacgaggcattctgcattatgtccactaagaaaatgctccatcaaatacaattagaactacagctgacacacttaactttctggaagaggataggactcaattttatagtccattctgattgttgaagagagattcggcatcggaacgtagctttcttttctttatttatttttagatgaaaataaacactcgtatatgtaatgttgtatgtatgggactgtatactgttttacacacgagcaccacaagttgaagttcttcccaccgtattggtattactcgtcttgagagcacagtgccaagtcggcccggtccatctcaactttgtttcccgtattttgagcagcttcaaaattgaactattagac

SEQ ID NO: 112917 - DNA, 1031 bp, Zea Mays
atttattattaaggcatgactgtgcctatcccagattactcttttaagtggttttatgacagatctcttcacttgcaggttttgacagaatatgtccttgtttctgtgactagtgctgtaacagtgactgtagcaggaattgtgaaggaagctgtcactattctggttgctgtgctattcttcaacgatccatttacatggttgaaggcgcttgggctagcaataataatatttggtgtcagtctattcaatatttacaagtataaaaggttcaaaaaagggcattacaatgaaaatgctgggacaaatacccaatcttccaattggacttcaaaatacgtcatccttgatgaagatactgaagctcaagatgatacaggctgatctgaatgtgatagaatgcagactatatatggcgcttccagagaagcaagatcatctgtgcctgcatagtcttactttcacaggctaactgacttcatattctttgagttcatcaattactctggtcagccatgcacgaacatgacgcttgcagccgtgtggcaagttgggaagattacacatacatggaacatacaagatacaacctggtatcagtacatatgttttgtcctttcattcaaaacaaagaacagtgcatatatctgaacgaggcattctgcattatgtccactaagaaaatgctccatcaaatacaattagaactacagctgacacacttaactttctggaagaggataggactcaattttatagtccattctgattgttgaagagagattcggcatcggaacgtagctttcttttctttatttatttttagatgaaaataaacactcgtatatgtaatgttgtatgtatgggactgtatactgttttacacacgagcaccacaagttgaagttcttcccaccgtattggtattactcgtcttgagagcacagtgccaagtcggcccggtccatctcaactttgtttcccgtattttgagcagcttcaaaattgaactattagacgataaatattcg

SEQ ID NO: 112918 - DNA, 1024 bp, Zea Mays
atttattattaaggcatgactgtgcctatcccagattactcttttaagtggttttatgacagatctcttcacttgcaggttttgacagaatatgtccttgtttctgtgactagtgctgtaacagtgactgtagcaggaattgtgaaggaagctgtcactattctggttgctgtgctattcttcaacgatccatttacatggttgaaggcgcttgggctagcaataataatatttggtgtcagtctattcaatatttacaagtataaaaggttcaaaaaagggcattacaatgaaaatgctgggacaaatacccaatcttccaattggacttcaaaatacgtcatccttgatgaagatactgaagctcaagatgatacaggctgatctgaatgtgatagactatatatggcgcttccagagaagcaagatcatctgtgcctgcatagtcttactttcacaggctaactgacttcatattctttgagttcatcaattactctggtcagccatgcacgaacatgacgcttgcagccgtgtggcaagttgggaagattacacatacatggaacatacaagatacaacctggtatcagtacatatgttttgtcctttcattcaaaacaaagaacagtgcatatatctgaacgaggcattctgcattatgtccactaagaaaatgctccatcaaatacaattagaactacagctgacacacttaactttctggaagaggataggactcaattttatagtccattctgattgttgaagagagattcggcatcggaacgtagctttcttttctttatttatttttagatgaaaataaacactcgtatatgtaatgttgtatgtatgggactgtatactgttttacacacgagcaccacaagttgaagttcttcccaccgtattggtattactcgtcttgagagcacagtgccaagtcggcccggtccatctcaactttgtttcccgtattttgagcagcttcaaaattgaactattagacgataaatattcg

SEQ ID NO: 112919 - DNA, 1727 bp, Zea Mays
actatacatcgattcgtgatctcggtctttccaaaccaacaggtgttgcctgcccaagtgcccagcctcgcttctccagtcaattctcagcctcgtcctccgcctccgctcccgctctctcctctccttggcctccgcttccgctcctgcctggaggctgcatcaaaccctaccgctccggacctcccggctggccgcgagatgcgacgcctgtccggcccctaatccttctcctcgatactgcccctcgcccgcccgcccgccggcatgggccgctacgggcccttccctgccgccgccggtgatggcgggggctgcctgcccctgccgattgtagcggctgaaggcgcgctggctgtcctggacggcgccattgcgaccgcggccttcgtgcagttagcaaggattcataggcacaaccagctacaaggatggactcggcaaaagatattccattttatgattggtctatcaaacatagtattcctagtatatttcgtgtctaccatcattgctacttgtcagagatggatttgctgggtacatggatgtggatttgttctcatggctagtccacagatattgcttcttgcttctttcctcttgctactgtcattctgggttgacctgtgtcatcagacaaatgatgaagacgaagaagatggaaggagtcagagtcaccatgaagctttactagacagaacaaaagcgaaacctggcattcatcctgttaatatccgtcagaggtgttgcccaggaatacagcttggaagccggcaaaaatttgtgattttggtgcttctactgtcatttgttgttatgcttgcctttgccatcctcatatgggttggtagaggagacaatcctatcgattcttctctactgaaaagggtttatttggatgtattttcagtagtagttattgtacttggtggtgctctggcatgttacggtgcagtgttattctcgaagatgagcaaagttcgttctgaaactgtatcaactgagaagtggaaggttgccagtttagctgctgtctcgctgatctgtttctcgtcttctgctatacttgcacttgtgactaatgttccagtgcttttgtattggtactcaacagatgtggacatcatcaacaatgctgttattttgtttatatattacttcataggctcgtcagtgccatcaggatttgttctatggatcatgagagagatgcctcatcggcaggtagttgaaagatccgtagaatcgagggtggttactttgttcagggaaagaccatcaactacgcaggatccacagtggaggacagctgtcacatcctcaaacaaggccctcaagtcaagcccaatttaacctgaagacaaaccatcgacagtgatacctcacgttctgcttaatgtgctgggactaataccaacacgtcagggtcacaactggcgtctgctggcattgcgctaactgatgcatttagaactgaaggttggggccatatttgaagaattaacaaaatgtaaatagctttggcagttactttacccttttagatgtaacaaactcatcccgttggttacatgtaccttgttttatttagcgcttcatctaatttaccgtagaaggcatgtgttcaaccgatctttgggctgtttggttcttttagtcacttctaaattttaggtactaaactttagttcctagaaattctatttaaaaactctattttagtc

SEQ ID NO: 112920 - DNA, 1676 bp, Zea Mays
actatacatcgattcgtgatctcggtctttccaaaccaacaggtgttgcctgcccaagtgcccagcctcgcttctccagtcaattctcagcctcgtcctccgcctccgctcccgctctctcctctccttggcctccgcttccgctcctgcctggaggctgcatcaaaccctaccgctccggacctcccggctggccgcgagatgcgacgcctgtccggcccctaatccttctcctcgatactgcccctcgcccgcccgcccgccggcatgggccgctacgggcccttccctgccgccgccggtgatggcgggggctgcctgcccctgccgattgtagcggctgaaggcgcgctggctgtcctggacggcgccattgcgaccgcggccttcgtgcagatattccattttatgattggtctatcaaacatagtattcctagtatatttcgtgtctaccatcattgctacttgtcagagatggatttgctgggtacatggatgtggatttgttctcatggctagtccacagatattgcttcttgcttctttcctcttgctactgtcattctgggttgacctgtgtcatcagacaaatgatgaagacgaagaagatggaaggagtcagagtcaccatgaagctttactagacagaacaaaagcgaaacctggcattcatcctgttaatatccgtcagaggtgttgcccaggaatacagcttggaagccggcaaaaatttgtgattttggtgcttctactgtcatttgttgttatgcttgcctttgccatcctcatatgggttggtagaggagacaatcctatcgattcttctctactgaaaagggtttatttggatgtattttcagtagtagttattgtacttggtggtgctctggcatgttacggtgcagtgttattctcgaagatgagcaaagttcgttctgaaactgtatcaactgagaagtggaaggttgccagtttagctgctgtctcgctgatctgtttctcgtcttctgctatacttgcacttgtgactaatgttccagtgcttttgtattggtactcaacagatgtggacatcatcaacaatgctgttattttgtttatatattacttcataggctcgtcagtgccatcaggatttgttctatggatcatgagagagatgcctcatcggcaggtagttgaaagatccgtagaatcgagggtggttactttgttcagggaaagaccatcaactacgcaggatccacagtggaggacagctgtcacatcctcaaacaaggccctcaagtcaagcccaatttaacctgaagacaaaccatcgacagtgatacctcacgttctgcttaatgtgctgggactaataccaacacgtcagggtcacaactggcgtctgctggcattgcgctaactgatgcatttagaactgaaggttggggccatatttgaagaattaacaaaatgtaaatagctttggcagttactttacccttttagatgtaacaaactcatcccgttggttacatgtaccttgttttatttagcgcttcatctaatttaccgtagaaggcatgtgttcaaccgatctttgggctgtttggttcttttagtcacttctaaattttaggtactaaactttagttcctagaaattctatttaaaaactctattttagtc

SEQ ID NO: 112921 - DNA, 1148 bp, Zea Mays
agctaattagctttatatttctcaaaattatgatgttacagggttgacctgtgtcatcagacaaatgatgaagacgaagaagatggaaggagtcagagtcaccatgaagctttactagacagaacaaaagcgaaacctggcattcatcctgttaatatccgtcagaggtgttgcccaggaatacagcttggaagccggcaaaaatttgtgattttggtgcttctactgtcatttgttgttatgcttgcctttgccatcctcatatgggttggtagaggagacaatcctatcgattcttctctactgaaaagggtttatttggatgtattttcagtagtagttattgtacttggtggtgctctggcatgttacggtgcagtgttattctcgaagatgagcaaagttcgttctgaaactgtatcaactgagaagtggaaggttgccagtttagctgctgtctcgctgatctgtttctcgtcttctgctatacttgcacttgtgactaatgttccagtgcttttgtattggtactcaacagatgtggacatcatcaacaatgctgttattttgtttatatattacttcataggctcgtcagtgccatcaggatttgttctatggatcatgagagagatgcctcatcggcaggtagttgaaagatccgtagaatcgagggtggttactttgttcagggaaagaccatcaactacgcaggatccacagtggaggacagctgtcacatcctcaaacaaggccctcaagtcaagcccaatttaacctgaagacaaaccatcgacagtgatacctcacgttctgcttaatgtgctgggactaataccaacacgtcagggtcacaactggcgtctgctggcattgcgctaactgatgcatttagaactgaaggttggggccatatttgaagaattaacaaaatgtaaatagctttggcagttactttacccttttagatgtaacaaactcatcccgttggttacatgtaccttgttttatttagcgcttcatctaatttaccgtagaaggcatgtgttcaaccgatctttgggctgtttggttcttttagtcacttctaaattttaggtactaaactttagttcctagaaattctatttaaaaactctattttagtc

SEQ ID NO: 112922 - DNA, 448 bp, Zea Mays
ttgttccaggataccaagttccactcaggcatcacataaaagaagtgcctcgcccgacccaggtcgccggagatagagtgacagatctgagatgttccacatccgcaccgccgtccttcttccgtagctcgttctccatgatggcgtccacgtcgatgggcgggtcggacgcaaatatctcgttcgggctatgggggaaggcgatgagctcagaggcggtcggggaggtggtgagggcgccaagcatggagatggtagaagggagtgggtgtgcgaggggagaggggcaggacagcggtgcggggggtgtgtggaaggggcaccgggggtgggggaagaggcgggcggaggcatggccacgctcccggatgaggatggcgagcgtcatagggcctgcatgctgctagatcgctagagcttgctcgcagatggagcggatgggttgttt

SEQ ID NO: 112923 - DNA, 486 bp, Zea Mays
ttgttccaggataccaagttccactcaggcatcacataaaagaagtgcctcgcccgacccaggtcgccggagatagagtgacagatctgagatgttccacatccgcaccgccgtccttcttccgtagctcgttctccatgatggcgtccacgtcgatgggcgggtcggacgcaaatatctcgttcgggctatgggggaaggcgatgagctcagaggcggtcggggaggtggtgagggcgccaagcatggagatggtagaagggagtgggtgtgcgaggggagaggggcaggacagcggtgcggggggtgtgtggaaggggcaccgggggtgggggaagaggcgggcggaggcatggccacgctcccggatgaggatggcgagcgtcatagggcctgcatgctgctagatcgctagagcttgctcgcagatggagcggatgggttgtttgtgcgaaaggctgggtgaggggaacgagggcgggcgcg

SEQ ID NO: 112924 - DNA, 339 bp, Zea Mays
atgggcatgagcaccaccactgacctgtccgcgccaccccactccgccaccctgccctgccgcatggcctcctcctcgtcatcttcctccgtcgccccgtggccgcgtccagacaagcaccgcggcgcgggcgccctggtccgccgcgcgcagctcgtcctgtcgcgcgaggtcgggtggtgcgggcagcgcgcgtggcggaagctgctcaggcggctggcgcaggagaccaggtgcgtgtgcagctccccgacggcggcggccacgggtcggcccatcacgttcggctacgacgccgccagctacgccaagaacttcgacgacgggcgcagccccgcg

SEQ ID NO: 112925 - DNA, 1149 bp, Zea Mays
aatcggaggacgcaagcgcacgagagatgttgccaattcacattctgcgtgcatcacatggaattcctccagttgcaccaactcaaatagcgcagccaatcttcctcctcccaaacaaaggctctctcctcctctccaccacgggccaacaagcgtatcgtctctgagtctctcgtctcatgccctggccaacatgagcacgtacatatctctctccttagagcgcagcagcagcgtggtccgcgacgccgccaagtccgcgcctccgggcagtggtgtcagtgccccgtatccacgcgcgggcgcgggcgcgggcacgtcgctttccctgtccggcgcagcggcggcgcacgggcacggccagtacctccccctcaacgaggacgactccctggacatggtcctcttcgacgtgctccgcgaggcatccggctccgcacccggcgccacctaccagccgccctcgtcgtcgttgcctacgctgaaggcgctcgcttccggcgcctcgcgcaagggcggtggcaacaacggcaacggcagtagggccgcgcacgcacccaaggcggccacggggcggcactaccgcggggtgaggcggcggccgtggggcaagtacgccgcagagatccgtgacccggcgcggcacggggcgcggctctggctcggcaccttcgccacggccgaggaggccgccgcggcgtacgaccgcgccgcgttcggcatgcggggcgccaaggcgctgctcaacttcccgccgccggccgcgggctgcgggaacgccgcaaccgccacggcgaagcaggctgctggaagccaagtgaacaacggcgaatgcgatctcctcgaagaaaatgggtcatcgcatgatagtgaatgtttctaagcattgtccagtccgttgattgaccagagtggtatgtggtagcgatccctcttctcgttgtaaggacatgccgtgagctgtgatgggttcaaattggggggatgatgatagccataaaactccaatgtttcttttttgtgcgtgtgtgtgtttccttcaaaatctggtttgggagcgaacgtgcacgatcctatttggatgcttgtttaatcatgaatatatacaaaaaaaaaggtcaagatgaaaacatgattttgttcgctgca

SEQ ID NO: 112926 - DNA, 2259 bp, Zea Mays
tataacgcccacaatcccctcttcccagccgcgccgccgccgccgtgaacgagatggcggcagcccttttgctccgcagtctccggccatcggtgagccgggcacatatccaccttctttcccatgcctcctccccgacggcgctggggtctccccttttaccccgcctctactcctctgcggcagcgtcaaccgccgcctctcctgttttcacgcccggcggcgtcatggacccatcccgcatccgcaacgtagcggtgatagcccacgtcgaccatgggaagacgacgctcatggaccggctccttcgacagtgcggggccgatatcccccacgagcgcgccatggattcaatcagccttgagcgcgagcgcggcattaccattgcctccaaggtcacttctgtctcttggaaggaaaatgaactcaacatggttgatacacctggccacgctgattttggtggtgaggttgaacgagttgttggaatggtggaaggagctgtcttggttgttgatgctggagagggacctttagcacaaactaaatttgtgctttcaaaagctttgaagtatggcttgcgtccaattcttctcctcaacaaggttgataggccttcagtttctgaagaaacctgcgatgaagtagagagcttggtttttgatctttttgcaaatcttggtgctacagaagaacagttagatttcccagttctttatgcatccgctaaagagggttgggcttccttaactttcaccaagagcccccctgataatgcaaagaatatgtcttcactgctcgattccattgtacgacatgttccttcaccaaaagctgatcttgaggctccattccaaatgttggtttccatgatggaacgtgatttttatctaggacggatactcactgggagagtaaggtccggagttgtccgtgttggtgacaaagtccatggtcttcgcagtacagatgatggagttcataaaattgaggatggaaaggttgtcaaactcatgaaaaagaaaggcacaaatatggtaacagtagaggctgcaggggctggtgatataatttcaatggcaggattggctgctccagcaattggacatactgtggcaaattcagagatattgagtgctctgcctacaattgagttggatcctcccacaatatctatgacgtttggcgtgaatgattcaccgttggctggccgggatggcactcatctaactggagcaaaaattggtaaccgcctgatggcagaggcagaaacgaatttggctattaatgttctccctggaccattatcagaatcttatgaagttcaaggaagaggagagcttcagttaggaattttcagcagctttacacggggaactggatttatgcaccgtgcttttcaggcatatgctaaatacagaggtccactgggcagtgtcagaaaaggagttctgatatctgttggcaagggacttatcacttcacatgcccttatgagtttagaagctcgtgggatcctctttgtatcccctggaatggaggcatatgaagggatgatagttggtgagcactcacgtgacagtgatcttgaggtgaatcctgtgagaactaaagaacttacaaatatccgagcccctggaaaggatgaaaatgtccgtttgtctccaccccgattgatgagtttggaagaggcaattggatatgttgctgcagatgagcttattgaggttactcccaaggtcgtacgtcttcgaaagaagtacttggattccactaagcgtaagatgatgaaaaacaagcctatgaattagaactccagagacaacaaaattacatcaagcactgccagcactactatataagtttatcatgcaagactcttgcagcaagagtgttgctgtctcttgcagcaagagacagcatttatgtataggttggtgttcaatgttgcaacctgagctctttaccagcagcttcacccaggttttacgtgcacacaggattggctgacagaataagcccaccgtagcagctactggaggtaggatcctcgttggttatatctatttagacttttttatggtgaaatttcagacacccacaggttctttgaaggttgtattattctttggaagttcaagaaatgcaggccaatccccataggtattttgtttgaaccggcttctttgttgacaattttatgaccatgtgttattactgattaagtgcaagaaaaaacaaatgaaattggcctccttg

SEQ ID NO: 112927 - DNA, 2581 bp, Zea Mays
ataacgcccacaatcccctcttcccagccgcgccgccgccgccgtgaacgagatggcggcagcccttttgctccgcagtctccggccatcggtgagccgggcacatatccaccttctttcccatgcctcctccccgacggcgctggggtctccccttttaccccgcctctactcctctgcggcagcgtcaaccgccgcctctcctgttttcacgcccggcggcgtcatggacccatcccgcatccgcaacgtagcggtgatagcccacgtcgaccatgggaagacgacgctcatggaccggctccttcgacagtgcggggccgatatcccccacgagcgcgccatggattcaatcagccttgagcgcgagcgcggcattaccattgcctccaagccatggccgtcacagggagagtgggcgaggcggccctagcgagcgcagcttcagctagcaccttcttgccgatcgctgctgttgacgcagcccacgcgtcctccttcagcctggcgttggcgagcacttcggacgcgtggtgagggtgaccacggtggactgcacggggcacaagggctgctcctccaaggccaagttgggcgtgtggttcggcgcggtggtggctagtcgagatccccatccggtggctgcagcatgtgtgcgattgtccatggcaagagaatctgaagataggggagagtggtcgtaaaagcatgtagagggtcacttctgtctcttggaaggaaaatgaactcaacatggttgatacacctggccacgctgattttggtggtgaggttgaacgagttgttggaatggtggaaggagctgtcttggttgttgatgctggagagggacctttagcacaaactaaatttgtgctttcaaaagctttgaagtatggcttgcgtccaattcttctcctcaacaaggttgataggccttcagtttctgaagaaacctgcgatgaagtagagagcttggtttttgatctttttgcaaatcttggtgctacagaagaacagttagatttcccagttctttatgcatccgctaaagagggttgggcttccttaactttcaccaagagcccccctgataatgcaaagaatatgtcttcactgctcgattccattgtacgacatgttccttcaccaaaagctgatcttgaggctccattccaaatgttggtttccatgatggaacgtgatttttatctaggacggatactcactgggagagtaaggtccggagttgtccgtgttggtgacaaagtccatggtcttcgcagtacagatgatggagttcataaaattgaggatggaaaggttgtcaaactcatgaaaaagaaaggcacaaatatggtaacagtagaggctgcaggggctggtgatataatttcaatggcaggattggctgctccagcaattggacatactgtggcaaattcagagatattgagtgctctgcctacaattgagttggatcctcccacaatatctatgacgtttggcgtgaatgattcaccgttggctggccgggatggcactcatctaactggagcaaaaattggtaaccgcctgatggcagaggcagaaacgaatttggctattaatgttctccctggaccattatcagaatcttatgaagttcaaggaagaggagagcttcagttaggaattttcagcagctttacacggggaactggatttatgcaccgtgcttttcaggcatatgctaaatacagaggtccactgggcagtgtcagaaaaggagttctgatatctgttggcaagggacttatcacttcacatgcccttatgagtttagaagctcgtgggatcctctttgtatcccctggaatggaggcatatgaagggatgatagttggtgagcactcacgtgacagtgatcttgaggtgaatcctgtgagaactaaagaacttacaaatatccgagcccctggaaaggatgaaaatgtccgtttgtctccaccccgattgatgagtttggaagaggcaattggatatgttgctgcagatgagcttattgaggttactcccaaggtcgtacgtcttcgaaagaagtacttggattccactaagcgtaagatgatgaaaaacaagcctatgaattagaactccagagacaacaaaattacatcaagcactgccagcactactatataagtttatcatgcaagactcttgcagcaagagtgttgctgtctcttgcagcaagagacagcatttatgtataggttggtgttcaatgttgcaacctgagctctttaccagcagcttcacccaggttttacgtgcacacaggattggctgacagaataagcccaccgtagcagctactggaggtaggatcctcgttggttatatctatttagacttttttatggtgaaatttcagacacccacaggttctttgaaggttgtattattctttggaagttcaagaaatgcaggccaatccccataggtattttgtttgaaccggcttctttgttgacaattttatgaccatgtgttattactgattaagtgcaagaaaaaacaaatgaaattggcctccttg

SEQ ID NO: 112928 - DNA, 2635 bp, Zea Mays
ataacgcccacaatcccctcttcccagccgcgccgccgccgccgtgaacgagatggcggcagcccttttgctccgcagtctccggccatcggtgagccgggcacatatccaccttctttcccatgcctcctccccgacggcgctggggtctccccttttaccccgcctctactcctctgcggcagcgtcaaccgccgcctctcctgttttcacgcccggcggcgtcatggacccatcccgcatccgcaacgtagcggtgatagcccacgtcgaccatgggaagacgacgctcatggaccggctccttcgacagtgcggggccgatatcccccacgagcgcgccatggattcaatcagccttgagcgcgagcgcggcattaccattgcctccaaggtcacttctgtctcttggaaggaaaatgaactcaacatggttgatacacctggccacgctgattttggtggtgaggttgaacgagttgttggaatggtggaaggagctgtcttggttgttgatgctggagagggacctttagcacaaactaaatttgtgctttcaaaagctttgaagtatggcttgcgtccaattcttctcctcaacaaggttgataggccttcagtttctgaagaaacctgcgatgaagtagagagcttggtttttgatctttttgcaaatcttggtgctacagaagaacagttagatttcccagttctttatgcatccgctaaagagggttgggcttccttaactttcaccaagagcccccctgataatgcaaagaatatgtcttcactgctcgattccattgtacgacatgttccttcaccaaaagctgatcttgaggctccattccaaatgttggtttccatgatggaacgtgatttttatctaggacggatactcactgggagagtaaggtccggagttgtccgtgttggtgacaaagtccatggtcttcgcagtacagatgatggagttcataaaattgaggatggaaaggttgtcaaactcatgaaaaagaaaggcacaaatatggtaacagtagaggctgcaggggctggtgatataatttcaatggcaggattggctgctccagcaattggacatactgtggcaaattcagagatattgagtgctctgcctacaattgagttggatcctcccacaatatctatgacgtttggcgtgaatgattcaccgttggctggccgggatggcactcatctaactggagcaaaaattggtaaccgcctgatggcagaggcagaaacgaatttggctattaatgttctccctggaccattatcagaatcttatgaagttcaaggaagaggagagcttcagttaggaatattaattgaaaatatgcggcgtgagggatttgagctttcagtttcacctccaaaagtgatgtataaaacagagcgtggtgaaaggttggagcctattgaagaagtgactgttgaggttggtgaagagcatgtgggattcgtcttggaaaccattactcacaggaagggtgaagtagttgacatgggcccggttcctggcacaactggaagaactcgaatcttcatgacctgtccatctaggggtttggtgggtgttaaaggaattttcagcagctttacacggggaactggatttatgcaccgtgcttttcaggcatatgctaaatacagaggtccactgggcagtgtcagaaaaggagttctgatatctgttggcaagggacttatcacttcacatgcccttatgagtttagaagctcgtgggatcctctttgtatcccctggaatggaggcatatgaagggatgatagttggtgagcactcacgtgacagtgatcttgaggtgaatcctgtgagaactaaagaacttacaaatatccgagcccctggaaaggatgaaaatgtccgtttgtctccaccccgattgatgagtttggaagaggcaattggatatgttgctgcagatgagcttattgaggttactcccaaggtcgtacgtcttcgaaagaagtacttggattccactaagcgtaagatgatgaaaaacaagcctatgaattagaactccagagacaacaaaattacatcaagcactgccagcactactatataagtttatcatgcaagactcttgcagcaagagtgttgctgtctcttgcagcaagagacagcatttatgtataggttggtgttcaatgttgcaacctgagctctttaccagcagcttcacccaggttttacgtgcacacaggattggctgacagaataagcccaccgtagcagctactggaggtaggatcctcgttggttatatctatttagacttttttatggtgaaatttcagacacccacaggttctttgaaggttgtattattctttggaagttcaagaaatgcaggccaatccccataggtattttgtttgaaccggcttctttgttgacaattttatgaccatgtgttattactgattaagtgcaagaaaaaacaaatgaaattggcctccttgctctaggacaattttacgaccatgtgttattactgagatagtgtcggacaccaagaaattggcctccttgctctaagcggtgtgttgcagacttaaccatttcactcagcaat

SEQ ID NO: 112929 - DNA, 458 bp, Zea Mays
agcttggaaagacaactgaactctcaaggcgtgaaagggaggagcttgagaaacaaaaagctcatgaacgttatatgaaacttcaggagcaaggaaaaacagaacaagcacggaaagatttggaacgtcttgctttaataagacagcaaagggctgatgctgcaaagaaacgcgatgaggagaaagctgccaaggagcagaggaagtcggaagcacggaagtaactgcaatatcatggacgatgagaccacgaaagcatgatctgcgttagttggatatttatttctaatgcatcagttatcttgttataaacctggtccctattctgtatccccataaaatatgcattgacaaaattagtaacagtcttgtgggcgtgtcttcctgtaaacttgagcttgacaaaattagaaagtagtattaaggtcagcttatgcgaaactggctcttttgtctgc

SEQ ID NO: 112930 - DNA, 131 bp, Zea Mays
cattcagagttcggttggacaaattaagatggattgagatcttagttgttaaggtagaagcaaaagcaccaccactaaatcatgtactttaaacggtgatagcagcagttgcggtcttcgatatcttagtg

SEQ ID NO: 112931 - DNA, 3835 bp, Zea Mays
actaaagaattagtacttaaacgctaggaggtaaataagggagctaaacaacaggaagcagaaaatcaaaatgggtgctatactaacctaccgagacagagcaaaacatccttgtacaccactggaaagcagaaggttgttgttttcttctaaattgcattgtatagagacagttcacgttagtaaaacagagaggcccccgcgtcgccgtcccacacggggcgactcgggcggcaaccctagctgccgcaccctctcccgcttcctcccctctcccgctgcgccgcggccggagcaggccgctgacagggctgtgcggccggccaggaagttggcggcggggctcgcggctgcagaggcgtttccgcggagaagctcggctggggcggatccgtggggtggagttcgctacgacggtcgaggtgctcggcgctggcatgattgtcgagggccgcgaggtgctcggcacaggtgcgcggctgctggggtctgacgtggctgagcggtgctagccctcggcgtcgacgcctcgatgttgctcgtggctagccggtttcagtctgagcagtggtagttccacggggtggagctcggctgggtgcagtttccgtggggttatgtgtttggcaggcctgcctcgagcagggcacggtcgtcgacgctcggggaggggccgaacatcgtgggaggagaggaggcgtctagtggcccgatggggtacgccggcagggccctcctctccttttggtggcttggcaacgtggggtggtgtgggccgacgggtatcgcctctggggggctcgacgtggccgcctggccgtcttccgcggcgccgggccaatggcgactgccagcatcggctctggcgcgcgtcagtgtgacgcacgcggcaaggtgttgcccggttccgtgtgcccagctggagggggtggcggccaacgcagctttgcggctgctgcggcaacggcgtgtcgttgcccctagaagggtttgtacgggatgtcagggcagcggcgacaacgggggttgcatgctttgtcctaggtcttggtctggcgatgtgctggaggacttcttggatgaaagcctcggcgacggtgacgctcgtgggtgtcgcttcccctattgaggacgtcgcattccccagcactgtcttccatgggcaaaagcctggtccatcttgcgatggtggcgtcctagacgtcactcccttcctaaaggcattgctattgaagttcgtctcggccacggcttcgccttcggtttttgcttttgtttctcgacgtctagtatgcgggtggaggtggggttttgccacgtaaagtcgaaggtcaggggatgtggctcggcaacgctgacatgagacgaaactcccccttctttgcgggctggattgtttcggaggttgggcaaatgcaggggacgaggcaaaggatcaagctcgttggtgaagaatcagagttgcctcgcgtggggtgtgttgaggcttggcaacgacggcgcaccgcaatcttcatccttctatgtcggtgtttgggtgtaggcggcgttgagttcctttggccatgtgcggcccgtcttgcggagtcggagatgtccgtcccttgtgttgagctcgacaacgatgactctggatgggttttgtgtgggggctaccgttgtctgggttgttcgtgcgctctgtgtaggtttcgggcccgattttccttaaaactgggtcaattctattcttcttaaaaagccttagaaatatgttgacccttgacattttcaaaatccattgcatgctgcttatacttgttactattgacctcttgcctaaaacaatgaaactataagctcaaatatatctatcttatatttctagttctctagaaactgcaaagctttctatacttgtgtcagcattagaatcattattcactaatatacttagtcaacgcattatatagaaaatgttcgatgggaaaaagtaggcctctaccacctttcattacgtagtattacattaatatattgttatggcttagtaaaatcatgcaactatgactctgctagtgacttaagaacttgacacatatcagttagggaaaaaagactactcaactccaattctaccatagacctgtgatgatcctggctactaatcaatctagtttggtcctcaccccccccaaccatgtcaggtcctcatgttctttgtcaacctcacagccctgaagaggtcctctcattgtttataacctcctagtccagctggcattgctacaggaattcattgttgagaccccacaaagcacaaagtaaacagagtttgctcaaattattcatatcaagaatttctactaacaaaggtatgcattcctaccataagaagagctctagaacaagaggtgaacaggcgccttcccctaggcatttacttcgttaatctaatgatggtggtaaaatccacatgcttgtctcaaatttagttttttacaaactaaattattaaacctgtgtcttagcagacttgcactcagccccttaactggtattaaattaacagggctagtccctttcattcaagatctacaaactactcttctacgctcctacaaaatcaaaaggcaaatgtcatatgaaaacacgacacgtcccacaaattatcatatgcatagatcactctcccaaatatcctctcaagttttaaggtgacaaaggatcatgatgaattcaccggagacacatcctttcctcaattttcttcactgtacttcagctattttgtttccatatagcttaagtttcaacaatcctgctaggcccacacaattatattgagctttgtagccacacatcgcaaagctaagaaacaaggtgcgtagagtatgaaagatgtaagcaaggtgacaaagcaagagaaaccaaccacctaccacaaaatgctggagtcattaacagtgtcacatttcagtgatatttatagaggaaatcctaaaatatttgacttaaccgtgtaacaagtaatatttcactgtaacttaaaaactagtgcaaggttaaacttttcctctaaagtatagtatgttcaaatgtcttaaagttatcaataaactatatattattatatttcatagaccatagttcattgaacatattacatctttatctgttttccttgtgtaagattgagtacatgatgattattggggaaaaagtaactaaacaagtatagattggctaaaggaggagtggatggaattatgtagctctggagatgcatgttgttcatggtgggatggaaagcagagatttataaccacaaacctctactcggcaatgaataagatctaacgaatgatcccatcaacttgaagttgaactccatctgtacaggatccaaatcagaacagtagcattcacgggaccataggtattaggtagaacaagcctccataaagtgaatgcgatgatacacatacaccagacagacttgaactattctcacgaactgtaaccttccttaatttattgaaaaagcctggatcaatatgcaatccagggaaaacttccatccaaatccaaaacttaaataacttttgtttcccattgtgttcgtgttggagaacaggagaagccttcacattgtcttgaaaacagaacagaggctatgtccagtaaatttatccccaaagacgcagaaactgccagcagagattttaatgagggataggttgctttgtagatcacaccaacccaaactaaacaatgagtcagatcacagtaacatctgtgcagactgcagactagataaatctattagatcatttgaggactctacaagagtgac

SEQ ID NO: 112932 - DNA, 417 bp, Zea Mays
atggggtacgccggcagggccctcctctccttttggtggcttggcaacgtggggtggtgtgggccgacgggtatcgcctctggggggctcgacgtggccgcctggccgtcttccgcggcgccgggccaatggcgactgccagcatcggctctggcgcgcgtcagtgtgacgcacgcggcaaggtgttgcccggttccgtgtgcccagctggagggggtggcggccaacgcagctttgcggctgctgcggcaacggcgtgtcgttgcccctagaagggtttgtacgggatgtcagggcagcggcgacaacgggggttgcatgctttgtcctaggtcttggtctggcgatgtgctggaggacttcttggatgaaagcctcggcgacggtgacgctcgtgggtgtcgcttcccctattga

SEQ ID NO: 112933 - DNA, 791 bp, Zea Mays
tctccagcttggtaccacagccaaagctagtttctctctcaccgtccatcccccaactgttcctggccgccggccatccctcccaccaccccctgctcgtggacggcgcgcccaccccggatcccgcaccgcgctgacagcccgtccgcgccgcaccgccggcccctctcctcctgcactggtggcccccggccatccctcccaaccccctgctcgtggccggcgcacccaccctgaatcctgcgccgccatcccgcgctcgcaccacgccaccggaccgcgacccgctgactgcgcccacgcccaccagtcgatcgcgcctgctcccggccgccatcctcgtcctcatcaccaggttgttccccgaggaccagcgggtgctggcccacctcgtcttgcactcgttccgctggctgggataccatcacggcgcggccacctgcccaccgtcgggtgcctgtgcttcgtctgctattggcagcttctggtcgcggtgggactgctccccacaacacgactgcatacacgcagtcctcgacgccttcatggagcacctcaacgccactgagtctgcccctcctctcccgcgaccagcttgtctgaggcaccttcatggccttcgatcgcgtcatgagccctgtccttcgtggttgtgtcgaaagccacccccaggccggtcgtcacgtgcccggaccccttgtcttcccccgtacagtgatcgcctccctggcaatcgagcccttgttgtctcccacccctcctagtaaccaccgcctctgtcatgcttgtca

SEQ ID NO: 112934 - DNA, 350 bp, Zea Mays
tataatgatgtgcagttctcctacatgttcgagagaaaaatgacatggaaccgcaaacttctgctaatcctgtttctttgttgtatgttgcataatccagctcggtttatttgtttcctgttagaatctttggtgcttaggatcgtttcctaagtccctagaataccaatccgtgtctaaaatacctcgatgatgagtagatccagacatgtcattttcttagaggatgacatgatcaagggaacttagacggttaggattaaccctactccggttactgttaaccgactagtgtagaggacacatcctaacatttccttcttagttgattgattaattttctttcttag

SEQ ID NO: 112935 - DNA, 2486 bp, Zea Mays
aggtagaaaaatcaaaacttgatgagaaaagaaaactaggtgaacaagacatggttcgactgacgcaagaaaaagagaatgcagaaaatacaattgtttcccttcagcaagaaatacagatcttgagtaggatgcatgaacagtaccgtgagagaaaagaaacagaggccaggcagatggaggaacacttgtctattagacttaaggaggctgagcttcttttaacgcaatcaaaaaagaaagctgaagaaattgaatctgcttcccaactgaaatctcaactttggagcaggaaggcaaacattttctggagttttatggataatcaaaaattgtccattaaggacataaggatatcatctcagtctattaagcaagaaatgtttgcccttcaaatgaaatggagggatgaaatatctaacattggacatgatttgaaaggcttggttgatgctgctgacaattatcataaggttcttgctgaaaatcagaagctatttaatgaggtacaggaactaaaaggcaatatcagagtctattgccgtgtcagaccatttcttcctggtcaagatggaaaaacaaccgttattgattatattggtgaaaatggtgatattctcatcacaaatcccttcaagcaagggaaggatgcatgcagaatgttcaagtttaacaaagtttttaatacacgtgcttctcaagttgaagtattctctgatatccagcctctgatcagatcagttcttgatgggtttaatgtgtgcatttttgcctatggtcaaactggttcaggaaagacttacacaatgagtgggccaggcacatcaaaagaagattggggtgttaactatcgagctttaaatgacttgttttatatctctctaagtagaaggaatgctttctcatatgaggtgggagtgcagatggttgagatttacaacgaacaagtgcgggatcttttatcaaatgatattgcacaaaaaagacttggaatttggagtacatctcagcctaacggacttgttgtccctgatgcaagtttacatccagtcaaatcaacattggatgtgctagagttgatggaaattgggcaaacaaatagagcagttggatcgacagctctgaatgaaaggagcagtcgatctcacagcattctaactgtgcatgttagaggggtggatttgaagaatggatctacttccagaggatgtctacatctgattgatcttgctgggagtgaaagagttgagcgatctgaagcaattggagatagattaaaagaagcacagtatattaacaaatccctctctgctctgggtgatgtgatttttgctttggcacagaaaaatgctcatgttccttatcgaaacagcaagctgactcaagttctacagagctctttaggcggacaagcaaagacattgatgtttgttcaaattaatccggatactgaatcatattcagaaacaataagcactttgaagtttgctgaaagggtttctggagttgagttaggtgctgcaagaagtaacaaagagggtaaagatataaaagagctgctagaacaggtttcatatctgaaagacacaatatcacggaaagatatggaaatcgatcaactcctgaaggacaaagccaagtcaccaagttcatcaacagatataaatgacagtagccaacagatccgacgactatcaggggctgctggatcaggcgaggccgaatgcgaagataacatgtctgatgatggctgctcagtggcaggaaccgagtgttctgtaggtggtgcttcagaggcgacagcagaacgaatgcagaaggccccatcaaggataggcaggctgtttctcacaaagaatgggcagcctgcaaattcgaagccaaaaccaagggagtctgccctgaaaccgtcaggtcgcacgacatctacaggaagccaggcgacaggaggaggatcttcagtgaaacccccgaagaggcggtagagaaataaagagcatctggggtttgtcatgttgatggctgatgcaatgcgtgggcgtttgtaaaccgactcggagattgcgctgctgaaacactacggtcaacgggttggtgcgatgcaagggtatgtcactgtaacggtttcacttgtaaacggtctgttgagtatgatggtgagcagccggcttttggtgggaaatgttgttgcgacagcgccgttgcgttttgagttcagccggctctgccgactgccgaagtgccgaggcctcagtcctgggccctgtctgccgaatctggccttggccgctaggcgctagcatcaggcgagaaacgaaaagctcgggatagcttcagatcaaacagcagcttcactctacagaaagcttgacaaaccagcttcgttttaaagaaagtttgccaaacggtaagctgagcttcacgaactctggatttgccgaaacaatagatctaaaacttcataataataataataataataataa

SEQ ID NO: 112936 - DNA, 1200 bp, Zea Mays
atgtctactgcgtcctttgtcacctaccttcagcggccccgggagctgccggcgccggagttccgggcgccgccgccgtccccggtcaccggcgttctgaccggcagcagcagctcggggtcgtccgggtacggcgagtgccaggatgacgacgacatcggcaggttcctgcgctgctccgccagggtcccagtgctgcgcctgccggaggggcccaggcccggcccacggagaaacaaaaacaagacggtggcggcctgggcgccgcctgtcgtcgacatgcgcctgcttgacccggtgccgtcgggggatggagggtccgcggtggaggcaatgagggcggccgccgtcgcgtttgggtgcttccagatggtcggacacggggtccacgcgagcttgctgtcggcagcgtcgcgtgctgccaagtccagaagatcgccggcgttggagacggaggggatgcgagcaggagacgaggacgagctgtggtggctgcggggcgaaggagaccaagaaatggcgggaactcagccgttgcgaaatggccccaaccaattcaggaacgaagcagacgatttgtttacccaacttgagcaggcttcaaccaagctcctgcacgccttgcagcacgccagtagtgcagcagctgaatcgttgcctaaagctgaagcgaacggctcgcttctctgcatccgcaagcaccgactcggcggcagcagcgcgtccggtccgatcagtcaagatgacgtcctgcggatgctggtacggagctcgcggtgctcccgcgctctcgccctccatctctgccccggcgcgtcggcgttccacgtcttctcgcggcgaggctggtccaggttctcgcccctcgacggcgccctcgtcgtcaccgtcggtgaccaactacagtgcgggctctacaaaagtgtgtccggcaaaccagcttacaacagtgacctccaaggagacagcagcgatgctatcgcggcagagttcttcctttcctgctcttcagcagctgcggcaaaggaggctcctccgaacatggacatggacgccatgaaaaccgtcccgctgaatctgcaaatcatggttgcagcttgccttgtgcttgtctactatgtcttcctgtcatgctcgtatgccatttggtaatgttcagcgagacagcaaccgcaggtcttgtttcccttacctgagtac

SEQ ID NO: 112937 - DNA, 786 bp, Zea Mays
atgatcgatactttgcctattcggtcagctacgactgaaaggttaccggagctgctgggggcgattcagctcttggcgcttcacgggttgaatttgcctgtatttggaaagtctggtgctcttgataggtatttgcagtgcagacccgaagttatttattgtgcatttcttccgatttttgcttctttgggtggtaaaccattcctagccaaccggcgagctgaggtgatagattggcttggtgggttgctgccggagttcgacttgccgttggattcttcagacgaggagctgcgggagtacctcattgatggcacgggactatgctacattgcagagaaactcatgcccggcattcaggaggaaatgtggggtggtaatgcatcggatcagaggtcgaatgtgaagaaattcctctattttgttgcggagatgggtctgccaggtttcagtgtcaaggatctggaggaggtgagatttcaaatgaccgacagttcacttgagacgagtacaggagctgcatcgattgggttgtgtgtggtatattatgtcaaggtgtgcaaatatgcatacaagctggtacatgctcagtctggctcatcaacgagacatgagtgtaaaagaatggattatatagcccatggccaaacaacgaatactgctactttacaaaagatggggaagatggagaaaacaataggggaaaaagaagtgggagggttaatagggcattcaaccagcgatacctcaaggcgtgtggagcaagaatcagtggggaatgcctga

SEQ ID NO: 112938 - DNA, 1573 bp, Zea Mays
atggcggagcgagaccgggtcttggagagagagcgaaggcagatggagcagatcctagagctggatatggaggagctccaggtagaggaggtcgacgacgacggctcatcctcctcctccgacgtcgacaccttccttagaaatactcatggagatggagggattaacacttatgaggagctttcaatcgatacatctactgtttccttgcaggatcacacctatcttggggcaaaggttgatggtgcccgaggcaaatttgctttcctgcatggagacagagtcctcaatctgccaatgttttatctccaaggagttgttttgtttcctgaagcttccctacatcttcgagtattccagcctagattagtggaagctattgacaaggctattaatcatgttgatgctccatgcatgataggtgtggtttatgtttatcgacacacaaatgatggacattatactattgcttctgtcgggacaatggcagagatactgaaaattcaacagctgtatgatggttcatcatgtattttctcccatggtcagcagcggtttcgtcttttgcgccattggttggatgtcgacggagtaccatggggtgaagtccaaattattgaagaagatacacctcaaagaactccaagagatgcttttgcacaattagctgcacctaacagtttcaggcaatgtgcttcatcgataatgcccagtttgcatgtgtattgttctacacaacttgatcatgtggattctgatatggacagggattcactatcacccactagcacttcaagcgatcactcaataacagataaaagaatataccttttaggttcccgctccagtggtttggtaaggtgtggtattgcggatgaatcctcaaatgaaggccaaaattctgtacatgaacagtcttgtcagagccatgactctgttaaagaaattgatgggtatggtcagccagataagaatacaaacacaggagatgaggataatctttgtttcatatcctccaaatcatttcagagaacaagaaagaaagataccaaacagcagaaacactacttcacaacgaaaaatgcttcacaggctccattgtcattttggcctcactgggcttatgagatgtatgattcgtattcactttccaggagagctgcaggaaaactctatatctttatattatagagagataagtcctgttatacgaaagggcatctagcgtaatggttaagccttccgagtagcacctctaggtcctgggttcgatccctctcggtggcgaatttctggcttggttaaaaaagttccctcactgtgcctcgcccgctcccggattacgccttgtgcgctaccctccggctgggccgttgcagagtgggcggtgacggcccgctagtgatgggggttagggttaaaggattttctcggctgggaccatgtttcggtctcttcttaatataataccgggagggcggtctttccctccccggccgagttttttgataagtcctgttatgtcaaagtataaatatgtgcagttgtgatttaagtgttgttgtatgtatga

SEQ ID NO: 112939 - DNA, 1521 bp, Zea Mays
gaacacacacacgtcggtccaaacacgcgccgtccgctcgcggcttctccaaccaaagccgtgcagccaaatccgaagggtagcgtagcacggggacgacgccatgagccgcgcgctcctctcccacgtcctccaccgtccgccgcacttcgcgtacacctgcttaaggagtggcgttggtgcccgaggaggagtgctcgcttctggcatccacccactccgtcgtctcaattgcagcgcggttgaagccgttcccggccccaccgaggaggcgcctgctcctcaggcaaggaagaaaagagtagtttctggtgtacagccaacaggatcggttcaccttggaaattatctaggggcaattaagaattgggttgcacttcaggattcatatgagacattctttttcatcgtggatcttcatgcaattactttaccatatgaggcgccactgctttctaaagcaacaagaagcactgctgcaatatatcttgcatgtggcgtcgacagctccaaggcttctatctttgtacagtctcatgtccgtgctcatgttgagttgatgtggctattgagttcttctactcctattggctggctgaatagaatgatccagttcaaagagaagtctcgcaaggcggtgcgtcacttgctggtgatgaaaatgttggggttgcacttttgacttatcctgttctaatggcttctgacattcttttgtaccagtccgatctggtacctgttggtgaagatcaaacacaacatttagaattaactcgtgaaatagctgagcgtgtaaataatctttatggtggaagaaagtggaagaaattgggagggagagggggtttgctatttaaggttcctgaagcccttattcctccagcaggggctcgtgttatgtccctaactgatggtctctccaagatgtccaagtctgctccttcagaccagtctcgtattaaccttcttgacccaaaagatgtgattgcaaataagatcaagcgctgcaaaactgactcattcccaggtatggagtttgacaacccagagaggccggaatgcagaaatcttctctctatataccagattatcactgagaagactaaggaggaagttgttagtgagtgccaacacatgaactggggtacattcaagactacactcacggaagctctaattgatcatttgcagcctattcaggttcgttatgaggagataatgtctgatccagcctacttggataatgtccttttagaaggagcagtaaaagctgctgagatagcggacatcaccctgaacaatgtttaccaagccatgggtttcttgcgtagataatgtatgggtcaaaacatttgttcgggagctcttatcttttttttttttggctttgagcttcgagcatgcttcacattagggcgctactgtttttcacacgcagggccttcattttacgacttcaaccccctttgagtcgtctcatgatttccatatcatttgattcatgtgataattttctgtctg

SEQ ID NO: 112940 - DNA, 1463 bp, Zea Mays
gaacacacacacgtcggtccaaacacgcgccgtccgctcgcggcttctccaaccaaagccgtgcagccaaatccgaagggtagcgtagcacggggacgacgccatgagccgcgcgctcctctcccacgtcctccaccgtccgccgcacttcgcgtacacctgcttaaggagtggcgttggtgcccgaggaggagtgctcgcttctggcatccacccactccgtcgtctcaattgcagcgcggttgaagccgttcccggccccaccgaggaggcgcctgctcctcaggcaaggaagaaaagagtagtttctggtgtacagccaacaggatcggttcaccttggaaattatctaggggcaattaagaattgggttgcacttcaggattcatatgagacattctttttcatcgtggatcttcatgcaattactttaccatatgaggcgccactgctttctaaagcaacaagaagcactgctgcaatatatcttgcatgtggcgtcgacagctccaaggcttctatctttgtacagtctcatgtccgtgctcatgttgagttgatgtggctattgagttcttctactcctattggctggctgaatagaatgatccagttcaaagagaagtctcgcaaggcggtgcgtcacttgctggtgatgaaaatgttggggttgcacttttgacttatcctgttctaatggcttctgacattcttttgtaccagctccagcagtagtctgtcttttactgacaattcatttatactttttgattggcaggagagggggtttgctatttaaggttcctgaagcccttattcctccagcaggggctcgtgttatgtccctaactgatggtctctccaagatgtccaagtctgctccttcagaccagtctcgtattaaccttcttgacccaaaagatgtgattgcaaataagatcaagcgctgcaaaactgactcattcccaggtatggagtttgacaacccagagaggccggaatgcagaaatcttctctctatataccagattatcactgagaagactaaggaggaagttgttagtgagtgccaacacatgaactggggtacattcaagactacactcacggaagctctaattgatcatttgcagcctattcaggttcgttatgaggagataatgtctgatccagcctacttggataatgtccttttagaaggagcagtaaaagctgctgagatagcggacatcaccctgaacaatgtttaccaagccatgggtttcttgcgtagataatgtatgggtcaaaacatttgttcgggagctcttatcttttttttttttggctttgagcttcgagcatgcttcacattagggcgctactgtttttcacacgcagggccttcattttacgacttcaaccccctttgagtcgtctcatgatttccatatcatttgattcatgtgataattttctgtctg

SEQ ID NO: 112941 - DNA, 1546 bp, Zea Mays
gaacacacacacgtcggtccaaacacgcgccgtccgctcgcggcttctccaaccaaagccgtgcagccaaatccgaagggtagcgtagcacggggacgacgccatgagccgcgcgctcctctcccacgtcctccaccgtccgccgcacttcgcgtacacctgcttaaggagtggcgttggtgcccgaggaggagtgctcgcttctggcatccacccactccgtcgtctcaattgcagcgcggttgaagccgttcccggccccaccgaggaggcgcctgctcctcaggcaaggaagaaaagagtagtttctggtgtacagccaacaggatcggttcaccttggaaattatctaggggcaattaagaattgggttgcacttcaggattcatatgagacattctttttcatcgtggatcttcatgcaattactttaccatatgaggcgccactgctttctaaagcaacaagaagcactgctgcaatatatcttgcatgtggcgtcgacagctccaaggcttctatctttgtacagtctcatgtccgtgctcatgttgagttgatgtggctattgagttcttctactcctattggctggctgaatagaatgatccagttcaaagagaagtctcgcaaggcgggtgatgaaaatgttggggttgcacttttgacttatcctgttctaatggcttctgacattcttttgtaccagtccgatctggtacctgttggtgaagatcaaacacaacatttagaattaactcgtgaaatagctgagcgtgtaaataatctttatggtggaagaaagtggaagaaattgggagggagagggggtttgctatttaaggttcctgaagcccttattcctccagcaggggctcgtgttatgtccctaactgatggtctctccaagatgtccaagtctgctccttcagaccagtctcgtattaaccttcttgacccaaaagatgtgattgcaaataagatcaagcgctgcaaaactgactcattcccaggtatggagtttgacaacccagagaggccggaatgcagaaatcttctctctatataccagattatcactgagaagactaaggaggaagttgttagtgagtgccaacacatgaactggggtacattcaagactacactcacggaagctctaattgatcatttgcagcctattcaggttcgttatgaggagataatgtctgatccagcctacttggataatgtccttttagaaggagcagtaaaagctgctgagatagcggacatcaccctgaacaatgtttaccaagccatgggtttcttgcgtagataatgtatgggtcaaaacatttgttcgggagctcttatcttttttttttttggctttgagcttcgagcatgcttcacattagggcgctactgtttttcacacgcagggccttcattttacgacttcaaccccctttgagtcgtctcatgatttccatatcatttgattcatgtgataattttctgtctgctgttccttcagattctgctggggaaatgttctagtttc

SEQ ID NO: 112942 - DNA, 884 bp, Zea Mays
ccgcctcccctacctcgccacagttccacacccacacctgccacgtccctccagcttccgcactcgctgcgaaatccggaatgggcacgccacgagcacgattgttggcccgcattgccgtggcggccgtcgtgctcctcgcgccgacgacgacgtgcggggtggccgggcactcgcgggcgctgcggcccggcggcgggcgcggccagcagcagccgtcgtcgctgttcccggcgaacgcgacgcgcgcggaggcgatcgagcggcagttcgtggagtgggtgcggtacgtgggcgggctccggcacagcacgttccagcacgcggtcgcccgcgcgtccccctcctactcgctcgtggtggacaaggaccccgcgctcggcgacttcacgaccatccaggccgccgtcgactcgctcccggccatcaacctcgtccgcgtcgtcatcagggtcaacgccggcacctacacgtacgcacgctggtgtcccggccttgcgcttagcttagctagctacgagggagggagggagcgacccggccggcggtgatgatggtcgtgtcgtacggtaccaagtaccaagcacctgctgctgctgatatgccttgtgtggcgcgcgtacgtgtcgtcgcagggagaaggtgaccgtctcggcgatgcgcgcgttcatcaccctggagggcgccggcgcggacaagacggtcgtgcagtggggcgacaccgcggactcgccgaccgggcccaagggccggcccctcggcacgttcaactcggcgtccttcgccgtgaacgcgcagtacttcctggcaaggaacatcactttcaaggtacgtacgtagccggcaccacgcacccgtgtcgtgtgttccctagtactatatat

SEQ ID NO: 112943 - DNA, 881 bp, Zea Mays
ccgcctcccctacctcgccacagttccacacccacacctgccacgtccctccagcttccgcactcgctgcgaaatccggaatgggcacgccacgagcacgattgttggcccgcattgccgtggcggccgtcgtgctcctcgcgccgacgacgacgtgcggggtggccgggcactcgcgggcgctgcggcccggcggcgggcgcggccagcagcagccgtcgtcgctgttcccggcgaacgcgacgcgcgcggaggcgatcgagcggcagttcgtggagtgggtgcggtacgtgggcgggctccggcacagcacgttccagcacgcggtcgcccgcgcgtccccctcctactcgctcgtggtggacaaggaccccgcgctcggcgacttcacgaccatccaggccgccgtcgactcgctcccggccatcaacctcgtccgcgtcgtcatcagggtcaacgccggcacctacacggagaaggtgaccgtctcggcgatgcgcgcgttcatcaccctggagggcgccggcgcggacaagacggtcgtgcagtggggcgacaccgcggactcgccgaccgggcccaagggccggcccctcggcacgttcaactcggcgtccttcgccgtgaacgcgcagtacttcctggcaaggaacatcactttcaaggtacgtacgtagccggcaccacgcacccgtgtcgtgtgttccctagtactatatatatgtgctccttagttctggcgttggcgcgcgggacagaacacgtcgccggtgccgaagcctggggcggcggggaagcaggcggtggcgctgcgggtgtcggcggacaacgcggcgttcgtggggtgcaggttcctgggcgcgcaggacacgctgtacgac

SEQ ID NO: 112944 - DNA, 1822 bp, Zea Mays
ccgcctcccctacctcgccacagttccacacccacacctgccacgtccctccagcttccgcactcgctgcgaaatccggaatgggcacgccacgagcacgattgttggcccgcattgccgtggcggccgtcgtgctcctcgcgccgacgacgacgtgcggggtggccgggcactcgcgggcgctgcggcccggcggcgggcgcggccagcagcagccgtcgtcgctgttcccggcgaacgcgacgcgcgcggaggcgatcgagcggcagttcgtggagtgggtgcggtacgtgggcgggctccggcacagcacgttccagcacgcggtcgcccgcgcgtccccctcctactcgctcgtggtggacaaggaccccgcgctcggcgacttcacgaccatccaggccgccgtcgactcgctcccggccatcaacctcgtccgcgtcgtcatcagggtcaacgccggcacctacacggagaaggtgaccgtctcggcgatgcgcgcgttcatcaccctggagggcgccggcgcggacaagacggtcgtgcagtggggcgacaccgcggactcgccgaccgggcccaagggccggcccctcggcacgttcaactcggcgtccttcgccgtgaacgcgcagtacttcctggcaaggaacatcactttcaagaacacgtcgccggtgccgaagcctggggcggcggggaagcaggcggtggcgctgcgggtgtcggcggacaacgcggcgttcgtggggtgcaggttcctgggcgcgcaggacacgctgtacgaccactcgggccgccactactacaaggactgctacatccaagggtccgtggacttcatcttcggcaacgcgctgtcgctgtacgaggtacgtacgcacgcctccgttctctactcggacaagtgctgggtggatcgggaagtaccactggagtcacggcctagtctgattagagcctttttttttccgtgcgccttgacacttggggtttatagtaccatcatgatgcttgacggcttggatggacgctgctggtgcaggactgccacgtgcacgcgatcgcgcgggactacggggcgctgacggcgcagaaccggcagagcatgctggaggacacggggttctcgttcgtcaactgccgggtgacggggtccggcgcgctctacctgggccgcgcctggggcaccttctcccgcgtcgtcttcgcctacacccacatggacgacatcatcgtccccaacgggtggttcaactggggcgaccccaaccgcgagctgtacgtcgtccccatctatccatcctctgctgttgcttgcgccattgccttctgatggggctagcggacgccatgccaggcgtgcaaaagcgcacacaaagggagggaacactcaccgcaccggctccattccattccattccacttccggtgaatcatccgtcgtgatcgtggaggggcttttaagattcgattcccgctggcccgccgccaccagcacaggcgcaccgcgcacgggcagcactcacccgtcaaatgccaaaggctaccaaaaaatgaccttctctcgtgttgctgctgcaggacggtgttctacgggcagtacaagtgcacgggcccgggcgcgacctatgccggccgggtggcgtggtcgcacgagctcaccgacgacgaggccaagcccttcatctcgctcagcttcatcgatggcaccgagtgggtcaggctgtagctgtaaatctcgcagccgctcacgccaccacgccgcacactgtaaagaaacagagcaagacagtatatacagattttatactttccgttc

SEQ ID NO: 112945 - DNA, 1525 bp, Zea Mays
ccgcctcccctacctcgccacagttccacacccacacctgccacgtccctccagcttccgcactcgctgcgaaatccggaatgggcacgccacgagcacgattgttggcccgcattgccgtggcggccgtcgtgctcctcgcgccgacgacgacgtgcggggtggccgggcactcgcgggcgctgcggcccggcggcgggcgcggccagcagcagccgtcgtcgctgttcccggcgaacgcgacgcgcgcggaggcgatcgagcggcagttcgtggagtgggtgcggtacgtgggcgggctccggcacagcacgttccagcacgcggtcgcccgcgcgtccccctcctactcgctcgtggtggacaaggaccccgcgctcggcgacttcacgaccatccaggccgccgtcgactcgctcccggccatcaacctcgtccgcgtcgtcatcagggtcaacgccggcacctacacggagaaggtgaccgtctcggcgatgcgcgcgttcatcaccctggagggcgccggcgcggacaagacggtcgtgcagtggggcgacaccgcggactcgccgaccgggcccaagggccggcccctcggcacgttcaactcggcgtccttcgccgtgaacgcgcagtacttcctggcaaggaacatcactttcaagttctggcgttggcgcgcgggacagaacacgtcgccggtgccgaagcctggggcggcggggaagcaggcggtggcgctgcgggtgtcggcggacaacgcggcgttcgtggggtgcaggttcctgggcgcgcaggacacgctgtacgaccactcgggccgccactactacaaggactgctacatccaagggtccgtggacttcatcttcggcaacgcgctgtcgctgtacgaggactgccacgtgcacgcgatcgcgcgggactacggggcgctgacggcgcagaaccggcagagcatgctggaggacacggggttctcgttcgtcaactgccgggtgacggggtccggcgcgctctacctgggccgcgcctggggcaccttctcccgcgtcgtcttcgcctacacccacatggacgacatcatcgtccccaacgggtggttcaactggggcgaccccaaccgcgagctgacggtgttctacgggcagtacaagtgcacgggcccgggcgcgacctatgccggccgggtggcgtggtcgcacgagctcaccgacgacgaggccaagcccttcatctcgctcagcttcatcgatggcaccgagtgggtcaggctgtagctgtaaatctcgcagccgctcacgccaccacgccgcacactgtaaagaaacagagcaagacagtatatacagattttatactttccgttcctcgaccgagcccaaaactctggagtctggatgcagcgtctcgatggaatgagcttttgcccaaaacccgtactcgtcagataagggcgggtttgttggatacgagaggaattcttttgctatttaaattgaaaagcaagatgatttctcttcat

SEQ ID NO: 112946 - DNA, 533 bp, Zea Mays
cccatctatccatcctctgctgttgcttgcgccattgccttctgatggggctagcggacgccatgccaggcgtgcaaaagcgcacacaaagggagggaacactcaccgcaccggctccattccattccattccacttccggacggtgttctacgggcagtacaagtgcacgggcccgggcgcgacctatgccggccgggtggcgtggtcgcacgagctcaccgacgacgaggccaagcccttcatctcgctcagcttcatcgatggcaccgagtgggtcaggctgtagctgtaaatctcgcagccgctcacgccaccacgccgcacactgtaaagaaacagagcaagacagtatatacagattttatactttccgttcctcgaccgagcccaaaactctggagtctggatgcagcgtctcgatggaatgagcttttgcccaaaacccgtactcgtcagataagggcgggtttgttggatacgagaggaattcttttgctatttaaattgaaaagcaagatgatttctcttcat

SEQ ID NO: 112947 - DNA, 414 bp, Zea Mays
gtgcgagtgtgccatggcgggcgaggggtcagagtcagaccctgcctgcctccccggtgccgccgccgtcgaagcggagaaagatcgagccgcccaggaggtttcggtgggtcgatctcgacaaaagctagagaggcaaagagatatccgccgtccttcaagcgcagcgtgagggagatgccttggaagctacaaaagcttcggttccctctttgggaagaatcaccttgttcctgtcatcccaacgaacgactgacgaacaaggctgtgaataccgaccaggatgacccttgcagtttcctttaagagcgcgacctgataccgcatactaagctatggacattaacattacattgatcgtaaggtgacagcacgaagttactgtcagctcagaagtcaagtaattactaccaa

SEQ ID NO: 112948 - DNA, 2074 bp, Zea Mays
gagaagcggggggctcgcagaggcgtagctcgcgatccgggcgccgagctggtgcgtacttggtttggtcgcgcggctcggtcgggaggctagctagctagggctcgcggcgggcgggatggcgaagggcggtgcggtcgtggggacggctgtggtggtgtgcgccgcggctgccgcggcggtgggggtagcggtggtgctgtcgcgcaggaggagtcggcggcgggaggcggaggacgagaggaagaggaaggcggccgcggtaatcgaggaggtggagcagcggctctccacgcccaccgcgctgctccggggcatcgcggacgccatggtcgaggagatggagcgcggccttcgcgctgagccccacgcgccgctcaagatgctcatcagctacgtcgacaacctcccaaccggggatgaacatggtctgttttatgcactggaccttggcgggaccaactttcgtgtcatccgggtccaacttggcggaagggacagacgtgtcgtgaagcaacagtatgaagaggtctccattccgcctcatcttatggttggaacttctacggaactatttgatttcattgctgctgagttggaaaaatttgtgcggactgaaggagaagatttccacctaccagatagcaagcagagggaactgggtttcaccttttctttcccagtgcaccaaacatctatatcatcggggactctaattaagtggaccaaaggattttgcatcaatggcacggttggagaagatgttgtggctgaattgagtagggccatggaaaggcagggtcttgatatgaaagttgcagctctggttaatgatactgtaggcacattggctggtgggagatatgctgataatgatgttgttgctgctgtaatattgggcactggcacaaatgcagcttatgtggaacatgcaaatgtgattcctaaatggaccgggctgctacctagatcagggaacatggtaatcaacatggagtggggaaacttcagatcagataaacttccaaggtcggagtatgataaatccttagacttcgaaagtttgaaccctggtgagcagatatatgaaaagatgatttctggaatgtatcttggagaaattgtccggaggatcctgctgaaactggctcatgatgcttcattgtttggggatgttgttcctccgaaactggaacagctatttatactgaggacgccagatatgtcagccatgcaccatgacacctcacatgatctcaaacacctgggagctaagctgaaggacattcttggggttcctgatacttctctggaagcaagatacatcactcttcatgtgtgcgaccttgtcgcagagagaggtgcacgcctggctgctgctggtatatatggtattctgaagaagctgggtaaagacaaattgctaggtgactttagccaacaaaggactgtagttgctattgacggtggcctatacgagcactacaagaagttcagtgcctgcctagaggcgacgctcacagacctgctcggcgaggaggttgcctcatcggttgttgtcaagttggccaacgacggctcaggaattggagctgcacttcttgctgcctcgcactcccagtatgctgaagctgcatagttctaggagctcgggggtcctagtgtaacctttttttttgtttcccaccatttcccccttcaatcgagaagcccccctcgtgcgattcgcatctctctattttctttcctcagcagcgggatatagctaggatggtgccattgagcttggagtacattatcactagcaacaagcattagcagcggcaggaaagaagtggaagcggaggcctgaataagccgttccattcctgccgattctttttcttcccaatcccttgaagtttgtattatgaggcgatatcacaaaacagccagttcttatctgtgtgatctcgtctttcaaaataaggagagaggtgggggaccaaatcatacagtctttactcattttttattgaatcgtgcagtgcttctgcctttatttcagaaacaactgcaatggcaatatttgctt

SEQ ID NO: 112949 - DNA, 840 bp, Zea Mays
cagatctgctacgccgatgtgaccttcagatccgccgttctcgagtatctcgccgtcaagaataatccagatgcaaaagggttgtatggagtgtcctttccttactatgatgaactttcaatggtatattccaaggacatggccataggtgaaggtgcggaagacatgacagatgctgttcaaaacttggaagaagagttagttcgtgtaaatgctaatgatgaagaggatggagaggatatgacatctgtagagacaccaaggcgttctgttgactcaacatcatctagctccaagaagcggaagaaagagtggaaaggaaagaagacttcatcaagtgacccgcttcttgatgtgttcaatgaagtgagtggtgatctcaaggttgccaccatgtcaattggaaaaatggcgcaagctatggatcgtgaggcatccaatcaagagaaggcaagagatgaggatccacaacaaaagctaagagagaaggcaatcaatgaggtccggagacttgaatttactggctcaaaagttatcaaagcagctggtgtgtttgttaggatgccagatcaaatggggatgttgtttgcacttccagaacgactgaggagggaatacattgtcgacatgctacgtgatgaagcagcaaggagagagagaaagaggtcaaagtgaaggtgctggtctagatgttgaatgatggagctttggaagttgctgttggtttagttggtctcaatctgtttacctttagtgttcttcatatgttgctgttgaatgacggtgaatgatgataaaaactgaatttttatgatgttgaacgttgttgaatgttcacaa

SEQ ID NO: 112950 - DNA, 1156 bp, Zea Mays
atttgcgacaattcacctgcatacaggggcagcatatctagcagctactccgcccccaaatgctcgccggcatatcccgtttcctcactcgccgccgccgcccgccctttccgcttgccgctaccgccgctgcagcagccatgtcgtcgtcgtcgtccacggcagcgaacatctccgagcgtccgatctctccggacaccacccgcgtggcctgggtggggacgggcgtcatgggccagtcaatggccggccacctcctcgccgccggctacgctctcaccgtattcaaccggacggcatccaagacccagggcctcgtctcccgcggcgccagcctcgcggacagcccgcgcgcggccgccgcggctgccgatgtcatcttcctcatggtcggcttcccctccgacgtccgctccaccgccctcgatccatccacaggcgccctctctggcctcaccccaggcggtatcctagtcgacatgaccacctccgaccccaccctcgccgccgagatagccgcggccgcggccgccgccggctgctcggccgtcgacgcccccgtctccggcggtgaccgaggggcccgcaacgccaccctctccatcttcgctggcggcgacgccgccgtcgttgctcgcctggcgccgctcttcaagctcatgggaaacgcgctgtacatgggcgggcccggcgcggggcagcgcgcgaagctgggcaaccagatcgccatcgcatccaccatggtagggctcgtggagggcatggtgtacgcgcacaaggccgggctggacgtggccaagtggctggaggccatctccaccggcgcagccgggtccaagtcgctggaactgtatgggaagcggatcctggagagggatatggcggctggcttctatgtccggcacttcgtcaaggacctcggtatctgcctgttggaatgccaggccatggggctgtcgctgccggggctcgccctcgcgcaacagctgtacgtgtcgctgatcgcgcacggcgagggcgggctcggtacacaggcgcttatactggccgtcgagcggctgaacaacaccagcctcgagaagaaggacgaatgaaaggccccaggctctagctttgatgaacttgtgggaagctttgcttggtgccttggtgcaag

SEQ ID NO: 112951 - DNA, 810 bp, Zea Mays
cgtaagccgagtagccgaccacgcgaagcatccagcagtgctcaactctgttcgccaccgccagtctgccacactccatgccccaccaccacctcgccgcctcgaaggcagaaccctaggcagcccccaatgccgccccaccgcctccttccccttctcctcctactcctgcctctcggcgtctccggcgccgccgctgccggggggaacgccacgtcggcgccgctcccctgctccgagctctcgcgcgtctgcacggccttcatcgccttcccgactgccggcgcggggcccgccaatgccacggtgctcgagtccatgttcgacgccgcgccgggcgacctcacggccgacgccgcggccagcccgaggtacgccttcgtgcgtaagaactgctcctgcctcccgtcccgcacctacctcgccaacaccacctacaccatcccctcctccgcgacgacctccttccccaataccaccgccgccgatgtcgcggctgcggcgtactcgggcctcgccgtgccgccgcctggcggggcggcgcagcgaccgccgcgaccgggagcggttgtggcgctccacctgctctgcggctgctcgtccgggccctggaactaccttctcacctatgtcggcgtcgaaggggacacagtggaatcactatcgagtaggttcggggcgagcatggatgccatcgagactgccaatgccatggccggccccgaccccatcaccgcgggaaaggtgtactacatcccactcaactcagtgccaggcactccttgcccactggccagcagtcagctaatg

SEQ ID NO: 112952 - DNA, 1692 bp, Zea Mays
actcctcctgccccagccccagcgccaacagactatacattgtcagggacaccagattaccattcaagcaaatttccttatggatgggttattggtagcatgggagttgcgcttgctttaattgttattgctgttcttgcacttgtcctatggaaattctttggatataaaccccaagatcgtaacggccagagaaagagcccagaccgacataagtttcaactccttaagagtggtagtttctgttatggttctggaagatatttgtgttgccaatttggaaatgcaaagccaacaagagcggatggtggtgagcatcatatcaatgtccccaaaggtgtagcagcagacgtatttgatagggagaagcctattgtgtttacgcacgaagaaatactcatatcaactgactcattttcggatgcaaatcttcttggtcatggtacatatggttctgtctattacggtgttctccgagagcaggaggttgcgataaagagaatgatggccactaaaacaaaagaattcatagtggaaatgaaagttctttgcaaggttcatcatgctagtctggtagaattgattggctatgcagcaggcaaggatgagcttttcctggtttatgagtactctcaaaatggttcactcaaaaatcatctacatgatcctgaaagaaaggggtgttcatcactttcatggatctttcgggtccaaattgcacttgatgctgccagaggactagaatacattcatgagcacaccaaagatcattatgttcatagagacattaaatcaagtaatatcttgcttgatggttccttcagagcgaagatttcagattttggccttgcaaaacttgtagtgaaatccaatgacgcagaggcttctgtcactaaggttgttggaacttttggttatttagcccctgaatacctgcgggatggcctggcaactacgaagagtgatgtctatgcttttggtgtggtactttttgagctaatatctggaaaggaggcgattacaagagctgaaggaatgggtgcaagctcaaactccgagcgatgctcactggcatcagttatgttagctgccgtaaggaaatgtcctaattcaacgtatatggggaacctgaaagactgcattgaccataatctaagggatctgtatccttatgactgtgcgtacaagatggccatgctagcaaaacagtgcgtggacgaagaccctgttctacggccggacatgaagcaggtggtaatcacgctctctcaaatactgctgtcttctatcgagtgggaggcaacacaggctgggaacagccaagtgtttagtggtcttgtggcggggaggtgatctggtcaacacaggctgctgtacatgctcttgagtgatctactcacctgatccaccggagacatattcgcctatggccctcctctttatatcttactggtcctttgtccagttgagcgattttcaggtttcttctgagctctgagagaatacctaccagagtgcaatatattttttggtgggtggtacagtatgtagcaacgtatgtatacaagaatctaccttgtgatgcaatgtcctgatgagtcatttcgtttgttccgctgctgctatgccctgacttgtgtttgtagaccaaattcagcagcagcgactgcaacgtgtacttgtgtattgtgg

SEQ ID NO: 112953 - DNA, 2577 bp, Zea Mays
agtccaaagtggtgaacctctcccgccgacgacgctcgcatacactccaattccccccccccccccccccccccccccccccttcctagtcagttcccccacctcatgactcctgaggtcttgctctagctcgagcgccatggccacgtctcgctgcggtaaacagcggcagccgctcctccactctcccacgcccgcagacgccaacggtggcggcgcagccaagaggcgcaggttcgtctcgttcctcgccgtcacggcagctcttgtcgcgtcctaccacctcctcgtgccaaccaattcgtcgcactaccacgcactattcctctccctcggttccaacgccaccgcggcggcccacctacgcgcgctcaccctccgcccccacgtcgctggcaccgaggccaacgcggccaccgcccgctacgtgctccacgccttctcctccctctccttcccagcacacatcaccccttactcggttctcctctcctaccccgtccaccgctccctctccctcgccgcggcgcccggcctagccgccaggccgttctccttggtgcaagagacctacaaaggcgacccgtacgctgaggccgccgcggaggtcctcccgacgtacttcgcctactcgggatccggctccgtcaccgccgaggtcgtctacgccaactacggccacaacgaggattatgcttacctcgcctcccgcggggtcgacgtcgtgggcaaggtcgcgctcgtgcggtacggtgacatccactgcgaggacatggtgcggaacgcgcgcgccgcgggcgccgccgccgctatcgtgtacaccgatgccaaggacttcggcgggagcgcggcgaagggggagaagcgcaagtggttccccgacgcgcggtggctgccgccgacaggcgttcaggtcgggaccctgtactacgggaacggcgatccgaccacgccgctgtggccgtcgtgcgcggctggggacgactgcgagcggctgagcatggaggagctggacggcagcgaggagatgccgggcatcccggcgctgccagtgtcggccagggacggggagacaatcctcaaggcgatgggcggcgatgtcgcgccacccaagtggcagggcggcgacggcgcgcccgtgtaccggctcggccccggcccggccgtgttgaacctcacctacattggaaacgagactttagcaacaatcgaaaatgtgtttgcggtgatagaaggaaaagaggagcctgacagatatgtgatcataggcaaccatcgtgatgcttggacatttggagcagttgatcctaacagtggaacagcagccatgcttgagatcgcggagaggctgtccaagctacaagcgaaagggtggaggcctagaagaacaataatcctatgcagttgggacgcagaagagtttgccctgatagggtctactgaatgggccgaggagaacatggacactctagcttcaagagctatagcttacctgaacgtggacatatcagtgtttggtcctgggggtcttatgccccgtgcgacccctcaacttgatgaattgatcaaagaagcaagtaaaatggtaccagatcctgatgaaccatctcaaaccttgtatgacaccatgatgcgccatcatccaccgatcactagagtggctggtgctggaacagattttgcagcatttgtccagcatataggagtcccgtcactcgacatgtcttatgggctgtttgaagaataccctgtttaccactcgttgtatgatgattatgtttgggtggagaggtttggagaccccttgttccacaggcatgttgcagtggccagcgtttggggtctgattgcactgaaacttgctgacgacgagatcatacccttcaattacgtctcttatgcctccgaactggaggagtgcacaaaagatatcgtagataaatgtaaaggatttcctgtcagtttctctcctttgcagaactccatcaagcagctcgagagtgctgccaccaaaatttacaaagagaagaagttgctgcaagcagaaaactggagcctaaagacaagtaagtatacgctgaaagtcagggagataaacgaccggttgatgatggccgagcgagcgttcaccaaccgagaaggactggtcgggagaccatggtacaagcatatgatatatgcatcatcggatcaagacgactgggggaccaaagccttccctggtatagtctcggccatggacaaggctaagaagtccaacacaaccgagacgtggcgactgctgcagcacgagatttacagggttgccagggctgtgtccaaggcttctgcagtcctggatggtaaactaacatgatgtgcacgtgcactgcagattttcattctattctacatagatcgaagtacccgatggattcagtttccatttcgtttcttgaaagctgaagtgcgtggaatacctgtcaggcatcattggataattgtgtaaataatgaagaaatatgctcaagttagtgtcctatgaataaagaatagtggaatcatctctcacgatgattcccttgagagtatcgccaa

SEQ ID NO: 112954 - DNA, 1775 bp, Zea Mays
cgggatccggctccgtcaccgccgagcgaggagatgccgggcatcccggcgctgccagtgtcggccagggacggggagacaatcctcaaggcgatgggcggcgatgtcgcgccacccaagtggcagggcggcgacggcgcgcccgtgtaccggctcggccccggcccggccgtgttgaacctcacctacattggaaacgagactttagcaacaatcgaaaatgtgtttgcggtgatagaaggaaaagaggagcctgacagatatgtgatcataggcaaccatcgtgatgcttggacatttggagcagttgatcctaacagtggaacagcagccatgcttgagatcgcggagaggctgtccaagctacaagcgaaagggtggaggcctagaagaacaataatcctatgcagttgggacgcagaagagtttgccctgatagggtctactgaatgggccgaggagaacatggacactctagcttcaagagctatagcttacctgaacgtggacatatcagtgtttggtcctgggggtcttatgccccgtgcgacccctcaacttgatgaattgatcaaagaagcaagtaaaatggtaccagatcctgatgaaccatctcaaaccttgtatgacaccatgatgcgccatcatccaccgatcactagagtggctggtgctggaacagattttgcagcatttgtccagcatataggagtcccgtcactcgacatgtcttatgggctgtttgaagaataccctgtttaccactcgttgtatgatgattatgtttgggtggagaggtttggagaccccttgttccacaggcatgttgcagtggccagcgtttggggtctgattgcactgaaacttgctgacgacgagatcatacccttcaattacgtctcttatgcctccgaactggaggagtgcacaaaagatatcgtagataaatgtaaaggatttcctgtcagtttctctcctttgcagaactccatcaagcagctcgagagtgctgccaccaaaatttacaaagagaagaagttgctgcaagcagaaaactggagcctaaagacaagtaagtatacgctgaaagtcagggagataaacgaccggttgatgatggccgagcgagcgttcaccaaccgagaaggactggtcgggagaccatggtacaagcatatgatatatgcatcatcggatcaagacgactgggggaccaaagccttccctggtatagtctcggccatggacaaggctaagaagtccaacacaaccgagacgtggcgactgctgcagcacgagatttacagggttgccagggctgtgtccaaggcttctgcagtcctggatggtaaactaacatgatgtgcacgtgcactgcagattttcattctattctacatagatcgaagtacccgatggattcagtttccatttcgtttcttgaaagctgaagtgcgtggaatacctgtcaggcatcattggataattgtgtaaataatgaagaaatatgctcaagttagtgtcctatgaataaagaatagtggaatcatctctcacgatgattcccttgagagtatcgccaatcattttcctgggagttgcatgttgttcttgctctcgctatctcggcgaccgctgcaaattgagcgtaccatctgtgtataaatatatctcatctatgaggtgtggagctaggctgaaactgattggcgcggtgtcggactggtatacaccatgtcagcagcatgggacctacaataaaaccattcttgttt

SEQ ID NO: 112955 - DNA, 1629 bp, Zea Mays
ggtggtgtacactgacccgctgcagtacggcggcgcacccggtgaggggtggttccccgactcgcggtggctgccgcccagcggtgtgcaggtggggagcctcttccggggcgtgggggacccgacgacgccgatgtgggcatcgtccgagggctgcgagcgcgtcagcttggaggaggccatgaataccgatgacatgccgctcatcccagccctgccggtatcggctcaggacgcgatggagatacacagagccatgggcggggccgtggcgccggaggactggcagggccgtgaagacggacccgtttaccgcctcgggccagggccggcagttttgaacctgacatatcttgggaatgattcgatggcaacgattgagaatgtcttcgccattatcgagggcgccgaagagcccgatagatatgtcattcttggtaaccatcgtgatgcttggacgttcggtgcatctgatcccaacagtggaacagcagctatgattgagttagctaaaaggttttcaatgctgcaaaaacaaggatggaggcctcgaagaactattatcttctgtagttgggacgcggaagaatacggactgacagggtcaactgaatgggttgaagaaaaccgggagatgttgtattctagagctgttgcttatctgaatattgacgtttcagtcgttggtccaggattcctgccttctacaactccccaacttgatgagttacttcagcaagtaactaaagtggttcaagaccctgataattcatctcagactgtgtatgattcatggattaaatcgagcactcctctccgggttcttagactaggtgatggaggatcagactattcagcattcgtccaacatgttggtattccttcgatgaatataatttttggagaaggaccaggatatccggtttaccactccttatatgatgactacgtatggatggcgaaattcggagatcctgcgttccgtaggcatgtggcagctgctagcatatggggaatgatggctttgaggttggcaaatgaagacatcctacccttcaattacatgtcctatgcaattgagcttgaggcatacacaaaaacggtagagaatgaagtgaagggaacaactgtcacttgttcccctctgtacaactcaatcagaactctcggagcggcagctaccaaagtgaataacgaacaaaaggaacttcaaaagctactcttgagcaagcagctgaacaaggattcactgaaaatccgacaactcaatgaccgtcttatgcagaccgagcgtgcattcactagcagggaaggcatcttcaagctagaatggtttaagcatctggtgtatggaccttcagaccagaatgactgggatactgcagtctatccaggtatagccaatgccatagccagcgcccggagcagcaacacttcggagtcctggaagtttgtacagcatgagatctacagagtagccagggccgtgacacaagcatctgctatactgagtggccgtctgacatgacaggattcaaaccatattcgttaaaaaagattgttactgtggatttcggaagttttgacattttttgaaactttcgactatgaaatatctgagttgcagag

SEQ ID NO: 112956 - DNA, 1823 bp, Zea Mays
gatctgtggtgctggcgcgcgcaccgcagtagacacgccctcggccgccgtcgagccaaccaacctcggagcaccgccgcaagaccagacagccgccgccgccccagcccctcgcggcctccaagccccgcacgccgctgatcggcagcgccgtcttccccaatgcaccgtccgcggcgaggcgcgccgccgagagcgccgtccggcgaacgcacattgccagggaggctgacatgacgctgccgtcgtcgaagcagctcctctccctccacgacgccgctgccaacggcaccgacgcaggccacggggaggcaccgcgcaccaagcgggaccttggcgagcggacggacgcgtcccgcgcgcgcagcgatgcccccgcggggagacccaaagaagaagaaagaacgccccgccgccgccatccttggggcccgcgccggcgtctggcagactcctccggcgacgatgagaggaggggagggaggggagggggtggtggcgctagggttttggtggccacccgtgtcgcccgagaggaggacgacgcgggggcgtttttcaatttcaagaattaaagcaaacttttcttgaacgaacaaaagcaaaaaaaaaataagatatgtcattcttggtaaccatcgtgatgcttggacgttcggtgcatctgatcccaacagtggaacagcagctatgattgagttagctaaaaggttttcaatgctgcaaaaacaaggatggaggcctcgaagaactattatcttctgtagttgggacgcggaagaatacggactgacagggtcaactgaatgggttgaagaaaaccgggagatgttgtattctagagctgttgcttatctgaatattgacgtttcagtcgttggtccaggattcctgccttctacaactccccaacttgatgagttacttcagcaagtaactaaagtggttcaagaccctgataattcatctcagactgtgtatgattcatggattaaatcgagcactcctctccgggttcttagactaggtgatggaggatcagactattcagcattcgtccaacatgttggtattccttcgatgaatataatttttggagaaggaccaggatatccggtttaccactccttatatgatgactacgtatggatggcgaaattcggagatcctgcgttccgtaggcatgtggcagctgctagcatatggggaatgatggctttgaggttggcaaatgaagacatcctacccttcaattacatgtcctatgcaattgagcttgaggcatacacaaaaacggtagagaatgaagtgaagggaacaactgtcacttgttcccctctgtacaactcaatcagaactctcggagcggcagctaccaaagtgaataacgaacaaaaggaacttcaaaagctactcttgagcaagcagctgaacaaggattcactgaaaatccgacaactcaatgaccgtcttatgcagaccgagcgtgcattcactagcagggaaggcatcttcaagctagaatggtttaagcatctggtgtatggaccttcagaccagaatgactgggatactgcagtctatccaggtatagccaatgccatagccagcgcccggagcagcaacacttcggagtcctggaagtttgtacagcatgagatctacagagtagccagggccgtgacacaagcatctgctatactgagtggccgtctgacatgacaggattcaaaccatattcgttaaaaaagattgttactgtggatttcggaagttttgacattttttgaaactttcgactatgaaatatctgagttgcagag

SEQ ID NO: 112957 - DNA, 116 bp, Zea Mays
gtttccatacatgttttcgttatgaaatagatcgatggtttacactaaaatttatacccatttatgttgttttggttcacgttttacgctaaaatccgcctgaactcccacgcacg

SEQ ID NO: 112958 - DNA, 1016 bp, Zea Mays
tcaccaggccagcgataagcaattaatggaggtagaggcttgctacaactacggcttcctccctgcagacagaggcaggcaccaaccaccacctccaccacatgccacccttcctcgcgctgcagaggatgcaggtttgccccatctgcgccaacaatctagggaaagacatggctgcacatttcagactgcagcacacgcatcttctcaaggtgctaaagagaaactatggcccagaggttgatgtttggagtgcaggagtgattctgtacatattttccctgatcatgttttacaaatcaagtaattcagactattcttggtatgccattatttccacttttcattcagtgactgaacctaccgagactgaagcaagtagggacagagcaaaaaactctcttgagaactgggcatccaatcagaaaccagagccttctatcagaggaactaatatggataagggtaccattttgaaaacattaacagttttggacactcagcttcctgttaaacaagcatttaaaataatgcatgatgagggtcttgctctggttcctctttgggatgaccgccagggaaccataacaggcatgctcactgcatcagattttgttttaatcttgagaaaggggatattgtgcattggtgtgctaaaatgttctaggcagcagaaagcaatatcacgggagcaagcagccaaagatctgcaagagttggagaaatggagagaagaacttgaggcattgttacttgctgaatggtcggagttgaggggggaagagctgcttgcgtactggtggagagaggatcattggttgaaagcgatgtttctacatatgaggtctgtaattaaggttgaggaagagttggttggagttcctgtgaaagatggactatatgagattagggataccagtgcgcttgtacgtttaaggccaacgtgggaggatcttcgcagctacttaattgccagaggccgcaaatgttttgaagtctgcgtgtacaatagctga

SEQ ID NO: 112959 - DNA, 924 bp, Zea Mays
ctggcaaaggtcgtggaagagaggaagcagcgagaggagccgaggaagaatatatccatcctaacatccacccacccacacaccagacacacataccttattctccgccgtttcttggcctccggaaatctcctcccccaagttgcaagcatgggcgggttcagcctcagcggcgctacaggtctcgcggcgtaccgcgaggaagacgacgaggagctgttcgagacgtcgtcttcgatctccggcgactccgacgatgagggccaccagctctccgatggagaggggggcgcctatgatttgtcatctgtgatggcacagctccctgtcaagaaagggctatccagatactacgacggcaagtcccagtccttcgcgtgcatgtctgaagtgcgatgcctggaagatctgcgcaagaaagagacgccctacaagaagatcaagacatcaaggagtagcgtcgcgttagacgaagagcaggactgtcatacgccgggtcgtacgaacagcagcagagcgcccggaagttgttgcgcaaacctggtggctcggaacaacggcaaaaacatgctgtacagacctcccccagtccctgtaaacaaaagtggataccgtcagtaggctctaggacattactggatgatatctatccagggtttcacctcttgttttttttccatttttgagggattttgttgacaggcgtattggcctgtctcagatgtaatgtaagagggtttccttctctgctcttagcagagttatctcctatgatcttgtccatgagacattggttcgtgtaaataatagtgatgttgtaaccacttcaaaagatccaggtaacttgtctattttgtggtcggatcgaagagacaaagtgggtaaaaaaaaggaaagcttttgcataaaaaaatgagaaaaaaa

SEQ ID NO: 112960 - DNA, 1076 bp, Zea Mays
cgaattctttgagaaagaggtaagctcaatgtttgtttcagtctaatttttttagtatgttttaatttcttcgcatctgctgaagactttaaatttgaactaagtctcaggagaagcatttgaattgttacaggtacttttggtctcacctaattgtgtggtatttatagtttgctcatttgtatacaatcatcggctttacaaccttgtttgctcaacccaaaaaaaagggtggacagagactgtctgtttcatcactcaccaagcacacccaacgtacatttaaggagaacagcacaagaagacaagaagcacctaaacggaagtgaataattaattaaccatgtaaaaccatgtcctcacacgtttaaattgtttacatttcctcataaatgaatttgtaccaattcaaacaagcttgatagcaagtacgagtagcatttgtgttagaaaaatacaagaaaaaaagatctcttaagttctcaacttttgcttgatcttgtgtgttagactgttagtgttcatatggcgcatcccaaatattcctgtcctgtaattgaacacagatagcccaaatactccttctgtaattgaacacaagaatatgtttagttgatggtctggtcatggagctcaaatttggttcaacatgaattatgatacttactgtgtactctagatatttatgtttattttttgcaatttttttgttcatttcagacatggatgcacccgattttccctgccctcttctatgcctgtgaaagagtcatcaggaaatttcatgagaacgactaccattcaggtattgtgagtaatttatctgggagatgtgctctctattcacatgaagaagcctcggggtttcaagtactaaagtggaatgcatcttttttttgtaaaataccaggtcttacctttcgactggtatcattttattaattattgcacacatatccgagaagtaatttatctgtggttcttgcttacagttttcccatatatacaggcaccccttctctataactctggcaccaggagataactacttgactgtgcatatccgcacgctgggt

SEQ ID NO: 112961 - DNA, 829 bp, Zea Mays
tcattcaggttgctgcgagagaaggcttcaagcttcctccttgacgacttctacaggactccaggaggtattcagttcgaagggcctggttcagatgcaaagcccatcacgctgaccattgagaaccaggactacatgggtgacattgagatactgaaagagtaccttggcaaggttaggaccatggtgaagccagggtgctcctgggagatcctgaaggcggcgatcagttccatggtgtcggtgacggatgtgctgactgtgatgtcccaccccctcaacgccgagctgcccctctaccatttcaagctgcatatattcaacattatgaatgcatggtaactattttgcatgcctatgacgagaatcatcacttttggagcatgggtgctttgtgcacatataaccaaactgctaaaatatttgcagttatgtatatgtttaagcgatccctgaccaactcttcaattatgccactaatgtactaaataaatatgtacgaccatatcggttgattcaacagcttctgttagcgctagaattatcatctatgtacactatgagctctttaaacgctagagttttgttaaatttgattttgcacttatatacttatttactccataacgtacacaacatacattatactttgttgttcagctatcgacaggcgtgcatgggcgcgccccatacactagtgtaatgtaaaacactaccaaagccacggtgaatagcattgtttttttccaggactaagcaaatgcctaccaacgaagcaaccttttcgctaaaagaggtcaagccatcaactaaagtatatgccatgatt

SEQ ID NO: 112962 - DNA, 1712 bp, Zea Mays
cccataaacaatcaccccgaagaagaaaatcacgggcagacatcatcagcaacgccggccggcgtcaccgccaccctcccctctcgcggacaccggaaaccatcacatcaaaccggaaaccacccttccctccagaactccagaccattcccttctccctttcctcttctccacgcttcgcccctcgccgactattttaaacccacgcttcttttagttctttcttccccgtcggcttccggagtggaaaccattttcctaccacccgcgggagatccacacgcccacgagcagtggagctcggcagcgaggcttcggagttctgccatggcgtcgtcccacatcatcctgcccaaggaggaggaggaggaggcggctgcggcagcggtggcggaggtcgggttgggagcggcggtggaggcggaccacgaccaccggccgtaccaggagcaggggcccgggaaggcggcgctgccgttctcggcaacgtgcgtccggatctcccgcgactcgtacccgaacctccgcgcgctgcggaacgcgtcgaccatgacactccacgatgatgacgccgccttcgtcaagctcgaggagggcgactacggatacgtgctcgacgacgtcccgcacctcaccgactacctcccggacctccccacttttcctaatcctctgcaagatcatcctgcgtattcaactgtcaagcaatattttgtcaatgcagatgatacagtccctgaaaaggtagttgttcagaagaacagtccacgaggagttcacttccgtcgtgctggacctcgtcagagggtgtattttgagtcagaagaagcgaaagcttgcattgtaacctgtggaggcctttgccctgggctcaatactgtcatcagagagttggtttgtggcttgtcccacatgtacaacgttagcaatgtcttcggaatacagaatgggtacaaggggttctattcgagcaattatcttcccatgacaccaaagagtgtgaatgatatccacaaacgaggtggtacagttcttggaacatcacgaggtggccatgataccaaaaagattgttgacaacattcaagatcgtggaattaatcaggtgttcattataggaggagatggaactcagaagggtgcatatgagatttacaaggaaatccggagacgtggtctacaagtagctgttgctggtattcccaagactattgataatgatatagcggttatagacaagtcatttggttttgatactgctgtagaagaagcccagcgtgccattaatgcagctcatgtggaagcttcaagtgctgaaaatggaataggtttagtgaagcttatgggtcgctatagtggatttattgccatgtatgctactcttgcaaacaggatgtgggcgaggctgctgtcttcaaccaaccaaccgagtttcctgagccagaaggacatcgacgcggccagagaagccgacaaggcggccaaccgcatgaagagcagagaggacgcgaagaagcaatctacaccagtgttggcaaatggtgagaaatagtgtgcttttgacggttctttgttgtatgcagtagctgctgcaagctggctgagatcagtaggccaaaactgcgaggtcgatgagttttacttccatttgcatgcgaacagaattcacgtaataaaagcttcatagtgtgtatttgcgttagtaaacatata

SEQ ID NO: 112963 - DNA, 2183 bp, Zea Mays
cccataaacaatcaccccgaagaagaaaatcacgggcagacatcatcagcaacgccggccggcgtcaccgccaccctcccctctcgcggacaccggaaaccatcacatcaaaccggaaaccacccttccctccagaactccagaccattcccttctccctttcctcttctccacgcttcgcccctcgccgactattttaaacccacgcttcttttagttctttcttccccgtcggcttccggagtggaaaccattttcctaccacccgcgggagatccacacgcccacgagcagtggagctcggcagcgaggcttcggagttctgccatggcgtcgtcccacatcatcctgcccaaggaggaggaggaggaggcggctgcggcagcggtggcggaggtcgggttgggagcggcggtggaggcggaccacgaccaccggccgtaccaggagcaggggcccgggaaggcggcgctgccgttctcggcaacgtgcgtccggatctcccgcgactcgtacccgaacctccgcgcgctgcggaacgcgtcgaccatgacactccacgatgatgacgccgccttcgtcaagctcgaggagggcgactacggatacgtgctcgacgacgtcccgcacctcaccgactacctcccggacctccccacttttcctaatcctctgcaagatcatcctgcgtattcaactgtcaagcaatattttgtcaatgcagatgatacagtccctgaaaaggtagttgttcagaagaacagtccacgaggagttcacttccgtcgtgctggacctcgtcagagggtgtattttgagtcagaagaagcgaaagcttgcattgtaacctgtggaggcctttgccctgggctcaatactgtcatcagagagttggtttgtggcttgtcccacatgtacaacgttagcaatgtcttcggaatacagaatgggtacaaggggttctattcgagcaattatcttcccatgacaccaaagagtgtgaatgatatccacaaacgaggtggtacagttcttggaacatcacgaggtggccatgataccaaaaagattgttgacaacattcaagatcgtggaattaatcaggtgttcattataggaggagatggaactcagaagggtgcatatgagatttacaaggaaatccggagacgtggtctacaagtagctgttgctggtattcccaagactattgataatgatatagcggttatagacaagtcatttggttttgatactgctgtagaagaagcccagcgtgccattaatgcagctcatgtggaagcttcaagtgctgaaaatggaataggtttagtgaagcttatgggtcgctatagtggatttattgccatgtatgctactcttgcaagcagagatgtggactgctgcttgattcctgagtcacccttttatttggaaggggagggtggactatttgagtatatagataggaggttgaaggagaacaatcacacggttattgttgtcgcggagggagcaggacaggatcttattgctcaaagtatacctgctgcagatcagcaagatgcatctggaaataagctgcttcttgatgttggtctctggttgactcacaagattaaggattattgcaagagcaagaagatggagatgactattaaatacatagatccaacttacatgatccgtgctattccaagcaatgcatcagacaatgtctattgcaccctgctcgcacatagtgccattcatggtgcaatggcgggatacagctttacagtcggaatggttaatggcaggcatgcatatataccatttcatagggtaacatctacaaggaacaaggtgaggataactgacaggatgtgggcgaggctgctgtcttcaaccaaccaaccgagtttcctgagccagaaggacatcgacgcggccagagaagccgacaaggcggccaaccgcatgaagagcagagaggacgcgaagaagcaatctacaccagtgttggcaaatggtgagaaatagtgtgcttttgacggttctttgttgtatgcagtagctgctgcaagctggctgagatcagtaggccaaaactgcgaggtcgatgagttttacttccatttgcatgcgaacagaattcacgtaataaaagcttcatagtgtgtatttgcgttagtaaacatata

SEQ ID NO: 112964 - DNA, 1091 bp, Zea Mays
tccagaccattcccttctccctttcctcttctccacgcttcgcccctcgccgactattttaaacccacgcttcttttagttctttcttccccgtcggcttccggagtggaaaccattttcctaccacccgcgggagatccacacgcccacgagcagtggagctcggcagcgaggcttcggagttctgccattaatgcagctcatgtggaagcttcaagtgctgaaaatggaataggtttagtgaagcttatgggtcgctatagtggatttattgccatgtatgctactcttgcaagcagagatgtggactgctgcttgattcctgagtcacccttttatttggaaggggagggtggactatttgagtatatagataggaggttgaaggagaacaatcacacggttattgttgtcgcggagggagcaggacaggatcttattgctcaaagtatacctgctgcagatcagcaagatgcatctggaaataagctgcttcttgatgttggtctctggttgactcacaagattaaggattattgcaagagcaagaagatggagatgactattaaatacatagatccaacttacatgatccgtgctattccaagcaatgcatcagacaatgtctattgcaccctgctcgcacatagtgccattcatggtgcaatggcgggatacagctttacagtcggaatggttaatggcaggcatgcatatataccatttcatagggtaacatctacaaggaacaaggtgaggataactgacaggatgtgggcgaggctgctgtcttcaaccaaccaaccgagtttcctgagccagaaggacatcgacgcggccagagaagccgacaaggcggccaaccgcatgaagagcagagaggacgcgaagaagcaatctacaccagtgttggcaaatggtgagaaatagtgtgcttttgacggttctttgttgtatgcagtagctgctgcaagctggctgagatcagtaggccaaaactgcgaggtcgatgagttttacttccatttgcatgcgaacagaattcacgtaataaaagcttcatagtgtgtatttgcgttagtaaacatata

SEQ ID NO: 112965 - DNA, 204 bp, Zea Mays
atgacaccgctggagtctagtcgactctccttgtttgtgtcgttcctctgcatcttgcaccgctcgccggagttcgtcgccataatatcgcgggagctctgcgtcctgcttactgctccagcatccttcctcccgcgatgccgtgattccggcaccgttgctgcctccccgctcatcagcaccacgacttcatcgtgcagctga

SEQ ID NO: 112966 - DNA, 678 bp, Zea Mays
cccacctagagtcctaatcgaaaaccctcgtttgttcgcttgaacagaagcctcccccgccgcacccgccaggcggcgcgggcgcgcggcaatggccgcgcagaacgctgggatcatcatcgattgtcgacaggcgatgtcccccgatcccccggccgtggagttggaggtcatcggctcatcttctccgtccatcacgccatgtcccgctgcagcggcgcccgccgacgccgatttcgatcatgacggatgcaccgcggaattatcttcttcaactgatcgagaattacaggaccatatcagacagtgggaagggtcctatgggcagggtgtactccgtaggatgccggatggtggcgagaagatgcattcacgtgtcctccggatgaagaaggagctcgagcggcggagggccagacagaggatggtgaggaaaatgtggacttcgcgtaatagcttcgggtttgctttagtgtttctccctttctgttttgggcttggttgatatcaggcccacggacagttgagttggtgattggtctgaatcatgggtaggatgccacaaagatttcccaaatgttgggttttagtgtaagattatggatggatgctgtttttttcgttgctttcagcgagcaattgaaattacatctgcaattagaatcatcccaggaggaa

SEQ ID NO: 112967 - DNA, 739 bp, Zea Mays
cccacctagagtcctaatcgaaaaccctcgtttgttcgcttgaacagaagcctcccccgccgcacccgccaggcggcgcgggcgcgcggcaatggccgcgcagaacgctgggatcatcatcgattgtcgacaggcgatgtcccccgatcccccggccgtggagttggaggtcatcggctcatcttctccgtccatcacgccatgtcccgctgcagcggcgcccgccgacgccgatttcgatcatgacggatgcaccgcggaattatcttcttcaactgatcgagaattacaggaccatatcagacagtgggaagggtcctatgggcagggtgtactccgtaggatgccggatggtggcgagaagatgcattcacgtgtcctccggatgaagaaggagctcgagcggcggagggccagacagaggatggatgtcacgcccttgagacagacagtgcaagctaagcgtactggtggcagcagtggagaaatctacaacttaaagtctgatgatgagaccatggacagtacggctagcaaacactatccaaactcaagttgtactacatctacaaagacctatacccaggttaagggagctgcatatgaagaacaaagttctttaagccatggcaaatatgcttacccaaagaatggtggtcaaatttcaaaagagtcgttgaggcatcaatcaaaaacgtgcgcttatcttccaaagagtacatgctctgaacatttaaat

SEQ ID NO: 112968 - DNA, 901 bp, Zea Mays
cccacctagagtcctaatcgaaaaccctcgtttgttcgcttgaacagaagcctcccccgccgcacccgccaggcggcgcgggcgcgcggcaatggccgcgcagaacgctgggatcatcatcgattgtcgacaggcgatgtcccccgatcccccggccgtggagttggaggtcatcggctcatcttctccgtccatcacgccatgtcccgctgcagcggcgcccgccgacgccgatttcgatcatgacggatgcaccgcggaattatcttcttcaactgatcgagaattacaggaccatatcagacagtgggaagggtcctatgggcagggtgtactccgtaggatgccggatggtggcgagaagatgcattcacgtgtcctccggatgaagaaggagctcgagcggcggagggccagacagaggatggatgtcacgcccttgagacagacagtgcaagctaagcgtactggtggcagcagtggagaaatctacaacttaaagtctgatgatgagaccatggacagtacggctagcaaacactatccaaactcaagttgtactacatctacaaagacctatacccaggttaagggagctgcatatgaagaacaaagttctttaagccatggcaaatatgcttacccaaagaatggtggtcaaatttcaaaagagtcgttgaggcatcaatcaaaaacgtggaaccttgccaaaaataaggcctcacccttggagattaaaaaggatgtagttctgttggatgacgatgatgatatagagcctgctagatcagctgatgttcagatatctaataagtgggaggagtcaaatatccactatccttcaagcactgatccagaagcggttgaactgacctactctgacatgaaatgtcttgaacca

SEQ ID NO: 112969 - DNA, 848 bp, Zea Mays
gaattcagcaagttacggagatggtggagaggtgtagatatttttaagaaagcgtacataattttgccgattaatgaatcgatgcactggagcttgatcattgtttgcatgcctacaaaagaggcagattctgggccaataatacttcacttggactctcttggtcttcactccagtcaaaagctttttgacatagttgcgaggtatattcaagcagaacggtggcacctagggatggattcgtcttatgatattccattttcagggaggatatggaggcgtctttcgaaaaatatcaatagggaaaagattgaggtgccacgtcagcgtaacgagtatgattgtggcctctttatgctttactatattgacaggtttattcaagatgcgccagagaggttgacaaaagagggccttggcatgtttggacgcagatggttcaaccatgaagaggcttcagcgtttcggggagggatacgggcgctactgattgatctatttcatagtgctctagacgacgatggaccatcggaggcagagcttgaagacaaggacattcagatggactgagcctgctgttgctgctttgattgaatatgtaacctcgttcactcccaagtgaagtttggccgtggagggaatgcgccccgttggctacacacttttgtttacacgctcgttcattcggcggtggaaatgtacagttcaacgttatctaagggcctgtttggaaccggattcagattcaacaaaaatatatttacgaaaagttagctaaatggtttagggtttagatcaataaaatccagattcacaaaatggtgcctttagatttaacaaaaaaaaca

SEQ ID NO: 112970 - DNA, 789 bp, Zea Mays
gaattcagcaagttacggagatggtggagaggtgtagatatttttaagaaagcgtacataattttgccgattaatgaatcgatgcactggagcttgatcattgtttgcatgcctacaaaagaggcagattctgggccaataatacttcacttggactctcttggtcttcactccagtcaaaagctttttgacatagttgcgaggtatattcaagcagaacggtggcacctagggatggattcgtcttatgatattccattttcagggaggatatggaggcgtctttcgaaaaatatcaatagggaaaagattgaggtttattcaagatgcgccagagaggttgacaaaagagggccttggcatgtttggacgcagatggttcaaccatgaagaggcttcagcgtttcggggagggatacgggcgctactgattgatctatttcatagtgctctagacgacgatggaccatcggaggcagagcttgaagacaaggacattcagatggactgagcctgctgttgctgctttgattgaatatgtaacctcgttcactcccaagtgaagtttggccgtggagggaatgcgccccgttggctacacacttttgtttacacgctcgttcattcggcggtggaaatgtacagttcaacgttatctaagggcctgtttggaaccggattcagattcaacaaaaatatatttacgaaaagttagctaaatggtttagggtttagatcaataaaatccagattcacaaaatggtgcctttagatttaacaaaaaaaaca

SEQ ID NO: 112971 - DNA, 786 bp, Zea Mays
gaattcagcaagttacggagatggtggagaggtgtagatatttttaagaaagcgtacataattttgccgattaatgaatcgatgcactggagcttgatcattgtttgcatgcctacaaaagaggcagattctgggccaataatacttcacttggactctcttggtcttcactccagtcaaaagctttttgacatagttgcgagggaggatatggaggcgtctttcgaaaaatatcaatagggaaaagattgaggtgccacgtcagcgtaacgagtatgattgtggcctctttatgctttactatattgacaggtttattcaagatgcgccagagaggttgacaaaagagggccttggcatgtttggacgcagatggttcaaccatgaagaggcttcagcgtttcggggagggatacgggcgctactgattgatctatttcatagtgctctagacgacgatggaccatcggaggcagagcttgaagacaaggacattcagatggactgagcctgctgttgctgctttgattgaatatgtaacctcgttcactcccaagtgaagtttggccgtggagggaatgcgccccgttggctacacacttttgtttacacgctcgttcattcggcggtggaaatgtacagttcaacgttatctaagggcctgtttggaaccggattcagattcaacaaaaatatatttacgaaaagttagctaaatggtttagggtttagatcaataaaatccagattcacaaaatggtgcctttagatttaacaaaaaaaaca

SEQ ID NO: 112972 - DNA, 775 bp, Zea Mays
gaattcagcaagttacggagatggtggagaggtgtagatatttttaagaaagcgtacataattttgccgattaatgaatcgatgcactggagcttgatcattgtttgcatgcctacaaaagaggcagattctgggccaataatacttcacttggactctcttggtcttcactccagtcaaaagctttttgacatagttgcgagggaggatatggaggcgtctttcgaaaaatatcaatagggaaaagattgaggtgccacgtcagcgtaacgagtatgattgtggcctctttatgctttactatattgacaggtttattcaagatgcgccagagaggttgacaaaagagggccttggcatgatggttcaaccatgaagaggcttcagcgtttcggggagggatacgggcgctactgattgatctatttcatagtgctctagacgacgatggaccatcggaggcagagcttgaagacaaggacattcagatggactgagcctgctgttgctgctttgattgaatatgtaacctcgttcactcccaagtgaagtttggccgtggagggaatgcgccccgttggctacacacttttgtttacacgctcgttcattcggcggtggaaatgtacagttcaacgttatctaagggcctgtttggaaccggattcagattcaacaaaaatatatttacgaaaagttagctaaatggtttagggtttagatcaataaaatccagattcacaaaatggtgcctttagatttaacaaaaaaaaca

SEQ ID NO: 112973 - DNA, 2081 bp, Zea Mays
ctttcttcccgccggattgacgaaatcgatcgctccgctcccaccggccaccaccagtccaccacacctcgatccccgcaccgcccagccggccgcccgcatccaccgcacaaaaccctaggcatggccccaccctaaaccccttgctccccacctcgtatggtcgtcgtccccttctccctccgcattgcgcgaaaccccatccgcctccgccttcttccggtctccgctgctcgcttcacccgtctcgccatgtcgaccacgccgccggcggcggctaccatatccgtcgagtatgccaagtccgggcgctcaatctgcaaggggtgcagcggggtcatcgcctccggggcgctccgcctcggcgcctctgcgcgcgacccccgtggcttcggcgccaccaagtggtaccacgtctcctgcttaccctcctcgtcgtacccgctcggccccatcgggagtatcaaggggttcgactccattaaggaccatgatcgtgcggaattgcgagaactagagaagaatcataaaagagacaatactgcagtcagccctccggaggaacaacgtccaaagaaagcaaggattcagatgttttcccctgcggagggggtgccagataatgtaacagtctctgttgagtatgcgaagtctggtcgctctacctgcaagggctgcagtgagaatattgccaaaggtgccctccgccttggtgcctcttttcctgatccccgtggctacgaaaatactaagtggtaccatgttgtgtgcttccctacatcatcatacccattatttccaatgtcaaatctgaaggggtttgattcaattgaggatcatgaccgtgacaagttgcacaaattggtggagaatcacaagagcgatggaaaagcggctgatgtattgaatgagtcaaatctgaagagagaaatggctcacagcatggatgactcgaatgaaggtgctgaaaaggatctggaaggaataaagattcactgcatgggggagtttgaagaaggtgctgaaaagaacctggaagaagcaaagttacctgcagggaacaaaatgattggtccatcgatatccttttcactttctgatataaaaaaagaatacaagaatgctacccttcctgctcattggaaggtttttgatacagttatcttccgtgagaaggaagatggccttcatgcttcatctaagattgctgcatttgattttgatgggtgccttgccaataccagtatgaagagggttggtgcagaccagtggtctttacagcataaatcaattccagaaaaattgcaaagactgtacgatgatggttacaagctggtcatattcaccaatgagtcaaacattgagcgctggaagaacaagcgacaacaagctgttgactccaaagttggccgccttgataactttattgaatgtgttaaagcccctattcaggttttcattgcttgtggtttagggaaaggaaaaggtattccagatgatccataccgcaaaccaaatcctggaatgtggtggttgatggctcagcatttcaattctggaatcaaaattgacatggatcaatctttctatgtcggtgatgctgctgggagagagaacgatcatagtgacgcagatatagaatttgctaaggccatcggtctcaagttccatgttcccgaggagtacttcggtttctaattacctgtgaccagctagtaagatggttacactacgtcgtttagtgtttggatattatcaatactgtggctattctggtatggtgatctacatgtctgtttaaaccgtcaaataatatcccagttattcacttaggtcctgtttgtttccttccagaattatgtaatccatatggattatataagtacttaataacctgcttatggattatcataatctaggtatctagattatataatccacctaataatctgtgttgtttgtttgtctcttaacttatttaagttggattatataatctagagggtaaacaaataaggctaacttgctgacataattgagaaaactcaactctctgtatcgtagagatgttgagtcaatca

SEQ ID NO: 112974 - DNA, 921 bp, Zea Mays
ctatataaaccgaccccaacgcatccattatattcagcttcttgatctcacacgaaggcatggcgacggagatccagggctactacgatgacggcaccgccgtggtgtcgttcgacgtgcacaacatcgacaccacgctgacgaacttgggcagcgtggtggagtggtggctgggtgagacctatcgcctccaccaccgcggccacatcgccggcctcgacgtggagtggcgccccgctcgcgtgccgggccccgtccccgtcgccgtgctgcagatctgcgtcgaccaccgctgcctcgtattccagatcctccaagccgactacatccccgacgccctgtccaggttcctcgccgaccgccggttcaccttcgtgggggtcgggatcagcggcgacgtcgcaaagctgcgggccgggtacaggctgggggtggcgagcgccgtggacctgcgcgttctcgctgccgacacgctggaggtgcccgagctgctccgcgcggggcttcagacgctggtgtgggaggtgatgggcgtgcagatggtgaagccgcaccacgtgcgcgtcagcgcctgggacacgcccacgctgtcggaagaccagctcaagtacgcctgcgccgacgctttcgcctcgttcgaggtcggccggaggctctacgaaggcgactactagggtctagggttacggtatgctgtctggtttagcaatgccatgcgtgtcaggccggcgtatcagtattagcagtcgtcgatggtcttcagtttgcgttgcagttgtgtcctctaatttctctgcctaataagttgtactagctagtatcacgcgcgtgatctcttttgtgtgcgccaccactcgtcatgcatatggcatttcgacttcaaaatttgaatgctatcttgaagccccatgatcttctctc

SEQ ID NO: 112975 - DNA, 587 bp, Zea Mays
cagaaagctttgtaatcagctgaatcaaagtttacatgccaagggaccactacccagttacattctactgttttattttggtggcaagtaacaaatcagagacaacagttgttaaagtaaaagctcaggcttaacgtatgagctgcaaaatagaacaccagagctgcttaggacctgtttggctgtttctcactgacgacatcatacagcatgtctctcacatgaaactattagctaactaaatgttagataggcatcagcctaccttcagcacataaacaacctatagcggtcttgtgccaataaaaattgaccaagatgtggactttctttcatcttgtttaccagtagtctttgcaagaacacacaccattttcgaagtggtggaacctctttgcatcccttgcaatgatctgacgtccaacaagttttgagattatcttgaaagccgtgtgacaatccccacaggatcgaagattctttataacccgaataggtgagcggggagcacttgttataagaccgtaactgatagccagcctctcactgtgagccagtaaagcatcctctttggtttcttgatcaac

SEQ ID NO: 112976 - DNA, 2098 bp, Zea Mays
caccacaacaccgaagcagccgagaaccggaccccgcaaggccgcaacagcaagggcagcactgccgaaaccgcaggccgcagcactcgagagcgcagccaggcggcggcgctccgcctccgactccacaccaggccgctgcgtccatggacccctccccgcagtcgacgccgcccaccggagacgacccggcagcggcggcggatcccgacctaccgaggctcacggtgacgtaggtggagcagatgaaggtggaggccagggttggcgacatctaccgctccctcttcggggccgcgcccaacacgaaatccatcatgctagagctgtggcgtgatcagcatatcgagtatctgacgcctgggctgaggcatatgggaccagcctttcatgttctagatgccaatcgcccttggctatgctactggatggttcatccacttgctttgctggatgaagcacttgatgatgatcttgagaatgatatcatagacttcttagctcgatgtcaggataaagatggtggatatagtggtggacctggacagttgcctcacctagctacgacttatgctgctgtaaatacacttgtgacaatagggagcgaaagagcattgtcatcaatcaataggggcaacctgtacaattttatgctgcagatgaaagatgtatcaggtgctttcagaatgcatgatggtggcgaaattgatgtccgtgcttcctacaccgctatatcggttgccagccttgtgaatattcttgattttaaactggcaaaaggtgtaggcgactacatagcaagatgtcaaacttatgaaggtggtattgctggggagccttatgctgaagcacatggtgggtatacattctgtggattggctgctttgatcctgcttaatgaggcagagaaagttgacttgcctagtttgattggctgggtggcttttcgtcaaggagtggaatgcggatttcaaggacgaactaataaattggttgatggttgctactccttttggcagggagctgccattgctttcacacaaaagttaattacgattgttgataagcaattgaagtcctcgtattcctgcaaaaggccatcaggagaggatgcctgcagcaccagttcatatgggtgcaccgcgaaaaagtcttcctctgctgtggactatgcgaagtttggatttgattttatacaacagagcaaccaaattggcccactcttccataacattgccctgcaacaatacatcctactttgttctcaggtgaggtaactttgaatacaatattattttcatatgcagagttttatcactagaatgtgaaattctgcaatgccgtcttattatagttgttaccaccctctatcccgaaattataagttgttttagcttttctaggttacataacttttgatatgcacctagatatacaatgtctacatacatagcaaaagttatgtgccgaaaaatgccgaaacaacctataaattggaacggagggagtatttattgaggaaatgagatctcagataagttaagattacaatcgcttctgtaactcaggtactagagggaggcttgagggataagcctggaaagaacagagatcactatcattcatgctactgcctcagtggcctcgcagttagccagtacagtgccatgactgatactggttcgtgcccattacctcagcatgtgcttggaccgtactctaatttgctggagccaatccatccactctacaatgttgtcctagataagtaccatacagcctatgagttcttctcagaagagtgatctaatgttagaacctaagaacaattggctaaggttgtgtacgattgtgttatttgcacgaatgatggtaacttagtcgtgttataccagggtatttgtatgtttggtcaggtggattgcctggataaatctctctgttgtaatggtcgtgtcccgaattatgtttgtaatggtcgtgtcccgaattatgttactggtgttcattattagttaaaatgcaacagaagtgtaggtctagatgctgcatagtgatctgtggatgctagaaccaagtgtttgtacgtaatactgtt

SEQ ID NO: 112977 - DNA, 1847 bp, Zea Mays
caccacaacaccgaagcagccgagaaccggaccccgcaaggccgcaacagcaagggcagcactgccgaaaccgcaggccgcagcactcgagagcgcagccaggcggcggcgctccgcctccgactccacaccaggccgctgcgtccatggacccctccccgcagtcgacgccgcccaccggagacgacccggcagcggcggcggatcccgacctaccgaggctcacggtgacgtaggtggagcagatgaaggtggaggccagggttggcgacatctaccgctccctcttcggggccgcgcccaacacgaaatccatcatgctagagctgtggcgtgatcagcatatcgagtatctgacgcctgggctgaggcatatgggaccagcctttcatgttctagatgccaatcgcccttggctatgctactggatggttcatccacttgctttgctggatgaagcacttgatgatgatcttgagaatgatatcatagacttcttagctcgatgtcaggataaagatggtggatatagtggtggacctggacagttgcctcacctagctacgacttatgctgctgtaaatacacttgtgacaatagggagcgaaagagcattgtcatcaatcaataggggcaacctgtacaattttatgctgcagatgaaagatgtatcaggtgctttcagaatgcatgatggtggcgaaattgatgtccgtgcttcctacaccgctatatcggttgccagccttgtgaatattcttgattttaaactggcaaaaggtgtaggcgactacatagcaagatgtcaaacttatgaaggtggtattgctggggagccttatgctgaagcacatggtgggtatacattctgtggattggctgctttgatcctgcttaatgaggcagagaaagttgacttgcctagtttgattggctgggtggcttttcgtcaaggagtggaatgcggatttcaaggacgaactaataaattggttgatggttgctactccttttggcagggagctgccattgctttcacacaaaagttaattacgattgttgataagcaattgaagtcctcgtattcctgcaaaaggccatcaggagaggatgcctgcagcaccagttcatatgggtgcaccgcgaaaaagtcttcctctgctgtggactatgcgaagtttggatttgattttatacaacagagcaaccaaattggcccactcttccataacattgccctgcaacaatacatcctactttgttctcaggtactagagggaggcttgagggataagcctggaaagaacagagatcactatcattcatgctactgcctcagtggcctcgcagttagccagtacagtgccatgactgatactggttcgtgcccattacctcagcatgtgcttggaccgtactctaatttgctggagccaatccatccactctacaatgttgtcctagataagtaccatacagcctatgagttcttctcagaagagtgatctaatgttagaacctaagaacaattggctaaggttgtgtacgattgtgttatttgcacgaatgatggtaacttagtcgtgttataccagggtatttgtatgtttggtcaggtggattgcctggataaatctctctgttgtaatggtcgtgtcccgaattatgtttgtaatggtcgtgtcccgaattatgttactggtgttcattattagttaaaatgcaacagaagtgtaggtctagatgctgcatagtgatctgtggatgctagaaccaagtgtttgtacgtaatactgttatgatggtactaaattgattagttaaatgcacgattatggtacctgaac

SEQ ID NO: 112978 - DNA, 1781 bp, Zea Mays
caacaccgaagcagccgagaaccggaccccgcaaggccgcaacagcaagggcagcactgccgaaaccgcaggccgcagcactcgagagcgcagccaggcggcggcgctccgcctccgactccacaccaggccgctgcgtccatggacccctccccgcagtcgacgccgcccaccggagacgacccggcagcggcggcggatcccgacctaccgaggctcacggtgacgtaggtggagcagatgaaggtggaggccagggttggcgacatctaccgctccctcttcggggccgcgcccaacacgaaatccatcatgctagagctgtggcgtgatcagcatatcgagtatctgacgcctgggctgaggcatatgggaccagcctttcatgttctagatgccaatcgcccttggctatgctactggatggttcatccacttgctttgctggatgaagcacttgatgatgatcttgagaatgatatcatagacttcttagctcgatgtcaggataaagatggtggatatagtggtggacctggacagttgcctcacctagctacgacttatgctgctgtaaatacacttgtgacaatagggagcgaaagagcattgtcatcaatcaataggtacgcaacctatcagcgtggataatgtacagataccactttctcagttgtagcccttcagaggtgatgcctgccactcattttttcctttgccctagaatgcatgatggtggcgaaattgatgtccgtgcttcctacaccgctatatcggttgccagccttgtgaatattcttgattttaaactggcaaaaggtgtaggcgactacatagcaagatgtcaaacttatgaaggtggtattgctggggagccttatgctgaagcacatggtgggtatacattctgtggattggctgctttgatcctgcttaatgaggcagagaaagttgacttgcctagtttgattggctgggtggcttttcgtcaaggagtggaatgcggatttcaaggacgaactaataaattggttgatggttgctactccttttggcagggagctgccattgctttcacacaaaagttaattacgattgttgataagcaattgaagtcctcgtattcctgcaaaaggccatcaggagaggatgcctgcagcaccagttcatatgggtgcaccgcgaaaaagtcttcctctgctgtggactatgcgaagtttggatttgattttatacaacagagcaaccaaattggcccactcttccataacattgccctgcaacaatacatcctactttgttctcaggtactagagggaggcttgagggataagcctggaaagaacagagatcactatcattcatgctactgcctcagtggcctcgcagttagccagtacagtgccatgactgatactggttcgtgcccattacctcagcatgtgcttggaccgtactctaatttgctggagccaatccatccactctacaatgttgtcctagataagtaccatacagcctatgagttcttctcagaagagtgatctaatgttagaacctaagaacaattggctaaggttgtgtacgattgtgttatttgcacgaatgatggtaacttagtcgtgttataccagggtatttgtatgtttggtcaggtggattgcctggataaatctctctgttgtaatggtcgtgtcccgaattatgtttgtaatggtcgtgtcccgaattatgttactggtgttcattattagttaaaatgcaacagaagtgtaggtcta

SEQ ID NO: 112979 - DNA, 1736 bp, Zea Mays
caacaccgaagcagccgagaaccggaccccgcaaggccgcaacagcaagggcagcactgccgaaaccgcaggccgcagcactcgagagcgcagccaggcggcggcgctccgcctccgactccacaccaggccgctgcgtccatggacccctccccgcagtcgacgccgcccaccggagacgacccggcagcggcggcggatcccgacctaccgaggctcacggtgacgtaggtggagcagatgaaggtggaggccagggttggcgacatctaccgctccctcttcggggccgcgcccaacacgaaatccatcatgctagagctgtggcgtgatcagcatatcgagtatctgacgcctgggctgaggcatatgggaccagcctttcatgttctagatgccaatcgcccttggctatgctactggatggttcatccacttgctttgctggatgaagcacttgatgatgatcttgagaatgatatcatagacttcttagctcgatgtcaggataaagatggtggatatagtggtggacctggacagttgcctcacctagctacgacttatgctgctgtaaatacacttgtgacaatagggagcgaaagagcattgtcatcaatcaataggggcaacctgtacaattttatgctgcagatgaaagatgtatcaggtgctttcagaatgcatgatggtggcgaaattgatgtccgtgcttcctacaccgctatatcgccttgtgaatattcttgattttaaactggcaaaaggtgtaggcgactacatagcaagatgtcaaacttatgaaggtggtattgctggggagccttatgctgaagcacatggtatacattctgtggattggctgctttgatcctgcttaatgaggcagagaaagttgacttgcctagtttgattggctgggtggcttttcgtcaaggagtggaatgcggatttcaaggacgaactaataaattggttgatggttgctactccttttggcagtgtgtgaccagggagctgccattgctttcacacaaaagttaattacgattgttgataagcaattgaagtcctcgtattcctgcaaaaggccatcaggagaggatgcctgcagcaccagttcatatgggtgcaccgcgaaaaagtcttcctctgctgtggactatgcgaagtttggatttgattttatacaacagagcaaccaaattggcccactcttccataacattgccctgcaacaatacatcctactttgttctcaggtactagagggaggcttgagggataagcctggaaagaacagagatcactatcattcatgctactgcctcagtggcctcgcagttagccagtacagtgccatgactgatactggttcgtgcccattacctcagcatgtgcttggaccgtactctaatttgctggagccaatccatccactctacaatgttgtcctagataagtaccatacagcctatgagttcttctcagaagagtgatctaatgttagaacctaagaacaattggctaaggttgtgtacgattgtgttatttgcacgaatgatggtaacttagtcgtgttataccagggtatttgtatgtttggtcaggtggattgcctggataaatctctctgttgtaatggtcgtgtcccgaattatgtttgtaatggtcgtgtcccgaattatgttactggtgttcattattagttaaaatgcaacagaagtgtaggtcta

SEQ ID NO: 112980 - DNA, 1890 bp, Zea Mays
tttccacacttggtcgccgtcttctccccctttcgctttcgctcttcctctccagcccacaagactccgcggcgccgcagacatgcgcccgcttatccgaaccgctcgctgctggctcctccgcgcgcgtgttcgcgccatggccacgcttcctatggcgtcccccgccgccgccatcccctcctccgccacccgccccgtcgcctccccttcttcgcgttctcaccgccccctcacccgcttcttctccgtcgcgccggcgccggtcggggcgaaagggctccgagcggcggcctccgccgttgaggtgggcggcgtaaagatcgcgcgcgaggatgttgtgaaagaagatgacccaacaaacaacgtgccagacactatctttgcgaagattggcctgcagctgcacaggagggagaaccatccccttgggattctgaagaacacaatttatgattactttgacaagaacttcactggacagtttgacaagtttgatgacctttgcccccttgtttctgtcaagcagaattttgatgatgtcttggtcccttctgaccatgtaagccggagttacaatgacacatattatgttgatgatcaaacagtcttaaggtgtcataccagtgctcatcaagctgagctgctaagggatggacgtacacactttcttgtaactggagatgtttaccgtagggattccattgattcaactcactatcctgtcttccatcagatggaagggttccgtgtgttctctcctgatgaatggtcaggttctggcttggatgggacagcatatgcagctgcagaactcaagaaaacactggaaggattggcaagacatctatttggtgctgtagagatgcgatgggttgacacatacttcccatttaccaacccatcctttgagctcgaaatatattttcaggatgattggttagaggttttgggctgtggagttaccgagcaggaaattttgaaaagaaatggcaggagagatcatgtggcatgggcctttggattgggattggagcgtcttgcgatggtccttttcgacattccagatattcgactattctggtcgaatgataaacggttcacgtcccagttctcagaaggcaagcttggtgtcaagttcaagccattttcaaagtttcctccttgttacaaagatatgagtttctggatcaatggtgcatttacagaaaacaacttatgtgaggttgtcagaggaatagccggggatcttgttgaggaggtaaaacttattgataatttcaccaacaagaaaggcatgacaagtcattgctacagaatagcatataggtcaatggaacgttcgctcacagacgaggagattaacaatcttcagttgaatgtcagggaagctgtgaaagataaattgaaagtagagttgagatagcagcagctaattatgctgtcatagcatggactaaattttgcctgtctttatgtaaatcaattaaaaaggattttttatctatcgagaaaatgcgccatttgttcctggcattgatcacgttctcttctgtttagggaagagaaaaggtccctgttccatttgggaatcatatcttgtaattcataaggctttgtttggttgcacagggatcaaaggagattgaggaggattaaatccctctctattcaattttgactaggtagagatttaatcccctctaacctccttttaatccccttgtaaccgaacaagccctaagatgatgagctgtacacttctcactattttggaggacatgtggtttgggaattcatgtttggcctttcaattcaattttggccgttgtacattatttgtaacgaacaagtaaaagcactctgtatataaagtctaggatggttcaa

SEQ ID NO: 112981 - DNA, 1016 bp, Zea Mays
ctccagcccacaagactccgcggcgccgcagacatgcgcccgcttatccgaaccgctcgctgctggctcctccgcgcgcgtgttcgcgccatggccacgcttcctatggcgtcccccgccgccgccatcccctcctccgccacccgccccgtcgcctccccttcttcgcgttctcaccgccccctcacccgcttcttctccgtcgcgccggcgccggtcggggcgaaagggctccgagcggcggcctccgccgttgaggtgggcggcgtaaagatcgcgcgcgaggatgttgtgaaagaagatgacccaacaaacaacgtgccagacactatctttgcgaagattggcctgcagctgcacaggagggagaaccatccccttgggattctgaagaacacaatttatgattactttgacaagaacttcactggacagtttgacaagtttgatgacctttgcccccttgtttctgtcaagcagaattttgatgatgtcttggtcccttctgaccatgtaagccggagttacaatgacacatattatgttgatgatcaaacagtcttaaggtgtcataccagtgctcatcaagctgagctgctaagggatggacgtacacactttcttgtaactggagatgtttaccgtagggattccattgattcaactcactatcctgtcttccatcaggtacttttgttttgccgtactcacttaaattttcttaatgaggtttgttttggtaatctttaacacatgtagatggaagggttccgtgtgttctctcctgatgaatggtcaggttctggcttggatgggacagcatatgcagctgcagaactcaagaaaacactggaaggattggcaagacatctatttggtaaatcatttgtagcttgttccttatcatttgaggggatgacgaaattgatccttgtttcagataaactatagaaaaatgtcatctgcaggtgctgtagagatgcgatgggttgacacatacttcccatttaccaacc

SEQ ID NO: 112982 - DNA, 1873 bp, Zea Mays
gcctaaatatttaattatataaccgatttcatatcttgatatttttataaacaaaacaaattttatctagcctggctcaccaatacaatcataatagactgatgcgggtaaccaatcagcctctaacatttgcaacatctgacaagaatcggagaaatgccgcctccgacgagccaccgtcctccatcgcttcctccgtctctttcttcagttgcagcgctcgtttcttaagcctcgtcccctcctcggactccaacgctagcctcagttttccctcaatttcttcagctttgatgagacctgtcatgtagccctccatctccatcccgacgcccatgtcctcggttataaacaccttgttcatcctctgctccgcgcccgccagtggccaacacagcatcggcacccccgccgcgatcgcctccagcgtcgagttccacccgcagtgggtgacgaatacgcctgtagcggggtggttgagcacatccacctgcggcgcccacgacgtgacgacgaggccacggtccttggtccgctccacgaagccctccggcaagagcgcgtccagatccgcctcggcacgttgctcccagtatcttccgggcccgtccctgcctgccggcgtgcgcacgacccacaggaaccgttgcccacatctttccaggccaacggcggtctccttgagctgctccttgggtagggcgcccttgctcccccagcagaggaacgcgacgctgcgctccggctgcgcgtccagccacgcgaggcattcgtgctgagggccgccgtcgccttcctgtctgcccgtcccagtcccaaccaacggcccgatggggtagactggaggcagtgcctgtccgggaacgcacaggggatccctcagcgcctggagggcccgctgctccagcgactcgaacgtgttgaccagtacgccgtgggtgcccgcgttgcgctccaagatctccatcgaggtcctgcacagctcgtcctccggactctccagcagcgacgtggcgagatgggacgccggcatgggcggcaccccgaggaactgaagcggcttgtccccaagttccttcaggcccgtcagcctaccggcaagcagcgccggcagctgggtgaagatcgccagagtccccgcgcctgaggcgaagaacttgaatacggggacgcccagcctcgtcgccacatcgatggcgtgggtgcagaacaggtcgatgacgagggagtgcaggcgctcccgggggatggagcggaggaagctctcgagcttgtcgttgtactggcgcatcagctccagtatgaggaggaaagggtgcttggtggagctggccacgtcaggtgccggggtcggcggcaggacgtggaaggtgatggacgggttggaggcggccacgcgctcgatgaagccggcgccggagtcggtcgacttgatgggcggctcgatgagcaccatggtgacgtcgtagccgtggtggaggaagaccttggcgagctgcgtcatgggcccgacgtgcccgacgccgccgacggggtacagaacggcgatctgcttcacggatacgtcatccatctctgaggcacgggcgcaccgcgcagtcgcgcacgactggttaggatttgggaatctactttgaccttgggatttcctcgatctgtggcaggcgccaggcagttctgtttggccattcgcgtttataaataacatcaatagaccacccggagttctggcatttgtagttttgacaacgaaagccaagactctgagacctaaagactttaatgattacaagtggggataaatttttattcggcgcattacggcattagcatttgcgtccgattttgcaacttgagccggacttgtgatttc

SEQ ID NO: 112983 - DNA, 1049 bp, Zea Mays
ataaataaagtctaaataaatgtgccttactaaccatggaatacataagaacatagaatagaattgcaagtgatcgaacatgaggattctaaccttccattcccgagtggaataacagcagcatgctgacgtgacattgactgatggtccaacacgaagtcataagcaagaacccgcctcccgaatagatgcctcatgttttctagattgatcctatcaaagacctatccatctttcaccacatcaagatagtagacccctaggcgtggctcaatcgcccagtctagaggttgccacgtcgactgccctccaccgacctgtgtcccaacatgcttgggagcatcaccatcttgcccagccacccttgagctggtgcctttgcggactttggagattctaacccagcaaaaaaatagaattttgtggcagcgtcaatagagccagtgctttagttgttcctgcagctgcaggtgccttgttggtgcctgtcttggacttcactgagaagggcttcaaggcttgtgccttctcgaagcggtcaaggcccccacgatacatctccctacacctctaatccaccagctctttgattctagtctttaccactccaaatctagtcgcttatgcacttgtgtactttaatactgcagacaagcaaaggatattgtgcctactgttgatcaaataaaataaatcagaaacagcaacagaaaggatttgcaaccaaaattaggtgatgtttgtataacgggatatgaggggctagcagagggatggaaagctcacccgctgcttggttcacagggaaggagggggaaagggaaattcggacctcttgtcccactgattctatcccgtcaggaggggtgggtcgtgctaagataagagctctgcacactgctgtagattactgccctcctacacgctcgccttccacagtccacaccgagggccacgcacgagcgactgcacggtgggggctattgcgtcgagaaagcagaggcaaggttgatagctgggagaactccctggtgatgcgtgtgacatag

SEQ ID NO: 112984 - DNA, 103 bp, Zea Mays
tcaattactggccatccactcttgagcagtggcgcatatgttctagtttttctaaggaggaggtgtacgtgttgtacacattcccattttcttctacagaaca

SEQ ID NO: 112985 - DNA, 1292 bp, Zea Mays
cgagtctcatagtagccggctaagagtggcgtaatggtgggcatggtagcggggtggtatacatgtcgaagaagatctggaggcgggaatcgaagctgttgtccgtgatctgctgccagatctcgcgcagctcctccttgttgattttgtcaacctgcacctgacggcggcggctcaatgtgtcaaacagctcgagcgcgaactctttcgattccgtcatccctgcacgtgtacatgcagctccccaatgtttcaacgacgaagggaaatggaggagaaagccgaggggaggcagcgcggcgtggtggtaccaatgcattccgcgaagtcggagcgggagaggaaaccctcggaagcgaggcggtcgaagttggcctgcacctccatccaggcgttgttggccttgttgctgctgatgaagcggaggccgcggagcgccttgtgcgcgccggagcgcgtgcggtcgagctgcgcgcgctgccgccgcgcggcgcgggcagcgagggccgactcgatgcctgacgacggctgctgctgctgcccctgcccttccgcgcggctttgggtgcggccgaagcgcttggtgaggtcctgcgagaactggcgcgcgatggacatggcctccgccttgagctcctgcgagaactgcaggagccggtgcgacgaggtccgcctgatcgacggcgacaaggaccgcgacgacgacgacgcgccgccggcatggtccccgcgcgcgcccagcggcagcgcggtggcgccccccgccgcggccggctcgacgctccgcagaatgatggtgtcgtcctcctgcaggtcgagcgtgacctcgaccagctcctccccgtcgtcggagctgcgttcggagccccgcggcgaggagcccgtgctgagtgaccgcggcgtcgtccccgccgagccgctccatcgctggtggcccggggcggcggcgcccctcatcgccgacccaatcagaagccgctttccagcgcggctcccggaacagtccaatgctcgaagaggagacgcgctcgacgactggatggatcgattttgtgggtggccttggaatctctggggaaaggcgcccgcgacgcgtccgagcgggagctcgagccgatgaaagaggaagcgcaacgagacagcaatatatgaggatgagaaggcgagtacggtgggccgggccacgcaaatgcacaactctatttaattatccacattgtcatctactaatatgtaagcagactctacatgcatatgtgcaatcaattttccaccagtatgtaccattttat

SEQ ID NO: 112986 - DNA, 2978 bp, Zea Mays
gtgctccctcaaccctggcttcttttggttcttcgtttcatcgcgtcgcctccgccgttggtacccttctcatagctcctgtacctcgttcccacgcaggagagggtggttgtgctagctccagtgttgtagacctggacgtcagggactccagcctcaccttcttgtgcccgtcctcgagcctccacgagatactggggaagagattagagccggccctaggtgcgcatgctgctgcctagattcatcgctcggccgctccacgctcgtatcagccgccagcgccctgatcctccctctccctgactccctcctcacgttctccgcacggctagatctgcacctgttcattcctctccagtccctagcgagagattcagtctcgcttggcaaccggcgccgccgaagccgacaagggaggcacgtgcgcccagcgaacaccaagctcaaggtgggtgatcgtactggcgaaccgctgcagcggcggcaggagcttgcgtggcctgggcggaatgagccgattgaggcgtctattggctgtgcttgttggccgattctaggttacctgcagtccgcgaattctgagctcttactccatggcgccctcgtctgcggaggctgactcggcggtgtcctccagcggccgtctcctcgtgctctacgcgtcacaaactgggaacgccatggacgccgcagagcgtgtgggccgcgaggcagaacgtggcggctgcccggccgtcgacgtgctctccatggacagcttcgatcccagtcgcttgccgagcgagcggttcgtggtatttgtcgtgtccaccacggggcagggcgaccccccagattccatgaaggggttttggagatatatgcttcggaaggatttggatagacaatggcttgaggggatccatcatgcagtgtttggactcggggattcaggctaccagaagtacaattttgctgcaaagaagcttgatagaaggcttttacatcttggtgcagaaccagttctagagataggtcttggagatgaccaacacccttcaggatatgaaggggctttagatccttggttgctatctatgtggaagtctctgaatgaaattaatccgtcactcttacctagagtgtctgatatcaatgatcctaatttgagttttttgggggatccaaaagttcatgtcatttattactcttccaatgaagttacacaagatcctatacttttggattccaataaaataataagtagcgcaagatcaatgtcccctgccctacggttccatgctgatggagagccaccttacatgcttcaaatggtaaaaaaacagtgtttgactaaggagggtactgatagagatgttcgccactttgaattggaagatccatcttcggccatggccatcaactataaaattggtgatgctcttgaaattctaccaagtcaaaatccatcagctgttgatgccttcattgaacgctgtaacttggatccagattgttacataacgattcgagtgagaagtggggataaagttttcaagggttcagttgagcagatggaccgcatcaaattaagaacctttgttgctttgacaatggatgtcgtgtcagcttcccctcggcgatatttctttgaggtcatgagcttttttgcaacaagtgaacgtgaaaaggagaggcttcagtattttgcttcaccagaaggaagagatgatctttaccagtacaatcagaaggagagtaggactgttctagaggtgttggaggattttccttcagtgcaaatgccttttgaatggctggtgcaactaacgcctccactgaagaaaagagccttttctatctcatcatccccactggcacacccaaaccaaatccatttgaccgttagcgtcgtagcatgggttactccattcaagagaacccggcgtggactctgctctacatggttggccgggctcaatccaaataaaggcaatcttatcccgtgttggatacaccaagggtccctgcctcctccacgtccattggttcctctcgtgttgattggaccaggaacagggtgtgcaccattccgtgcatttgtggaggaaagggctgcacaggctgcagctgaaccaacagccccggttctgttcttcttcggctgtagaaaccaagaaaacgattttctatacaaggatttctggctaactcatgcgcaggatgagggggtgttgtcctcgaaaaggggcggtggtttcttcgtcgctttttcccgggatcagccgcaaaaggtctacgtgcaacataagataatggaacagagttcaagagtgtggaacttattactgtccgatgcagtgatctacattgcaggctcttcgacgaaaatgcctgccgatgttacagctgcgctagaggaggttatttgtaaagaaggtggtgtcaagcaagcggatgcttcgaaatggctcagggatctagaaagggctggtagacttaacatcgagacatggtcatagttgtgatgggcaagaatagagatggcaatgggtacccgcgacccaatacccgatgggtatttactccattagggtatgtatgtgggctaaatattctacccgtgggtctgttattgggcaaaaatcttcacccaatgggtaaacgggtattagaacgttccgccttcacccatacccgttaacccgtgggtataaaatacccaatataaacttagtccaagcatgaactttgactttagtcatccatcttttttactctttaacaaccttttaggccataatgtcatagaaggcttaacgacaatttaatgaacatgtaatgggacatgtaatgtgctatgtagtactatcctagtgttactactttatccaattatctttggtgtgttgaatggatggttaaatgattctagaaattttgtaatggtatttagatgttgacatttgtatcatataacattttgatagatgttt

SEQ ID NO: 112987 - DNA, 1110 bp, Zea Mays
aattagtatcctctcttcttaacttcagttagctgttgtagctacgctgctcagtactgaccagaacacaaccatctaccctctctcacattatgcttgtgtgcaggcaatcttatcccgtgttggatacaccaagggtccctgcctcctccacgtccattggttcctctcgtgttgattggaccaggaacagggtgtgcaccattccgtgcatttgtggaggaaagggctgcacaggctgcagctgaaccaacagccccggttctgttcttcttcggctgtagaaaccaagaaaacgattttctatacaaggatttctggctaactcatgcgcaggatgagggggtgttgtcctcgaaaaggggcggtggtttcttcgtcgctttttcccgggatcagccgcaaaaggtctacgtgcaacataagataatggaacagagttcaagagtgtggaacttattactgtccgatgcagtgatctacattgcaggctcttcgacgaaaatgcctgccgatgttacagctgcgctagaggaggttatttgtaaagaaggtggtgtcaagcaagcggatgcttcgaaatggctcagggatctagaaagggctggtagacttaacatcgagacatggtcatagttgtgatgggcaagaatagagatggcaatgggtacccgcgacccaatacccgatgggtatttactccattagggtatgtatgtgggctaaatattctacccgtgggtctgttattgggcaaaaatcttcacccaatgggtaaacgggtattagaacgttccgccttcacccatacccgttaacccgtgggtataaaatacccaatataaacttagtccaagcatgaactttgactttagtcatccatcttttttactctttaacaaccttttaggccataatgtcatagaaggcttaacgacaatttaatgaacatgtaatgggacatgtaatgtgctatgtagtactatcctagtgttactactttatccaattatctttggtgtgttgaatggatggttaaatgattctagaaattttgtaatggtatttagatgttgacatttgtatcatataacattttgatagatgttt

SEQ ID NO: 112988 - DNA, 261 bp, Zea Mays
atggaaaatggtaaaaagaagaagaccatgtcggcagatgataaatcttgcaaaagccatgagcacagcaagctagagtttgcaactttgttcacctatggctgggtaatcctccatgtcttgaatattcagtggagggccgaggtcgagacaggatcacaggagatcggcgacgagtcgaggagatgcaggcctcgaggcagaagggttgagaagagccgaagtcagcataccgaggcatgccaccacaccgacagctga

SEQ ID NO: 112989 - DNA, 172 bp, Zea Mays
agatcgagatcatctacaattatggcaaggaggaccattaaacaagagtcccgcgagcgggggtagaacttccagagttccgaatcacttcctgtttaatcgagttgtacgagaaataagaatgaaaattactggactccatccatgcttctcatttgtgagctaaaataat

SEQ ID NO: 112990 - DNA, 1062 bp, Zea Mays
gttgcgttccagggcgagctatcgcgcagcaggcacagcgccctacaacgcccggccgtgcaaactaaccttcggatcagatggagacgccggcggcggactcctccggcggcgaccgctacaggtcccacctggctggcgagggcgagaagcacaccgtgtggcggcacggcgcgccgccctcgtacgacgccgtgaacgcgctcttcgaggccgagcgcacgcaggagtggccggcggggtcgctggaggagatcgtgcagaacgcgatcaagacgtgggagatggagctgtcgcacaaggcgcggctgtcggacttcaagtccgtgagccccggcaggttcaggctgtccgtgaacggcgggcgggcccggagcggggaggagacgctggccgtgggcagctacaacgcgctgctggacagcccgctcctggcgcgcgcgggcgcgtacgacgcctccgccgagacgttccggtcctcgcacgacctgttccgcgccgcgttcccgcgcggcttcgcgtgggaggtgctcaaggtctactccggcccgccgctgctcgccttcaagttccggcactggggccacaaggaggggccctacaagggccacgccgccaccggcgacaaggtcgagttcttcggcgtcgccgtgcttaaggtggacgatgagctgcgggcggaagacgtggaggtatactacgacccgggcgagcttttgggaggccttctcaaggggcccaaggtggcttcctccgaggaggaccgccgcgaggccgctgccgtgtcggcgtcaggtgctgtcccgccgccgctagcttgcccctttctcaaccccgggaagccacagtgatcaaccagcaccccccatttatgtagcggtttggtgaataagtgaaagcttaaatgacggtgttcctggtcgtccatggacatcactgagggtacttgtaccccattgattaattgatgtttcatgaccagaagaaattgttcgcgtaataattgtgagatattccttcaccaaaaaataataaaaaataaagcaacgcgtaattgtttca

SEQ ID NO: 112991 - DNA, 512 bp, Zea Mays
atgctggctaggacctaggagcgtgcggggccaccaaccgatgcgtccgtcccgtccacaccagtacaccaccatcccccaccggccaccacttctgctccgcgtccgcttttcagctctccaccgctatctcgcacgtcgctccccaaatcatcccatcctacgcccgcggccgtggcaccgaatcccagaagcgtctagaagggggaggtggtcgcccatgaccgtctgaccggccgtcgccatgggatgcgctggatccactccaaagactgacgataatggtaagaatttgaagaaaccaaagccttggaagcacacccaagcaataacgccggcacaactcagacagatgcgtgatgaattttgggacactgctcctcactatggtggacagaaagagatttgggacgcacttagagccgctgcagactctgacctagcgcttgcgcaaaccatagtggatagtgctggcatcatcgtatcgaatctgacagacgaatctctagaat

SEQ ID NO: 112992 - DNA, 3118 bp, Zea Mays
cccgaaagcaccgcccgctcccacacccggcacgaggcggaggcacccacacccactccggtcacccaacttgactcgccctccccctacctccgtcgctcttcccgtgaaaccctccaggatccaacgaaaaaggcgaaatctccgaaccacaccgccataatcacacacgccaaccggcggcccagggccggctttcccccctggttccctcctcaaatggcctagcggaggcgggtgtctcttttctttcccctcgcgtcgcgcctcagtgagggcaaggtagagtggcactgggaaagacgcgcgccgtgccgcctcgcaatgcccgctcccgaccgtgccacggcggggggcggtgccgggggccacttccgcggccacgcgcacctcaccaactgcatccacctgcgccaccaccacgcgcacgcgcacgcgggagcgggaggcgcgtcgtcgtcgggccggaggcggagcccggcgtccgcgtcgctgatgcgcgaccttctcgcgctgcagcgctcgcgatcgctccgggacccgtccacgcgccgctccgtcgagtcgtccagggtggcggccgaccccgacgatggcaccgacgacgacgacgacgacgacgccgatctccccgccaagtcccgccgcagcgccggggcgctcaagacgctcctggaccagctagccgagaacccccatccgaagcccggccgccgcccgccccgccggttcaaacgtcgggcaggccgccgcgccgccgctgccagcaagcctccagaccgcgcggccgcgctctccgtcaactccagctcccaggaggccgtctgcggcaacaaatacctgttccatggcggcggcggcggcgacgacgacggcgatggcgtggtggagctgcagcagcatttgccgcaggactcgcgcaacgtctgtggcattccatggaactggtcgcgtctgcaccaccggggcaagtctatcctcgacatggccggccgcagcctttcgtgcggcctctccgactccaagtcggcggcggggcgaaagtccgaagcgcccgccgcctcaggtgtccgtccccttttccccgttaagtccgagaggctggcttcgtcgaccagttcggactcggacgcgctgcccctgcttgttgaggaggctgccacctccggtgctcgcaaacgcattggcgtcatttcttctggaagctactccggagagcttgggattttctctaaccagacaagcgagatggactccgacctgctgtctgagtctcagtcggggcacaagtcactggcctcgcgctcgcagcatggccgtgggcgtcatcgtagcctgacacagaagttcgcaccaaagacgttcaaagacgttgttggccagagcttggtggtgcaggcgctgtccaacgccatcctgaggaggaagattgggttggtgtatgtattctatggtccgcacggcacgggcaagacttcgtgcgcccgtgtctttgccaaggcgctcaattgcctctcctctgagcaccccaggccctgtgactcatgcacgtcgtgcattgctcacaatctcggcaagagcaggagcctgatggagattgggccggttggcaacatcgacatggagggcattgtggacgtcctcgataatgtgatgctttcacctgcaccatcacactacagggtgtttatatttgatgactgtgatactctgccagctgacacttggagtgctatctcaaaagttgtggaccgggcaccccgtcgagttgtgtttatccttgtcagtccaaaccttgaacttcctcacatcatcctgtcgagatgccagaagttctttttcccaaagctgagggagtccgacattgtcaatacattgcagtggatttgcaccagcgagagtctagatgttgataaagatgcaatgaagctaattgcatctcgttccgatggatctttgagggatgccgagatgactcttgatcaactcagtttgcttggacaaaggatttccttgtctcttgtccaagaattggttggtctggtgtctgatgataaactggtcgatttgcttgatttggctctatctgccgacatggtgaacacagtgaagacactacgagacatcacagaaaccggcgttgagcctttagcactgatgtctcagcttgccacaataattactgatattcttgctggttcgtatgcatttactcgagaaaggcccaggagaaagttcttcaaacgtcctaccttgtcaaaggaagatatggaaaaactacgtcaggccttgaaaacactatctgaagctgaaaagcagttgagggtttctagtgacaagacaacctggcttacagctgctctgcttcagcttgctcctgataagcagtacctgctgcctagttcatcaactagtacaagtttgaaccatggtgtgctggttggtccctttcctgataggggtgtagggagggccccagcagttgagaataaaggtaacctggcaggcacgtcttatggggaaaagagaactgttgaacacacagaaaatggtcatgtgttgtcaaccagttctgtcagagcaaatgagggaactaaactcagaaaagcggaaaatgaaatggtctggcaagctgtgcttgagagtatccaatcagatacattgagaaaaatgatggctaaagaggccaggctaaactctatcagccttggaacagaaccaacagtgcaactaataattagctcacatatcagtaagtccaaagccgaaaactacagagctcagattctgcaggcatttgagtccgttcttcgttctgctataatacttgaaattcgatatgaatcaaagaatgatgcaaaaccaggtcatactccatcaatgtttccttaccctgagaatgactcgacactgaggaggtcctttactaaacatagtccactctcttctggagaaggtgaaataattgaagttggaccttctcgcatgcattggcatgctcaaacaaataatgatgttcttgacgtaaatgaaagaagaaaggagaacacatgggaggaagaaacttcgtcatcaccaaaccaagagagcgtgactaatccaaaaggaagaaatggga

SEQ ID NO: 112993 - DNA, 777 bp, Zea Mays
atgtcgattgcggcagtcaggtcatcatccccggcgctgttagcgaggtcatgctgtaaccttaggaggagcgctgattccagccccttcaagcctatcacgtccccactcagtaaggcgtctacatccgcttccttgggcgggcaccgcatggcctcgtcgtctttgtcatcgccatccttcgctagcgcgaaggggtcgtcagccgcaaagaaggcaaccaaggagttgcgattctggcagagctggaggcccacccgtctccgttgtcgccgtcctccgctggcgcgactccccagcagcacgggagcccagaaggtggagacgaccttggaggagtccaccgagctttggatcttgctggcctgcgggagcgacgacgtggaccaccgcacggcggaggcgtgggcttggatggcttggacacagtgttctccttgtcaacgacggtggaggtggtgcggcttgggtgcggtgttctccttcacggcaatggcggaggtggtgcccgtaggctgccgtggacgagcacggggctggtcctgcgtcagggagccctcgtccttcctcggcgattggggcaaggtagaggaggaggtggtgatttgtgtgtcgagagacgagcgagggatgctcgtggagggaaggatccaatcgggggtgccgatgacggaggcaaaaggcatggcgcgcgtcgtgcgggggcaaaggcctggtcgcgcttggctgatctccgaggcaaagggtgggtcacgctgcgcagaggcggaggcctag

SEQ ID NO: 112994 - DNA, 1508 bp, Zea Mays
agcctcagccctcaggcctcagccagcgtgcgcgcccacaacccctcacgtcgtccccgccaatcacaccgcacgaaccgaggacgacgggacaccaccgtcaccgcgacgtagtagtagtactacatgcatagcatagcctcgtggagtcgtggtagtagtagtttagttttgctcgcttccacaccgcaccgccgttcccttttttatatcccgcggatgcgcctgcctctgcctcggggtcgggggggcagctggtgacatcggattcggatcaggccgagaagatcgaactgctccgatccggcgcttaatttctctctctctctctcgggctagctgcccgggcaaatggacgccgagtggagcggcgacgagagcaaggctggcgctgcgggcggagtttcgtcggctgattgcccaagttcgccaccgccggtgtcgccggcgccaccgtccacgtcgccagctgctaccggtgccgggaggaggcggtcggcgaacaagcgggtggtcaccgtgccgctggcggacgtcagtggcccacggcccaagggcgtcggcgagggcaacacgccgacggacgcgtgggcgtggcgcaagtacggccagaagcccatcaagggctcgccttttccgagggcttactacaggtgcagcagctccaaggggtgcccggccaggaagcaggtggagcggagcagggcggagccggacaaggtgatcgtcacgtactcgttcgagcacagccactcggaggccatggcggcggcgagggcgcagaaccgccaggccccgaagccaaagccggcccagccacagccagtcccgccggagtccccgtcatccggcagccacgacgtcgctgccgctgccacggtcgtctgcgcgcctgctgcggccgagaccgaggccggcgcggcggccgtcgaggtgcacgacgagttcaggtggctctacgacggcgtgtccgtcacctcctcggcgtccccaccggacgtcgaggcggcggacgagatgctgtacggggcgatgttcttcggcgccccgcccgcgcccctccccgacgagttcggcgacgtcggcgggctgttcgacggagaagggggcgaggaggacgccatgttcgcgggtctcggcgagctgcccgagtgcgccatggtgttccggcggcacgccggcgacgggatttcggtggcaggccgggtgaagtgaagtgaatcctgaattgaaggtcctgacatgtgggccggggcaggccggactccaataaaaaccagataaactcatgtagagctccttgatctatctacttttggcttttcttccgttcctcttgtcatcacctagcttttcttctttcatccttctctgattggttgtttatacacaaacacagacacggtagcagatagaaaaacttggcatttttgcgtttgcacagagttgattcggtggacatcaggggtgggtttgagaaggacacgcggattttttttttctctcaa

SEQ ID NO: 112995 - DNA, 916 bp, Zea Mays
gtagacgtccagcaatgctgcatgcgcacttggcagtggcaccgaggaccgaaccgttggcggcgttgcggctcttcattttgaaacggacatggctggcatcaagcacctccaattctttccggcgttctagcctcccagttccaggttgtagctgcccaaaccaaagccatcccacagggcctccgctctacctgtagcccgaaaaatggaaggggacgcggttctttcgagcatggattccctgtggttctactccagcgtcttcctccggcagccctccaagcacaaggggagcgagtgcgcagaagagccgcagcaagattgggcaggaaccaacaagacgaccagcggccgcccttgttgccaggctcccaaatgcgccaaggaggcagcggggcgaagagcggaggggggaacggtgcgaattgcgcctgcaacgggccgcggggagtgggatgagcgcatggttgcttggcagaaggagcagaggcggcgggcgctggttgccgcggcagcccggtgctcgccggcgacgatgccgccgcctggtggagaaggcgtggccatgaaggcgcatctcaggtcgtgggcccacgcggtcgcttgctccgtcagatgagggctctccattcaggaacctatggaaagtagattttttttgctccatctctgaacgacggcatctcttcatggttgtgcttgcggattattgtggtttatgcagttcgtctttcaggtacgatcactcgaggctcgcataaaggcaagcgattcatttgatacccagtataagtatgtgtccgtgttatacagattatgattgtaagagtagcaatgtgtcgctttctgtgtacacttgttttgcatctggaatctgataaaactctatgctgctgtttgtttcgttagaatt

SEQ ID NO: 112996 - DNA, 799 bp, Zea Mays
acctccaattctttccggcgttctagcctcccagttccaggttgtagctgcccaaaccaaagccatcccacagggcctccgctctacctgtagcccgaaaaatggaaggggacgcggttctttcgagcatggattccctgtggttctactccagcgtcttcctccggcagccctccaagcacaaggggagcgagtgcgcagaagagccgcagcaagattgggcaggaaccaacaagacgaccagcggccgcccttgttgccaggctcccaaatgcgccaaggaggcagcggggcgaagagcggaggggggaacggtgcgaattgcgcctgcaacgggccgcggggagtgggatgagcgcatggttgcttggcagaaggagcagaggcggcgggcgctggttgccgcggcagcccggtgctcgccggcgacgatgccgccgcctggtggagaaggcgtggccatgaaggcgcatctcaggtcgtgggcccacgcggtcgcttgctccgtcagatgagggctctccattcaggaacctatggaaagtagattttttttgctccatctctgaacgacggcatctcttcatggttgtgcttgcggattattgtggtttatgcagttcgtctttcaggtacgatcactcgaggctcgcataaaggcaagcgattcatttgatacccagtataagtatgtgtccgtgttatacagattatgattgtaagagtagcaatgtgtcgctttctgtgtacacttgttttgcatctggaatctgataaaactctatgctgctgtttgttt

SEQ ID NO: 112997 - DNA, 445 bp, Zea Mays
aaaagatccaacacatacaacgccaagaacagcgtaataatcttcggcgattccccccgctgagctgcgggactccgccgccaccgctttcaccctcgagctcgttcttccccacgccctccgacgccagccccggtctcttcttccggccccagccaaccctgtgatggtgacggtgtccgcgagcagcggtggggaaaggagaggagccatcggatgcgacggcagcgcgtatttgatctggctccggcgagagagagagggaggagaggaagaggaggagaaggcggtgaggatccagtggggttcgccctgctctgtctctgttttcctgcccgttttcttggcgccaggtgtttccgtgtttgtttgatttttctcggccactcctctcccgcgatttttctctgccgtttgctaatatccaccaccttgctgccgataa

SEQ ID NO: 112998 - DNA, 414 bp, Zea Mays
gcgtaataatcttcggcgattccccccgctgagctgcgggactccgccgccaccgctttcaccctcgagctcgttcttccccacgccctccgacgccagccccggtctcttcttccggccccagccaaccctgtgatggtgacggtgtccgcgagcagcggtggggaaaggagaggagccatcggatgcgacggcagcgcgtatttgatctggctccggcgagagagagagggaggagaggaagaggaggagaaggcggtgaggatccagtggggttcgccctgctctgtctctgttttcctgcccgttttcttggcgccaggtgtttccgtgtttgtttgatttttctcggccactcctctcccgcgatttttctctgccgtttgctaatatccaccaccttgctgccgataa

SEQ ID NO: 112999 - DNA, 3089 bp, Zea Mays
cggcaggcagccacacggatcaccgaaccgaacacaggaaaaatgcatgtgtcatgtgtagcttgctccctatatatgctttgctcaaacgatcctccgttcagcggcatcatctattgccttcccgctcgattgggttagactaccgtcagccaccgtctagtagttctcaatccgacatgccgcttctcgttctgcgcgtgccgctcgcctcgaccaacaatactagtacatgcagtggcgctgcacctcctgtagctgtagcaccagcggcagagcattccgacggcctactgttcgacggccttgctctgggccacggtgacgacgtcgacgataaggccgaggcggacggcgacgacgcagcgaccgtgaagctggagtggctgaggtcgcagatcatcggcgcggaagcagagttcgcgtcgccgttcgggacccgacgcatcacgtacgcggaccacacggcgtccggccgctgcctgcggttcgtcgaggagttcgtgcttcggaacgtcctgcctttctacgggaacacccacacgacggacagctacgtgggcatgcacacgagcaagctggccggggatgcggcgcggtacgtgaagcgcagcctaggcgcggggccgcgcgacatgctgctgttctgcggcacggggtgcacggcggccatcaagcgcctgcaggaggtgacgggcatggccgtggcgcccacgctgcgcgccgcggtgctggccgcgctgcccccgtccgaccgctgggtggtcttcgtggggccctacgagcaccactccaacctgctcacctggcgggagagcctcgcggaggtggtggaggtcgggctgcgcgccgccgacggcctcctggacctggccgcgctggagtcggagctggcggcgcgcgcgccgtcggggcggcccatgctgggcgccttctcggcgtgcagcaacgtcaccgggctgcgcaccgacacccgcgccgtggcggcgctcctgcgccgccacggcgcccacgcctgcttcgacttcgcgtgcagcgcgccctacgtgcgcgtcgacatgcggtcgggcgacgcggacggctacgacgccgtgttcctcagcccgcacaagttcctcggcgggcccgggagccccggcgtgctgctcatggcgtcgcggctctaccgcctccgcgccaccgcgccgtccacctgcggcgggggcaccgtgcgctacgtcagcgcctacggcgacacggtgtacagcgacgacgccgaggagcgcgaggacgccggcacgccggcgatcatacagaaggtccgcgcggcgctgtcgttccgcgtcaaggagtgggtcggggaggcgtgcatcgaggcgcaggaggcgcgcatgctggcgctggccctccgccgcgtccgcgcgggggccaaccccagcctgcgcctgctgcagggcgccgatgccgccgcgagcgcgccccgcctccccgtgctctccttcgtggtctacgctcctccgcgagacgggaccgagcccgagggcaggctgcagctgcactgccggttcgtcaccaagcttctcaacgacctgttcggcgtgcaggcgcgcgcgggttgcgcgtgcgcggggccctacgcgcaccggctcctcggcatcagtccggcgcgcgccaaagccatcagatcagccgtcgaacagggctaccacggggttctgcccgggtggacgcgcgtcagcctggcatactacacgtcgatgcaggaggccgagttcgtgctggacgccgttgccttcgtcgccagcttcggccaccggttcctgccgctgtacacgttcgactggaaaaccggagactggcactacgatcacagctgcgcccgtgggctcgtgccgaacatcgtcggcggcaatcccagtgggcgagtcaaagccgagaactgctaccagagctacatggcatttgcgcactgcctggcggagtccttggctaccacttgcactgggctcagcagcgatcctgctatacgtattcccaagagcgtcgacccacagttggtgtatttcctcgtatgagttgtcataggcggtgatactactccgttgtacggtgtaattggattggaatactggaggatactactccgttccgttttgacctgacttgaagagttcatgtgggccatggtcatgagtagcaggtgttgttgggctaccgatgtgggccatgagtagcagcaacacctgaccgcatcgctcctatgggccgtcccattcccaccgcccctcgtgaccagcttcctcaatcccgcctctggaatctggattctggaacagaaaagcaccacccggattatatgccgtttattacccactgtgccacgcgcaggcgcgttcggcgttcgggactcccttctgcacaacctgacaattgcatccgaagatgtccaccagaagaaccagatccgcggccccaaccatgcttctcctcctggtctgcgcgacggcggtctcggcggcctctgccgccgccggggcgggcaggggcagggtcggatcgggccgcgcggggccgtcgccgtgccaggatctggcgacgcgggacgactgcgcggcgagagctgggtgcaggtggtgccgtagcgaggcgctcgacgacatgtgcttcgggcctaccgaggcgaggcgcctcccacggcaggtcttctcctgcgatccaccctccgacgcggcgcacgccagcttcaacaagtgacgcccgcagccgcgctcgccttgttcccggactgctccgtctgacctttactttcgccaggcaccaattgttgctccttttgtcattgctggatctgagatttatttatcagagaatagcttggtccgttttgctacgtgattctttcgtgggtttatataatataatgtaaaatctgctcaaaattcaatcagagcattgcaaatattgtatttaaaaaaaaatctaagtcgttttcgttacagatattgtattttgacatgtcatctggaaatttggggcaattttctgtgtggtcgttaataccgcaacttggcagtaacggcctgcttggtttgtggatgaattttgtaacg

SEQ ID NO: 113000 - DNA, 2028 bp, Zea Mays
catctattgccttcccgctcgattgggttagactaccgtcagccaccgtctagtagttctcaatccgacatgccgcttctcgttctgcgcgtgccgctcgcctcgaccaacaatactagtacatgcagtggcgctgcacctcctgtagctgtagcaccagcggcagagcattccgacggcctactgttcgacggccttgctctgggccacggtgacgacgtcgacgataaggccgaggcggacggcgacgacgcagcgaccgtgaagctggagtggctgaggtcgcagatcatcggcgcggaagcagagttcgcgtcgccgttcgggacccgacgcatcacgtacgcggaccacacggcgtccggccgctgcctgcggttcgtcgaggagttcgtgcttcggaacgtcctgcctttctacgggaacacccacacgacggacagctacgtgggcatgcacacgagcaagctggccggggatgcggcgcggtacgtgaagcgcagcctaggcgcggggccgcgcgacatgctgctgttctgcggcacggggtgcacggcggccatcaagcgcctgcaggaggtgacgggcatggccgtggcgcccacgctgcgcgccgcggtgctggccgcgctgcccccgtccgaccgctgggtggtcttcgtggggccctacgagcaccactccaacctgctcacctggcgggagagcctcgcggaggtggtggaggtcgggctgcgcgccgccgacggcctcctggacctggccgcgctggagtcggagctggcggcgcgcgcgccgtcggggcggcccatgctgggcgccttctcggcgtgcagcaacgtcaccgggctgcgcaccgacacccgcgccgtggcggcgctcctgcgccgccacggcgcccacgcctgcttcgacttcgcgtgcagcgcgccctacgtgcgcgtcgacatgcggtcgggcgacgcggacggctacgacgccgtgttcctcagcccgcacaagttcctcggcgggcccgggagccccggcgtgctgctcatggcgtcgcggctctaccgcctccgcgccaccgcgccgtccacctgcggcgggggcaccgtgcgctacgtcagcgcctacggcgacacggtgtacagcgacgacgccgaggagcgcgaggacgccggcacgccggcgatcatacagaaggtccgcgcggcgctgtcgttccgcgtcaaggagtgggtcggggaggcgtgcatcgaggcgcaggaggcgcgcatgctggcgctggccctccgccgcgtccgcgcgggggccaaccccagcctgcgcctgctgcagggcgccgatgccgccgcgagcgcgccccgcctccccgtgctctccttcgtggtctacgctcctccgcgagacgggaccgagcccgagggcaggctgcagctgcactgccggttcgtcaccaagcttctcaacgacctgttcggcgtgcaggcgcgcgcgggttgcgcgtgcgcggggccctacgcgcaccggctcctcggcatcagtccggcgcgcgccaaagccatcagatcagccgtcgaacagggctaccacggggttctgcccgggtggacgcgcgtcagcctggcatactacacgtcgatgcaggaggccgagttcgtgctggacgccgttgccttcgtcgccagcttcggccaccggttcctgccgctgtacacgttcgactggaaaaccggagactggcactacgatcacagctgcgcccgtgggctcgtgccgaacatcgtcggcggcaatcccagtgggcgagtcaaagccgagaactgctaccagagctacatggcatttgcgcactgcctggcggagtccttggctaccacttgcactgggctcagcagcgatcctgctatacgtattcccaagagcgtcgacccacagttggtgtatttcctcgtatgagttgtcataggcggtgatactactccgttgtacggtgtaattggattggaatactggaggatactactccgttccgttttgacc

SEQ ID NO: 113001 - DNA, 637 bp, Zea Mays
attacccactgtgccacgcgcaggcgcgttcggcgttcgggactcccttctgcacaacctgacaattgcatccgaagatgtccaccagaagaaccagatccgcggccccaaccatgcttctcctcctggtctgcgcgacggcggtctcggcggcctctgccgccgccggggcgggcaggggcagggtcggatcgggccgcgcggggccgtcgccgtgccaggatctggcgacgcgggacgactgcgcggcgagagctgggtgcaggtggtgccgtagcgaggcgctcgacgacatgtgcttcgggcctaccgaggcgaggcgcctcccacggcaggtcttctcctgcgatccaccctccgacgcggcgcacgccagcttcaacaagtgacgcccgcagccgcgctcgccttgttcccggactgctccgtctgacctttactttcgccaggcaccaattgttgctccttttgtcattgctggatctgagatttatttatcagagaatagcttggtccgttttgctacgtgattctttcgtgggtttatataatataatgtaaaatctgctcaaaattcaatcagagcattgcaaatattgtatttaaaaaaaaatctaagtcgttttcgttacagata

SEQ ID NO: 113002 - DNA, 435 bp, Zea Mays
ctcgccagaggctcagacccccatccccatctctcgccggcggagcgcacctgcgccccgggtgagaggaaggcaggatgccgaagcccgccgccgctgagccattctccatacggggttacgccatgaggatgcgggctgtcgacgcggccgagtgctacccattcgtcggtggctgctgcagcgaaggggagggggaactgccgccgcggttcccgcagatggaccggaagccgctgccacggtggtggaagcacgagctcgcggcggggcaggctcagcttttggctggcgccaagggcggagaggctgcggcagccggctgccgcggcggtgggctgcggaaggggaccaagaggaagggatctcactcgagctccacgggcgagagggccaggaaacggcggcgtgttaggtcctttttgacgaacaagg

SEQ ID NO: 113003 - DNA, 2800 bp, Zea Mays
atggacagtaacctcttcaggataaaggaagtgacctcctctgtaaataagcaaggcatagaagtcaatggttcaactaataatcctacaaatggtggctatgaaatggtgaaaacttccacagggaccaaagatgatatctttggggatctccctctcctcgaattagaaagctccaagattatgtttcggactggtgttcatgaacttccaactgttatagaagaatcatttataacaaatcaaaccgaagcagattctataccagaagcagtacccttgcggctgattgatgcatctgacatcactgctcatacaccatctcctcttgaagacttggtgaaaagtgaagacaatgagccagcatgcatctcccacagtgatgtggaagggagttacccttccactgttgggattgatggcgtgccaaatcataagaacatcaatatggtgaaaccaggtcttggtgatatgcagttaaaacttgctgaagtgtgtgctttgggttctcattctgttctgaggtcaaaatatggctctggtaaccctctgcagggttgttttgatgtgaacaaaaactgctctcaggaaataaaaaaacatggttctaattctactagcagtccacctaccatgagaaccagaactgaagaaactaaatacaaagatgcaccagttaagtgcaagagtactgatatcactgatacagtggctgcactacctgcgcctgccaaccattcatatcaagctagtgtgttgccctctgcagtatcacgtacagttttcagcacaagtgttgattcaaatgacgtgtcttcattcagaagtctgcctgccaaggaatgcatcccaattaccagatctgggaacttcagaactaatatgtgcaatggaagtaagaaacatgtggatccatgtgcggcactatctacagataaccagggtacctcgcactcaaaacttgacccaattttcagtcctgctaacattggaatggcttttatgaagctaccgggccttcaaagaatggagatcttaaactacaatgcaaagataggtgaaaacaggtttagtaatgcagagtccatgaacacagtaagatatcagaaacaacagttgttgagtggcatgacctatgtaatgcaaggtcagaaacagattggtctaggcagctctcaagttaagagaccagctctggatgattatgggggccaaggtgatcatcatctgcagcaacccacggttcgtttgatgggtaagaccgtctcagtttgctcgcatagcaaggatcataacgtatcgaccatggataaagtgagtcctaacaatgttgccattgaagcaagccgcctatccacaatttcatgtcagttacccccaaagagatcgttcccttgtcagaattctgtgacacaaagagtgcatctaaacaattcttcagattttttggcaaggattccgaacaatagtgtgccagggcaaaatactactttacatgaactccatgaccaaaggccacaaccaacaaatagttctgcaacagtgaaaggttgcacttggaattttggtaatcagtttgtttgccaagctgaactcgataaggcagctatggtcagcgccaactctcaaaccaggcatctagagcttcatcaaccacctcatttgataagcattcctcagaatcaacagtctcatttgtggactcctgcagcacacactaggaaagatcagtgttttgtgggtccagcggtgaaccaatcttccccagttccaaaatcattgctaaatgcaagcatgaaggaaaaatatcagaattccactttgttgtcttacaatgatcctagttctatgcctattcgccaaccctaccagatacctggcgcaaagtcatcttctgcatctgtcatatccttttttgagtatggtgcggataattcgttgtccagaagctcttctcctggtctgagtctttctcttacaactggtttggctaatgagtctgtttcgacaagcagagcagcttgtgcgggcagtcttacaaatgcagatggtaggaaggctgctagctttgtcgaaccaataagatcagcttatgcagataatgtttcacagccacctgcaaagccaataagcaacagaacagtttatgcagcagataatgtttcacaacaacctgcaaagagacaacttgttacaggtagaaaggattttatgtctatgggcccaaacattgtgaaccattcacctggttggtcacttagtgatgcagttggtcctcaggtgcttgattttagtaaaagaatgggaagagatgctgctcaaatgtcaaaaaatgaaagcgacaatccaagggccagttccggttcagttccgcctattgaaacatggtctaggcctggggtggttgcaggggctaatactaataccatgttgaatccaggtcaaaacctgaatgatcattccaaactgctatactccaccaaattttcagttgacagcggtatcaattcagttatattatagtgaaaagcaagaaaaaataataataaggtgtccttgttgaagatagctctggagtttttcagtgttcaaacagtcaggcacaggaaacttgtaagagctctacatttctgagcatgttagtttagcaattgatggattgctttactcttgtaattttgccggtcaaatgtgcaaggttatttgattgtttgattccatgtcatgccatatctgaaaaaaagcttgagagttcaactgtacagattgtaactacttgtgtgttttgtgggcattcaat

SEQ ID NO: 113004 - DNA, 371 bp, Zea Mays
tttttttttaaacatgttgggtttgttttgattagcaaaattatgcacagctcaaaattcaaagcccattagtagcagacacaacagtgatatcacaagggtttagtttctgtacggatcaacatcaggtttctaaagtaaactaaattacacaagcatgcgtgagttcctgaaacgatcagaaaaggcaacttaaagtcaccaaacctcagagctcgctatgctgcgtagaagtccttgaaacaccagcgaagaggtctttggcaatgacaagcaaaccctttaagtccttagctcccacttccaggcaatccttcagcaattccccttcctccacctcccacttaatatccatgaacacctctctcaat

SEQ ID NO: 113005 - DNA, 2696 bp, Zea Mays
ttcagactgcgcctctctgctctcctcctatccatggccgcacctctgattgtctctatataaatagacaagctcccgagccgccgatttacgcatcggccggcatgacgcggcgtattcagagggagaagatgagagcaacgtgggctttgccgagcctcctcctcttcctcgccttctcttcttccttttgcaaagcctcagcctccgcctccacaaagcaagacaaggtctacatagtgtacctgggcaagcacggcggcgcgaaggcggaggaagcggtccttgaggaccatcgcacgctgctgctctccgtcaagggcagtgaggaagaggcacgggcgtcgctgctgtacagctacaagcacaccctcaacggcttcgcggccatcctctcccaggaagaggccacgaaactgtcagagaggagcgaggtggtgtccgcgttccagagcgaggggaggtgggcgccgcacaccacgaggtcttggcggtttctgggcttcgaggaggggctcgaccgtcgcccccccgacgacggtggggatcagtggctgctgccgtcgtccctcgacaaggccagcgaggacatcatcgtcggcatcctcgactccgggatttggccggagtcgaggagcttcagcgaccaagggctcggcccggtgccggcgcgctggaaagggacgtgccaaggcggggattccttcccctcctcgtcctgcaacaggaagatcataggcgcgcgatactacctcaaggcctacgaggcgcactacaacggcggcctcaacgcgacgtacgcctaccgctcgccgcgggaccacgacgggcacggcacgcacacggcgtccacggccgcgggccgcgccgtggccggcgcgtccgcgctgggcgggttcgcgcgcgggtcggcctcgggcggggcgcccctggcccgcctggccgtctacaaggcgtgctggcccatcccgggccccgaccccaacgtcgagaacacgtgcttcgaggccgacatgctggccgccatggacgacgcggtcggcgacggcgtcgacgtcctcagcgtctccatcggctcctcgggcgccccgccgcggttcgcggacgacggcatcgcgctgggggcgctgcacgccgccgcgcgcggcgtggtcgtctcgtgcagcggcggcaactccgggcccaggcccgccaccgtgtccaacctcgcgccctggatgctcacggttgccgccagcagcatcgaccgcgccttccacgcgccggtcaggctgggcaacggtgtgacggtcatgggtcaaaccgtgacaccgtaccagctccccggcgacaagccctatcctttggtttatgcggcagacgcagttgttcctgggactcccgctaatgtttccaaccaatgcctgcccaactccctggccagcgacaaggtgcgaggcaagatcgtcgtgtgcttgcggggcgctgggctgcgggtggggaagggcctggaggtgaagcgcgcgggcggcgcggccattctgctcggcaacccagcggcctccggctccgaagtccccgtcgacgcgcacgtcctcccgggcaccgcggtcgccgcagccgacgccgacaccatcctccgctacatcaactccagctccagcccgaccgccgtgctggacccctccaggaccgtggtggacgtccggccgtcgccggtgatggcgcagttctcgtcgcgtggccccaacgtcctggagcccagcattctcaagccggacatcacggcgccggggctgaacatcctggcggcgtggagcggggcgtcgtcgccgacgaaactcgacggcgaccaccgcgtggtgcagtacaacatcatgtcggggacgtccatgtcgtgcccgcacgcctccgccgccgccgcgctcgtcaaggccgcgcaccccgactggagctccgccgcgatccgatcggccatcatgaccacggccacgaccagcgacgcggaaggcggcccactgatgaacggggacgggtcggtcgcggggcccatggactacggctcgggccacatccggcccaggcacgcgcttgaccctggcctcgtgtacgacacgtcgtaccatgactacctgctcttcgcgtgcgccgccagcagcgccgggtccgggtcccagctggaccgctcggtgccgtgcccgccgcgcccgccgccgccgcaccagctgaaccacccgtcggtggccgtgcgcgggctcaacggctcggtgaccgtgcgccggaccgtcaccaacgtcggcccgggcgcggcgcggtatgccgtcgccgtcgtcgagcccgcgggcgtgtccgtgacggtctcgccgagacggctccgcttcgcgcgggccggcgagaagagggcgttcaggataaagttggaggcggccagcagggggaggagcggcgcacgcgtggcgagagggcaggtcgtggccggctcgtacgcgtggagcgacggcggcgcccatgtcgttaggagccccattgttgttatcttcgactgatcatcgttcggtaagctagtggctagcctcgcgcggacagacaactctggaggaggataggtgtttagccataccttgttcgaagcaggggatgcaaggcaatgaaaaccttcggctatgtgtggaagaataatcatcacatcaagcagaaaaataaaatccagttgtctt

SEQ ID NO: 113006 - DNA, 1068 bp, Zea Mays
agaggtttaggcaaaaccattgagtaccacggcaccacacatttccttcagcaccgctctagctagctacctactagctcatcgcaagccgaggccgatctggcctgacctgatctgatcactgtgagaagacatgtcgcaggacgcggcgtgggcgcaggccgagcgggagcagcgccggccgtccacggagcccatcgggatcccggccatctcgggggcggcgcgggtcgccgagcgggagacgaaccagctggcagacgacggcgacggcgaggcggtgcccccgcacgtgctgctggcgcggcgcagggcggcgtcctcggtgtgctccggccagggccgcacgctcaagggccgcgacctgcgccgcgtgcgcgactccgtcctgcggatgaccggcttcatcgagagctagcctcggcctcggccagcggcgggtgcccacgtcggcctcgcttgctgccctgccccacctcgctggtccagcatcgtactagcgtcagtaatgcagcagcaaccagcccgcccgatccaaacggttgaatatgtaacgctgtctgagtcagtacgtccctgatcggttgatttccttttgtgagagattgggtgttacagaggatggtccatgagaatgcattttgtattcctttgtaaaattcataccaaatgggacggaggtggatttagtcttatgtatatataggctagtaatttgtccttgaagaattgaatttgttaagttagagcaaggttaataatttggttaatactaggtttcaagatatggctatatcacttataaacaactaaaagtccagtgatacaagttgtatatctaatatttagttcacatcttcctctcaaaaagtatcttggagttcatgatgagcatcccaaagtattttggagttcatgagcatcccatttttaactggctacttttttatattcttttttttttgaaacggacatgagagctgcctattgtattaataagaaagggaacctgaaagaggggcaaagttacaagagatttacaaatgtacataaaaagaatagtaaaac

SEQ ID NO: 113007 - DNA, 2634 bp, Zea Mays
ctcctccccgtcgcgtccagccaagaacagcgcccttccaccgcccgagtacgcggtgtagcgctcctacatccactagcccggaaagccgtcgggttgttagatcggattgatccaatatgggaacacggggacaatatatctccgattcaggtgcaagtactgcaagaaacagtggaagggggtggtgctacacgtttcaagcaacacaatgcatcgcttgggaggaatgtgcatggttgtcgtaatgtttcgctagacattgcctttactttcggcgtgagattgacaaggtcgcaggccgcatttgcaggattatttcacaaagttcaaggatgattggccaacatatgaacctaccatcatgtgcgactcatggacaggaccaacccaaaagtgagcgattaatttcatgttattttgcaatggtgttatgttcttccacaaatcaattgatgcaactggtaaatttcaagatgcgaactatttacacaaggtaatttcattaatcgttttatgtctgtatttgtatcttcgatgttgtttgtgaactataaaacaatgccatgtaatgtatttgaactgttaaatattgttattggacttttgttcaaattatgggacttcaatgtgatttatttgcaaaaaaacatatacctgagtttctgcatcagtgccgccagtttatctggtcaggagccgattaatcggtcttatcggttgactaatcggttttaaattgtttagaattcaaactaggttgactttaatttctattggttttcgtcgatttatcgtggtttacagattatcgatggacaccggtttgtgtgtcctcaatccggtttggtgaactctgatcctctaaagattttacagatttccgtagcagtacttgttgcttgaatccacattttcttcaaaggtacgtttagactgtgtcatttaaaaaattgttttgtcctgtttaacaatataaattgcaacatttataaagataaccttataacagaggaagagcaatggaaatcacatgggtcacgtctatctacaatctactagactactactgtacgcctgtatggctgtatcgtacaccctaggtgcgtgtgcgtacttgttgcagtaatacacaagtcaccactatatcactctctacaagcccactactgctcctgccactcctactatacagtatacactgcccagttgcgctagtgtagcgtaggaatactgtaggcgatgatcgacggtccactgtgcccagccctcgacaagtctcagtcgcttcatgcacgtcgcggtgccagtctcgttgctcctgctcccttatcctgcaaagctgaaagctgcaaggcctgcagatcacttccagtcttcaaaagtacagttcgcgaaagttgaaacgagcgagcgacgaaccgaaccaaccaaccggcggtggccacgtagccccccctgacacaaagacaaagctacctagaagctagcccgtggagcggctagactactagactatcatgtctcggtactgcgtcaacgagcagtcgagcacccggcctcatcctgcctcggcaggcagttggcacggcagcaccccagcaggcagcagcccctccaatttaaagcaagcaacgacgggcaaagagcagctcggcgggggctgctgcagcgccgcgcgtttgcgagtccgggacgacgacatggggaggggccgcagcgagataaagcggatcgagaacccgacgcagcggcagtccaccttctacaagcgcagggacgggctcttcaagaaggcaagggagctcgccgtcctgtgcgacgtcgacctgctgctgctcctcttctccggctccgggaagctgtaccactacctctcgcccaccgtgcccactgtcaaggacctggtcgagaggtacgaggccgcgacgcacagcaaggtctgggccgacgttcgccaggagcggcgcgcggagctggagaaggcggagcggatgtgcgagctcatggagaaggagctgcggttcatgacggtggacgacggggagcagtacacggtgccgtcgctggagctgctggagcacagcctggaggcggccgtgcacagggtgcgctccgagaaggaccgcaagatcggcggcgagatcgactgcctccagaacattatcagaggacgccacgaggagcgctacgggttgtgcgacaagaacttcttgcaaatttggccgcagcttgctcattctcaggcctggaacaacggcggggaaggtggagggtcgaccccaccaagcggcggcggcggcctggaactcaaactgggtttcaactgacgctggctggcttggaagctcgaggatggatcgaagactatgagctccttcattgtgccctgtcaggctacctacccctgcaccctgttggttatggtttaaaatggttattgaccaaagttgtcctgcatcaaacaaggctcagcttgatgttaatgtgctgagggatctaatgtattattagcgttatccagctcttgtttacgtgctccatctcaatccatgcacgttaggatggattgtctaatctagttcaaatttcgtatcaatctattccatcccatacaaattaatccatgtggat

SEQ ID NO: 113008 - DNA, 3285 bp, Zea Mays
ctcctccccgtcgcgtccagccaagaacagcgcccttccaccgcccgagtacgcggtgtagcgctcctacatccactagcccggaaagccgtcgggttgttagatcggattgatccaatatgggaacacggggacaatatatctccgattcaggtgcaagtactgcaagaaacagtggaagggggtggtgctacacgtttcaagcaacacaatgcatcgcttgggaggaatgtgcatggttgtcgtaatgtttcgctagacattgcctttactttcggcgtgagattgacaaggtcgcaggccgcatttgcaggattatttcacaaagttcaaggatgattggccaacatatgaacctaccatcatgtgcgactcatggacaggaccaacccaaaagtgagcgattaatttcatgttattttgcaatggtgttatgttcttccacaaatcaattgatgcaactggtaaatttcaagatgcgaactatttacacaaggtaatttcattaatcgttttatgtctgtatttgtatcttcgatgttgtttgtgaactataaaacaatgccatgtaatgtatttgaactgttaaatattgttattggacttttgttcaaattatgggacttcaatgtgatttatttgcaaaaaaacatatacctgagtttctgcatcagtgccgccagtttatctggtcaggagccgattaatcggtcttatcggttgactaatcggttttaaattgtttagaattcaaactaggttgactttaatttctattggttttcgtcgatttatcgtggtttacagattatcgatggacaccggtttgtgtgtcctcaatccggtttggtgaactctgatcctctaaagattttacagatttccgtagcagtacttgttgcttgaatccacattttcttcaaaggtacgtttagactgtgtcatttaaaaaattgttttgtcctgtttaacaatataaattgcaacatttataaagataaccttataacagaggaagagcaatggaaatcacatgggtcacgtctatctacaatctactagactactactgtacgcctgtatggctgtatcgtacaccctaggtgcgtgtgcgtacttgttgcagtaatacacaagtcaccactatatcactctctacaagcccactactgctcctgccactcctactatacagtatacactgcccagttgcgctagtgtagcgtaggaatactgtaggcgatgatcgacggtccactgtgcccagccctcgacaagtctcagtcgcttcatgcacgtcgcggtgccagtctcgttgctcctgctcccttatcctgcaaagctgaaagctgcaaggcctgcagatcacttccagtcttcaaaagtacagttcgcgaaagttgaaacgagcgagcgacgaaccgaaccaaccaaccggcggtggccacgtagccccccctgacacaaagacaaagctacctagaagctagcccgtggagcggctagactactagactatcatgtctcggtactgcgtcaacgagcagtcgagcacccggcctcatcctgcctcggcaggcagttggcacggcagcaccccagcaggcagcagcccctccaatttaaagcaagcaacgacgggcaaagagcagctcggcgggggctgctgcagcgccgcgcgtttgcgagtccgggacgacgacatggggaggggccgcagcgagataaagcggatcgagaacccgacgcagcggcagtccaccttctacaagcgcagggacgggctcttcaagaaggcaagggagctcgccgtcctgtgcgacgtcgacctgctgctgctcctcttctccggctccgggaagctgtaccactacctctcgcccaccgtgcccactgtcaaggacctggtcgagaggtacgaggccgcgacgcacagcaaggtctgggccgacgttcgccaggagcggcgcgcggagctggagaaggcggagcggatgtgcgagctcatggagaaggagctgcggttcatgacggtggacgacggggagcagtacacggtgccgtcgctggagctgctggagcacagcctggaggcggccgtgcacagggtgcgctccgagaaggaccgcaagatcggcggcgagatcgactgcctccagaacattatcagaggacgccacgaggagcgctacgggttgtgcgacaagaacttcttgcaaatttggccgcagcttgctcattctcaggcctggaacaacggcggggaaggtggagggtcgaccccaccaagcggcggcggcggcctggaactcaaactgggtttcaactgacgctggctggcttggaagctcgaggatggatcgaagactatgagctccttcattgtgccctgtcaggctacctacccctgcaccctgttggttatggtttaaaatggttattgaccaaagttgtcctgcatcaaacaaggctcagcttgatgttaatgtgctgagggatctaatgtattattagcgttatccagctcttgtttacgtgctccatctcaatccatgcacgttaggatggattgtctaatctagttcaaatttcgtatcaatctattccatcccatacaaattaatccatgtggattgggtggtattgagtcggtttaattctatagcaagtcaaaatccatcccaatccatcccaatacacaccaatacacatggaattgaaataaccgaaccaggcctaagatggatatctgaaccctaaaccctaaacacatgtattcatattaaaattaaggtgcatacatgaccttagcacatatattcaaactgtgttgtagtggataggatggaacggctccaggaataacgcaggcaagtaaatttcgccgtttgtgaatccagaacgattcggtaatgacacgctgaaaaccagattaaaccctgaacccaaatagaactaaaagcatgtgcgcctggcgctaggagctcagcaagaacgtagcaatatagagatcgataatcacgtctcaaagatcattactgaaaagatctcatcactgctccaaggattacgcaacgagaggcaagaaagaagggcgaatgacagcgacaaacgagaaagcaaaatcaaatgaaggaaacctaacatagcgtagacgaattgggtacgaaggaatccgccgccgccggcttagcttcacgtctcacaatggaaggcaccagccaccaggaccagccgtccaggtagcccctggccttttaccggcgggctgtgctgcgagcggag

SEQ ID NO: 113009 - DNA, 1098 bp, Zea Mays
agactatcatgtctcggtactgcgtcaacgagcagtcgagcacccggcctcatcctgcctcggcaggcagttggcacggcagcaccccagcaggcagcagcccctccaatttaaagcaagcaacgacgggcaaagagcagctcggcgggggctgctgcagcgccgcgcgtttgcgagtccgggacgacgacatggggaggggccgcagcgagataaagcggatcgagaacccgacgcagcggcagtccaccttctacaagcgcagggacgggctcttcaagaaggcaagggagctcgccgtcctgtgcgacgtcgacctgctgctgctcctcttctccggctccgggaagctgtaccactacctctcgcccaccgtgcccactgtcaaggacctggtcgagaggtacgaggccgcgacgcacagcaaggtctgggccgacgttcgccaggagcggcgcgcggagctggagaaggcggagcggatgtgcgagctcatggagaaggagctgcggttcatgacggtggacgacggggagcagtacacggtgccgtcgctggagctgctggagcacagcctggaggcggccgtgcacagggtgcgctccgagaaggaccgcaagatcggcggcgagatcgactgcctccagaacattatcagaggacgccacgaggagcgctacgggttgtgcgacaagcttgctcattctcaggcctggaacaacggcggggaaggtggagggtcgaccccaccaagcggcggcggcggcctggaactcaaactgggtttcaactgacgctggctggcttggaagctcgaggatggatcgaagactatgagctccttcattgtgccctgtcaggctacctacccctgcaccctgttggttatggtttaaaatggttattgaccaaagttgtcctgcatcaaacaaggctcagcttgatgttaatgtgctgagggatctaatgtattattagcgttatccagctcttgtttacgtgctccatctcaatccatgcacgttaggatggattgtctaatctagttcaaatttcgtatcaatctattccatcccatacaaattaatccatgtggat

SEQ ID NO: 113010 - DNA, 1139 bp, Zea Mays
accactcaccacccactgcattattccaaatccagatcttctgttaagagctactggtaatcgttagtcaaagagcgtgccaagccaagaaccaggatatggcctccgcttcactgagcagtcaggcctctctggccgtagcagcgctcgtcgctgcggcgctgctggtcgccgccagccacgcgacgcccgccgacgacaaggccagggcgccaacgtcggccataactaacaagcctgccgagcattcagcctacggcagcgcgatgccgcgagggtcgccgtcgccagcatcgccagcacccgtgaacaagggtgtgccgtcacccggcggcactgctgcgccgcctccgggctacaacagcaacaatgccacgccgccgtcgctgcccctcgttccgccgccgcggccgcttccattcgtcatcgtagagggcgtcatatactgcaagagctgcaaggggaagggctacaacaccggcatagacgcgtcgccactgcaaggggccacggcgatgatggtgtgctacgggcggaaggtggtgaacgcgacggggacggtgaccgacgccaacggctacttcctcatcatgttctacgacatggccagcttcagctccaagacctgcaagatgtacctggtctcgtcgccgacgccgcagtgcagcaagcccttctacccgcccaaccagtggatcgggctctccctggtcagggagaccaggacggtcccgccggcggggctgcagggcatctacacccccaccagcgtcctcttctacgcccccgccgccaaaggccagtgcccctactgatcacgacatgacacgacacggcctcttccgacaccgttggacgcaggcgaggagatagaccactgtacgtggtcggcgcatggggcgtacgtggccgccgacgtgcatgcatatgttcaattcgacgccgccggcgccgtcgaacgcgcgagactgcgtgcgtcttttggatgcatctcggtcgatccaggcagtaagtaataagctagctaggcattgctgaattacattccggtggaagttccgtctgcagtgacgactgattacgatgtcggtgatattgacttctttatttattattttaaaagttgtcatttgttcttc

SEQ ID NO: 113011 - DNA, 701 bp, Zea Mays
atggctcgcctcgcgagatgccttgcggcctccctgtccgccgtgatcctcgccgtggtctgcttgccatcccgcggcgaggccatgggtggcctgccccagccaccgccggacgtcaacttcaccgtcgccgtcgagggcacggtctggtgcaagagctgccggtacgccggctacgtccagtcgtccatggacgcgtcgcctctccctgatgccgcggcgctgctgcagtgccggcgcggcgacggcagggcggtgtccgtgtggaacaccacgggcgccgacggccacttcctgatccaggcggactggcagtcggcgcccttcaacagcaaggactgcagagtcaaggcgtacgcgccacggtcgtcgccgcccgcggcgcgcgcctgcacggtggccgtcaaccccagcccgaataagggggcgccgctcaagttccgcaggttcgtgccgctctccggcgagatgcaggcgctctactcggctggcgacttcacgttcgcgcccgaggaccccgccagtaagtgctagcatagcagccacgtcatcgcgtagccggctctgtatctggattctggacgcccataagcgcgcgattaatcggatttatatttacggagtatgttacatgtttgttgtttgatgtgaaataattcaccatgtaatgtaacataaatctggccacgcgtgggaaacag

SEQ ID NO: 113012 - DNA, 343 bp, Zea Mays
tactttttgcctttcaagtaacactacgacgagcaaaagcctggtgctgctaggtaaaaactggattgattggctgtacaagtatacctcgaaccaatgatgtacaaaacctttccttgcagtactaccccacacctcaattctgtttcctatttatgctacttttgctaccacgctagtttaatcctatcaaaccatgctaaacctgttacagctactcctacctctcccaactctgcaccacgcaccgttggcaactccgttgccacaaattcacacgcacacaacttggtaagaagtcagtccatttatagctgagactcagcagatgcccaactccaat

SEQ ID NO: 113013 - DNA, 590 bp, Zea Mays
atgtggagcgtcttcctcttgccgagcttgaccccgacgcgtcccagcagcgagtcggccacgtccagcgagacgttcgccagcgtgggcagcgcgcgggtgccgacgtggcactccgcctgcacgttgacgccccggaacctcacctccaccgtggggatctggataccggcgcggtcgatgcgcgcgcggagcttcctgaggaagcgctcgttgtcctcatcggcgacccggaacacgcgctccacgaaggcctggcgctgcgcgagccccatcgcgcgcacgtccacctcctcatgcgcgtgccggcgcctccggccgcggcggccgctgtcgctgccgccgtcggaagcgtccgccggccgcacgaggcccgtgcgcaggcgctcgaaggacggcagccgctccatcgcggcccactgcagcgcctcctcgtcgtccacctcgtcggcgccgctgcggcgccgcgacgacgcgcccgagaagtagggggtggcgtcggggctcgacatgccgtgcaggcctcggctcagcgtctccatgcttgttgtgctggtagcgacgaaccgtgcatgcactgcacatacgcc

SEQ ID NO: 113014 - DNA, 4070 bp, Zea Mays
acgatcgagctgggaccggtagctcgcccacaagcactactgctccggcggcggccatcgccttgtcatcaggctccagctagcttgcaacagagggggcgagctaggaggaggagatgagtgccccagcgggcagcggcggcggcggggagcgggcgatgaacatccgcggcatattccggttcgcggaccgggtggacgtcctgctgatggccctgggcacgctgggcgccattggcgacggctgctccaccaacctgctgctcatcttcgccagcgacgtgatgaacgcgctcgggtacgggggtgcccaggccggcggcggcgccaagagcgcgcagttcatgcacgaggtggagaagtcgtgcctgaacttcgtctacctggggctcgtggtgctggcggtggcgttcatggaagggtactgctggagccggacgagcgagcggcaggtgctgcggatccggtacctgtacctgcaggccatcctgcggcaggaagcgggcttcttcgactcgcaggaggccaccacgtcggagatcataaacagcatctccaaggacgcctcccacatccaggaggtcctcagcgagaaggtccctctgttcctgatgcactctacggtcttcgtctccggcctggccttcgccacctacttctgctggaggctggccctggtttcgttccctctcgtcctgctgctcataatcccgggactcatctacggcaagtacctcctctacctgtcccgccggtcgcgccacgagtacgccaaggcgaactccctggtcgaccaggctctgggctccatcaagaccgtctactccttcacggccgagaagaggatcatccagaggtacacggcgatcctcgacaagacgatcaagctggggatcaagcagggcatcgccaagggtctcgctgtggggttcaccggcctttctttcgccatttgggccttccttgcgtggtatggtgggaggctggtggtgttccatcatgtgaccggtggaaggatatatgctgctgggatttccttcgtcttgggtggcctatcccttggaatggcactgcctgagctgaaacatttcgctgaggcgtctgttgctgccacaagaatccttgatcggataaaccgtgtcccccagattgatgctgaggacccaaaaggccttgtgctggaccaaatccggggagagctcgaatttgagtctgtccgtttcgagtacccatcaagaccaaacatgcccgtcctcaaaaacttcagcctccagattcccgctgggcagactattgctttggttgggtccagtggcagcggcaagtcaacagcgatagctttagtgcagcgcttctacgatgccagcgaagggactgtaaaagttgatggttttgacatcaaagaactccagctcaaatggatcaggagcaagatggggctagtcagccaagaccatgcgttgtttggcacttcaataaaagagaacatcttgtttggcaaaccagatgcaaccatggacgaggtctatgcggcagctatgacagcaaacgctcacaacttcataagggggcttccagaggaatatgagacaaagattggtgagcgtggagcactgttatcaggtggccagaagcagcgtattgccattgcgagggcggtaattaagaacactgctatactcttgctcgatgaagccacaagtgcacttgattcagaatcagagaagttggtacagcatgcacttgatcaagcatctatgggacgaacaacactggtagtagctcataagctctcaaccgtgaagaacgctgatcagatcgcggtagttgatgggggtacaatagctgaaattggtacacatgatgaactgatcagcaagggtggcccatactcgagacttgtgaaattgcagaagatggtaagctacatcgatcaagaaaatgatcagtttagggcttcctcagtggccaggaccagtaccagccgacacagcatgtccagagcaagtccaatgccactaacaccagctgccttaaaggaaaatgattctgatgttcatccacctgcaccatctttctccaggcttcttgcaatgaacgcacctgagtggaggcaggcagtcgtaggcagtttatccgcattggtatatggttccttgcagcctatctatgccataaccatcggaggaatgattgctgcattctttgttcaggaccaaaatgagatgaatgcaattatcagacgctatgccttgatcttctgctcactgtccttggtatccattgttgttaatctattgcagcactacaattttgcatacatgggggagcatcttgttaggcgcatccgggtccaagtacttgagaagatattaacttttgaggcagcatggtttgatgaagaaactaactcaagcggtgcattgtgctctcggctaagcaatgaggcttctcttgtcaaaacccttgttgcagacagaatatccttactgcttcaaacagcttctggaattataattgcagtgacaatgggcctgatggtagcttggaaacttgctcttgtcatgatagctgtacagccatctacaatgatgtgttattatgcaaaaaaaatggttctctcaaatgtgtcaagggacttggcaaaggctcagcatcaaagcacccagattgccatagaagctgtttacaaccacaggatggtaacctcctttggatgttcatcaaaggttcttcagctattcgagcatgcgcaagaggaacccttgaaaaaagcaaggaagaaatcatgggtagcagggatcaccacagggttgtcaccttgcctctcgttcttgtcatgggcactggacttctggtatggtgggaagctagcacagtctggggagatatcggcgggtgatgttttcaaaaccttcttcgtgctggtgagcacaggaaagcttattgctgatgctggtagcatgacttctgacctggcaaagggatcaaatgcagttgcttcagtatttgaggtgctagataggaaatccatctctccaaaaaattcacaggtagagaaggaggatcagaagaagaaaatagaaggtaggatagaattcaagaaggtagattttgcatatccaacaagaccagagtgccttatcctacaggattttagcttggacgtgaaagcaggaacaagtgttggcctggttggcagaagcggttgtggtaaatcaactatcataggtttgatccagaggttctatgatgttgataggggggctgtaagaattgatggtatggatgtgagggagatgaatattctctggtttcgaggatttacagctcttgttagtcaggagcctgcaatgttttcaggcagtgtcagggacaacattgcttttggtaaaccagaagctgatgaagatgagattgtggaagctgcgaaagctgcaaacgcacatgagttcatctcaactttgaaggatggatacgatactgattgtggagagcatggtatacagctctcaggggggcagaagcaaagaatcgcaattgcaagggcaataatccggaatcccacaatactactacttgatgaagcaacaagtgcgcttgatgcacagtcagagcaagtggtgcaggaagctcttgatcgaataatgtcagggaggaccacaattgtggtggcacatcggctaaacacaatcaagaatgtagactcgattgcttttctgggagagggtaaagtggtggagcgtggctcttacccgcagctcatgaacaagaagggggcattctataaccttgcaactcttcagaagtaactggttgtatgacatgtaaactattatacctaatgaaactccggcagtaattgatatgatagctaggttactatagcacagaagcagcactcctaagctagttttcaagcaactctttcaataatcagttaatatatatctgacacaatcctcgtccttcaagtttctggtgggctaacacaggcaaaaaatatatatataaaaagaaatgacaatatggcctagctaaaagaagcatgataagtaaaaacaagcatt

SEQ ID NO: 113015 - DNA, 450 bp, Zea Mays
atgcgtgcacttcaccgccatggtgttcgacaccacggcctgcgagcggcaagacctgctgctcggcatcgacccgcgccgtggccggcagagcaacaagcggcggcgctggcggcgcgcgagaggaccgggccctcgcgtgatgatgacgccagtgcgaagcgggcggacaaggattattccgtcgggaaggagttggtgtcgtaccgtgcgccaggtgagcacgcatcaggtctcatgcagtcatgctccaattggacgccgccagaatcggacggtaagctgcataaccgccaaatgtatgtgctcgcagtgaagaccgagatcgaggacggtgacgaggtagcgctgttgttgatgatccccacacaaccgccgccgtcgcaggagcacgcaccgaggcgcgggccgctggagcaccatgtctatgacggcgcggaaacggtgtaa

SEQ ID NO: 113016 - DNA, 384 bp, Zea Mays
atggcggtgatcttcggtaagctggggagcgcgaggacgtggagttttaaaccccgacccgcgagcacgatttgttgcaatccgcccggcggagttgggctagttgctgcgctgccccgtgaaggtcatctgcatcaacccccacggctgtggacggcggagcggcaagagagacggagagagtacagagagggcgaggcccaggaggacgtcagtgcatcatcggccaagtcaacagagggaaaggggtgagtatgtgttcggatccttgaggatgtcctcaccggagaacaccaggacaaattgacgcgcggctgggcgaaggagagaactggccatggcaagataacagcgatgatgacccccctggtatttatcccctaa

SEQ ID NO: 113017 - DNA, 852 bp, Zea Mays
tttccttgccgccagccagcccattaaccctcgttcctgtcgcgcagccacgacctccacttccacatctcccccggcgtcggcgcggtcagttgaaccatggcggactccaaggccacctcggcggtcaccctccgcacccgcaagttcatgaccaaccgcctcctggcccgcaagcaattcgtgcttgaggtgatccaccccggccgcgccaacgtctccaaggcggagttgaaggagaggcttgccaaggcgtacgaggtgaaggaccccaacaccatctttgtcttcaagttccgcacccacttcggaggaggaaagtccactggtttcggcctcatctacgacaacctcgaggctgccaagaagttcgagccgaaataccgcctcatcaggaatggtcttgctactaaggttgagaagtcccgcaagcaaatgaaggagcggaagaacagggccaagaagatccgtggtgtcaagaagaccaaagctggtgacgccaagaagaagtaaacgttcgtttacatttgtattactgttctgggctctgggtggtctagctgcaatgtcataattatggtcgtgttaggttttgttccacccttggcactgaagtgattttttttgtaattcctcggcactgaagtgaagttttgtctgaatattgcctcgtaacataattgcccggtccctgttctagttgtggcgcagtctggtttgttttgacatttgttttcaaggttcatccttatttgcattgcatttgtttatggcttgacgttaacatttggaacaagtatttgtcaccgctcatgtcgatggtgtaaaacatgatagttatgttgtcttccc

SEQ ID NO: 113018 - DNA, 1773 bp, Zea Mays
atggcggaaatgacaagacgggtgccatatcgaatggacgaatccatatgcgcggaagaacaaattggggcctacaatggcgggagggaacaatgccatttcacgagccaagttaaaccgactcacgagccaacttcagtcaagccgagctcctctttgaaaagagagccgagctcgtctatcaaccagccaccgtgcagcggcaagggtgtcaaggtcccgtaaaatctggcttttctccctccccataccccgcagtcccgcacacacactcgctttcttcggttcttcctcctcgagcagccacttccgtctctaaccctacagcgacgacgagagcgaggccatgaaggggaagaagccggtcaaggagctcaagctcaccgtgccggcgcaggagaccccggtagacaagttcctgacggcaagtggcacgttcaaggatggtgagctgaggctcaatcagagcggcttgcggcttatctctgaggaaaacggggatgaagatgaatctacaaagctgaaggtggaagatgtgcagttatcaatggatgatcttgagatgattcaagtcattggcaaaggaagcggtggtgttgtccagctagtgaggcacaaatgggtgggcacattatttgccttaaagggtattcaaatgaacattcaggagtcagttcgtaaacaaatagtacaggagctcaaaataaaccaagcaacacagagccctcatatagttatgtgccatcaatctttttaccacaatggtgtaatatatcttgttcttgagtacatggaccgtggatcgcttgcagacattgttaagcaagtgaagactattctggagccataccttgcagtactttgtaagcaggtcttggagggtttattgtatcttcatcatcaaaggcacgtgattcacagggacataaaaccatctaacttgttggtcaaccgtaaaggtgaagtcaagattaccgacttcggagtgagtgctgtgctagcaagctcaataggtcagcgagatacatttgttggaacctacaactatatggcgcctgagcggattagtggtagcacttatgactacaaaagtgacatatggagtttgggcttagttatacttgagtgtgccattggccggttcccttatataccttcggaaggtgaaggttggttaagcttttatgaacttctggaggccattgtcgatcagccaccaccttctgcacctgcagatcagttctctccagaattctgctcatttatctcctcttgcatacagaaagatccggctcagaggatgtctgcttcagaactcttgaatcacccttttttgaagaagttcgaggataaggacttaaacctggggattcttgtggagaacctggaacctccaatgaatatacccgaatagcctgtcgtttttagtgatgaagcctttgttgtgccttcagggtttggcctcgaagcctcttggcatctgctcctcaactgcagcctccctacctgaatatgctataacatcattgtatgattcaagccccttatctgagcataagagtagagggaactatgctgcattccgtgtatggtcaccttattgtagctattgttgcgacgggccttgtgattttgagtcttgttttaacttttgcagtcttatcggctgtggattcaaaatgaacgaactgaatattcaaaacatgtttgccaacacgcttcaaggacgctatttcacccccaaaatgataaaagaaagcgaagtcgcgcatt

SEQ ID NO: 113019 - DNA, 1294 bp, Zea Mays
gccttcttctccagttctaataacgcttggccctctccttaaccttaagcagcagccccccgtggcccgggccaggaccaaccaacagacccgccgcgcgcccgcctacacccgtgacgcctcgccgagaaccacgcgcgatccgcccggtcgacgaggggcatctcgctatctcgtcctcctgggcgcttgggagaacggcaaccgccagccggccgagccaaggccaagccatggtggagtccagtggccaccggagcaccgtccccgcggccgtcggcttcttcagggtcccgggcctcttcgtgaggctgagcggcaagggcggagcgagcaatgccgtggacccggaggactcggtctggagcccgacctccccgctggacctgaagcacgtcatcaggtgcagcccgccgagggcctgcctcggcctcgccgacgccctcaccgccgacgggaccggttccctgcactcagggggcaggagctcgttcgtcgactccatcaagccgttcctcgagcgggcgctgcccaaggcggcgtgcgggaaggaggctgctgctgctgcctcctcgtcggccggcgtcgtcgccgcaaccctgggcaaacaggcgagcgagtacgccgactgcgaggagtacacttgcgtcatctcgcgcggggccgacccgaggaccacgcacatcctcgccggcgagacggtggaggtgcgcaggggcgacgtaggtggtggctgcaggaaggtggttttcatcatcgagccgttggcattgagcgaccggcagccgcgcgcgtcttcgtcttcgtcgccggcggcacccgctagagtcgtcgcgtccggccgttgctgctgctgcatgaagaggctgctggaggaccgggacatcttcatctacctgggcgagaaggccttctgcagcgacgagtgcaggaacgggttcatcgaggaggcggcggaggaggagctcatgattctggatcctgctcgaaatctttgatcaagatttgttagctgccgtggcaaaagtagagagtgtaatatttgcccgcaatattttgcttctgccttcaacttggggactacttggctgggagagtgagtgggggaaggacaaaggaaattgcctctcgttcaagtttttcggtaaggagaggtcgtgtcgtgtcccggtttggccaaccagtgcaacggccgagccagccaatttccgtggtttgttgagctccattttggctactgtcagattagtagctcttcgccatcaatatattactactgttttgtttaaggcca

SEQ ID NO: 113020 - DNA, 1420 bp, Zea Mays
tgattactgcgttccaagctcttctcattgaggcgacctgttcgttctcaactgtgccatggtgtttctgcacttaatgcgaagagcttcgagcgggtgttcctctttttttttctgcacataatgtgttgtgtacttgtgtgtgttccttctggtgatttcgtcttgctctttggacatgcaacagaatcacgtttttacgtttctgtttgtatacgaatcgatccatcctattcctaaagacctaaaccagccaataaacgtgatgaccattttcaattcaggggcatctcgctatctcgtcctcctgggcgcttgggagaacggcaaccgccagccggccgagccaaggccaagccatggtggagtccagtggccaccggagcaccgtccccgcggccgtcggcttcttcagggtcccgggcctcttcgtgaggctgagcggcaagggcggagcgagcaatgccgtggacccggaggactcggtctggagcccgacctccccgctggacctgaagcacgtcatcaggtgcagcccgccgagggcctgcctcggcctcgccgacgccctcaccgccgacgggaccggttccctgcactcagggggcaggagctcgttcgtcgactccatcaagccgttcctcgagcgggcgctgcccaaggcggcgtgcgggaaggaggctgctgctgctgcctcctcgtcggccggcgtcgtcgccgcaaccctgggcaaacaggcgagcgagtacgccgactgcgaggagtacacttgcgtcatctcgcgcggggccgacccgaggaccacgcacatcctcgccggcgagacggtggaggtgcgcaggggcgacgtaggtggtggctgcaggaaggtggttttcatcatcgagccgttggcattgagcgaccggcagccgcgcgcgtcttcgtcttcgtcgccggcggcacccgctagagtcgtcgcgtccggccgttgctgctgctgcatgaagaggctgctggaggaccgggacatcttcatctacctgggcgagaaggccttctgcagcgacgagtgcaggaacgggttcatcgaggaggcggcggaggaggagctcatgattctggatcctgctcgaaatctttgatcaagatttgttagctgccgtggcaaaagtagagagtgtaatatttgcccgcaatattttgcttctgccttcaacttggggactacttggctgggagagtgagtgggggaaggacaaaggaaattgcctctcgttcaagtttttcggtaaggagaggtcgtgtcgtgtcccggtttggccaaccagtgcaacggccgagccagccaatttccgtggtttgttgagctccattttggctactgtcagattagtagctcttcgccatcaatatattactactgttttgtttaaggcca

SEQ ID NO: 113021 - DNA, 2527 bp, Zea Mays
cgagagcgcccgaaccccacttggggcgcccgtgccgatatataatccaatcgaaaccgccacactgttggccgccggcgccagcccgctagtaacctgcttaatttaggcatacgtgagactctgagagaaggtactgaccacacaagggaggccactcccgcccggttcgtccgcgtcgtcgccgatccgtacgcaactcccgtgatccgatccggacgtacggccgctctctctccgggctagctggcgatcgccgactgcatggggccggcggccggcgacggcgaccgcggccccggcgccgcggcggagcacaaggtgaacctgtcggcgcggcagccgttcgtggagtcggtgcggacgtgcctggccgagacgttcttccccgacgacccgttccggggcctggggtcgcgcccgcccgccgcgcgcgcgtggggcgcgctcaagtacttcgtgccggccctggagtgggcgccgcgctacaccgccggcaagttcaagtacgacctcctcgccggggtcaccatcgccagcctcgccatcccgcagggcatcagctacgccaagctcgccaacctcccgcccatcatcggcctctattccagtttcgtgccgccgctgctgtacgcggtgttcggaagctccaacaacctggcggtgggcacggtggcggcggcgtcgctgctgctggcgtccatcatcgagacggaggtcccgccggaggagaacccgcagctgtacctgcagctcttctacaccgccgccttcttcaccggcgtcttccagaccgcgctaggcgtcttcaggttagggctgatagtggatttcctgtcgcggtcgacgatcaccgggttcatgggcggcacggcgacgatcatcatcttgcagcagctcaaggggatgctggggatgaagcacttcacgccaaagacagacctcgtctccgtcatgcgctccatcttctattacaggcacgagtggaggtggcagagtttagttcttggcatatgcttcctcctgctcttgctgttaagcaagcacttgaggaagaagaaaccaaatctgttctgggtgtcggccattgcgcctttcctgatcgtggtcatcggcggcgtcttcgccttcctggtcaaaggagacgagcatggcatcccgatagtcggcgatctgaagaaagggatcaacccgctgtctatttcgcagctgacgtttacagacaagcacgtcaatacggcaatgaaagcggggttcttgtccgggatcctggcgctggcagaagggatcgccgtcggacggagcctggcgctggtaaagaacgagcagatcgacgggaacaaggagatgatcgcattcggcatcatgaacatcgccgggtccttcacttcttgctacctcaccacagggccgttctccaaatcggcggtgaacttccacgccgggtgccggacgcccatgtccaacgtggtgatgtcggtgtgcatcctgctggtgctgctgttcctggccccgctcttcaagtacacccccctggtggcgctctcgtccatcatcgtcgtcgccatgatcgggctcatcaaggtcagggagttctgccacctgtaccgggtcgacaagttcgacttctgcatctgcatggtcgcattcatcggcgtcgtcttcttcaccatggtcatcggcctcagtgcctcggtaggcttgtccgtggtcagggcactgctgcacgtggcgagacctagcacctgcaagctcggaagcgtcgcgggaggcgacatcttccgcgacgtcaggcactacccgcacgcgaggagcgtccccaacgtcctcgttttgcagctgggatctccgatatatttcgtcaatgcaggttacttgcgagaaaggatcttaagatgggcggaagaggaggagaacggcagcaagattgacgggcaagatctgcagtacgtggtccttgatctcgctggtgtgacttccatcgacaacacggggattgggatgctagtcgaggttcacaagagccttgatcgtaaagggatcaggatagcgctgacgaaccccaggctggaggtgacggagaagctggtgctgtctgggtacatcaaggacatcataggggaggagtgggtgttcctcacggtgaaggacgccatcacggcgtgccggtacgcgctccagagatctagaagcaaggatgacggtgaagtatagctagcgtccagggacagtcttttagtaggaattatagttcagtagtagctcatcactagctgtagatattgagaagcaggcaggaaagcaagcatcggaggtccttgtataggagaagattcagagctacgactacgagagattggggtgtggttgcggtgcttgcatgtgttggattattgtgtggcatctggtctctccgtctttgtaagggaaatagcgaggtggctggggataggtagctagcgtttgtgtatagaccagttcagctttgcctgtaccagtttgcaattgcagcacaataggctgtttg

SEQ ID NO: 113022 - DNA, 1180 bp, Zea Mays
ttagtttgaagcggtgctagctagctagctgctttgctcagctcgcaagcatgcatataaactcttgtctcttctcacgcagtgacgcagagctagctagctagtagctagctgcgcaccggcagtacgtagatcccgggcgggcaatcgaaccgcaaacgcctctgggtttcgggaagggtgctttgctctttgcagccagctggccggccggccctggtgttttatataacttggaaggttcagtcgctgacagagaggaagaagaaggaaggaggaggaggatggggaggaagctgggcctcgacagggtcctcgactgcttctcgctctccctgtgctccagcgcctgcgcctgcgtacactccgtggaggaggaggagcaggaagacgaggacgagcggaaggccctggtgagcagccagctggaggagctggtgaagctgagcagggatctcgtcggcggagccgccaagaccctcgctttccatctggaaccaaagaccgtggagctcaaggtgtccatgcactgctacgggtgcgccaagaaggtccagaagcacatctccaagatggacggcgtcacgtcgttcgaggtggatttggagaagaagaaggtggtcgtgatcggggacgtgacgccgtacgaggtgctggcgagcatctccaaggtgaagttcgcggagctgtgggtggccccccaacaaccccaagcagcaagccgctgcggaaaggcgcctgcaggtggtgtagtgtagaagatctcccaatggatgctcatgtgttctcttgtattcatcctgcatgcatgggcatggctgtagctcaggcgggcgggcgggcgggcaaaaccactcagaaatgtaagccaccaggaagcaatgcaagcaaccgtgtgtgcgtgcgagtgcaaacgatttggacgtgggggacacctcacgtacgccttgcaacatgttgctctgcgtttttttttatgtaaaagggcaattggggtaacgcggcgagcccaattataccgttgatttgatacgggtgagggagagaatgaggaggaggaggaggaggagctcgggcccgctgctaaatcctagatttagcttttataaatagctattagtttgatactcgtttcattatattaaggataaaatatatccgcaattcatttaaaataaat

SEQ ID NO: 113023 - DNA, 208 bp, Zea Mays
gtttaaaataggagatgaaagaataagctattggaaataaccttaggaacgagcaaacccggcatcggcaggcatgcctgggttccatagtgattatgttagtatcctattatggctctgtacgtatgttttatctattcagtagatattctatgtagcattagcacatattggaggtgtcttgcttgtgaacgcaacttgggtgtaa

SEQ ID NO: 113024 - DNA, 2068 bp, Zea Mays
atgaccggaatgcgagatccggttgccaagcgagggagaggaaggaaggccgctcgggggagacgcctggaaaaccgccacctccgcgcgccgggataccccgcctcccacgcgcccccaccaaactccgccacgctcgctctggagacaccgccttcctgtcctccgctcactgtgcttatcctcggatccgcgactattgccccgctcccccaaatatcgctgacacagggatccaagcccctgccatctattcagccgccccgacgcccacagtggataccaactgacgggccaccaaccatgttgttccacgccctgggctgttgctggaagctgatcaatcacttgattggtctccggaaaggatccaaatcttttgaggaagcacgtgccgctggattcaccgaagagagcggaaccttgggcgatatttgggaaaccgtctccggcagcgatcttgtgttgctgctgatatccgatgttgcacagttcatcctgaaagttgcatctcactttctgctggctgacaactatgagaagatcttctctcacatgaaaccaaacaatatccttgttttatctcatggatttcttctgggacatttgcaatcactcggactcaatttcccaaagaacatcagtgtgattgttgtatgccccaagggaatgggtccatccgtaagcaggctttatgttcagggcaaggaagtcaatggcactggcatcaactctagctttgttgtgcaccaggatgttgatggaagggcaactgatgttgctttagcatggctagttgcacttggttcccccttcacgtttgctactactttggaacaggagtacaagagtgatatctttggagagcgaggcatcttgttgggtgctgtccatggtatcgtggaggctctgtttaggaggtacacagaacaaggaatggatgaagagtcggcctacaaaaacactatcgagggcataactgggatcatctcgaaaaccatctcaaagaaattacgtgattattcatccttatgccaaccattgttggggatgcttgaagtgtacaactctttgagcgaggaaggcaaaaaggagttcaacaaggcttataatgcatcgttttacccgtgcatggatatactctacgaatgctatgaagatgtggcctctggaagtgaaatccggagcgtggtgttggctgggcggaggttttatgagaaagagggcctcccaacttttccgatgggcaacatcgaccaaactcgcatgtggaaggttggtgaaaaggtgcgctcaacccgtccggaaggtgatcttggcccgctccatgccttcactgctggagtgtacattgccctgatgatggctcagattgagatcctgaggaagaaggggcactcctactctgagatcatcaacgagagtgtgattgagtcagtggactcgctgaactcgttcatgcacgcccgatccaggaagtgggcgcctcgcttcgactacatcctgacgcagcaggccttcgtggcggtggacaaggacgccccgatcaaccaggacctcatcagcaacttcttgtcggaccctgtccacggtgccatcgaggtctgcgccgagctaaggcccactgtcgacatatctgtgcctgccaacgccgactttgtgcgcccggagcttcggtagtcttcctagattgaggcaatgtgagcggagagggagagagaaagaggatttcgtgtcccgagttagaacagagtgttgtatgttttgtgcgactgtttgtaagtcaagtctgaactgtgaacctatgtgagcttctatcagaggacccggagaaagcctgggcatctgtttctggaataaaatggctccttccatggaatagatcgggagggtatgtgcgaaagtatgatgaacatgtgatctctcttcgcataggtttgcccatgtcagtgtttttttgtttcggtgacaatggccaggcatttgcactgctataccttagattattcgaaatgttgcctaggaatagactaacgggttgttttgttcgattggctaaagtttagtc

SEQ ID NO: 113025 - DNA, 396 bp, Zea Mays
atggggatggataaatgcagcgcaaatggataagtgtagcgcgaacaacatggacaacaacaacgtacacaaggcgggcatggtgatgaacgggttgcacatcagtgtgtacgcataagagacgttggggtgtgcggcggccatgtccacagatggttgatgagcaagatgctcgagcgcattggggattcaccgctgatcaggttcggcacatacacatgcggcgccggggccatgtcgggcacgctcaagtgggacatggctactgtcatggagtacaagggcctacccctgcagcaggtcgtcgactactatgtcaggggcacgatgcagaatatccgaagacaactattatcaataattagccaatataaactatttacaatgctttactaa

SEQ ID NO: 113026 - DNA, 1528 bp, Zea Mays
aaaggaacccacttctcgaatagaaattgagctcaacattgtcaccaatatgtgcccttggccatcatacacaactaacttccaggaattaccataatgtatgaatagataactagacaaccatctaagttcctggtcaccagaaccaacaaaccaagccaacacactactcagcctatagataatcttgaatttcgcactcttctgcagcatgcaccttccacctaccactgcaattgattccaatgctaatagtggagccaatccaattggagagaaactgaaagatggccatggtattggccgcacttcagtattaccgatagcatgtgccaggtcttgcatcgtcgagccaacaccattgttgcaggtggcaataacatgtgatgacaattcctcaaacacacggtgggcacctagaactagaaccgcgtgaccattgttgatgtgctgttggagttcgaccatatccggaggtgacccacacagcttgaagatcttcagcagctggtacatctcgccactgccgggcatgaggggcttgccgaagaagatctcgttgaggcaacccacgctccagaggtcgaagccgacgctgtagctggtggagttcagcagcagcacaggtgtgcggtaccagagcgtgacgacgcggctggtgagcggttgtcggcacccagcgccgtagttggcgaggccgaagtcaccaatcttgagcatgtcggggtagtcgatcagcagattggagcccttgatgtcctggtgaaggatgccctgctcatggcagtgctgcagccccacaaacagcttggcaccaatcaaggtaggtgaaggcttgaggtactactgcagcaggtgctcgatctgtccagtgcagatggtgtccaccgtcttttcctccaggttgcacactgggtgcgcgaaggcgaccacgtcccactccttgctgacggcctggtggtggcctgacaggaagttatgcgtgaggacgagggcgcaccggagttggccctatgccacggacaccatgttgctgccggtgacttgggcgacgatgtgccccgcggcggcagcggtcggtagttcgatgtggtcggagccgatttccgctgggaggagcagctccaggtacttgagcgatggtctaggcgccctcgaagcgaagagcacgggtgcggccttggcgagcgcgtccggggggacggtgcccgagatctcgttgttggggccgatggaggcgatggtgaaggaggcaggagtgcacccgcgcaggatgagtcgcgcctcgactccatcccgctgatccgagtggggaaggaaggcgatgtcggtctcgtgctctaggagatgggacatcacggatccatggtcgccgtggacggagttgtcgtcgtccgagtcaagcggtgcacccgaatcgttgttgaagaagcgtccgcgtgcggccgggtgcaccgattccaccgcaacctctggtgtgacgcaggtagtcgcgtcggggttggaggaagggctgtcccagtggccg

SEQ ID NO: 113027 - DNA, 1908 bp, Zea Mays
gcctctcaagctcaagggctcaaggccattagcgtaattacaaaattgtaattaattctcaatctcaaggttagtaacgtaattctagagcttccgagcagaaaaggtacggagtcggaaggatatgatcgcttaggagtgcggctagggttttttcttgtcacaccttccctcggtcccttccatcttctagccgccgccgccgccgccgctgcccaaaaccctacctaccctcttcttccccctcactctcctttcatctccattctaatggcggcccaacccgtccggcgaagctgctagtgcttgtatctactatcttcatcaggtacttcgccatcctactgaagtattccccgccgccgctgccatggccaccctcaaccctttcgaactcctcggcgccgacgacaacgacgacccgacgcagctgattgcggcggcggcggctgctgctcagaaagccgaggcgaagaagtccgccgtggcgcctgctgggaaggctgcccagcctgcggcgaccaccaagttcccgaccaagcccgctcctccctcgcagacggttcgggatgcacgcggcggtggctcatcagctcgtggaggctttggccgtggtgaacgtggccgtggcagaggtggacggggatatggccagaaccgtggcttcagtggtgacaatggcaatgagttccagggaggttatggtggcggaggctatggggatggtgctgtaactggtggatctgaaggagaaagggagagagagactcgtcccccgtaccgtggcggaggcagacgtggtggttacaggaatgttgagtttgctgatgactctgagaggccaccacggagaaactatgagcgccacagcgggactggccatggctatgagatgaagcgtgatggcgcagggcgtgggaactggggcactgccactgatgaacttattgcccaggatgcagaggactctccgaagatggaggaggctgctcctgttgctgagaaacaaggtgagcagaatgatgccccagcagcagatgagaacaaagataacaaggatgctactgcaaatgaggaggaagaaaaggaagaggacaaggagatgactctggaggaatttgagaaaataagagaggagaagaggaaagcactacttgcattgaaggctgaggagaggaaagttgaagttgacaaggatttgcagtctctgcagccactttcaaacaagaaagaaaatgatgaagttttcattaagctggttagtttccctgtaattaatgctttgataccttaagtttgctgagctttgcacgggttcttcgatgttcttttgttctcttagggttctgacaaggataagaagaaggaaaatgctgagcgtgatgagcgtgccaagaagtcggtgagcatcaacgagttcctgaaacctgctgaaggagaaaggtactacggcggccgtggccgtggaaggggccgtggggatcgtggtggttttagaggcggatacggagggggatacagtcgtggcccagctgctgctgctccatccattgaagatcaagctcagttcccaagccttggtgggaagtgaagggcgcccagctgctgctgtcaccgagcgttgtgttgtctgctgttgtcatatttaaattttgtccgacgttaaatttctgtgccacggtttaaacggaacaaataatgatgttgcatgtggctatctttagttatgtggtacttgacgttgaataccggagttgttgtttatcagaattaacctccaatttttgtaggccagcttttaccattttgttgtcttagcatgcttgcttgtttggctgtcctgtatggcactgctgcagctgcaatccatattagttgcagctggattaaagccggagtgaacttgtc

SEQ ID NO: 113028 - DNA, 1843 bp, Zea Mays
gcctctcaagctcaagggctcaaggccattagcgtaattacaaaattgtaattaattctcaatctcaaggttagtaacgtaattctagagcttccgagcagaaaaggtacggagtcggaaggatatgatcgcttaggagtgcggctagggttttttcttgtcacaccttccctcggtcccttccatcttctagccgccgccgccgccgccgctgcccaaaaccctacctaccctcttcttccccctcactctcctttcatctccattctaatggcggcccaacccgtccggcgaagctgctagtgcttgtatctactatcttcatcaggtacttcgccatcctactgaagtattccccgccgccgctgccatggccaccctcaaccctttcgaactcctcggcgccgacgacaacgacgacccgacgcagctgattgcggcggcggcggctgctgctcagaaagccgaggcgaagaagtccgccgtggcgcctgctgggaaggctgcccagcctgcggcgaccaccaagttcccgaccaagcccgctcctccctcgcagacggttcgggatgcacgcggcggtggctcatcagctcgtggaggctttggccgtggtgaacgtggccgtggcagaggtggacggggatatggccagaaccgtggcttcagtggtgacaatggcaatgagttccagggaggttatggtggcggaggctatggggatggtgctgtaactggtggatctgaaggagaaagggagagagagactcgtcccccgtaccgtggcggaggcagacgtggtggttacaggaatgttgagtttgctgatgactctgagaggccaccacggagaaactatgagcgccacagcgggactggccatggctatgagatgaagcgtgatggcgcagggcgtgggaactggggcactgccactgatgaacttattgcccaggatgcagaggactctccgaagatggaggaggctgctcctgttgctgagaaacaaggtgagcagaatgatgccccagcagcagatgagaacaaagataacaaggatgctactgcaaatgaggaggaagaaaaggaagaggacaaggagatgactctggaggaatttgagaaaataagagaggagaagaggaaagcactacttgcattgaaggctgaggagaggaaagttgaagttgacaaggatttgcagtctctgcagccactttcaaacaagaaagaaaatgatgaagttttcattaagctgggttctgacaaggataagaagaaggaaaatgctgagcgtgatgagcgtgccaagaagtcggtgagcatcaacgagttcctgaaacctgctgaaggagaaaggtactacggcggccgtggccgtggaaggggccgtggggatcgtggtggttttagaggcggatacggagggggatacagtcgtggcccagctgctgctgctccatccattgaagatcaagctcagttcccaagccttggtgggaagtgaagggcgcccagctgctgctgtcaccgagcgttgtgttgtctgctgttgtcatatttaaattttgtccgacgttaaatttctgtgccacggtttaaacggaacaaataatgatgttgcatgtggctatctttagttatgtggtacttgacgttgaataccggagttgttgtttatcagaattaacctccaatttttgtaggccagcttttaccattttgttgtcttagcatgcttgcttgtttggctgtcctgtatggcactgctgcagctgcaatccatattagttgcagctggattaaagccggagtgaacttgtcacctcttgcttgccttaca

SEQ ID NO: 113029 - DNA, 1531 bp, Zea Mays
gcttaggagtgcggctagggttttttcttgtcacaccttccctcggtcccttccatcttctagccgccgccgccgccgccgctgcccaaaaccctacctaccctcttcttccccctcactctcctttcatctccattctaatggcggcccaacccgtccggcgaagctgctagtgcttgtatctactatcttcatcaggtacttcgccatcctactgaagtattccccgccgccgctgccatggccaccctcaaccctttcgaactcctcggcgccgacgacaacgacgacccgacgcagctgattgcggcggcggcggctgctgctcagaaagccgaggcgaagaagtccgccgtggcgcctgctgggaaggctgcccagcctgcggcgaccaccaagttcccgaccaagcccgctcctccctcgcagacggttcgggatgcacgcggcggtggctcatcagctcgtggaggctttggccgtggtgaacgtggccgtggcagaggtggacggggatatggccagaaccgtggcttcagtggtgacaatggcaatgagttccagggaggttatggtggcggaggctatggggatggtgctgtaactggtggatctgaaggagaaagggagagagagactcgtcccccgtaccgtggcggaggcagacgtggtggttacaggaatgttgagtttgctgatgactctgagaggccaccacggagaaactatgagcgccacagcgggactggccatggctatgagatgaagcgtgatggcgcagggcgtgggaactggggcactgccactgatgaacttattgcccaaggactctccgaagatggaggaggctgctcctgttgctgagaaacaaggtgagcagaatgatgccccagcagcagatgagaacaaagataacaaggatgctactgcaaatgaggaggaagaaaaggaagaggacaaggagatgactctggaggaatttgagaaaataagagaggagaagaggaaagcactacttgcattgaaggctgaggagaggaaagttgaagttgacaaggatttgcagtctctgcagccactttcaaacaagaaagaaaatgatgaagttttcattaagctgggttctgacaaggataagaagaaggaaaatgctgagcgtgatgagcgtgccaagaaggtatgcattgtagttgcaaatcaaagtagtttctgacatatggttgcactgcaattgcatgtggggatggtgtgtggattgtgcatgtgctagagattccgttttacagctcttcagcttaacactttcttattgaatgcttgaatcagagtggatgtagccgtagtacatctcttcagcttaacactttcttccgcttatcaatcttttttagtaacagggactgtaatcttataaatcttaattagatctgaaattgtaagcgtgtgatttgagagttgagaccaagtattccgaatcttcaaccttgatacacaaactctgaacaaggggaaaaagcaaggggcagtctta

SEQ ID NO: 113030 - DNA, 426 bp, Zea Mays
atggagcccgcagccgaggacaccacatctgctgtgccagactcgtgggagggccgacatcgacggtcacatgagtcggctcatcctctccgcgtgtcgtgtgtcctcctcgctggacctcgccttctccatgaagaagacagtcaccttcgttacccgaggatagatcgcgtgccgaccctgacccctccatcaccaatcggcgctagcggcatctcttccccaatggatatgcgggcgagaactacatcccggtggacggtggtcaagcggcgatgtccacgagaagcagagcctccggcacggctccaacctcgtacttcgacttcgaccaaatccatgaactacaggttcagtctgtcacttcacctaccatccgcgtctccctgccagggtcttcaatcctttgtgctggttgtccattag

SEQ ID NO: 113031 - DNA, 506 bp, Zea Mays
acagagggaggcagatgcggtcgagggggaggaggtaggagacggcgaggtggagggaggggtggcgcggctgcccagaggcgggatgcggcgaggaggagaaggggtgcggccgaggggggcatggcctccccgaatcgctggtgaagcaagaacgggcgaggagcttctacaaatcgacggtggtggggggaggggcgctgatgtcgaacggaggcagggtcacggtgtcgccccctgtggacacctccagcgtctgcgccaccgtgaagcggtcgcggacggagaacgaggctggacggtagcagtcgtggatccgggcatcaccgagggggtgggggcaggggaagggaggggaggccttgaatcccggatgcgtccgcaggggtgttctcggatccttgtcaccgcggcgcgggacatggggagcagccgagcaggggcggcgggcgcggagaggaccaagcaatggcaacgcgagggatgtgaggggacgggttcgtgag

SEQ ID NO: 113032 - DNA, 514 bp, Zea Mays
acagagggaggcagatgcggtcgagggggaggaggtaggagacggcgaggtggagggaggggtggcgcggctgcccagaggcgggatgcggcgaggaggagaaggggtgcggccgaggggggcatggcctccccgaatcgctggtgaagcaagaacgggcgaggagcttctacaaatcgacggtggtggggggaggggcgctgatgtcgaacggaggcagggtcacggtgtcgccccctgtggacacctccagcgtctgcgccaccgtgaagcggtcgcggacggagaacgaggctggacggtagcagtcgtggatccgggcatcaccgagggggtgggggcaggggaagggaggggaggccttgaatcccggatgcgtccgcaggggtgttctcggatccttgtcaccgcggcgcgggacatggggagcagccgagcaggggcggcgggcgcggagaggaccaagcaatggcaacgcgagggatgtgaggggacgggttcgtgagacgggggc

SEQ ID NO: 113033 - DNA, 1886 bp, Zea Mays
acaacactcgtttgcctctcatctcgcttcgcttccattccatcgcgccagtcgccagactcacctgggagagtggggggaaatatcaattagaaacaacgaggaattagcaaagaaagaagaataactcccataagaaaaatcgccaaatacgccattcatcttcttcgcccgggtttcagaacgtacggcagtttagccaggatggtggcgatcgagaaccagagccaggccgcggtggcggcggaggcggtggcggcgccggcgtcgcggatccccagggaggcgcggcgcctgctgcacgagctggcggcggcgtgggcggacgtggccgactgccgcgcgctggaggtcgtgccgctcaagggggccatgaccaacgaggtctaccaggcgcgctggctcactgcaggccctgccggccagaaggaggagcccagggcggagagggaggtgaggaaggtgctcgtgcggatttacggcgacggcgtcgacctcttcttcgaccgcgaggacgaggtgcgcaccttcgagtgcatgtcacgccatggccagggtccccgcctcctcggccgctttccgaacggccgcgtcgaggagttcatccacgcaaggacattgtcagctgccgaccttcgcgatcctgaaatttcagctctggtggcttccaagctgagggagttccacaaccttgacatgcctggtcccaaatctgtgctcatttgggacagacttaggaactggctcagaactgccaagagcttgtgtccacctgaagaagccaaggaatttcggttggacagtctggagaaccagattactgcattggagaacgagtgttcaggtgattaccagtggattggtttctgtcacaatgatcttcagtatggcaatatcatgattgatgaagagaccaacgtgctgaccatcattgattatgagtatgcaagcttcaacccagttgcatatgacattgctaaccatttctgtgagatggcagcagactatcattcatcaaagcctcatatactggactacagcagatatccagatgttgatgagcagaagcgttttgttaagacctacctgaacatttctggtgaggaacctgatgcggaagttgtggagaacctgctccaaagcattgagaagcacacgctcgccagccatctagtatggggcctctggggaataatttcggaccatgttaacgacattgacttcgactacaaggagtatgcgaggcagagattcgagcagtactggcacaagtctgcgatcttaacatcttgaacatgtgtataaacacccgtacgtggtctcaggaactccctgagggcctgtggctgcacacacgaaattgtgcagtgccactgacacatagataagctgtgaaagaagaaatactgacgacgacgacgaataatcccgttttgggctcgggaggttatttctccgcaactcgatgagcttcaggcttcagcttcaggaaggaaggaaggagctatggggatttggctgcccgcttatgctgtaccaatgcaattaaaagataaagatccggtccggtgttgcgtgtgctatgtttagttttggctagcaccgccgagagccgtggtcctgttgtggtgtttctagtttctgtatgcttgatgttgttagtgtgctggataatttggttttgtgcttggggagtccttagctttgggacaacgcatacattgtatactgggtagatgtataaacataaaacagctatgggaatttggttctctacctttatttctctctcgaacaggctgtatttcgttaagaaggtaaatttgggtttgtatttgttattatcagcttgttatacatgtgtcagatcaaatgcatttcttttg

SEQ ID NO: 113034 - DNA, 621 bp, Zea Mays
tctgtgtgaaatatttactgtatccaacatttttaattacagctaaaaggtttccacatatgaggcacaccacctcaaaaagggggagggggaaaacagcaaaatacatgacatctgatttcaaaatatggtcagagattatttttgcacatatgaggtacacagtactcaaaagcagcaaatgcatgtcatctgatttcaaaatatggtcagagcatggataaaaatgtacaggactacctactaccaactgctggtctcagaaaaatagagaggcacatgctgggcagcaggactaagtcgtaatctctgaccatattttggataaaattgtacaggactacctactaccaacttgcctgttcttccttggatacttgagaaaagcataaagtctgtttcaatgtgtgtccaagattaccttgaactttcatatagtccaaggttgtatattccagaagcattgtcttcctcgaaggagagctgttcctcagcctctgcatcggtgaaggtcagagctctctgcagcttttttgaagagaaaacctccacatctgccatgtacacagcagtcacagggcggtgatctgatagtctgagatcaactgtcttatatgacag

SEQ ID NO: 113035 - DNA, 1728 bp, Zea Mays
atgggcaagtcgccggggaagtggatcaaatcggtgcttttggggaagaaatctaccaagtcaggtcctaccaagtcgaatgaatctaaggctgacaacaacagatactcgaccggggaggaccgcacattgtctgagagttctcctgtgatttctgagccggtactagttaacatccacaagaacgtagctatcaatgggaaggctgcagatgccagtgatagggcacggcaacaagatccgcagagccaaagcgttgttgagtccagatcatcggctccagctgctcagctgggagaagatcaagctgcagcgaaggcacaggcagcctttcgtggttacctggcacgaaggtcattccgtgcattaaaaggtatcgtaagactccaggcgctgattcgagggtatcttgtaaggaggcaggctgtatcaacccttcgcgcaacatggttgattgtgaagtttcaggctctagttcgtggaagaaatgttagactctctggcagtcgcatgcagctcaatgtgaagtttggtcagagtaactttgggggtgttagatcgtctgatgcatggaaagagaagctatcttcaaatgcttatgttcggaagacatgggaacctaaggggaaggggttcgggggtttctcgacccgccttctgtcttcaccaattgttttagaacctcttcacttccagtatgacaagagggatcccaattcaacctataactggtttgagagatggaccataggttgcatctggaagcctgcttttcaacccaaaagagttgctgatgggaaaccactggtaaagaaggctagttatgcaatggaaactcaatcagccaagttaaaacgcaacattcggaagggttctgctgctatcgctgggagtttccatacatctggtgaatctgataaagtaaaaaggaatccaaagaatttctctagcttccctgctgattcagtaccagatagccagttatctgaacttgaaaaggttaaaaggaacctcaggaaggtaactgattcgatggctgaagcctcaaagatatctagttccagggttgattcctcgaaggtatgtaattctacagctgaggttccaaaggaatctaatcctgtggcagaaatctcaaagatacgtagtctcctgaatgggatctctgaccatcaggatattcaatgtgagaatacacgtgaatcttcatttcctcttggaactcaagaagactctgacaatgatcatctattgcgatattcaaatatggatagcttggacttggtacctggtttgaaaagtgatcaggaaattcagctggattcggtttctataggagaaaatgttgatgatcccactgttgttgctccagcagttgaagaaatgtcaccgcaaaacattgatacggaagacaatgttttatgcaagaaagaggaagcaaggtccaaggaagagcacttgtctaatggaagccttagaactagcaagaggaagtcttcattccccaacaaatcagaatatgtagaaaatgggactcacgctactcctgttcagccaaggcagccaagctatatggctgcaacggagtccgcaaaggcgaaattgcgagcccagaattcacccagtctggattctgattcagcggcagaaaagaatggtttcacccgacgccactctcttccttccagtacaaagagtagagcacttaaagctgaatggaagcgctga

SEQ ID NO: 113036 - DNA, 1316 bp, Zea Mays
ggacatttggagtattcttcagttcaggtccctccaattcccaccatgatctcttggccaaccatctaccatgttcttgaagaaacggttcccctgtatgtagctatgatagtggcctacctatccatacaatggtggaagctgttcacgccagagcagtgctccggtatcaacaagttcgtggcgaagttttccatccctttgctctctttccagatcctctctacaaacaatccttacagcatgaacctgaagctcatattctcagatgtcctacagaaatcgctctccttgctggggtttgcagttgcctctagggtgtgctgcgaggagaagtttgattggctgattacaggtttttctctatcaacgctgccaaataccttgattgttggaatcccattgctcaaaggaatgtatggcgatgaagctgtgaagctgctaagccagatagttgccttgcaaagcctgatttggtacacacttctgttgtttctgtttgagtttcgggctgctagaggaatggctatcacaacatcatctgaagctatagaatcaggtactccaggacctatgcagcaaggacacgaagaggggcaagcgaaaggagtctcggcaagatgttatggtgccttccacttcttactggtggtcagtaggaagctggtgacaaatcccaacatgtatgcaagcctagccggcctgatctgggctctgatcagcttcaggtggcgaatacagttaccatcgatcgtcaacaactccataagaatactttcagatggagggctagggatggcgatgttcagcttaggtgtcttcactgccctgcaaacgaaaatcgtggcatgtggaaccaaaaggatgctgctatcactaggcatcaggttcttcctcgggccaggcctgatggtgatctcttcctatctaatcggtatgcgtggaactttgctgaaggtggccataatacaggcagctctacctcaaggaatagtgccgtttgtgtttgccaaagagtataacgtgcatgcggatattctgagcactgcgataattctgggaatgatggttgcggttccggtggccctgggttattacttcgtcatggatcatcccagactctaaccatgtcccatttgcggaaaggattatcctctagattcatattgcgggcgtgcttgtgatattatatctttgtggaggctgtatatatctggattcgtgttagttgacccaagctaatgataacaaccagcttggtttcggtgaattgttcggccagtacttgattagtaaataattgatgcaaaagaagg

SEQ ID NO: 113037 - DNA, 1325 bp, Zea Mays
ggacatttggagtattcttcagttcaggtccctccaattcccaccatgatctcttggccaaccatctaccatgttcttgaagaaacggttcccctgtatgtagctatgatagtggcctacctatccatacaatggtggaagctgttcacgccagagcagtgctccggtatcaacaagttcgtggcgaagttttccatccctttgctctctttccagatcctctctacaaacaatccttacagcatgaacctgaagctcatattctcagatgtcctacagaaatcgctctccttgctggggtttgcagttgcctctagggtgtgctgcgaggagaagtttgattggctgattacaggtttttctctatcaacgctgccaaataccttgattgttggaatcccattgctcaaaggaatgtatggcgatgaagctgtgaagctgctaagccagatagttgccttgcaaagcctgatttggtacacacttctgttgtttctgtttgagtttcgggctgctagaggaatggctatcacaacatcatctgaagctatagatgaagcagaatcaggtactccaggacctatgcagcaaggacacgaagaggggcaagcgaaaggagtctcggcaagatgttatggtgccttccacttcttactggtggtcagtaggaagctggtgacaaatcccaacatgtatgcaagcctagccggcctgatctgggctctgatcagcttcaggtggcgaatacagttaccatcgatcgtcaacaactccataagaatactttcagatggagggctagggatggcgatgttcagcttaggtgtcttcactgccctgcaaacgaaaatcgtggcatgtggaaccaaaaggatgctgctatcactaggcatcaggttcttcctcgggccaggcctgatggtgatctcttcctatctaatcggtatgcgtggaactttgctgaaggtggccataatacaggcagctctacctcaaggaatagtgccgtttgtgtttgccaaagagtataacgtgcatgcggatattctgagcactgcgataattctgggaatgatggttgcggttccggtggccctgggttattacttcgtcatggatcatcccagactctaaccatgtcccatttgcggaaaggattatcctctagattcatattgcgggcgtgcttgtgatattatatctttgtggaggctgtatatatctggattcgtgttagttgacccaagctaatgataacaaccagcttggtttcggtgaattgttcggccagtacttgattagtaaataattgatgcaaaagaagg

SEQ ID NO: 113038 - DNA, 834 bp, Zea Mays
atgggtccaggactctactccgacatcggcagaaaggccagggatctcttgacagggggcttcaatacgggccagcagttggtcctcattacccactgctccaatggaacccggatagcagcttcaagcacaaagagtaacgagttcatcattagtgagatccaggcccagctgaagaataagaatgtcacagtggatgtcaaagcaaattcagaggctaatctctcaactacagtcactgttgaggaacttggtgtactaggcttgaaaaagataattaccattccttatccacatccagcatttgggaggcttgaaatccagtacttgcatgattatgctggtatcaacgccagttctaccatgaacagaaaacctttggttaacctttctgctgtatttggcaacaaagctattgctgctggtgctgatgttgtgtatgatggtgctactggggatttcactaagtacaatgctgggttgagtttcaccaatgcagatctcaatgctgctgtgaccttgaacaacaaaggggacagcctcactgcgtcctactaccacttggtggacacagagaagaacacagctgttggtgtggaggtggcccgcaacttctcaaccaaggcgaacagagtcacctttgggatgcggcatgctctggaccctaccaccactgtgaaggcgcgctacagcagcaatggaatggccagcgccctcatccagcacgagtggagacccaagtcattctgcaccctatccaccgaggtcgacgtcaacaggtttgatttcttgcagacccccaagtttgggctatcactggtcctcaagccctga

SEQ ID NO: 113039 - DNA, 691 bp, Zea Mays
gcgcttcggcgggcatctcactacagttacttgcagctggccatgcacatggcgctatcgtcccgcagctcattcgccgccgacgtcctcctcccagccaccatgtcgtatcgtcagccgtgcagcggtgcttccagctacttgggctctcagcccgcggcccctttcccgtcggcagcgttcggcgcggtggcgcagctggacgtcttcgactgcctgtcgtcggacgaaggcgttggcgtcccggcagctgtacctggtgcgttcgcgccgccgccgccgcttatgccggccgagcgcgtcgtcccggacgctgctgcaggctacagtagtcatactaggagtgcagcggctgtggcgggtgaggggtcgaggactacgcacagaattgcgttccgagtgaggtcggacgaggacgaggtactcgacgacggctacaaatggaggaagtacggaaagaagtccgtcaagaacagccctaatccgaggaactactaccggtgctcgacggagggctgcaacgtcaagaaaagggtggagcgagacagggacgacccgagatacgttgtgaccatgtacgagggagtgcacaaccatgtgagtcctggtaccgtctattacgccacccacgacgccgcctccggccgcttcttcgtcgccgggatgcatcagccaggccattgatcaacga

SEQ ID NO: 113040 - DNA, 588 bp, Zea Mays
atggcggaatcgcgcgcacacacaaactatctacgggccttcggcaacaactttgctggtcggcctctcttcggcggcgtccgggcatacgaagaacatgtagaagcccgcaaggatcgtcaccgcggccatggaccagacgacggcggccacgggcgcaggcatcaacggagcaactctgccggagaacatgaccgtcagggcggtggtgacgacccatatggccgccttcacctgcaacctccggggcgatcccgggggcgttctctcgaacgcacggagcaggtggaagagaagcacgacgcagaagaagctgacggccacaaacagtatggactgggggtcgtgtctcgagccgtagatggctattgcgctgttgagcccgagaacgaacagcgcgacggccgaggaataggagtgaccccgaatgtcggcaccatggtctatggtgtccaaattacacgtcttcgacctcgaaagttcctagttgaaggcattcaactttgcgttattgttgcctacgttgaggactcaacaagccaaagtgagtataccaatgagcttgacactattaaccctctatggtga

SEQ ID NO: 113041 - DNA, 848 bp, Zea Mays
ggtttttttagtgcattcgggtgatcgactgatcgggtcttggactcttggcttgggcagacgaccagacgctagggctgggcaaggcgccgccgcagctctggcactagagaccggccgactgcaccgccgcgccaccgccagcgtgtgccacttcgaccccgccaccgcgccacaactgcttccgtgcaagtctgcagccagccagccagccaggcgctgttcacccgcgctcgcacgatgcagctgccccatgccagcaggtccggtcccaactcgtcgccacccgtcgtcgtcgccggctcgtcgtcatcggctccggcgtctcggcaacaacaatcggaggcgcctcgcggtcgaactctcgcgccgtggccccggtttgcagcccctcgctctcttctaagcaccatggatgtggataatatttgtgatattgacaacaatgtgtctaatgaagatgagatacatggtattgggggggggggggatgttaatggcaatgacagtgaccacatggaggaggaggatcatgttcttacacctactggtagtgaggtgaatgtcagaaaaaacaaatccatagatggagacaatcgtgtggtgaaacgactactagcaaccaagtcaactagtacctctacaagcaagtttatggcatcagcatttaaagcaacaaggtcaaacaagagcacagatttagtgcctcaacctcaagtttcgaaaggtgtcctttttactttgtttgtttcattttcaagtgaatgcaaatgtatattaacatattcttttttgttatagttgcacaagatgcaagtgcgagtgcaagtgaaaatgcaagcatagct

SEQ ID NO: 113042 - DNA, 720 bp, Zea Mays
ttctattcatcaaccatcaatgcaaaatcaactaataagggtactagctcgaaggattctgtggcaagcaaaaatgttgttttgatggatgacgatgatgagaatgaggttaatcttgatgagttatatgcagcaacaaacaatgtgaagaaagtgtctgaattggatctttacatgagtgacggcctagtgaaggctaatgaaggtgatgcaccatttgatgccttatcatggtggaaggggcaagtgacaaattttcctattctttctagccttgctcgtgatgtactatcaatgcaagtgtcaactgttgcttcagagtcggcatttagctctggtggacgtgtggttgattccttccgttcgaagcttaaacctaaaattattgaagccttggtttgtactaaggattggaagcttgcttcagacaaagatttggagggtgaaataaaaactataagtgaagctatgaatgctatggaggtggacgatgaggttgcgacttgagatcttcaagcaagcatggattgcttgcactatcttatgttatttaaaaactatcctttattgtaatagtctattgtgttgaactgtcttgtgctatgttaaactcttgggtgatgtgaacttatgaacgattgtgttagactattgtatggtgtgaacttattgctatattgtgttgttgatctatggtttatgtaatgctatattgtatga

SEQ ID NO: 113043 - DNA, 4258 bp, Zea Mays
atgtcgtctcgcttccaccacggcggcggcgacgaccaccgcgtgggcgacgcgggcgacgccgccctcgcccgcgacatcgtcacgctccacaaggcgctctccctcgacccttccacccaccgccgccgcaccctaccactcccctccccatcccccgtcgtcactgagcagccgcgtaacaagccccgtctcaagccctcctcctcctcgtcgtcgtcgcgtaagctcctgccgtccacccctaactcctcctccgcttccacttcctcgtcctcgtcttccttctggaagaagtccctgactgccatttcgcacctgggccgccgccgcctcgacttcgcgttcgcgctgcatgtgcactccgtcaacggcctccccgctgcgctcgatgggtctgcggtctccgtacgcttccgccgaatgtccgtgtccgcctccacccgccccgtcgtggcggccctcggcgccgccgcgttcgaggaggcgctcacgctgcggtccccggtctacttctcccgcggcgcaaaggccgtggtcaagtacgagccccgttcctttgttgtctccgtcgccgcctccactctcgagcttggtaagcacgaggtcgacctcacccgcttgctcccgctctcgttcgacgatctcgaggacggcggcgactccggcttcgggaagtggagcagcagcttccggctgtccggccccgcccgcggcgcgcggcttaacgtaaccttctcttgctcgctcctcgcgggtggcgtcggcagcgagcagcacaaggccgtggaagtggcgggggtgcggcgcggatcgatggcgcggccggtgtcagtgcaggcaccaacgcctgtgcccgcgcggagcagggacgtgagggtgctgcacgaggtgctgcccagcttgaggtctgccaggtcgctgccttttgttggtgatgggggtcttgatgcgaggaaggaggaggtggcagcactggactgcatggaggacgggtctccggaggcaaagcactgcacatcagtagaggttaagaagggggacttggtgcgcccagatggggattgcagcacgatggagttcaatgttgttgggcatggagttgaggttgcttcatatgacccacaaaggctcaaacatgtggaaaccagcaatgaggctgatcaaaatgaggatccagggttcaaaattgacgaagaggtatcattcaagcctgtgctagtatgtggtgatgtcgctgaggatcagactgttggagtgaagactgaggtggcagtctgtgatgttgctgttcaaagggagaatgtggaagacaaacatgatggaataatcaaagccaattcactgcctacctctgctctcgaagcagaggatcagttgggagcagatgtagaactggaggacctggaatgtattttgaacgagctcttagttgctaagccggaggaatttgaatcaccagtagtagaagataagtattctaggcgattgagttgcacagctgatagttacaagtctgacagtaggaagggcagatcacgcagcatggatatttcaacagattctgttgctaatgagttcttggatatgcttgcaatagagcatatcccatttgggcaaccctcagatagtgatcccgagtcaccgagggaacgactttggaagcagtttgaaaaggaagcactagcatctgacaaagctattcttggtttggactttgatgatggaattgaaggacctatttgtgagaatgttgtggaggatttcgatctctctgcaatgatacatgaggctgagctcgagcttcagaatggaagtcaacccattgataccaaatttcgagctaagtcgctggaagacgaagaaactgaggccttaatgcgtcaatttgggctaaatgagaagtccttccaatcttctcctcctgaaagtagaagtgggtttggtagccccattaacctcccacctgagcaacccctggagctaccaccattggctgaaggtttaggtccatttattcagaccaaagatggaggatttctgcgatcaatgaacccagccctgttcaaaaatgcacaaaacagctgcagcttggttatgcaggcttcttccccgattgtactgccggcagagatgggatctgggattatggatatattgcatggtctggcatcagttggaattgagaagttatcaatgcaggcaaacaaacttatgcccctagaagatgttaatggtaaaatgatgcagcagattgcctgggaggctgctccagctctggagtctgctgaaagatatgacccgttggactatcatagcgttgatgctttggtaggagggggtggaaatgctccctccagtaagaagaagaaatgtaggtgtgctgatctttcatcatccttgggtggggagaatgcttcagaatatgtttcacttgaggaccttgcaccattagctatggaaaagattgaagccctttccattgagggtttgaggatacaatctggcatgtcagaagaagaggcaccctccaatatcagtgcaaagcctattggggaattttcatctctgcaaggaaagtgtgcagagaatacctggtcccttggtttagagggaactgcagggttgcagcttctggatgttaagcagagtggagaagaagttgatggattaatgggcttatccatcactctagatgagtggatgaggcttgattctggggtggtggacgaagaagagcaatacagtgaccggacatcaaagatacttgctgctcaccatgcaaaatccatggagttagctgctgagaatcggaatggggacagaaagaacaggagatctggtagaagatggggcctgttaggaaataactttacagttgctctcatggttcaactccgtgacccactgcgcaactacgagccagtgggcacaccaatgcttgcattaattcaagttgaaagggtttttgtacccccaaagcccaaaatctacagtactgtctcagacaaaggcaacagcgagcaggatgatgaggaacccaagaccgaaaaggttccagataaggcattggtcacggaagagaaggctgaggaattagaggatcccattccccaattcaaggttacagaagtgcatgtcgctggtttcaagagcgaacctgagaagaagaaaccatggggcaatcaaacgcagcagcagtctggctctagatggttgcttgcagctggaatgggcaagggaaacaagcatcctctgatgaaatccaaagctatagtgaagccaaccaaagaggcagctggtcaggcaggagacatcctctggagcatttcttcacgtgttcatggagccgggaccaggtggggcgagctaacaggaagcaagagtcattcacggaacccaaatatcatgcttcaaaaggacaagagatttcggtgatggcttggtggtcagtagttagcgctgggaaggacggacggttggtctatctcattagaaaggggacgtagcaattggaatgtccttggtggattgtgaaaccatgtacattgagttctcttgcataggatcagtactttttatatgctgcacagttcgtgatcggtgttccttccgaactctcgtgagaaccgtgcatagaaactgttgtttcttttgccacatttaagagcagcttctgcctctgaaggtcaccaccttgtacagatttgcagcgctgggcagaggtcagtgcggcagcgttgacgccccgtggctgtgatgattctatctacgagggtccccatgatccataaaaagcttcgttggttggacgcaagctttgtctaaggaatttgcgggtcgtgtctcgatcgacagctcatcaaaccatcattcggcacagggacaaaagaaaaaatggatggaatctgttctcgtgatagcctcccccgtctcgttctacacttctactcatgcatgccatttcgtccggctttgtcgcaagcccagctgccgagatcaaactagggctggaaacgagtcgagctcggctcggtgtggctcggtgcctgaatgagctcggctcggctcgtccattccacgagccggtgaaagaggctcggctcgcgagccatattttggtgcttttcgttgcattatttggtgaattaacattatataaatttgaaatatagaatcaccattctacattatgagtaaattaaattataacttgtaatatattcatcatcaaagactaaaaaatgagctattatcc

SEQ ID NO: 113044 - DNA, 2418 bp, Zea Mays
cgtcgccttccaccaccaccccaccagcccacccgcatccgcgtcgctgctgctgctgccaccgtcgtgcgtctccgcgccacgcgtgcgcgtacccgtggcggatcgcgctgcagcagaggcgatcggcgagcgatccaggggaggagatcgcttgtcggcgccgccgctgccgccgccgatcgagccgcgactcctcccgttcggtcccctcgcagctcccgtccgggcccgtccctcgaggcagggcggggtggctcgatcgcccgcagatgaaacatggcttcgacgttaaacattgtaataggttctcatgtatgggtggaagataaagatttgtcctgggttgatggcgaggtatcccggattgatggtaaaaaagcccatgttcgcacaaccaaggggaagacggtcattgcaaatatatcggatatccaccctaaagacacagaagcaccgcctgatggggtggatgacatgacaaggttatcatacttgcatgagcctggtgttttagataacctggctgtcagatatgcgaaaaatatcatttatacctatactggtaacattctgattgcaataaatccattccaaaggctacctaatctggttgatgcccgtactatggaaaaatacaaaggtgcaaatcttggtgacctagatcctcatgtatttgcaatagctgacgtctcttacaggcaaatgataaatgaaggaaagagtaactccattttggtcagtggtgaaagtggtgctggtaagactgaaactacgaagttgttgatgggatatcttgcatatctgggtgggcgatctggaacaggagagaggacagttgaacagcaagtattagaatctaatccagttcttgaagcctttgggaatgcgaaaactgttcggaacaacaactcaagtcgatttggtaaatttgttgaaatccaatttgacaagagcggtaagatatctggtgctgccattagaacttacttgctcgagagatctcgagtttgccaaattaatagtccagagaggaactaccattgcttttacttcctatgtgcagcaccatcagaggatctcaagaagtataagctcggggacccatcgttgtttcactatctcaaccagtcagcttgtattaaagttgatggaatcaatgatgctgaagaataccttgcaacaagaaaagcaatggatactgttggcattactgatcaagaacaggaagctatattccgggttgttgctgctgtgcttcatcttggaaacataaattttacaaaagggagagaagcagattcatccataataaaggatgacaaatctagattccatcttaatacagcaggagagctcttaatgtgtgattgtgagaagttggagaatgccttgataaagagggaaattaatacaccagaaggagtgattaccacaacagttggtccgaattctgctactattagccgggatggtttagcaaagcagatatactctcgattgtttgactggcttgtaaacagaataaatgcatcgataggacaagacccaaactctaacaaactgattggggtacttgatatatatggttttgaaagttttaaaaccaacagttttgaacaactgtgcatcaattttaccaatgaaaaactccagcaacattttaatcagaatgtcttcaaaatggaacaagaggaatacacaagggagcaaattaattggagttacatagagtttgttgacaatcaagatgtacttgacctgattgaaaggaaaccaggtggcattattgcgcttcttgatgaagcctgcatgtttccaaagtccacacacgagacattgtctcagaagctgtacgaaaagttcaagaaccacaaaagatttaccaaaccaaagctttctcgtactgcatttacaattcaacattatgctggagatgtaacatatcaatctgatcaattcctggacaagaacaaggactatgtggtagcagagcatcaggaattacttaatgcttctaagtgctcttttgtatcagggttatttccacaagcaacagaagagaacacaaaatcatcaaaatcctcaattgcaactcgctttaagatacaacttcatgaactcatggagactttgagctctacagagccacattacataagatgtataaaaccaaatagtgtccttaagcctggcatttttgagaataccaatgttctgcagcagcttcgatgttctggtgttcttgaagccattagaatcagctgtgctggttatcccacaaggaaactatttcatgattttctacatcgttttcgtgttcttgctcctgaaattttgaaagagaaaaatgatgaaaaagtctcctgtcaaaaggttttggacaaaatgggactacagggttatcagggcgagtaa

SEQ ID NO: 113045 - DNA, 3546 bp, Zea Mays
atggcgcccacactagcggctggaaggttagaagagggtgcaacaacgacagatgctctttacttagcagaaagaaaagggcatgatcaaacgaagaaatcactttctgaagctcaagaaacaaacaaggagttactaaaaaaaattgagaaagctgagaaaaacatagatcagcttctggagaatgtggaaagacttgaaaaagatgcaattacaagagagtctttactgcttacaacaaagcaaagctatggtgacaccgcaaaattgctgcttgaatctcaagagaaaaaccaagagttagtgcacaaagtagaggactcagatagcaaaattgttctgcttgaagattcagtaaaaaggtttaaccacttttcttacagactcgaagaaagtactgcagataaagattctttattggctatagaaagacatgaaaacagtgaaaccaagaaagaattagttggttctcagaaaaagattgcggaattgctaactgaagtgcaagatactcgtgcaaatgttgcagaacttgaggacttgattaggagacttgaacaagatgtcactgccaaagaggccttattgcttacagaaaaggaggcacacgacgcaacaaggaagactctgactgaagctcaggaagagagtggagaacttctgaagaaaattcatgataatgataaacatattcttcagcttcagtttactatacaaaggcttgaggaaactacagttgcaaatgagaatttgctgttgagggagagggagcagaatgacataacaacaaaagcgcacaatgaaagtcaagaaaaatatgaagaattactaagcaaatttgttgatgttgacaggaaaatcgaccttcttcaaggtaccatagaaaggcttggagaaaatacaacaaaggattctctgttgctatcagagagacatgaaaaggatgctattaagaaagcacttactgaggctcaagagaaaaatgaagagttactgatgaaagttgaagatgctaatgaaaaaatagaacaacttcaaactacgatagatatgcttgaagataatgtagctgcaaaagatgtttctttagaagctgcaatgaaggaaaatgatgcaattaggagatctcttactgaagctcaagagagaaatgatgaattactcaagaaaattagtgacagtgaatacaggatccatttacttcaagacacgatacaaaagcttcaagtagatgcaatatcaagattgtcgtcttttgtaatggaaaaacaagaaagtgatgcttcaaagagagctgttactgaagctcatgaaagaaatgaagatttactgaagagaaatgaggacctcctcaagaggaatgatgatctgattaagaaaattgaagactctagtaaaattgtcactcaacttcaggaagctctacaaaggcttgaaggaaaagcatgcaacttagaggctgagaaccaagttcttcgtcaacaagcaacttcaactccaccaacttcagctaaatctccagcttcacgtgcaaagatctcaaggatccatagaagtccagagaatggccataatttgaatggtgacattaggcaaactgaaatgaagccctccactggcacatcagaagcaataacctcagcagctaatgttcctgacttgggcgaccaaaaagattttgaacatggagaaaaactgcaaagaataccaaaacagaaatatcagccttctcatcaccagcagccccaggacgatcagcagtggctactcgcttgtattccacaacatcttggattttctgggagcaaaccagttgcagctctccttatataccaatgccttctccattggaaatcatttgaagccatgaagacaggtgtcttcgacagcattttgcatgctataaactcagccacagaggctcaaaatgacatgagaacattggcatattggttgtccaacttatctacattaacagttctccttcaacgatcattcaaaactactaggacggcaatctcaactccacaaaggagaagattttcatcggagaggatctttcatggaaatcaaacttcaaatgctgggcttgcttatctcagtggtcaatcagttgttgggtctgctggactgccccaagttgaagcaaaatatcctgctttgctattcaaacagcagctcgtggatctaattgaaaaggtttatggcatgataagtgacagcgtgaagaaggagctaaaccctttgcttgaattgtgtatacaggatccacgaacttctcactcgagtatcgcaaaaggcaatcttaatggcatgggtcaacagaaccaactcacatattggctgggcatagtgaaaattctcactagctacttggatgtactgagggtaaatcacgttccatcaattctggtgcataaactcttcactcagatattctcattgattgatgttcaactatttaaccggttacttttgcggcgtgagtgctgttcttttagtaacggggaatatgtcagagctggactaactgaactaaaacattggtccgacaatgctacaagagagtttgcaggttcagcgtgggaggcattgaggcatattagacaagctgtcgatttcctggtacgtctcccggtgcttgctcggctgggcccacaggccgattcacatcccatcgtggctccattttccaagacgcgtgcgcccgttcgacagcccgaggatatcctttccaaggtgatttcagcggcgcaaggatcacctcttttgactatgcaggcactacggggtccacaagatctctcgcatccgcctaatgagtctggttccatcaaacctgcgcctgctatatctcccgagaaacctaggcgtatctgctccgaggaaattacctcaggcttttcaacggttggagctgggcctgaggagcccaggtgtgattgctcctgtcctctaggcacaggcaactgcaaagattgggcctcccaatctggggaatgttttgaggaggcaggacacccccaggcgtcgacagttgagcaacctctcctggctgctcccattgacgtgcctactctctctgatcagcagggcattggtttgagtattgagcagatcccagaacagcacattgaagatcaggggatttatttaaatgacgatcagagtactgaacagaacccagaacaacacattgaagatcaggggctcattttatatgatgatcagagtactgaacagaattctgaacagaacattgaacaacagacatccttgatccctagtggacttaatctcttgaattcacaacctgttactactcaactcaatgtgcaggatgaccggaggctcttacaggcctaccccttggtttattctagaaggcgacgacactctagaagcccaccgccattgaccaaaactccacaagaaacccctgaagttgcagctgttaggaaactcatgaaggcttctaaggctattgaagcgctgctgcctcaaccagtcatccataagcaaaaaccaaagctccaagcaccttag

SEQ ID NO: 113046 - DNA, 643 bp, Zea Mays
tggtgtgatcttataagcttattgctttcaacctcctcaaccagaatccttgtcaatggggaacctgggttgcctattatccataaacgaggcctacaacaaggtgatccactctcccatgctcttcatccttgttatggatgctctgaactacttggtcaagtatgccacttccaaccaactgctgcaaccccttgcggtccaacatgccaggcataggatctccttttacgcagatgacgcagtaatatttttgagacccttaatgacagatctgatggttgcaaagtccatcctcaacctgtttgggcaagcttctggtttacaatgtaatttatccaagagttctgtggcccctattcaatgtttagaacctgaaagacttttaacaatggaaattctgttctgtagtgcaaaaaatttcccctgtacatatcttgggctgcctctatccatccataaaccccctaaggaggctctacaacttttggtggataaagtttcagactacttgccgggatggaaagcttctctaatgaaccggtctggtcgattaattatggtacgagcagtcttgacagcctctcctatatattctatgctagcaattgatctcccaaaatgggccattaaggctgcggac

SEQ ID NO: 113047 - DNA, 122 bp, Zea Mays
tttttttttctcgaacgcgcaggagagctgcgcatcattatattaagagaggaaaggtccaaagtggaccgaaatacaacacccagaaggcagaaaagaaaaaacaagaaaaacagaccaag

SEQ ID NO: 113048 - DNA, 753 bp, Zea Mays
tttattaggtgatttctcttaaaccaatgaggacattaagagagatacacactgatgtgtgccctgccctcagcatacaacagctagagcgaatagttagtatgtactgggatgatgtgaatggaacaaacactatttcagcagagtttacatcaagcttgaaatctgcggtgcgtgatgaatcgaatatggccacaagtttttctatattgctagatgatgattccagtatacctttttcacttgatgatattacaaagacactgccagtcattgaggtggctgatgacgactttgtgccttttgtccatgaaaacccaagctttgcgtttttattgcaaagaggggagtagtccatttttcctcaccatggtgacttcacccacctgtggataagtcaggattcctgcctaggatgtacagtacgcgtgattctttttgtaccaggtagcaaggcattaaagattagatgctaggtgagcttataggattctggttttattgatttgtgtgttgattgtccatttgtattcaggttttccttgccattttttttctgtttgtagttatttttttgggcttgtatactaggggctaagggcagaaggccctgtcctgtaagcaaagtagcacaaggttttgctgtaggtgggaaagctgtacatgtgttgtaggagggggagtagcggttatcctgctggtcagggctaagaacgacagttgttgagaaggcaacggttatgccgtttttcc

SEQ ID NO: 113049 - DNA, 160 bp, Zea Mays
atatcccgagttgtggaccaactcttaaagttgttcgccacctttataggtttgtctcgtttaagcagatctggaatcatctgttgtataaatgtgtttactagcctcctgggactagtaattgtatcacatttgagtcccaaaggattggggcgcttca

SEQ ID NO: 113050 - DNA, 1520 bp, Zea Mays
catcttgcgaccataccataacgcggcaaagtttccatatgcactgacgcgtcgaatgcaattttgcggtgaccatcttcgtttccaaaatgcaaaagaaaaaggaaatccgtcacgaaatgaataacgagacactttgctgcgtctccgactccccgtaccctcctccttcccattataaattgcgtcgcaccacaggcagtagagccccctctctcttctcatccctcgtggtcgcgtggtcctgggtgctggcctcttccaagctccaaggaacatccaaagcacatccgtgttacgagttcggagactaaacgcgattaagagtactggtagcctagttacagttggatctgagcgatgggggaggagcaggtggtggcgccaaagccggaggccgccgccgccgccgccgccacgtcggtggagctgacggggttcgttatgggcgcggaggacgccgagcgcgccgcggcggccgccggcgtagcgaccgtccaggacctgctgccgctcctggtcccgtccgcgaggaagcgcgcgcaggtcccgatctcggggttccccgtgggcgccgtggggctgggcgccagcggccgcgtctacgtcggcgtaaacctcgagttccgcggcctcccgctgtgccactccgtccacgccgagcagttcctcgtcgccaacgcggccgccgcgggggagcccgagctgcgcgccgtcgccgtctcccacatgccctgcggccactgccgccagttcctgcaggagatccgcggcgccgccagcatccgaatcctcgtgaccagcgacgccgctgagggatgcgcacccgagtggcgcacggtggcgtccctcctcctccgccccttcgggccccacgatctcctccccggagatgtgcccctcgtcctcgaggctcacgacaacgccctgggtgatcccgtcgccaatggcctcgcccgcagcgacctggacgcgcgcctgaggcaggccgcggaggcggcggcgcgggcggcgcacgcgccgtacagcaagtgtccgtcggggttcgcggtggcagacggcgacgggaggatctatgccggcggctgcctggagtccgcggcctacaacccgacgctgggtcccgtccaggcggccatcattgcgatggtggcagccggaggctgctccgccggggacgtggtcgcggcggcgctcgtggagaaggagcaggcgtcggtggcccaggaggcgacggccaggatcttcctcgacgccgtggccccacatgccagctttcacgtctacaactacaggccgtccgatgcttgatgagcttctgtggcaggaacgtgatcgagataatgtccataaaaacaattttaagaataaaatgataaaaccatgtgcagttgccagcaggactgtgatgtggggcctacttattcagcgtgattattgtcctcctattgccacttgtgctcactgtactgtactattcaaattgttatctgatttagtggttggatacgtttgactag

SEQ ID NO: 113051 - DNA, 646 bp, Zea Mays
caactgctgagattgctaagaaacaagagcaagaaaaacaaaggtaggaaaaagcttccgaagttggtcgatataggctttgtagccacagtggaagtcttagtcattctctgccaaggtaataaaaccaatcgttgttgtttcacgttgttgtcttcttgagttccagaaggtttattctttgttccttatcatgtcatgtctaaccacttttatgtaagcgtaacatgttttcattaggccttttgggcagatatcggatcacaaggaactggtacaaggcctacccagagcacaaggcatgccccatgatgttcctccacatgatgttgctgatgaagttccctctccttccaacaggagtcctcttcatgagcacatcgtttggggttctgtggtcagtgcaagcgctccctgaattgacaggcacaagagcaagcgatgatgagttacggaagaagatatataacaagttgaagacctattccatcgttactgtaacaatggtcagatttagttctccattagtatcaatacatatgttaaggtacacatgttctgatgtttgtgacatagttggaatgacatgttcatgagtatgcgacagcagctgatgaaatgcaacacaactagcaatgggcttagc

SEQ ID NO: 113052 - DNA, 1645 bp, Zea Mays
cttctcctgatcttctctcacaagttctgaccacttgtacactaagctgatcctctttctcaccgcactgcacacatggacgcgagccagggcgtcctcctgtccagctccctggtcggcggcgccaagggctccgcgtcatggccggagctgctcggctccgcgcactgggagggcctcctcgatcctctcgatctcacgctccgccgcctcatcctgctctgcggcgacctctgccaggtcacctacgattccttcaactccgacacccactccaagtactgtggcagctgccgctactccaggtccacgctcttcgcccgcacgctgttcccggccgccgccgacatcttcccggcggcgtacctctacgcaacctcccagtcgtcgttcccgggcggtatcatggtgttctcgctctcccgcgaggcgtggaacaaggagtccaactggatcggctacgtctccgtgtccacagacgccgccgcggccgccacgggccagcgcgtcatctacgtcgcgtggcgcggcaccatccggacgctggagtgggtcgacgtgctcaagccggagctcgtctcgcccgacgccatcctgccggaaggggacccggcccgcggccacgctcgcgtgatggaggggtggtacctcatctacacctccagcgacgagcggtcgcccttctccaagtacagcgcgcgggagcagctgctcgccgcggtgcgcgagctggtggcccggtacaagggcgagagcctcagcatcgtgtgcaccggccacagcctcggcgcgtcgctggccacgctgtccgcgttcgacttcgcggtgaacggcgtgtccagggtcggcggcgccgacatccccgtcacggccatcgtgttcgggagcccgcagatcgggaacccggagttcaagaagaggttcgaggagctgcccaacctgcgggcgctgcacgtcaggaacatgcccgacgtgatcccgctgtacccgagcggcctcctgggctacgcaaacgccggcgacctcctggccgtggactccaagaagtcaccgtacgtgaagcacgactccaccaacgtcggggactaccacaacctgcagggcatcctgcacacggtggcgggctggaacgggaaggacggcgagttcaagctgcaggtgcaccgcagcgtggcgctggtcaacaagtcgtccgcgttcctcactgacgacaacctcgtgccggagtcgtggtgggtggagcggaacaaggggatggtcatcggagaaaccgggctgtggcagctcgaaccgcctggcgaggagcccgtacccccgttcgtgaccgggaaggtcatcgatgacgacgaccatgtcgctgccaccaccaccactactgccacggctagtaaggagacgaagacaccggtcaaggataagaatcggctcgggactcagcttttctcggcatgctttagaggggtcaatcagtctgtcgataactgaatggttgaatgtttggaggatatttgctactgttgtatcggtttgtgttgggacctctgtcgcggttctggaagaacaacaacactgttgcgaattcctcctctccctccttgcttcggaaggaaaaaaaatagtgagtgtctttatctttcttttatta

SEQ ID NO: 113053 - DNA, 371 bp, Zea Mays
cgcgaagggcaagcgacggcggcggcacggacacaagattctgtcaagcgtcgatcccctctggtggccacgtctcaccagtacaagggtcaagtcatgcatgaagtagctcgagtctttagagaaaaaatgtcttttctatttatattatataagtttcattctaattaatgtattgaagacattttctaaattatttttatgtacttgttctgtcaaagagaggtgcatcattatatggatccatgatctcgtcatggtcatcacactagtgatgtagtcttttgcaacttattagtgtcaacagacacgagattattatgcttgttgtaataaggttgtctatatcgtaacaaaacttgcatgtctct

SEQ ID NO: 113054 - DNA, 1719 bp, Zea Mays
tgcattgtgtcgggtgtgcgacaccgacacgcgcccggcaggcaccgagccgctgtgtaacgacgagcgagaatggtggccacgaagccgcgggtcgccgtagtcggcgcaggcgtggccgggctcacagcggcgcaccggctctgcgccgcaggcggcgagaggttcgaggtgacggtcgtagaggccggcgcccgcgcgggcgggcgggtgctcacgtccgagttcgccggccaccgcgtcgagatgggcgccacgtgggtgcagggggtcgatgggagccccgtgtacgcgctcgcgcgcgacgccggcgcgctcgcctgcggcaaggaccttcccccgtacgagcgcatggacgggttccccggccgcgtgctcacggtcgccgagggcggcgaggaggtcgacgccgaccgggtggccagtccgatcgaggagctgtacaggggcatgatggaggccgcgcgcgccggcgaggccggcggcggaggtggcgtcgaggagtacctgagtcgcggcctccgagcgttccaggcggcgcgaccgggcggcggcaaggagctggaggaggtcgaggacgcgctgctcgccatgcacatcaaccgggagagggcggacacctccgccgacgacctcggcgacctcgacctcgccaccgagggcgagtaccgcgacttccccggcgagcacgtcacgatccctgccgggtactcccgcgtcgtggaccacctcgtcgcggcgctcccgccggataccgttcgcctcggcctccgcctccgccgcctcgactggagcgagacccccctgcgacttcacttcgacgatggcgcgacggcgatctccgccgaccacgtcatcctcacggtgtcgctgggcgtcctcaaggcgagccttggtaaggacgcccacgccgcgggcggcatcgccttcgacccaccgctcccgcagttcaagcgcgaggccgtcgcgaggctcggcttcggcgtcgtgaacaagatgttcatggagctggaggccgtgccagcggcgagaccggaaggcgaccgaggtggcggcggcgagcacccgctagccgcgtctgcgccaccggagttcccgttcctacacatggctttccgggggcacgtgtcggagatcccgtggtggatgcgtggcaccgagtcgatctgccccgtccacgcgggctccagcgtggcgctggcgtggttcgccgggcgggaggccgagcacctcgagtctctccccgacgacgaggtcatccgcggggtacactccacgctggactccttcctcccggccccgtcacggtggagggtgaagcggatcaagaggagcgggtgggccacggaccagctcttcctgggatcctacacctacgtgcccgtcgggtccagcggcgaggacctcgaccggatggccgagccgctgccacgccggttggacgccgacgtcgacgttgcccgcgcgccgccgccccgcgttctgttcgccggcgaggcgacgcaccggacgcactactcgacgacgcacgccgcgtacctgagcggtgtgagggaggccgagcggttgctgcagcactacgcttaggttgcagacttgcagttgcaggtgcgttcgtaattgcaccgacgagtcgaggtgacgcgtcagcgtcatatcctaggggattttgccctgtgttcttgctgtgtgctagactgctaaggtatatggatttgg

SEQ ID NO: 113055 - DNA, 506 bp, Zea Mays
gggctgattgggtatagtgatagtgattatgctggggatgttgacagcaggaagagcactactggagtggttttcttcctgaacaatagtccggttacttggacttcgatgaaacaaaaggtggtggctcaatcaacctgtgaagcagaatatatagctgctgccaatgcggcttgtcaggcattatggctgagtagggtactggccgaagtacaaggagtatcactgaaagctccaatgctaaaagtgggcaacaaatcagctattgccctcattaagaacccagtgctacatggtcagagcaagcacatagaagtgaagtatcattttgttcgggagtgtgctgagaatgggcagatcaaagtggacttcatcaggagcgaagaacagctgcgggacttcctaacgaaaccgcttgggaagaccaaatttcaagagttgcgctctaaggtcggactggtggatgtagacagattgcaccacaaggcttaggaggagattgttag

SEQ ID NO: 113056 - DNA, 684 bp, Zea Mays
ctccctttatttggtcagaaattcacttggtctagtcagcagaatcccccaaccctagtgaagcttgacagagtgttatgcacattagactgggtggagttgtttctaaattccttgcttcagagatcagcctcaaatgactcagaccattgccccctccttttgggcctgaatgacaatagtatggcaggaaggcgcaggttctattttgagtccttttggcctaagtttgatggatttctggaggctatttcattggcttggcattctgttccagctgtgcagtgtccttttgcaactttgaactctaagctgaaatctactgctcgtgggctgcaggcttggagtgctaaaaaggttgggcatatttcagcctctttagcccttgcccgtgtgctcctgcaccagtttgaaattgctcaagacagtcgtggtctatccccagctgagctatcgtttttattaagccttaagaaacactcccttgctctatcttcacttcaaaggacaattgccaggcctcgttctagaattgggtggctgcgtgagggtgatgccaatactaaattattccacatgcattcaagattccgcaagaagaagaattttgttccaaaattggtctctaattgtgctgtccttaccagccatgatgccaaagctggtctggtcaatgaattctat

SEQ ID NO: 113057 - DNA, 2574 bp, Zea Mays
ctcagtaaagtgatgtttgatgcaggttcccctcgtcctgctccacataaaagtaacagtacttctgcaccaagccatggatatcctggtagtactgcacctgcacctgtacgtttgcctccgccaaaaggaaagggagaaggaaattttgctcatgctccaaaccatcccaatcaataccattcaacgtcatattctccaggatcagctctaccacctgcgcatccacctgacattcctgcatttagaaagcccaagattttggcaccagcgcctagtcaatcgctgctacctccaccaacaaattcatactgcacgacgccctgctcagatcctctgaccaatagtcctccaggaatgacatgcctctgtgtgttgccaataaaagttgagcttcgctttggtatagcattgtacacattctttacacttgtccccgaacttgcacaagatattgcatcgggagtgttcatgaatcaaagtcaagttcgtgttatgggggcaaatgctgcacctgatgaccctgaaaagacaatagtctttattgatcttgtgccactgggaccaaaatttgacaatgcgacggcattttcagtatttgaaaggttttgtaataagcaggtcatcataaatcataatcattttggaaagtatgacgtgttgtatgttctctaccaaggccttcctccgtcaccaccggcagcaagcatgaacaatggtcttagcaatgtaaatggtccaagtttgcatccgcttgctgctgatgtgggaaattatagagaaagaaaaggcaggcacgttattataataattattctatcaagtgtgtgtgcttttattttatgtgctggagctgcactagtgctttatttcaagcttcgaaaccacatccatttaactgaagcgtcacttgtgccaacaaaacctacaggtcctgtttctgcaatggttgggaacaggctagaaagcagacctatttcggcatcaccatccttcagctcaagtttggtggcatataaaggatctgccaaaacatttaacctggttgagatggagagagctacactaggatttgatgagtccagaattattggtgagggtggttttgggcgtgtctatgaaggtattcttgaggatggagaacgggttgctatcaaggttttaaagcgggacgatcaacaaggtacccgggagtttttggctgaggtcgagatgcttagccgattgcatcataggaacttggttaagctgataggtatatgcacagaggggcatagccgatgtttggtttatgagcttgttccgaatggcagtgtggaatctcacttgcatggatcagataagggagctgctcagtttgattggaacgctaggctcaaaattgcacttggtgcagcacgcgcacttgcatatttgcatgaggattcaagtccacgtgtcatacaccgtgatttcaagtccagtaacatcttattggaacatgacttcaccccaaaggtgtcagactttggcttagcaaggacagctttgggtgagggaaacgagcatatttcaactcgtgtcatgggaacttttgggtatcttgctcctgaatatgcaatgactggccatcttctagtaaagagtgatgtttacagctacggtgttgttcttcttgagcttcttacagggaggaaaccggtagatatgttaagacctcctggacaggaaaacttagtggcatgggctggttctcttctgacaagcagggatggtctggaatcaatcatagatcattcacttgggcgcagcattccatttgacagcatcgcaaaagtagcagccattgcttctatgtgtgttcagcctgaggtggaccagcgcccattcatgggtgaagtagttcaagctctaaagctggtatgcaatgaaggcggcgagttcaatgagtcaacctttagccaagatttgcatatccaagatgtcgaggttatgagtagagcaagtacggatgtagacgttgacccaacgctatctgctgagctgttcacttcatcagcgcgttatgatgctatagatgcccctggttctttccgaagatactcaagttcaggtcctctaagagtagggagaactggactgaacaaagagaggggcctgtcaacaggcagctcaagtgaacacgttgggctacagaggtttaggattgatggagaatagtcagcctgcaagcagctcatgatgatgtgcgcatggaagaaatacacattggattattttcttccaagccagatttcatactcatcgtgaatagtatgtggaaaattgagaaaggcgtaaaaatcagtgtgccactgttcggtgctcccgtcgccttctttggaaagctcaaacaagacttcacacgaatttttgtacagttctagagatgatagatgcttttaggaaagaaggggtgtacacgagtttttcagctgtaattccccacgaaccgtattacgtttcgccgtagcatcagtgcaaatcaattaaagggcgtgcacgcagtcaccattttgagttcaatgaaaaaaaattcatcctgattgaccgcaa

SEQ ID NO: 113058 - DNA, 234 bp, Zea Mays
atggacgacctagagttcgtggagatggccggtggaggtggggatctcatctttgacgcgctctgcacggactcggacttggactcggatctaggtccctctaggaggatgacgagtagcggccccggcaacgaggggaacgaggaccgaccagccaccatagcttcgtcggcagtcccgacaagacgagacgccatgcatggtaggaccggaagatgcacgcccgctttgtaa

SEQ ID NO: 113059 - DNA, 935 bp, Zea Mays
ttatatatacgtacgtaaacatatttacatgtaacccatgttgttactaccctgatcgatgagagtgagagaaacctactatatctatattaattatttcataaactctatacttaatcatatctgatactccgcgcgcgcttgatgaagagtcatccatgcatgtatatatgcatctaccgatggaagtaaatagggtgaataattcagggaatccaacagtgggactgcatgccggcgttcgccgagaagcaggtgtcgtcgagagacgaagcgctggcagccgacgccgccgccgtcgaccccaggatggcttccatgaagtccatcaccggagccagagcaggctcgggcatgaaactgccggcgcacttgggttcaaggaacaccgggaggccggcgccttccggttgcaccgccgccgtcacgacatcggcagctgcctggttgttgcactgcctcgcgccgccgccgccgtcctccggctccggcgggtagcaggcgtccgccgccgtgcggcactgcttgacgaactccccctcgacggcggcggcgtactggagagcggccgcgccgccggggaggaagagcgtctgggagccgaagtccgccgcccacgccgccgcggggtcgacgtgcgccatggaaggagaaggctgcgtcgtcgtcacgcccactgcttgcgccgccgctgctgacgcgctgtccgccccgttcagcggcgcgcatccggcggccgcgaggtcctgtgctccggcggctcctccatccagaatgttgtagtacaggtctgcagcgagcattgcattgcagcagaagaagccgagttagagttgtgtttccgtcgcatgctcgataaatttgtgtcgtcgtcagtctgtgtttcttcaggagagaaaaaaaaaacatcggtgtcgtcggtttctctgattaac

SEQ ID NO: 113060 - DNA, 1683 bp, Zea Mays
catttgcccatttgtccgtttcgcctcgtcgtcgtgggggcagtgcacgctcttcgcaggagggagagaggcaggagaaatttcgggggtttcgcgttgcggcgtggatgggggcgtcgggcaagtggatccggacgctggtgggactccggccggcagcagagagggagagacccggcgccgtggcgaaggggcggaagtggagccggctgtggcgaagctcgtcctcgcagcgggggagcagcgcgccggcgtcggaggcgccgtccgaggcgtcgtccactgccgacatgctcagcagctctgtcgtcgcggccgtcgtgcgcgcgcagcccagggacttccgcgtcatcaggcaggagtgggcagccgtccgcattcagtccgccttccgcgcattcctggctcggagggcgttgagggcactgcggggcatcgtgcggctgcaggcattggtgcgcggccgccacgtgcgcaagcagctctccgtgacgctcaagtgcatgaacgcgctcgtcagggtccaggagcgcgcgcgggaacgccgcttccggatctccgcggacggccgccactcgcaggacatcctcgacgaccgaagcggccttgctgatcctgtcaaggaagcagaggcaggatggtgtgatagtcaaggtactgtggatgacctaagatcaaagatgcatatgaggcatgagggtgcggtaaagagagaaagagcaattgcttatgctctttcccaccagcgaagttcaagccacagtggaagacccagctcccctgctgcatctctcaggaatcatggaactggcagaagcaataaagattggagccatttggatgggtcgatggcgacgaaaccatgggagagccgcctgatggagcagacccacaccgaacactcgaacaattcacggtgttcagaaagcatcgaggagatgaacgcagccagctcaaagctctcagatgcaagctcagtcaaagtcagaagaaacaatatgacgacaagggtggcagcagctaggccgcctccttccacaatctcagcttcttcgtcagatttcgtttgcgacgccagctgctccccatcgacttcctccgtcaccccagccgcctctggcaccagtttcctaacatcagacagaaggtctgattacgggccgaactacatgaactggactaaatctgcgaaagcaaggttgaatggttctggcacagcacataggctaccgctccaaaggcaacgatcttctgatctgcaccaccgcatcagcaggatagcgctatcttcggcagatgctcaaagcaccgctggatcggaagtttcggttacttctaagaggctgaacagtctgactctgagaggtcgaggcgctagaagaagtttggacaggaagaacgatgaccagcctgttgccttgttttaaatcctactagtcatgtttattttcatgacgctatgcgcgttaggcatgttcatgctgacttgtatgtatgctctgatttcaatgcctcgttgctcattttggtaccgtccacaattctgtctgtgccaacgccgaactgttacttttgagggatccaaaccgaagtcgcgcgggatggtgataacttgtatgcaatgtacctccgtgttggtcctgctggatcagcacaacgaaactggcaattgaattcaaagtt

SEQ ID NO: 113061 - DNA, 1317 bp, Zea Mays
gctaaatggacgtaagaatttcccttcgaatgttttcacgcgtcgccaatgccaccatcacgtcacacaaaagttggaaggactcaattatgagaggaggatacagattgcggggccaatctgcaagaaacgcaccctgacatatgggctcccgtgatgccatctggggccactagagttgaccggcaaactgattacgcgattatttaacagcacgatcgcgtgaggacagaagctcagatgccgccttcatttgaagctcccaaagcccaacacctctcctagcctccttccgtcccgccgccactcccgtcatgggcgattccgcggcgggcgcgccggagccgagcaggttcggcaggatctgcgtcttctgcggcagcaaccccggcaatcgcgccgtctacggggacgcagcgctcgacctcggcaaagagctggtggcgaaggggatcgatttggtctacggcggcgggagcgtcgggctcatgggcctgatcgcgcagacggtccttggtggcggctgcagtgtcctcggagtgattccgagagcactcatgccgcttgagatatctggtgctagcgttggagaagttaaggttgtctccgacatgcacgagaggaaagctgagatggcacggcaagctgatgccttcatagctcttcctggagggtacggaacaatggaagaactgttagagatgataacgtggtcacagctcggaattcatgacaaaccagtcggtttgctgaacgttgatggctactacgacccgctgctcatgctgtttgatagaggggcaacggaaggctttatcaagctagattgcagagatataattgtttcagcgccaactgcccatgagttactgaagaagatggagcactacactcggtcgcaccaggaggtcgccccacggacgagctgggagatgtcagagctgggctatggaaaagcgtcggagtcatagcgtacgcttaccaagatgaaatcgtcgtccctggagtacgttcttcgtctagcatctagttgttactcgactgcaggcattggcattcaagcatcatctttagatctacccttttagctgtcactcatggtacgctcgattgttattgttacttcatctggtgaacaagagtataagaatttgtatatgttcttccacgtcaacggtgctggcaaaagcatattacaaacagtacttttgttcaccgtggttacaaataatacagtttgtacgatgaagggattatgtttactattgtaatgtcataacgtgtaggtaattattacgttttgctgaacaatctgaa

SEQ ID NO: 113062 - DNA, 125 bp, Zea Mays
ctcaattaaagttgatgcaatcggcatgaatgaaaaaaatagtttataaaaaatattattttcccccaattactatttgtctcatttctaatttacttgtaataaattctaagaaatcgaaaaga

SEQ ID NO: 113063 - DNA, 1434 bp, Zea Mays
tgtggcagcagttctagcatcaagacatccatacatgtgcagacatagcacaacagcacacaaacaacttcgaatacacatcaaaatttctcggtaaaatcggtgccagcatacacattgtggacgatgcacgcgaaatgtcactaatgggaacagtaaccttaaattgaggaaaggatatctctaattccagtctcccttgtttgcaaatcatcttgggactcctatcagtgaccatggcaatcatatcaaggagaatcactaccacagtaggcaaaatgagaaaccactgggattgcacaatgagacctggaaggtgtaaactcaggactgtcctgattagactgccctatagtagcacaagaccaagctcagagggcttgatgccattgcgaatacggtagttgtagaggtaatagtggagctgcccatctccaggaccaaacttgagctccttgaggaacgactcattctccatgacatcgagagcattgaacacatcgtaattcttctgcttggcaacaatcagagcatcattcatcagctgctgcaatgcagttttggtagagacgttgtaatatgagtatgcggctttgagcgttgcatagttagcattgttcagcaccgacgagggcagcgtgtaaaagctgcagaaatccgtgacctcatgcgtctcagggctctccacaaggtagctgtccacgacatcctcttgcggcagcagccagtgctccacatccacctcatcaaaatccggtgccaccacgaacctcgcaaggtaagccctcagcagccgtgtgaccgcagcaacatcccgcagttccattctgcggaacccaggggtgagcggcgcgtcaggcagcttgtatagccggaccgtgcggctcattgtcatgcgtggaccaaggcgagagaacccaacatcgataagcttcttggggttgagggatcggtgccagtagcggcaggtggtgatgggggttgggaggacgacccccgcggtgtatgcagcctgccaaatgttctcctggtggacgcggcgggtgacctcccggatgagcacgggcgccaggcgcttggatcggagcttcttgtggacgcagaggaagttgatctcggccatgcggacgacgtcgtcccgagcgcggatgcgggccgggacgcccgagatgaaggcgacgagcttcttggactccttggcgcgaacgccgatgtgccaggcccggaagaaggacggcggcttgagcgcccagcggaggaaggccggagagtagttgaagcggaacatgttctcgtcgtcctcgacgtagttgtgggcaagcagcgagtagaggtcggcgaggagcgcgtcgtcatcgaggtcgcaggtgagccactcgaaggcggcgggtagcgggtaggggtcggcgcgcacctcggagagtggcgtgggcg

SEQ ID NO: 113064 - DNA, 2476 bp, Zea Mays
catatgcggatgcggccatcaacaggaggaccatatcccacacacgcatatgatcggtgcgctgtgtgtgtcgtctccacccccgcttcttctcctcttcctcctcccgctgtccgctctcgcataagccaactcgaaccagcgaaggctagctagcgcttccgccaagcctgcaggccacgccggccggaaccgattgctctgattgattggtcaatcagtcatcaggccgcaatcgtatagctcatcagctgagcgaagacactgctgctagctgcagggcgggcgagagctcatctccaccggccggccgtcggcggctcagcgctttgcaggggcggcgcgcgcgctccggccgacggcgaagcgaagcgaattaagcggccgagaggcgggttgttgttgtcccatcgttagccatcaatcatcgtgtgattgatagggaagcgtacgtgcgtcctcccagaatccctgcgccagtcgtttcggcggttcagcttccgttcctgctggttccttccttgttgcatcggcggcggcggcgcgcggcggcgatggacgctacctttggctgctgggccggcgccggccaccatgttgacgagtacttgtcgcgccaggctgctggatgcggtcggctcgacatggtggacgaggccttcctcggggcgtgctttggccagctccagtgcgacggggcccttactactgccgccggtggcgtcgacgccggggcgtgccagctggtgagctcgaatgcgggtgccgtccaaggcggcgccggtatggacggtgacccgctcgcgttcttgagcgcggggacgggggacgtcttcgacgcgggccttctcgacgcggcgctcgcgttcaccagggagctcggcgtcggcgtcgtcggcgacggcggggccgcgtcgaacggcgccttgctctccagctacgatagcggcaccaccggcggcaacatatcctcaggggagtcaaacaactacagcggcggcggcggcggccatgacgccgaggtggtgtcaccgaccacggcgccgccgccgccgttgacgtttacccaccacgcgtcgtccaactcccaggcccagcaggcggcgcaccacgccaaaaggaaggtgaccgatgagtacccggcgacaacgacaacgacaaccgcagcaccgccaccggcgttcccgctgcccggcggcggcggcggcgcgaagcggcgtgcagcgacgagcatcagcttcggcggcggccacgtccccagctgcggcgcggccgcggccgggtacgagccggacatggaggcgatggcgcaggtgaaggagatgatctaccgcgcggcggccatgcggcccgtgaacctcgggcccgaggccgtcggcgcggcgggggcgggcgcggagaggccccggcggaagaacgtgcgcatctcgagcgacccgcagacggtggcggcgcggctgcggcgcgagcgcgtgagcgagcgcctgcgcgtgctgcagaagctggtcccggggggcagcaagatggacacggcgtccatgctcgacgaggcggccagctacctcaagttcctcaagtcccaggtccaggcgctggaaaccctaggcacgacgacggcgaccaacgccaacagcagcgcgagcgccaccaccagcaggagcagcgcggcgagcaggtcgccgcagtacaactattacggcggcggcggcaataataataatcctgccggctttcttggattcagtaacgttatttctccggctgggtatgtaaatccgggtggatcgtcgtcgaatactggcagcaacaaactgctgttttagtgactgttcttgtgtgattgttgtttgtcgtccggagcggacgatgcacatacacatgcatgcatgcatgttgctgtttcacatacggccggcgtacgtagcgatgatgatgtgatcgtctaccatgtgagtaccgagtgtacttactacatagtagtagtactctatagcacggtgtttaaggttgtagctacgcatatgtatgtgcaaattaagttgggattcggcgcactactgttgatcaagtgatcgagatgctgcagctgtactagtacaactgtagtagatagtgagtgagacacagactgcatgcagaagcagaacgagggaaaacggtgacgatgatgactgaactggcagagaaaaagaaaatgtagacagtatagtgtttcttgcaatacctaataattaatcgatgatccaaatgtagtgtagaaacagactgctagctgttaattagtattctctctattctttctttatttgtcgtgggcgaaaaatatttgagaacggatgcagtagttctttacatgttgtccgctgctaaatgcatgctgaccatcggtgctattcgcaaagccacatccttgtttacatggaagctgcacatttcgaattttccttgttgcctacacagaacacagtaggagtac

SEQ ID NO: 113065 - DNA, 1244 bp, Zea Mays
ggaggaccatatcccacacacgcatatgatcggtgcgctgtgtgtgtcgtctccacccccgcttcttctcctcttcctcctcccgctgtccgctctcgcataagccaactcgaaccagcgaaggctagctagcgcttccgccaagcctgcaggccacgccggccggaaccgattgctctgattgattggtcaatcagtcatcaggccgcaatcgtatagctcatcagctgagcgaagacactgctgctagctgcagggcgggcgagagctcatctccaccggccggccgtcggcggctcagcgctttgcaggggcggcgcgcgcgctccggccgacggcgaagcgaagcgaattaagcggccgagaggcgggttgttgttgtcccatcgttagccatcaatcatcgtgtgattgatagggaagcgtacgtgcgtcctcccagaatccctgcgccagtcgtttcggcggttcagcttccgttcctgctggttccttccttgttgcatcggcggcggcggcgcgcggcggcgatggacgctacctttggctgctgggccggcgccggccaccatgttgacgagtacttgtcgcgccaggctgctggatgcggtcggctcgacatggtggacgaggccttcctcggggcgtgctttggccagctccagtgcgacggggcccttactactgccgccggtggcgtcgacgccggggcgtgccagctggtgagctcgaatgcgggtgccgtccaaggcggcgccggtatggacggtgacccgctcgcgttcttgagcgcggggacgggggacgtcttcgacgcgggccttctcgacgcggcgctcgcgttcaccagggagctcggcgtcggcgtcgtcggcgacggcggggccgcgtcgaacggcgccttgctctccagctacgatagcggcaccaccggcggcaacatatcctcaggggagtcaaacaactacagcggcggcggcggcggccatgacgccgaggtggtgtcaccgaccacggcgccgccgccgccgttgacgtttacccaccacgcgtcgtccaactcccaggcccagcaggcggcgcaccacgccaaaaggaaggtgaccgatgagtacccggcgacaacgacaacgacaaccgcagcaccgccaccggcgttcccgctgcccggcggcggcggcggcgcgaagcggcgtgcagcgacgagcatcagcttcggcggcggccacgtccccagctgcggc

SEQ ID NO: 113066 - DNA, 1816 bp, Zea Mays
ggaggaccatatcccacacacgcatatgatcggtgcgctgtgtgtgtcgtctccacccccgcttcttctcctcttcctcctcccgctgtccgctctcgcataagccaactcgaaccagcgaaggctagctagcgcttccgccaagcctgcaggccacgccggccggaaccgattgctctgattgattggtcaatcagtcatcaggccgcaatcgtatagctcatcagctgagcgaagacactgctgctagctgcagggcgggcgagagctcatctccaccggccggccgtcggcggctcagcgctttgcaggggcggcgcgcgcgctccggccgacggcgaagcgaagcgaattaagcggccgagaggcgggttgttgttgtcccatcgttagccatcaatcatcgtgtgattgatagggaagcttcctctttcgtgcagcgtacgtgcgtcctcccagaatccctgcgccagtcgtttcggcggttcagcttccgttcctgctggttccttccttgttgcatcggcggcggcggcgcgcggcggcgatggacgctacctttggctgctgggccggcgccggccaccatgttgacgagtacttgtcgcgccaggctgctggatgcggtcggctcgacatggtggacgaggccttcctcggggcgtgctttggccagctccagtgcgacggggcccttactactgccgccggtggcgtcgacgccggggcgtgccagctggtgagctcgaatgcgggtgccgtccaaggcggcgccggtatggacggtgacccgctcgcgttcttgagcgcggggacgggggacgtcttcgacgcgggccttctcgacgcggcgctcgcgttcaccagggagctcggcgtcggcgtcgtcggcgacggcggggccgcgtcgaacggcgccttgctctccagctacgatagcggcaccaccggcggcaacatatcctcaggggagtcaaacaactacagcggcggcggcggcggccatgacgccgaggtggtgtcaccgaccacggcgccgccgccgccgttgacgtttacccaccacgcgtcgtccaactcccaggcccagcaggcggcgcaccacgccaaaaggaaggtgaccgatgagtacccggcgacaacgacaacgacaaccgcagcaccgccaccggcgttcccgctgcccggcggcggcggcggcgcgaagcggcgtgcagcgacgagcatcagcttcggcggcggccacgtccccagctgcggcgcggccgcggccgggtacgagccggacatggaggcgatggcgcaggtgaaggagatgatctaccgcgcggcggccatgcggcccgtgaacctcgggcccgaggccgtcggcgcggcgggggcgggcgcggagaggccccggcggaagaacgtgcgcatctcgagcgacccgcagacggtggcggcgcggctgcggcgcgagcgcgtgagcgagcgcctgcgcgtgctgcagaagctggtcccggggggcagcaagatggacacggcgtccatgctcgacgaggcggccagctacctcaagttcctcaagtcccaggtccaggcgctggaaaccctaggcacgacgacggcgaccaacgccaacagcagcgcgagcgccaccaccagcaggagcagcgcggcgagcaggtcgccgcagtacaactattacggcggcggcggcaataataataatcctgccggctttcttggattcagtaacgttatttctccggctgggtatgtaaatccgggtggatcgtcgtcgaatactggcagcaacaaactgctgttttag

SEQ ID NO: 113067 - DNA, 2440 bp, Zea Mays
ggaggaccatatcccacacacgcatatgatcggtgcgctgtgtgtgtcgtctccacccccgcttcttctcctcttcctcctcccgctgtccgctctcgcataagccaactcgaaccagcgaaggctagctagcgcttccgccaagcctgcaggccacgccggccggaaccgattgctctgattgattggtcaatcagtcatcaggccgcaatcgtatagctcatcagctgagcgaagacactgctgctagctgcagggcgggcgagagctcatctccaccggccggccgtcggcggctcagcgctttgcaggggcggcgcgcgcgctccggccgacggcgaagcgaagcgaattaagcggccgagaggcgggttgttgttgtcccatcgttagccatcaatcatcgtgtgattgatagggaaggtatgagcacacaacagatcctgctccataattagcacacgtacgtgatttcatgcatccgaatccaatcatcccgtccggtccgcccggccggctggaagaatttaactacttgaacagtataaaaaaaacatttgcttatcataaaattaagaagagggcctctagctcacattaagcatatatatgtatttactccagtctcattgtttggtgtggaggaagaaaaaaaagaaggcatgtatacagttgtagttatgcggttcgacacatctccttcccccgcgtccttgtccgtccatcaatgccatggccgtgtgtgactgtttcctgacgttcattccacagcccgatttggattccctctccgacgtagatggatgccgctagtgttgatttcctacgtatggccaaggattcgtctaaagctccaaaagcttcctctttcgtgcagcgtacgtgcgtcctcccagaatccctgcgccagtcgtttcggcggttcagcttccgttcctgctggttccttccttgttgcatcggcggcggcggcgcgcggcggcgatggacgctacctttggctgctgggccggcgccggccaccatgttgacgagtacttgtcgcgccaggctgctggatgcggtcggctcgacatggtggacgaggccttcctcggggcgtgctttggccagctccagtgcgacggggcccttactactgccgccggtggcgtcgacgccggggcgtgccagctggtgagctcgaatgcgggtgccgtccaaggcggcgccggtatggacggtgacccgctcgcgttcttgagcgcggggacgggggacgtcttcgacgcgggccttctcgacgcggcgctcgcgttcaccagggagctcggcgtcggcgtcgtcggcgacggcggggccgcgtcgaacggcgccttgctctccagctacgatagcggcaccaccggcggcaacatatcctcaggggagtcaaacaactacagcggcggcggcggcggccatgacgccgaggtggtgtcaccgaccacggcgccgccgccgccgttgacgtttacccaccacgcgtcgtccaactcccaggcccagcaggcggcgcaccacgccaaaaggaaggtgaccgatgagtacccggcgacaacgacaacgacaaccgcagcaccgccaccggcgttcccgctgcccggcggcggcggcggcgcgaagcggcgtgcagcgacgagcatcagcttcggcggcggccacgtccccagctgcggcgcggccgcggccgggtacgagccggacatggaggcgatggcgcaggtgaaggagatgatctaccgcgcggcggccatgcggcccgtgaacctcgggcccgaggccgtcggcgcggcgggggcgggcgcggagaggccccggcggaagaacgtgcgcatctcgagcgacccgcagacggtggcggcgcggctgcggcgcgagcgcgtgagcgagcgcctgcgcgtgctgcagaagctggtcccggggggcagcaagatggacacggcgtccatgctcgacgaggcggccagctacctcaagttcctcaagtcccaggtccaggcgctggaaaccctaggcacgacgacggcgaccaacgccaacagcagcgcgagcgccaccaccagcaggagcagcgcggcgagcaggtcgccgcagtacaactattacggcggcggcggcaataataataatcctgccggctttcttggattcagtaacgttatttctccggctgggtatgtaaatccgggtggatcgtcgtcgaatactggcagcaacaaactgctgttttagtgactgttcttgtgtgattgttgtttgtcgtccggagcggacgatgcacatacacatgcatgcatgcatgttgctgtttcacatacggccggcgtacgtagcgatgatgatgtgatcgtctaccatgtgagtaccgagtgtacttactacatagtagtagtactctatagcacggtgtttaaggttg

SEQ ID NO: 113068 - DNA, 2507 bp, Zea Mays
cacgcgtatataacccaagaggagcgcgcggacgggacgacgcccgcgccaccacaattcacaagccacccacgccccccgtgcccgtgcgcgcggcctatatatcgccccgtccgtccccgatgggcgcgcccgcgccgaggccgccgccgccgcgcgcaaccgcccgcgccctgctcgccgtctccgtcgccgtcgccgcgtggctcggcgcctccgcgggctcggacagcggcgccggcgtgctgcggcgggcgcagcgcggggagttcgcgtcgtggatggccggcgtgcggcgggccatccacgagcggcccgagctggcgttccaggagcacgagacgagcgcgctggtccggagggagctcgacgcgatgggcgtcgcgtacaggtacccggtcgccgggacgggcgtcgtcgcggccgtcggcaccggggcgccgccgttcgtcgcgctgcgcgccgacatggacgcgctcccgctgcaggaggaagtggagtgggagcacaagagcaaggaggcccggaagatgcacgcctgcggccacgacgcgcacaccgcaatgctgctcggtgccgccaggatcctccatgagcgccgcaacgacctgcagggcacagtagtcctccttttccagccgggtgaggaggtcggtattggcgcaaagaggatggtggaggcaggcgccgtggagaacgtggaggccatattcgggttccacgtcaccgtgctgctccccaccggcgtggtgggctccaggaccggcccgctgcttgccgggtgcgggttcttcgaggcggtgatcaccggggtcggcggccacgccgcctccccacacaacaccgtagaccccgtcctggcagcctccagcgtcgtgctcagcctgcagagcctcgtgtcgcgcgaggcggacccgctggactcgcaggtggtgacggtgacgaggttcctgggcggcggcgcgttcaacgtggtcccgggctccgtgacgatcggcggcacgttccggtgcttctcggccgagggcttcctgcggctgaagcggcggatcgaggaggtggtcgtggcgcagtccgcggtgcaccggtgcgcggcgtccgtggacttcagcgccggtgggagcccgctgctgcccccgaccgtgaacgccgcgccgctgcacgcgcacttcgaggccgtcgccgccgacacggtcggcgtgggcgccgtccgtggcgccatggagccctgcatgggcagcgaggacttcgcgtccttctcggcggccgtccccgcctcgcacttctacttcgtcggcatagggaacgaggcgatcggggccgtgcacgccgcgcactcgccgcacttcctcgtcgacgatggtgcgctcccgtacggcgccgcgatgcacgccaacctcgccatcgagtacttgcggaaccacgcgatagccaataggtccgttggtccccacgacgagctttagttagatctactgcagccagcctttcgcgagcagccacagcggtggcggcggcgccggcgccggcttcacgctcatagctcgtgcccagcgaagctcaagacgagctcatgcttgcgatcgtcaagcaatcacgtcgtgatccgatcattttgtggctcagggagggcgttgtaggaatgcagtgcgactgatgttgttgttcaatgcgcggggcgtaattaagctggttgagagataagaatgagatgttgcctttacaatacaggcgctcctgtccgagctctgttccacaattagtttgggaaatgaaagatgagaccgtggactccaatgtttcacatcctgcttttttttttataaagcaccgaaaattttaaaattagaagtactgattccgttctcgaatattgtcgcgtgctatataaaaaaaagaacggaagaagtaggttggaaggaaggagtaggttggaagggacatcttttgtatagttcatcagagaagaaacattacacaagaaattccagagaaaaaatcattaatatgcataatggttggaagggacgtgactctgattctgaaacaaatacctactgcggctgaggaactgccgatatagaatatctgaatcggtaaagatacatcatcataattcatacatgcgatgcagctagcgtaggaagaaacatgctaggactagtactagtacatacaaagtaggaacgggacaaactcgccgtggcctggagcactcagtggcgcaggctgccgaagaggagcgccacggcggggcagaggacggcggcgacgacggaggacgagacggcggcggccccagacgtggggctgggcgcgggcgcgtcggcggccatcgcgacccccgcgagggcggacgcggcgagcgcggcggcggcgacggcgcggaaggccttggatgccatttccttacggtacagtttgcaggcttgtaccgtgcaccgtagaaagggagatgccgaggagggatctgggattctgggttgtactggtgcagtggtgtttgt

SEQ ID NO: 113069 - DNA, 2822 bp, Zea Mays
aaactcactcgtgggtcctatcgggtcagatacccgaaatacatcgggtcgggtatgggtaaaatgctttatccacgggtatccagtggatacccgaagtatcaatatacctctttaaatgtgctacatccactaaaaatgtgctacattcactagaaaaactcactcgcatgtgttgttgattaatgaatattaatttgtgttgtgttaacagtcaactgtaatgtaatcgagactaatgagtcattgacaatgttataactgtcaactatcatgaactcattaagcttttattctctgtactcaaatttaaatttattagatgtgataattatgagtcgagatattgtatcgacgtgtagccaaatatagtcattctcgtgttgcattggtgcttagatgtaaactaaaatattttatgcatttattataacactgatcgaatgttatttagtctacactaacatatccactggatacctgatacccggtggatacccgatgggcatggatactggtacagttttctcgcctgattgacttggtgggtatggatatttgtagaagtctcgggtacaatttcggatcgaatattattatacccgaataaaacccgacccgctgtcatccctagagaagagagggcaatcccattagaaacatagctttgttgctgctagcgttggaatagtaattgtttataagcatatatccagttatccagagaagttttcctttgcgattctagctgtgctagcgttgttcgttgttcttactctggcagctagctcagcgcctcagcccatatatagatttgctcaagaaaagaaaagaaaacgagagacgttctcacgttgttctggcttcaagttttgtagtttcgttgtttctgcaatttcaccaaaggtttgatttttttccccattcagggcacagtagtcctccttttccagccgggtgaggaggtcggtattggcgcaaagaggatggtggaggcaggcgccgtggagaacgtggaggccatattcgggttccacgtcaccgtgctgctccccaccggcgtggtgggctccaggaccggcccgctgcttgccgggtgcgggttcttcgaggcggtgatcaccggggtcggcggccacgccgcctccccacacaacaccgtagaccccgtcctggcagcctccagcgtcgtgctcagcctgcagagcctcgtgtcgcgcgaggcggacccgctggactcgcaggtggtgacggtgacgaggttcctgggcggcggcgcgttcaacgtggtcccgggctccgtgacgatcggcggcacgttccggtgcttctcggccgagggcttcctgcggctgaagcggcggatcgaggaggtggtcgtggcgcagtccgcggtgcaccggtgcgcggcgtccgtggacttcagcgccggtgggagcccgctgctgcccccgaccgtgaacgccgcgccgctgcacgcgcacttcgaggccgtcgccgccgacacggtcggcgtgggcgccgtccgtggcgccatggagccctgcatgggcagcgaggacttcgcgtccttctcggcggccgtccccgcctcgcacttctacttcgtcggcatagggaacgaggcgatcggggccgtgcacgccgcgcactcgccgcacttcctcgtcgacgatggtgcgctcccgtacggcgccgcgatgcacgccaacctcgccatcgagtacttgcggaaccacgcgatagccaataggtccgttggtccccacgacgagctttagttagatctactgcagccagcctttcgcgagcagccacagcggtggcggcggcgccggcgccggcttcacgctcatagctcgtgcccagcgaagctcaagacgagctcatgcttgcgatcgtcaagcaatcacgtcgtgatccgatcattttgtggctcagggagggcgttgtaggaatgcagtgcgactgatgttgttgttcaatgcgcggggcgtaattaagctggttgagagataagaatgagatgttgcctttacaatacaggcgctcctgtccgagctctgttccacaattagtttgggaaatgaaagatgagaccgtggactccaatgtttcacatcctgcttttttttttataaagcaccgaaaattttaaaattagaagtactgattccgttctcgaatattgtcgcgtgctatataaaaaaaagaacggaagaagtaggttggaaggaaggagtaggttggaagggacatcttttgtatagttcatcagagaagaaacattacacaagaaattccagagaaaaaatcattaatatgcataatggttggaagggacgtgactctgattctgaaacaaatacctactgcggctgaggaactgccgatatagaatatctgaatcggtaaagatacatcatcataattcatacatgcgatgcagctagcgtaggaagaaacatgctaggactagtactagtacatacaaagtaggaacgggacaaactcgccgtggcctggagcactcagtggcgcaggctgccgaagaggagcgccacggcggggcagaggacggcggcgacgacggaggacgagacggcggcggccccagacgtggggctgggcgcgggcgcgtcggcggccatcgcgacccccgcgagggcggacgcggcgagcgcggcggcggcgacggcgcggaaggccttggatgccatttccttacggtacagtttgcaggcttgtaccgtgcaccgtagaaagggagatgccgaggagggatctgggattctgggttgtactggtgcagtggtgtttgt

SEQ ID NO: 113070 - DNA, 2489 bp, Zea Mays
ctctcctccgcccccgcctcgtcctccgaccctccgccattcccaaagcacgctccgctttccttttgtttactctcccgcatcctcctctcgtttccctttccgcccatgcggatccgtctcctcgcatccgccgccgtcgcccacctcccccgcgcccgaatctgacccgggcggagttagggatgggggcagaaggggagggggcagtggaggaggccacggggttcgaggtgtgcatcgtgctgcccaagctctcccgcgccgccgcgacggggcccaccgaggactgcgtggcgcggctggtgcgagagctcgagggtgccggcctgctcgtcgagcgcgtccgcggcgtccccgctgagttcatcaagctggctgcaccaatggggaccctggggagagctgctgctgatatgcagatgaaaaagctaacctacatcggaatggagcttcaatttcaatgggaccaggtcgcagcattcgttaggcagccagatggttctctgtttagctggagagagcggtattgctgcttccgctacttgatatatggcattgtgaacaagacaaactctgaaatagctattaaatttgatggtaaggagttccattggaagcaaagtgagtccttattgacaatgctggaagctgaaggagttgtaaagcgaatattccctttgcatgatgaaattaagaggaagcaactcctgagaaattgggcacttaattggcttgacttcacatggcaacctattgatgagatttactcctactttggaacaaagattgcaacatactttgcgttcctaggaatgtatacacgatggcttttcttcccagctgtttttggattgacaactcaactaatagattttgggtcattgcagtggttggttcttcctgctttctttatctttgttatttcttgggccgtcttctttctgcaattttggaaaaggaagaattcagcacttcttgcaagatggggtattaattgttcactatctgaatacaaaaatctgggcatcgaactcagttccttgagtgattctcttactgttgaggaaaagaagttttgtgatgtatctgctgagaaaagcaagttacaaaggaacgaatggtttggtgttctccttagaataaggaacaatgctatcattgtgctggctatcatctgtcttcagttgccatttgagttggcctatgctcatctatatgagattacagaaactgaggctatgaagtatttgttgactgcagtatatcttgttgcaattcaatattacaccagaattggtggcaaggtgtctgtcaatttgataaagtatgaaaacaaccaaggagaagaatcgagttccgctagtttagtttataaggtctttggtctttactttatgcagtcatatattgggttattttaccatgcttcattgtatcgtgatatactggccctccgccaagtcctcatccagcgtctcattgtgtcccaggtattggaaaatctgattgagaattccattccttaccttaagtacagctacaaaaagtacatagctgttcacaagaaaaagcatgagaaagaatcaccagtgggtaggtcagtgcggttatcaacaagagtggagaaagagtatttaaaaccctcttatactgcgagcattggagcagaacttgaagacggtttatttgatgactttctggagctggctcttcagtttggcatgatcatgatgtttgcctgtgcatttccattgatattctgctttgcagctctgaacaatgttactgaaatcagagcagatgcattaaagttgctagtcatgttgaaaagacctgagccgcgtgctgcagctacaattggagcatggttgaacatattccagttcttggttgtgatggcaatatgcaccaactgcttgcttctcgtttgtctgtatgacgaggaggggaaatggaggattgagccaggactagcagcaatcctcataatggagcatgctctcctcttaatcaagtttggtttctcacactttgtgcctgaggagcctgcgtgggtgaaagcaaatcgtgtgcgatatgtagctcaggcacaaaacgtctgctccaaacaacttttgaggagcatttcaaaatttgacggaaaactggattgagaaacatcatgcacagtttagcggttatcgctggttttgtagtttaggtagagcggttttgtatagtacaaagatgtacaaatctaggggtgtaatatcttgatgcatatgaccgttaagtgtagatattaggtgatcgccacctatcttaccagcaaatggtgaagaatgcccacaagtgtaagtcagtttttcccctctttcattttaatggtctgttgaattgaacggaaactcacatgctgcaccatgtaggaggtgtttgtaatgtgctgtgggtgatttcgaagagtaagatggcaccctagccaacagatatcaattagatatcaa

SEQ ID NO: 113071 - DNA, 2430 bp, Zea Mays
tactctcccgcatcctcctctcgtttccctttccgcccatgcggatccgtctcctcgcatccgccgccgtcgcccacctcccccgcgcccgaatctgacccgggcggagttagggatgggggcagaaggggagggggcagtggaggaggccacggggttcgaggtgtgcatcgtgctgcccaagctctcccgcgccgccgcgacggggcccaccgaggactgcgtggcgcggctggtgcgagagctcgagggtgccggcctgctcgtcgagcgcgtccgcggcgtccccgctgagttcatcaagctggctgcaccaatggggaccctggggagagctgctgctgatatgcagatgaaaaagctaacctacatcggaatggagcttcaatttcaatgggaccaggtcgcagcattcgttaggcagccagatggttctctgtttagctggagagagcggtattgctgcttccgctacttgatatatggcattgtgaacaagacaaactctgaaatagctattaaatttgatggtaaggagttccattggaagcaaagtgagtccttattgacaatgctggaagctgaaggagttgtaaagcgaatattccctttgcatgatgaaattaagaggaagcaactcctgagaaattgggcacttaattggcttgacttcacatggcaacctattgatgagatttactcctactttggaacaaagattgcaacatactttgcgttcctaggaatgtatacacgatggcttttcttcccagctgtttttggattgacaactcaactaatagattttgggtcattgcagtggttggttcttcctgctttctttatctttgttatttcttgggccgtcttctttctgcaattttggaaaaggaagaattcagcacttcttgcaagatggggtattaattgttcactatctgaatacaaaaatctgggcatcgaactcagttccttgagtgattctcttactgttgaggaaaagaagttttgtgatgtatctgctgagaaaagcaagttacaaaggaacgaatggtttggtgttctccttagaataaggaacaatgctatcattgtgctggctatcatctgtcttcagttgccatttgagttggcctatgctcatctatatgagattacagaaactgaggctatgaagtatttgttgactgcagtatatcttgttgcaattcaatattacaccagaattggtggcaaggtgtctgtcaatttgataaagtatgaaaacaaccaaggagaagaatcgagttccgctagtttagtttataaggtctttggtctttactttatgcagtcatatattgggttattttaccatgcttcattgtatcgtgatatactggccctccgccaagtcctcatccagcgtctcattgtgtcccaggtattggaaaatctgattgagaattccattccttaccttaagtacagctacaaaaagtacatagctgttcacaagaaaaagcatgagaaagaatcaccagtgggtaggtcagtgcggttatcaacaagagtggagaaagagtatttaaaaccctcttatactgcgagcattggagcagaacttgaagacggtttatttgatgactttctggagctggctcttcagtttggcatgatcatgatgtttgcctgtgcatttccattgatattctgctttgcagctctgaacaatgttactgaaatcagagcagatgcattaaagttgctagtcatgttgaaaagacctgagccgcgtgctgcagctacaattggagcatggttgaacatattccagtttgttttcagttcttggttgtgatggcaatatgcaccaactgcttgcttctcgtttgtctgtatgacgaggaggggaaatggaggattgagccaggactagcagcaatcctcataatggagcatgctctcctcttaatcaagtttggtttctcacactttgtgcctgaggagcctgcgtgggtgaaagcaaatcgtgtgcgatatgtagctcaggcacaaaacgtctgctccaaacaacttttgaggagcatttcaaaatttgacggaaaactggattgagaaacatcatgcacagtttagcggttatcgctggttttgtagtttaggtagagcggttttgtatagtacaaagatgtacaaatctaggggtgtaatatcttgatgcatatgaccgttaagtgtagatattaggtgatcgccacctatcttaccagcaaatggtgaagaatgcccacaagtgtaagtcagtttttcccctctttcattttaatggtctgttgaattgaacggaaactcacatgctgcaccatgtaggaggtgtttgtaatgtgctgtgggtgatttcgaagagtaagatggcaccctagccaacagatatcaattagatatcaa

SEQ ID NO: 113072 - DNA, 811 bp, Zea Mays
gcagagtccaggtgcgtcagccaggagtcaggactctcaactccggcgaagggagcagaaccgtttgtggcagttgggcggcgtcggcatggacgaggctacgaagaaggtggaggctacggtgctggagatcccgcgagggtctgatatggagtccgtaacggagaacaaggaggaggcgaaggcggcggaggagggcgacgctggcagggagagcaaggacaaggaacggaaggaagatgaggaggaggatgaaggtaagggtggcgggaagagagagtacggcgaccaaggggaccttatcctgtgccgcctgtcgagcaagaggagggtgactctgtcggagttcaagggcaggtcgctggtgtccatccgagagttctacgtgaaggacggcaaggagatgccctccgccaaaggtattagtatgacaatggagcagtgggaagcattttgcaatgctgcacctgcgatagaggatgccatcaaaaagcttgaagattcagactgagaacttgttttaggagcctcttcttttggcagggagctggacgtgatgcacaatatatatatcgctgtagcaaggctgtctgaattacaaacgactttggtgatgttccagcggccgcacatgggctttatggggtgtatggctcctcggctctacgttttttagccatgttctacgaagctctactccataaaaaagtcaggtcacctgacagctccacgcaattctataacataaaaaaaaaaggtgagatcacctaataactccaaacaacttcattccgtacaaaaaaaagtaaaa

SEQ ID NO: 113073 - DNA, 1266 bp, Zea Mays
tgggaccgtcagagactcggctacctctcctgcaaaatggctatggcagtggcttccttcgtcgccgcttcgcaccaccacggcagtcacctggccgccggcgtccccttctccgcgcgagtaggcaggagcttaggccgcagtggcgtcaccatctacatgagagcccagaagaagcgcaatagtgaatctgggagcagtagcggaggtggggacgtgcgggccagcagcgggcggcgagtgtggcgtcgtcggaaactgaccaaagaggatgacatgttgcgttacaagttggatcgtatcccttttctagaggagaaggtgagaaaagtaagggagaatgggaagatcatatgcctggacattaatcagctgatgttatctcaagagaatagatttgcattcaccatggaggtggctgaagaagctaatgtctatcttgagaagaacaggcatgaatatgggctgaagaagcctatactgcatgttctcagtgaccgcatgaatgaagctgggttttctcggcctgagggttacctttatccttatcctattaagcctggtccttatttcattaaagaggaaggaaattgagtaaaatcacgtgctacttgtaacaggattatcattttcaacaactatagtttggcctgcatccagacaaaagaacatattcaggtatggtattaatggtctagcaattaatatattgcacagaagcaagagcgaatcccatacctgcagatacattgaagagaagaattaaaaggatgatgccaagtgcaaaagtgtctttaggcatattttgttctcttcgactggtatgttattgccttaggaggattcatggggacgagctatcacacttctgccccttttatacatgggtgctggctgagacagctaaagatgaaataagttgtgacattatgtatggtctactagtaataattcctgtacagggttatgatgaaacacgtcacccaacagcacaaggtcaactacattcggcacttggcagaagctactttagaagtcgtactgcctttctagtaactaaggccaaagtaaactaaaacctatcatgttttagtagttgatacaatgccttttgtattatacttttctgatctgtgccagattatgtaatggcaccttagtcttggaatgctacatagcatgaggtgtgcttgtagttctttggtcatgtatgcattaacttatatggatctctattattttttgagcattaaagcatttttctgt

SEQ ID NO: 113074 - DNA, 119 bp, Zea Mays
gagtatagtggattgagggaacataatggaaatagagggaagtgcaagtgcaatagtacccccacaataatgccctatcaccttaataaaaaaaggcttgtccatcaaagaaaaaaata

SEQ ID NO: 113075 - DNA, 1125 bp, Zea Mays
acacagacaacaacgagttaacgaaagccttttatccaagctcagggaagggaagctcacagtttcgttggatccaatcttttatccaagctcagcgatggcttctcgtcagcagcatcctactagctaccacgccggcgagaccaaggcccgtgccgaggagaagacgggtcaagtgatgggggcgacgcaggagaaagggagggaggccaagcacaaggcgtccgacgcctccgaccgcgccatgggaatgggccacgacgccatggaggcgaccagggagaaggcgcgcgccgccgcggaccgaaccatggggatgggccacgacgccggggaggcggccaaggacagggcgtaccgggccaaggacgcggcctccggtgccgctggccgcgccagggacactgcgtccgacgcggccggcgctgccggggaccgcgcccgcgacggcgcgcagcagaccgggagctacgtcgcgcagacggccgaggccgccaggcagaaggcggccggcgccgcgctgtacgccaaggacaccgtggtggccggcaaggacaagaccggcgccctcctgcagcaggtgagatgcacggtgatgcctagtcattgttagcttctctcccgtctttgctactgcgaaaatgggttattcgatctcaaaatacattcgttcttcggctgttcaggcaggggagaaggtgatgagcacggccgtgggggccaaggacacggttgtcagcacggccgtgggggccaaggacacggttgtcagcaccgccgtgggagccaaggacgcgatgatgaactcgctcggcatggccggcgaggacaaggacggcaccaccaccaccgacgccggcaaggacaccagcacccgcaagcctggcagggactattagaggacacggcagccaaacttctcagtgtttctgttccagaagtttctgatcccatcatttaggttcaaaagtttctcatttcatttcaaactttcagtgtttggtgcatgctgtaaactctcttcaggacgggtcgtttgacatttgtgtcgactgaagcctccgcgctttcgactcaacgatgtatatgtaataataaagtcgcaaagctgttgttttattttca

SEQ ID NO: 113076 - DNA, 1019 bp, Zea Mays
acacagacaacaacgagttaacgaaagccttttatccaagctcagggaagggaagctcacagtttcgttggatccaatcttttatccaagctcagcgatggcttctcgtcagcagcatcctactagctaccacgccggcgagaccaaggcccgtgccgaggagaagacgggtcaagtgatgggggcgacgcaggagaaagggagggaggccaagcacaaggcgtccgacgcctccgaccgcgccatgggaatgggccacgacgccatggaggcgaccagggagaaggcgcgcgccgccgcggaccgaaccatggggatgggccacgacgccggggaggcggccaaggacagggcgtaccgggccaaggacgcggcctccggtgccgctggccgcgccagggacactgcgtccgacgcggccggcgctgccggggaccgcgcccgcgacggcgcgcagcagaccgggagctacgtcgcgcagacggccgaggccgccaggcagaaggcggccggcgccgcgctgtacgccaaggacaccgtggtggccggcaaggacaagaccggcgccctcctgcagcaggcaggggagaaggtgatgagcacggccgtgggggccaaggacacggttgtcagcacggccgtgggggccaaggacacggttgtcagcaccgccgtgggagccaaggacgcgatgatgaactcgctcggcatggccggcgaggacaaggacggcaccaccaccaccgacgccggcaaggacaccagcacccgcaagcctggcagggactattagaggacacggcagccaaacttctcagtgtttctgttccagaagtttctgatcccatcatttaggttcaaaagtttctcatttcatttcaaactttcagtgtttggtgcatgctgtaaactctcttcaggacgggtcgtttgacatttgtgtcgactgaagcctccgcgctttcgactcaacgatgtatatgtaataataaagtcgcaaagctgttgttttattttca

SEQ ID NO: 113077 - DNA, 98 bp, Zea Mays
tttacagtacatgtgtttggactttggacactgggttccaatgacattatgagattccaagttcacacaacaggagttgccagcttgcaagccgattc

SEQ ID NO: 113078 - DNA, 306 bp, Zea Mays
ccagagaggagagagcgtacatacatggccggcctgcagcggtcgagcgagacgttccggcggtccgggtcgtcggggacggtgtgggaggacaagcaccagtcgggcgagctcgccaagccggcccggtcgcggcagcagcggagcggctccagccgcgggtacagggccagccacgtgcagccggcgctggacccgccgtccccgcgcgtcgccgcctgcggcttctgcagcctcttcggcaaggacaagcatcatcagccgccccgcggcaagggccggcgccgctgacgagttcggccggcc

SEQ ID NO: 113079 - DNA, 2558 bp, Zea Mays
aacaaagctggtagtgacacgcggacaagggaggtaacgctcttaaattatatgcttgtacgtagcatacaagctgcgtgcctacaaataaaactcataggcgaccacaccggcgcgtacgtgcacagcatggcgcatcaacatcaccaccagcacaatggccggcacggcggcggtcaccgcctggagacggtgatcgacatggcgcagcagcagccggagaagccagcaggcgtggggcggttcggcttcacgggcggtctggagttcaccggcctcacgtacacggtcgtgaagaagcagcgcggcgccggcggggagtgggagaagaaggacgtggacctgctgcacgagatcaccgggtacgctcccaaggggtgcgtcacggccgtcatgggccccagcggcgccggcaagtccacgttcctggacgcgctcgccgggcgcatcgccagcctcgacggccgcgtggcgctggacggcgtcgagatgagccccagcctcatcaagcgctcatcggcctacgtcatgcaggacgaccgcctgttccccatgctcaccgtctacgagacgctcatgttcgccgccgacttccggctcggttcctccgtctccgcctctgacaagaagctccgcgtcgagaacctcatcgagcagctcggcctcacctcctcgagaaacacgtacatcggagatgagggcacgaggggggtgtccggcggcgagcgccggcgcgtctcgatcggcgtggacatcatccacgggccggcgcttctgttcctggacgagccgacgtcggggctggactcgacgagcgcgcacagcgtgatcgagaaggtgcacgacatcgcgtgcgccggtagcaccgtggtgctcaccatccaccagccgtcctcgcgcatcctgctgctgctggaccacctcatcatcctggcgcgcgggcagctcatgtacagcggtgggcccaaggaggtgaccgcgcaccttggccgcatggggcgcaaggtgcccaagggggagagctccatcgagcacctcctggacgtcatccaggagtacgagcagtcggagttcggcgtgaaggcgctggccgagttctgcctcaccggcctgaagccgcccaagctcaccgccacctacggggccgaggggctgtccaccgtgtccagcatcgtccagacgccaatctcgggtcccggcggcggcgacgacgacgacttcgatcgcagcctgaggagccagcactccaagtctccgtggagcggcgtgcgcctgacgccgtcccggcgccccaggcacaaggaccagcaacacgggaggccaggccccggccccggccccggcaaccacaggtacacgccggacatcgtgatgggaacgccgacgccgctgagcagcgcgtacacggtgaacgaggacgactacctgacgccgacgcaccgcgcggccccgaacgcgacgggcgcccccggggtgggcgtcaacgcgctggggcacaggggcaagttcgccaactcgtacgtcggggaggtgtgggtgctgatgcggcgcaacttcaccaacatctggcgcacgccggagctgttcctgtcgcggctgatggtgctgacggtgatggggttcctgatggccaccatgttcaccaagcccaaggacaacgcgcagggcatcaccaaccgcctcagcttcttcatcttcaccgtctgcgtcttcttcttctcctccaacgacgccgtgccggccttcatccaggagcgcttcatcttcatcagggagacgtcgcacaacgcgtaccgcgcctccgcctacgtcgtcgcggggctcatcacctacctccccttcctcctgctccagtcggccacctacgccgccatcgtctggttcgcgctcaagctccacggccagttcctctacttcctcgtcatgctctacgcgtcgctgctgtccaccaactccttcgtcgtcttcatcagctccgtcgtgccaaacttcatccttggctacgctgcggtgatcgcgttcacggcgctcttcttcctcttctgcggctacttcctggacagccacagcatcccggtggcgtggaagtggatgaacaccgtctcgacgatgaagtacccgtacgagggcctgctgatgaacgagttcgacggggaccgggtgttcgcctcggaccccgccgtcgggctgaccctgaccggcaacaacatcctgcagcagctgggcatcagcgtggaggaggaccgcaagtggtggatggtgctctacctcctcggctgggccgtcttctaccgcgtcctcttctacctcgtcctccgcttcgcctccaagaacaagaggaagtagcgtgtgtcttcgttaattaattaattgttgtttcagccctcgattggtgcgtatggtatgtgtagggcctggatgtacgaggagagaaggtgtatttttatttcttgaagcgacaaggcagcaaggcgccggccggaaagccgggttgatttgattatatatgtatgccacgattgattcccaatgttaactactataccccggtcctcccc

SEQ ID NO: 113080 - DNA, 1609 bp, Zea Mays
acagcaacacagcccacttgtgagctgtctcctagcgaatccttgcgggggaaaggaatgggcgtcagcgctcgagctcaccatccgaagcaccggtgccaccaggagacgtgcgtgcccgacggcgcgtcgctcgcggcgatgtacctctacggcgacgtgctcgagtccgtggtggagcgggtgccggtggccgacctcgccgccgcggcgcgggtctcgcgggagtggctccgcgcggtgcgcgccgcgctgcgccgccgcccgctgcggctgccctggctcgtcgtgcacctccagggccgcgggggcctccggtgcgccgcggcgtacgacccgtgctcgggcgcctggctcgccgtgccggcgccgcgccacgccacgccgtcgcacgtccgcctcctgcgcggcgcgcgcggggaccgcgtctgcgcgctctcgctctcggggctcgccgtcgcggccgatccgctcggcacggccggatgcgtcgcgttggatgcccccggcgtgtggcgcatcgacccggtgttggccgcggtgggcgaccgcgtcgtcgcgctcggcggcgcgtgccggctggcgctggccgagggcggcaacgccgccgcggtcgaggtccacgaggatggcgggtggaccgcctgcgatccgatgccggacgcgctcagggactcagccgccgcgacgtggctctccacggccgccacggaccagcgggtgtacctcgtggagaggaccaccgggtgggcgagctggttcgacccggcgaaccggcggtggggccccacccgtcgtctcggccccgacgccgccgttaccacgtggggcgtcgcgcccggccgcgccggcgccgaggaccgcctccttctgttcggggctaagcgggcagacaaggaggcagagtgcacggtcgtcgtccaggcatgggaggtggacggcgacactctggaacagagcccctccgcatccagcgatgcgatgccgccggagctgtccgagaggctgtttcgtcgtgacgacactgatgacgacgacgacgaagaggaactggacgacatgacgttgtcgatcggggtgtgcggcaacgccgcgggcgggtacgtgtacaatgcggccgagccggcgaacggcgcggtgctctacgagctgtgggaggaggggaacgccatcgccgtggcccggtgggactgggtgccctgcgcaccagctgtgcaggcccagccgctgggccgtgccatcctgggctgctcgccggtggggctggatgagctggcgttggccgttgctgcaaggggcccacgctgaactcacggcggcgacacaccaaatcaagtggagcaaccgctgtttgccacttgcaagtcaagtcgtgaaagacaaaaagatattcttgtatggtgtgccactcttgctgtttggttagctttaatccgaaacgtttctattccagtagcattttatctttataaattacagcttcagcggtcgcaacagctagattttgtaaatcatcatttgatagcgaggaccgctctttcctcaaagttgcatcgtttgcgtgtacaaatgtcaatgggtgggtctccccgcaaggaatttttgacga

SEQ ID NO: 113081 - DNA, 1324 bp, Zea Mays
atccacaccttcagggcgccgttcttggtactatagcaactatataggagtagtgtttgggtttcactttgatctcttgtgttctttctcgcagcgtgtccgggtggtgttgtgctttcttgcagtgagcctgctctgtttttaccaatggtttctttgttcatgtggtggttttgagctccatttttcttcttcttcttcttctctctccctgggactgttgtttttttggtgtggtgcaaaaacttccaatccggctgcgacgaatctcgtctgggcagcccggccaccttttgcacataaggatgggctacgtgtgttgaacattagtggcgaagcgcccgattcactctgcttgggggcctggagttccatctgccttccagtcctctcagtgaagcgggcgcacatcagttggtttttctttaccccccctcgcctccccttttgttttcctgcgatggcttctgttttcgtgttcaaacagaaggtcgtcgtctcttggatctgcttgagttttgtcatggtttatgtggcctgcgcaatgcaaagggtctggaactaaaaggttttctgtggcgaaattgatgcccgtgccaagtacatgaacagagttggaatgcaatgaactccaatggcaacacgcgccttttagcggaagtaaaagccgccacagtgaatgcgaaccctaaaagctgcgcgcttgaaaacgttccagtttcgttcttctaagaaaaagaaaacacactctatcgttttggattaaagctggtgtttgtactgctgtacataaaagcggttctttttaaaatcaacaaaactgtactatgtctgaagctgacatcctgacaagactgggacataaacggctcgtagtcttacggcttctttggctaatctcttctccggagggattggtggatttaaaatctatctatctcgaaccgaagaagccctgcatggagaaaccggacgaaaacagttgattgacataattgaaattatgcatgtttccaacgaacagaacgatctcaaatatcttggaagtatattcgcagaatattccgttcttatgtgtcgccacatgcaagtcctccaagaacgtcctctccatgtatgaaatgaagacattatactagcccaacgtagcaaaaaaaaaagaagagtaaggtccctttggtaggcttatttttcagtttcggctctgactcatgcaaaagttgtatcaaacacctctttttcaaatggcttcatcagtgaagtgtttttccaaaataaactagagggcatgagccaaaaaagtggctcacccggcttcagctca

SEQ ID NO: 113082 - DNA, 1035 bp, Zea Mays
ttgtctctcttatttacctatccgtcattcccaattccaaaggaccaagcaatgtttcgatacctcgctgctctgattctcgtcgtcgccttggcgacgtgtacaaacaagtctgttgatgcccgcgtggtccaccccatcgtcaccctcgaggccgatggctcatctcccacctctggcgatggtcgtcgcctgatcagctccaccaaccaagatgaacttggagcgttatgccaacagatgcactacaagacgttgtgctccacgatgacgacactgcctggggtgactacgccagagcaactcttagatgcatccctgcggattacagcggtgaaggcagcgatggcggagatgaagctagacaatgcaataaaatcaggcagtgctcagggtaacccgatgatgtcgtcgctaaagacatgcaaggagagctacgcgtcgctggtagactccatcaataccacgcggaacacgctcaaaagcggcggcagcaatgcagacctcatgtcggagctatccgcggcggacaccttcgccaccgactgcggggacaccttcgacgagcgaccagacctcaactcacccatacccggtgcacagcgccacgtcaaccgcctcatcagcaactgccttgacctagcagccaccattaaggaacaaccctagatgcctatgatgtggacactgaaaaaatttatctacaactggctgaagaagaaacagtcccacaacctacttcaaatttacgacatgtctgcacataccaataattgtgtggcttatcgattttggctctttttatatcctttgatattgctggggcataaaaagcaatcatcggttattagtaggtggatacgtgtcgcaaatccaaagaaggttgtatgactgtttctctgtagccaactatagaactagaccgcttgcatgcatgtattgacgaggacacacagtgttagcatggtacattatatacatctagtgtacattgctctgttgtccgtttgccttggggagcttgagcgcgtctat

SEQ ID NO: 113083 - DNA, 1352 bp, Zea Mays
gctccaaactaagctttcacgcgccattcccggtcctcccgaacacacatgcaacggaagaaacatggacgcctccgtggcgaagcagctcaggcgagtccgcacgctcgggcgcggtgcgtcgggcgccgtcgtgtggctggcctccgacgacgcctcggggtgcctcttgacggtcaaggccgcgggcgccggtggggcggcgcagctgcagcgcgaggagcgggtgctggaggacctctgctctccgcacatcgtgccctgcctcggatcccgcacggccgcaggcggtgaataccagctgttcctcgagttcgcgcccggcgggtcgctggccgacagggcagcgcagagcgggggccgcctcgcgcagccggccatccaggcgtacacgcgagacatcacgcgggggctggcgtacctccacggccgctcgctggtgcacggggacgtcaaggccaggaacgtagtaatcggcggagacggccgcgccaggctcaccgacttcgggtgcgcgaggtctgtccagccgtccccgtcgcggccgatcggcgggacaccggcgttcatggcgccggaggtggctcgctgggaggagcaggagccggcggctgacgtgtgggcgctcgcatgcaccgtcatcgaaatggccaccggacgcgcgccgtggaccgacgtgggcgacgtcttcgctgccgtccacaagattggctacaccgacgaggtcccggagctgcccgcgtggctgccagcgcaagcgaaggacttcttgcgccagtgcctggcgagagacccccgaaaccggcccaccgcatcgcagctgctggagcacccgttccttgcgtccgccttatgcgatggcaatggcaataatgccgatccgaccaagcatgactggacgtcccccaacagcacgctcaatgcggcattctgggagtccgacgaggacgaggacgaggagacctctgaacgagcgttcgaaaggatcagctcattggcgagtcactgcacggatttgccggactgggatttggagttggaggaaggatggatccaagcgcggggagactgctcccgcgtctccgaggcaccggcagccatgctgacaaccagttttgccttagggtgtgaagcgttggatgccgccgccgccgttgtcgtcgtggaaggccgcagtgcatttgctacatgaagtgcaggagttagagatgattctaccatatgccagagacattcgcctgtccacgcaggacggcaggacgcagtgtaggatttctcgacgattttgttaagtgccagagacgtcccagcgcaggaataggcagcaatgtaggaattacagatggttttgc

SEQ ID NO: 113084 - DNA, 1636 bp, Zea Mays
gacgcacgcaagcacaccacacgccctcacaactcgcatccatcgggcctcttccactccacatcgggagccgcaagcagaagcagaaccaatgacgacgacgaccacggcgaagcagctccggcgcgtgcgcacgctcggccgcggcgcgtcgggcgccgtggtgtggctggcctccgacgaggcctcgggcgagctggtggcggtcaagtcggcgcgcgccgccggggccgcggcgcagctgcagcgcgagggccgcgtcctccggggcctctcgtcgccgcacatcgtgccctgcctcggctcccgcgccgcggcgggcggcgagtaccagctcctgctggagttcgcgccgggcgggtcgctggccgacgaggccgccaggagcggcgggggccgcctcgcggagcgcgccatcggcgcctacgccggggacgtggcgcgcgggctggcgtacctccacggccggtcgctcgtgcacggggacgtcaaggcccggaacgtggtcatcggcggcgacgggcgcgccaggctgaccgacttcgggtgcgcgaggccggccggcgggtcgacgcgccccgtcgggggcaccccggcgttcatggcgcccgaggtggcgcgcggccaggagcagggccccgccgccgacgtctgggcgctcgggtgcatggtcgtcgagctggccacgggccgcgcgccctggagcgacgtggagggcgacgacctcctcgccgcgctccaccggatcgggtacacggacgacgtgccggaggtgcccgcgtggctgtcgcccgaggccaaggacttcctggccggctgcttcgagcgccgcgccgccgcccggcccacggccgcgcagctcgcggcgcacccgttcgtcgtcgcctccgcctccgccgccgccgccatccgcggcccggcgaagcaggaggtggtcccgtcacccaagagcacgctgcacgacgcgttctgggactcggacgccgaggacgaagcggacgagatgtcgacgggcgcggcggccgagaggatcggggcattggcgtgcgccgcctccgcgctgcctgactgggacaccgaggaaggctggatcgacctccaggacgaccactcggccggaactgccgacgcaccgccggcgcccgtcgcggactacttcatcagctgggcggagccgtcagacgcagagctggaaccattcgtcgccgtcgccgccgccgcaggtctcccgcacgttgcaggagtggcattagcaggcgccaccgccgttaacctgcagggcagttattattattacccgcctatgcatctaggcgtccgcggaaacgagattccacgcccgttgttggatcatcatggcgacgggttagaaaaggggcagggatcccaccgcgtttgtaacagagaaacagaaaaggtaacaatgaaacgaatttcgttaaaaagaagagctgctttccttctcgaccagcatcacgtgcgatcgctggacaaactggaatatcgtccacgtcacgaccgaatgctgcgtcgacggcaatctatatatcggagcaatagcgtccttggttacgacgttagcaaaggtaggcaggtccgttggcgccgtgcggtttgcattgccgttgctgcctga

SEQ ID NO: 113085 - DNA, 102 bp, Zea Mays
gcgcatattggccctgagccagttgcacaggacagtttagaagatgatgatagtgttgcgccaagtgatgcaccattgcaggagccccaggtagaatctgaa

SEQ ID NO: 113086 - DNA, 545 bp, Zea Mays
gagctgcaaacagacagcgagagcatcgtcgacaatgcacgctgagtttgtagctacgtatgaggcaactggacaggcgatatggataaagaaattcgtacccggattaagagtggttgatagcatagagcgaccactgagaatttactgcgataacgagccagcggtatttttctcccataacaataagtcaagtggctctgccaagtatattgacattaagtgttatattgttaaggagaagattctggatcacaccattcaagttgagcatataagaacccatcagatgcttgcggatccgctcacaaaaggtcttccacccagcgtgtttagtaagcacgcagccggcatgggattaagggagtacctatgatctagaatcacaggggctacagattgcaacctagtaaaatctttcgttctgaagcaggggagcatgttgtagtcaatgagtgcagtgatacttaatagatcattgtcacgcattggtctctatgtgtaaacttgttaaaggacggaattaataaaagtttgagtgtgag

SEQ ID NO: 113087 - DNA, 103 bp, Zea Mays
catgtactcatgtggcacagcctagaggaccaacttaccaagaatactaaagcacataggatgtttagttttctgattttaatttttgaatttctatccaaat

SEQ ID NO: 113088 - DNA, 120 bp, Zea Mays
ctcgctgcctccgaaatgtcgcccacgcctcggccgccacacgcagccccgaaacctcgtcgtctccctggtcctcggcgtccccggtcctcagcgtccagacatagaattgaaaaaaaa

SEQ ID NO: 113089 - DNA, 91 bp, Zea Mays
tctcgtccacatttacctctggagcttcttcatgtagaactcgagctctttaccctcaaggatgtagctggccaataaaaggaaatgccac

SEQ ID NO: 113090 - DNA, 1518 bp, Zea Mays
cagcaatcccgcgcacagaaacaccaaagccccaaacctcaccctctcccgaatcccgatggagttctttgacgaaaccctcgcctccgccgccgtcgagaagcccgcgctcaacggcgtcgttgcggaggaggagcaagtccccatcacccaccccgcaaagtcacacgccgcggtcgctgccgagaaccccactcctatcagcagcgtcgcgaacggtgagggtgagggggtccccggcgcccacactgccgccaagtcctacgctgccgtcgccgtcctcgcggagatcgccgccctccgcgccgccaagctcgacctggaagcgaagctcgacgaggcccgccgtgagaacaagttcctcgccgaggagactcaccgcatcgagggtatcttcccgcaggttcgggcggaggccaccatcgccgccgccacctctgccgaggagatcgccgtgctccgcacgaaggtcgaccgcttcaagaccgagaagggcgagcacgagctggacaagcagagccacgacaagctcgccaaggaggtagatgccgtgcgccaggagaagcacaagctcgaggaggagatcagggccctgaaggcttctgccaccgccgcggtcgctgccgagaagcccactcctatcagcagcgtcgcgaacggtgagggggtccccggcgcccacactgccggcaagtcctacgctgccgtcgccgtcctcgcggagatcgccgccctccgcgccgccaagctcgacctggaagcgaagctcgacgaggcccgccgtgagaacaagttcctcgccgaggagactcaccgcatcgaggggatcttcccgcaggttcgggcggaggccaccatcgccgccgccacctctgccgaggagatcgccttgctccgcatgaagatcgaccgcctcaagaccgagatgggcgaacacgagctggacatgcagagccacgacaagctcgccaaggaggtggatgccttgcgccaggagaagctcaagctcgaggaggagatcagggccctgaaggcttctaccaccgccgccgccaccaaggagagggaggctgcgccagcggctgaggccccgaacgaaggggaggttgcgtggctggggatggtggtggctgcggctgcaggcgtcgccagcatggctgccgtcatgctgatctgtctccgcaagaggtaatctgacgttctggtgatcggttccgtagcagtactggaagttttcgtcgtgatgcttgtataactgaactgggagtgatgtgacttctatgagtagttgcttattagcctacagaaatatagggatccggagactggttatgtctcatggcagtttttgtttcaccaatatcgttttatggcgctgacataaaaacagatattcgtgcaactgaagaacgatgtgacttctggtttatgttagtgctacggcacggcctcgtgtccctttttttgacctaataatggtccatcctctgctgatgagtgcgctacttcgcttacttg

SEQ ID NO: 113091 - DNA, 107 bp, Zea Mays
gccagctattcaaagcctaattttagcttcaaatattttaaacaagatctctgaaccagatgacaaatcatgtgtcgcatatagaaccttgttcaattacaaaaaga

SEQ ID NO: 113092 - DNA, 926 bp, Zea Mays
tgccattcgatttataccccggtcttagggtttggccactcccgactccctcggctgcctcccgcagccgcccgctgctccggtccttccgaacgctggcctgttcttccctgcctttggcccattcgtcaggcggcccctccgcaggcgacgcaggcgcggtcacgacggcgcgtggccccgactacgtagacagctaaccggtctccgcctccggcccttctcctgtcgcccgattgagtcgctgctgcaactgccaacttcacccccggcgagctcaccacagtcttccggaaaggtgctatcaatttggaagatggcagatgaggagcaggccccaagctctaggaaaagggttgcaggtactcaaatcaacaaggataatccggaacctgatgatgaaggaacagaacaagagatgggtacatttaagaaagctactgaagaagttatggcaacacggaggattgtaaaggttcggcgccagcagacgtcatcagcttcttctaaccctttctctgcaatcagatttgcccccactgattctagtgctcaaacaagtgctcctgtcccagaggtccaaccttcagatgtcaaagttgacgagggaagcaatggtagcgggaaagatactttgtctctgcccgacaagactgctggctctggggtaaatacggactctagtgcctcaactgaagcaccacctcagcctgttgaaaccagtgacaaggcagaagacacaaaggacgaatctagtggagacaaagtggtagttggagaacccaatgaaggcagttgcatgccatctgaagttgagggcaaaacaaaagagggagatgctgaagaaaaggaaaggacagatgaagctggaaatatcgataaaattagcaagggactcgttttatctatttgctcgtcttgtgctc

SEQ ID NO: 113093 - DNA, 1977 bp, Zea Mays
tgccattcgatttataccccggtcttagggtttggccactcccgactccctcggctgcctcccgcagccgcccgctgctccggtccttccgaacgctggcctgttcttccctgcctttggcccattcgtcaggcggcccctccgcaggcgacgcaggcgcggtcacgacggcgcgtggccccgactacgtagacagctaaccggtctccgcctccggcccttctcctgtcgcccgattgagtcgctgctgcaactgccaacttcacccccggcgagctcaccacagtcttccggaaaggtgctatcaatttggaagatggcagatgaggagcaggccccaagctctaggaaaagggttgcaggtactcaaatcaacaaggataatccggaacctgatgatgaaggaacagaacaagagatgggtacatttaagaaagctactgaagaagttatggcaacacggaggattgtaaaggttcggcgccagcagacgtcatcagcttcttctaaccctttctctgcaatcagatttgcccccactgattctagtgctcaaacaagtgctcctgtcccagaggtccaaccttcagatgtcaaagttgacgagggaagcaatggtagcgggaaagatactttgtctctgcccgacaagactgctggctctggggtaaatacggactctagtgcctcaactgaagcaccacctcagcctgttgaaaccagtgacaaggcagaagacacaaaggacgaatctagtggagacaaagtggtagttggagaacccaatgaaggcagttgcatgccatctgaagttgagggcaaaacaaaagagggagatgctgaagaaaaggaaaggacagatgaagctggaaatatcgataaaattagcaaggatgacactgggaagaaagatggagatgacactgagaagaaagatggaggtgatgatactggaggtgaatcagagcagaaagggcaaacaccatcagcaacaccccttttctcgtttaagaatctgtcaagtggtcaaaatgctttcacaggtctgaccggaactggattttcaagcacatcattctcgtttggctcagcctctaaagatggctcaagtgctggtcccctatttgggctgaaagctgatggttcttcgttcccttcttttaatcttggtgctgccaccaatgggggttctgccacagctcttgctacttcagcagaggcacccaagatgtttgctatgacagagggccctgtcgaaaccggtgaagaaaatgagaaggctgtattcagcgctgattctgctttgtacgagtacttagatgggggctggaaagaaagaggaaaaggtgaactgaagctgaacgtccccgtatctgggggcgagcgagcccggctcgtcatgaggacaaaaggcaactaccggctggtcctgaatgcaagcctctacaacgacatgtcgctcaaggacatggacaagaagggcgtgacatttgcctgtatgaacagcattggggagtcgccgagcagcctcgctacatttgctctgaagttcaaggacacggccaccagggaggaattcaaggatgcggtggagtctcacaagacaagcaaggcacaggaactgccgctgaagacgcccgagaactctccgaaggcagcagaagtctgaagccgcacccgagtcacgcttgctcgtgtcttttgtacgtgtccaggaaggaaggaactgagagagtttctgttgttgcggagtttttaagaatgtcgcgtcatgacatatgatgtcctgagttgtattttgcgtacgggttccctggtgctgtttttgggaacttaccattactacaggcgcataatcttgggatcctggacaagggactcgttttatctatttgctcgtcttgtgctccgttatgttctatcggttaagttgcgcgtgacgctattatgtcatgaataaatgtatgcaattataca

SEQ ID NO: 113094 - DNA, 1823 bp, Zea Mays
ttttcatttctaagttgcgcaccctacctgtcactgttttttggtggctcatgagactttcttttaacgtttctaagtttgttcttttgtttgaatttcaggtgctatcaatttggaagatggcagatgaggagcaggccccaagctctaggaaaagggttgcaggtactcaaatcaacaaggataatccggaacctgatgatgaaggaacagaacaagagatgggtacatttaagaaagctactgaagaagttatggcaacacggaggattgtaaaggttcggcgccagcagacgtcatcagcttcttctaaccctttctctgcaatcagatttgcccccactgattctagtgctcaaacaagtgctcctgtcccagaggtccaaccttcagatgtcaaagttgacgagggaagcaatggtagcgggaaagatactttgtctctgcccgacaagactgctggctctggggtaaatacggactctagtgcctcaactgaagcaccacctcagcctgttgaaaccagtgacaaggcagaagacacaaaggacgaatctagtggagacaaagtggtagttggagaacccaatgaaggcagttgcatgccatctgaagttgagggcaaaacaaaagagggagatgctgaagaaaaggaaaggacagatgaagctggaaatatcgataaaattagcaaggatgacactgggaagaaagatggagatgacactgagaagaaagatggaggtgatgatactggaggtgaatcagagcagaaagggcaaacaccatcagcaacaccccttttctcgtttaagaatctgtcaagtggtcaaaatgctttcacaggtctgaccggaactggattttcaagcacatcattctcgtttggctcagcctctaaagatggctcaagtgctggtcccctatttgggctgaaagctgatggttcttcgttcccttcttttaatcttggtgctgccaccaatgggggttctgccacagctcttgctacttcagcagaggcacccaagatgtttgctatgacagagggccctgtcgaaaccggtgaagaaaatgagaaggctgtattcagcgctgattctgctttgtacgagtacttagatgggggctggaaagaaagaggaaaaggtgaactgaagctgaacgtccccgtatctgggggcgagcgagcccggctcgtcatgaggacaaaaggcaactaccggctggtcctgaatgcaagcctctacaacgacatgtcgctcaaggacatggacaagaagggcgtgacatttgcctgtatgaacagcattggggagtcgccgagcagcctcgctacatttgctctgaagttcaaggacacggccaccagggaggaattcaaggatgcggtggagtctcacaagacaagcaaggcacaggaactgccgctgaagacgcccgagaactctccgaaggcagcagaagtctgaagccgcacccgagtcacgcttgctcgtgtcttttgtacgtgtccaggaaggaaggaactgagagagtttctgttgttgcggagtttttaagaatgtcgcgtcatgacatatgatgtcctgagttgtattttgcgtacgggttccctggtgctgtttttgggaacttaccattactacaggcgcataatcttgggatcctggacaagggactcgttttatctatttgctcgtcttgtgctccgttatgttctatcggttaagttgcgcgtgacgctattatgtcatgaataaatgtatgcaattatacatgttcctgttgttatattccacaacatggaatgcttttttttt

SEQ ID NO: 113095 - DNA, 990 bp, Zea Mays
aagatctacattgccgaatgatcatgacattggtgtagggtttagtgtacttaccatataggggagccgatgatcctcttggccataatcgtggcgccatctttcttcgccactcccaccaagcgaggaagtagtatgcttcctggggttggggcttcttcaacggatctccgcctcctctgatcgccgctatgtgtaccggccaccgtcgccagcgatgaagtcgaggagatgggcaacagaggaggaaatctttaatccgcaactgggacgcacccaggacctgcactggatgcgcgatttcgggggcggctgcaactggcgcagcgcttcacttcgttgctgcgaatctcaagcagcgactgcggcgggaggtcgcggccgtgggcgacgtgtggcggcgcctggcggctggtcagagtttggtgctttaaactcgcgcggcgtcagtaatcctccaatgccaagcatgacgatgttgggggcacggtatgtttggccttttctcatttggttgtttaagtagctcaaaatttagggtttcatgaggattaaccgattaagtcactgctccaaacaggtgtcccctgtatttcggggatcactaggctatattttttttttcattaagctatgtttattttattcctaaacaaagaagtagatgatcatttggatacgataagttatgtggagactctgtatggtgatattaacagagcaatcgcataggtacaatacaaaatcatgccttctttgcatatatacacacacatcaatccactgtcaaaattgaaccaaatgcttgataattacaaagcaacgttaacttttcttctccaaatcccagtgacttgatactacgctgaagctacagaatcaacaaggagagctaagaaagtacgtacaattcctaagaatcagaagaaacccttaacactaggtactatatatacctacgatgaggctgaacgaagttcaactagagag

SEQ ID NO: 113096 - DNA, 721 bp, Zea Mays
ataatcgtggcgccatctttcttcgccactcccaccaagcgaggaagtagtatgcttcctggggttggggcttcttcaacggatctccgcctcctctgatcgccgctatgtgtaccggccaccgtcgccagcgatgaagtcgaggagatgggcaacagaggaggaaatctttaatccgcaactgggacgcacccaggacctgcactggatgcgcgatttcgggggcggctgcaactggcgcagcgcttcacttcgttgctgcgaatctcaagcagcgactgcggcgggaggtcgcggccgtgggcgacgtgtggcggcgcctggcggctggtcagagtttggtgctttaaactcgcgcggcgtcagtaatcctccaatgccaagcatgacgatgttgggggcacgaactaaagtcaaagttgaactctgcgctatgtcaactagtgttggcgcaagctggtatatgatgagtttgtggtgcagattgcaagcgaatgtgaagattgaaaaagttaacagagtcttcttagagagagtacttacgaagaaaggaaacaaccgctgttgcaatgcctaggtagacgaagttcagaactgcctgtgaaaaaaaaaacaaagtgaaaattgatctcgttaacaaggaaatgaattctagttgaagtatacttcaagcaacatgtaattcatggagaaacgtgatgaaagtttgaccacattttta

SEQ ID NO: 113097 - DNA, 2025 bp, Zea Mays
atggcatcagtgaggctatccatattgaaactagattggaacatggaagtgcaacaacatcatctgttattggatctggtgatgacagggataactcatctgatagatcctctgcaggaaaaaaatacggtgactctatctggtgatgataagggcaaggaaacaggtacaaccactgaagcgtcatattccaaagaagagaaatctgagaacaacagtgtctcaactgaagcagagaactcccgaggagattcttccagtggagtgaatggttcttcagaaacgtctaccaatggtggtgagcaggtggatcccaagactgaaactagcacatccaccagtaacgagcacaatgaatctcaaggggctgatggcagttctggatcaaataactgtaacggccctgaacaaaccattgatactgctgaagtacaattgtgcatatcgcaagatcgattgtctgctatgcttattgcttatgccatgatttctcgtcaagttgtatcagaacgagtcattatagctgtacggttaatgatgcaggcccataacacaggaaaatctggaaggggcaaagttctaggaaaaaatgaggaaaggcaccgtaccccagctttcctgcagcagtccacaggcacaggcacagaccggcacgctgagtcgctgacgctggctgcaggcctgcagccttctctatgcaaatgcacgcagagggatgacctggatatggtcggcaaccaagctcatccggtcaagatttttcggcttcagaagctttcaaaccaccatggatataaagcgatgatccagcctgagaactacaagctgcaactaagcgatccaagctccaatatgccttccatggacgagcctctgttacctttggtccagcgtgaccaaaagtacatttccaagaaagacagaagaagctcctgtgatgttccaagcaggtgtgcaacttccttttccccaagcagctatctcaaagctaacttcagtactctcaatcatctgccgcccactgatgaaactaccagtacggtaccctcaccaaatatgcagcgggtgcactcttcaccttctatattcacatcaagcaaagaagcacactgtgtggatgagcttggtggccaaagccatgctgctgctgctgcacaatatacgccatcaattgcaaggcgggctattgtcagcgtcatcttatacatctcaataggggtgcttgtatacatgacaaatgttgaaggcttcaaggggaaatccacattcaagctagtggatgccctttacttcaccatcattagtttgtgcacaatagggtacggtgacatagtcccctgtactaccttcacaaaggtgttcacatgcttgttcctactagttggtgttcgtttcatcgacctaatgctaaatgggctgttgacaaatgtactggacaagcagagaacagttctacttagcacaatggacgataacaagcttaacaaggtgtttgacacctacatgattgatgctaggaagaaaaggtcaagagggaggatgaaagtaatacttgcattatcggttgtagcaggcactatctcaatttgcacaatcatagtacatgaagttgagggtctaaactggatcgatagtttctatttatcagtcatttctgttacaacggttggatatggagacaaaagcttctcaacaacagcaggaagactcactgccactgtgtgcctgttggtaagcactttagcagttgcaaaggccttcttgttcctaacagacttaaggatggacaaaaggaaccggcggactacaaaatggatcctcaagaagaaaatggacaacgagccacttgttggagacctagaaaaccatcctgctgtaagcaaatcagattttgtgatctacaagctcaaagagatggggaaaattgatgagaaagacatcaaaatgatctctgaccagttcgatcagatagagtttggaaaatgtgaaaggatccctctggcagatataattggaaaattatga

SEQ ID NO: 113098 - DNA, 120 bp, Zea Mays
atgcttggaggtatgcacgcgagcataacaagggccagcatccagcctctaatgaatccgatgataaagccaccgacgaaggttgtcaaaagctgtatgtacttccctaccttaacatga

SEQ ID NO: 113099 - DNA, 930 bp, Zea Mays
atggcgtgcggggatggggcagaagaaaaatttagggaaccgctgcggctagcgtcagataccactcctggcgccgctgacttcctcaaccctatgcggccgacgccggcgctcgtcgccggtggacgcatggtaacaagcttcttatccgccactgaatggatgcttccgtctccggccacgcaagtccacaccatctccgtacttccctcccgtcgcgacttcgccttctccaacctcacgatgttgctcaggaatagcggcggcaacgagggagagagtggcagtactaagttccacgtagtacgggacgacctcctccacccgctcgccaacggcaacaaggcgcgcaagctcgacgccctcctgcccatcctccgccgctgcggcgttactgacatcgttacatgtgggggttgccagagcgcccatgccgcagctatcgcggttcactgtgccgaatggggaatcaggccacatatactgctgagaggcgagcaactggatgttcccacagggtataatctcatctcattgatgtttggcaatgtgacatatgtctctcggtctttgtatgcccaaagagacgagatgctttatgagcatgccataaaggttgcaggatatagtggcacagtgatgtgggcagatgaagttataggaaagggtttgggtgtagatgaggacaccactgatggaaatggttcaagaagagtgatgattgttaaggaaggggcaggtagtgttcaagcactgcttggtaaggagcgattctttttggctagtttccatttatcattcatgattacacatgatgtttgtactgccaataaaacaaaataaattgataggatcatattctagtccatgcagctttgactggtcactggtttcacttcatcatattcaagctgtatttcatcaggactg

SEQ ID NO: 113100 - DNA, 1438 bp, Zea Mays
atggcgtgcggggatggggcagaagaaaaatttagggaaccgctgcggctagcgtcagataccactcctggcgccgctgacttcctcaaccctatgcggccgacgccggcgctcgtcgccggtggacgcatggtaacaagcttcttatccgccactgaatggatgcttccgtctccggccacgcaagtccacaccatctccgtacttccctcccgtcgcgacttcgccttctccaacctcacgatgttgctcaggaatagcggcggcaacgagggagagagtggcagtactaagttccacgtagtacgggacgacctcctccacccgctcgccaacggcaacaaggcgcgcaagctcgacgccctcctgcccatcctccgccgctgcggcgttactgacatcgttacatgtgggggttgccagagcgcccatgccgcagctatcgcggttcactgtgccgaatggggaatcaggccacatatactgctgagaggcgagcaactggatgttcccacagggtataatctcatctcattgatgtttggcaatgtgacatatgtctctcggtctttgtatgcccaaagagacgagatgctttatgagcatgccataaaggttgcaggatatagtggcacagtgatgtgggcagatgaagttataggaaagggtttgggtgtagatgaggacaccactgatggaaatggttcaagaagagtgatgattgttaaggaaggggcaggtagtgttcaagcactgcttggtgtcatgcggctactgaagtatctttctggtttgacattatttagaaaggatgagaaagttcatatcgtggtagattctggaacaggaacaactgctgtggggttagctcttggagcggtatgtctaggactccagtggagggttactgctgttatgcttgctgacacacttgaaggatataaacagcgagagagatctcttttatctgattttgagaaggttttcccggaaatctaccatggaatggtggaagatgctactcatgacaatctagttcaatgggtggagcggttttcacctagaagatttggcaaggtgctggatggtgaaatcgcaatgtgccgccaggtagctcaacagaccggtatcctgctggatcctatgtataccttggctgcctgggagcaagctgttgatatatgctgtggagacagtgaagccaaagtcttgatgatccatacgggtggcacccttggcctttttggattggcacaaaggtattcatcacagttcaacacaggcgaacaaccttaggcatgtgcaatgatgatgttcaaatgttacggtttgtgggtatggactatggaatgtgatctttgactttgaataatcaaaagtagaaagaggtggggctttgttaaaggaattggtctttatattgatttggaagctaaca

SEQ ID NO: 113101 - DNA, 1287 bp, Zea Mays
atggcgtgcggggatggggcagaagaaaaatttagggaaccgctgcggctagcgtcagataccactcctggcgccgctgacttcctcaaccctatgcggccgacgccggcgctcgtcgccggtggacgcatggtaacaagcttcttatccgccactgaatggatgcttccgtctccggccacgcaagtccacaccatctccgtacttccctcccgtcgcgacttcgccttctccaacctcacgatgttgctcaggaatagcggcggcaacgagggagagagtggcagtactaagttccacgtagtacgggacgacctcctccacccgctcgccaacggcaacaaggcgcgcaagctcgacgccctcctgcccatcctccgccgctgcggcgttactgacatcgttacatgtgggggttgccagagcgcccatgccgcagctatcgcggttcactgtgccgaatggggaatcaggccacatatactgctgagaggcgagcaactggatgttcccacagggtataatctcatctcattgatgtttggcaatgtgacatatgtctctcggtctttgtatgcccaaagagacgagatgctttatgagcatgccataaaggttgcaggatatagtggcacagtgatgtgggcagatgaagttataggaaagggtttgggtgtagatgaggacaccactgatggaaatggttcaagaagagtgatgattgttaaggaaggggcagactccagtggagggttactgctgttatgcttgctgacacacttgaaggatataaacagcgagagagatctcttttatctgattttgagaaggttttcccggaaatctaccatggaatggtggaagatgctactcatgacaatctagttcaatgggtggagcggttttcacctagaagatttggcaaggtgctggatggtgaaatcgcaatgtgccgccaggtagctcaacagaccggtatcctgctggatcctatgtataccttggctgcctgggagcaagctgttgatatatgctgtggagacagtgaagccaaagtcttgatgatccatacgggtggcacccttggcctttttggattggcacaaaggtattcatcacagttcaacacaggcgaacaaccttaggcatgtgcaatgatgatgttcaaatgttacggtttgtgggtatggactatggaatgtgatctttgactttgaataatcaaaagtagaaagaggtggggctttgttaaaggaattggtctttatattgatttggaagctaaca

SEQ ID NO: 113102 - DNA, 720 bp, Zea Mays
gatttcagatttgtaaaaggaaaacttttactggagctcgataaagttattttgctacttttcacatgatttattctctcttcaggtgtcatgcggctactgaagtatctttctggtttgacattatttagaaaggatgagaaagttcatatcgtggtagattctggaacaggaacaactgctgtggggttagctcttggagcgactccagtggagggttactgctgttatgcttgctgacacacttgaaggatataaacagcgagagagatctcttttatctgattttgagaaggttttcccggaaatctaccatggaatggtggaagatgctactcatgacaatctagttcaatgggtggagcggttttcacctagaagatttggcaaggtgctggatggtgaaatcgcaatgtgccgccaggtagctcaacagaccggtatcctgctggatcctatgtataccttggctgcctgggagcaagctgttgatatatgctgtggagacagtgaagccaaagtcttgatgatccatacgggtggcacccttggcctttttggattggcacaaaggtattcatcacagttcaacacaggcgaacaaccttaggcatgtgcaatgatgatgttcaaatgttacggtttgtgggtatggactatggaatgtgatctttgactttgaataatcaaaagtagaaagaggtggggctttgttaaagg

SEQ ID NO: 113103 - DNA, 1737 bp, Zea Mays
aacccagacgcggcgggctcggccgcggcgtgggctggtcctcagtcctcttccgttcttcctcctcgctcccgccccctcgcgcccctcgcctttcagttttggatgccacggaggcctgccagtggtgggccaccgccgtacgcgcgcgacgatgccggtgaagcgttcggcgtccgcgctggcgctcccgccggtcggccgccgcgcgcgggcccgcctctgcatccgcctcgccgcgccgctctccttcctgctcctcttcgtggcgctgttccacgcccagccgctcctgggcgttccgcccgctgcgcagccgccctccgcggggcccggtaaggtcgccttccttttcctcgtccgcgcgggggtgccgctcgacttcctctgggacgccttcttccgcaacggcgaggaggggaagttctcggtgtacgtgcactccgcgccggggttccagctcgaccgcaccaccacgggatccccatacttctatgggcggcaacttgcgaggagcgtcaaggtggtgtggggcgaggccaccatggtggaggcagagaggatgttgtttgccgccgcgcttcaggatcccgcgaaccagcgctttgttttgctctctgatagctgtgtcccactctacaatttcagctccatatatacttacctgatggcttcacctaaaagttttgtagacagctttgttgataagacggagaagcgttataatcaaaacatgtctcctgccattccaaaggataaatggaggaaaggatctcagatggtagtaaccaagagcttgtttagacgaaggccaaatgctagacaactggggttcacctttcggagaaagcagatactgaaaggagtagctcaacaggagcatgattgtattccggatgaacattatgtgcagacattattttctatcaaaggacttgaagatgaactggagagaagaactttgacctatacctcgtggaaccaatcatcaaatccgaaagacaaaatgacttggcatcctatgaaatttgagtatgatacatctagccctgagcatatcaatgctatcaagagaattgatcatgtcaactatcaaatggagcacaggacagagtggtgccaatgcaatggtacctcggccccatgttttttatttgccaggaagttctcctatagtgcggccatgcatcttttggaacaaggagccattggcacaccgaaatctgctcagctgatgattaacttttaacaaaattgtttacacaagtctgcgctcacttttttgatgggtcattataccgttcacaatttcaccagcctcaatgggagctgtacattagcagcggtagctacagagacatggagtatcagagtattgacagcgaccagaatgcgcttagacagctaaggacttgaagagagttgatgcacaaactacagagcctcggttttgaagtttgtcagctctatcagtatgcgatttccaggggacagatggtagtgaaggacagagtacacacaacccttaccctaacaggacaggaaagttataacaatagcttgattttccttataaatattcttccccttgtatgattaaagaatagatagttttttttacttgcatacaggttatcagacatagcgaatagggaaacatgcaagaagatacatgtgtccataggacctactgtttagaacattggtcacattggcaagaagataagctgccttttc

SEQ ID NO: 113104 - DNA, 1840 bp, Zea Mays
aacccagacgcggcgggctcggccgcggcgtgggctggtcctcagtcctcttccgttcttcctcctcgctcccgccccctcgcgcccctcgcctttcagttttggatgccacggaggcctgccagtggtgggccaccgccgtacgcgcgcgacgatgccggtgaagcgttcggcgtccgcgctggcgctcccgccggtcggccgccgcgcgcgggcccgcctctgcatccgcctcgccgcgccgctctccttcctgctcctcttcgtggcgctgttccacgcccagccgctcctgggcgttccgcccgctgcgcagccgccctccgcggggcccggtaaggtcgccttccttttcctcgtccgcgcgggggtgccgctcgacttcctctgggacgccttcttccgcaacggcgaggaggggaagttctcggtgtacgtgcactccgcgccggggttccagctcgaccgcaccaccacgggatccccatacttctatgggcggcaacttgcgaggagcgtcaaggtggtgtggggcgaggccaccatggtggaggcagagaggatgttgtttgccgccgcgcttcaggatcccgcgaaccagcgctttgttttgctctctgatagctgtgtcccactctacaatttcagctccatatatacttacctgatggcttcacctaaaagttttgtagacagctttgttgataagacggagaagcgttataatcaaaacatgtctcctgccattccaaaggataaatggaggaaaggatctcagtgggtagtattaatcagaaaacatgctgaagttgttgttggtgacaaaaacgtattaaaagtattcagaagacattgcaagatggtagtaaccaagagcttgtttagacgaaggccaaatgctagacaactggggttcacctttcggagaaagcagatactgaaaggagtagctcaacaggagcatgattgtattccggatgaacattatgtgcagacattattttctatcaaaggacttgaagatgaactggagagaagaactttgacctatacctcgtggaaccaatcatcaaatccgaaagacaaaatgacttggcatcctatgaaatttgagtatgatacatctagccctgagcatatcaatgctatcaagagaattgatcatgtcaactatcaaatggagcacaggacagagtggtgccaatgcaatggtacctcggccccatgttttttatttgccaggaagttctcctatagtgcggccatgcatcttttggaacaaggagccattggcacaccgaaatctgctcagctgatgattaacttttaacaaaattgtttacacaagtctgcgctcacttttttgatgggtcattataccgttcacaatttcaccagcctcaatgggagctgtacattagcagcggtagctacagagacatggagtatcagagtattgacagcgaccagaatgcgcttagacagctaaggacttgaagagagttgatgcacaaactacagagcctcggttttgaagtttgtcagctctatcagtatgcgatttccaggggacagatggtagtgaaggacagagtacacacaacccttaccctaacaggacaggaaagttataacaatagcttgattttccttataaatattcttccccttgtatgattaaagaatagatagttttttttacttgcatacaggttatcagacatagcgaatagggaaacatgcaagaagatacatgtgtccataggacctactgtttagaacattggtcacattggcaagaagataagctgccttttcatgatctgcagctacaacatag

SEQ ID NO: 113105 - DNA, 1588 bp, Zea Mays
ggcgtgggctggtcctcagtcctcttccgttcttcctcctcgctcccgccccctcgcgcccctcgcctttcagttttggatgccacggaggcctgccagtggtgggccaccgccgtacgcgcgcgacgatgccggtgaagcgttcggcgtccgcgctggcgctcccgccggtcggccgccgcgcgcgggcccgcctctgcatccgcctcgccgcgccgctctccttcctgctcctcttcgtggcgctgttccacgcccagccgctcctgggcgttccgcccgctgcgcagccgccctccgcggggcccggtaaggtcgccttccttttcctcgtccgcgcgggggtgccgctcgacttcctctgggacgccttcttccgcaacggcgaggaggggaagttctcggtgtacgtgcactccgcgccggggttccagctcgaccgcaccaccacgggatccccatacttctatgggcggcaacttgcgaggagcgtcaaggtggtgtggggcgaggccaccatggtggaggcagagaggatgttgtttgccgccgcgcttcaggatcccgcgaaccagcgctttgttttgctctctgatagctgtgtcccactctacaatttcagctccatatatacttacctgatggcttcacctaaaagttttgtagacagctttgttgataagacggagaagcgttataatcaaaacatgtctcctgccattccaaaggataaatggaggaaaggatctcagtgggtagtattaatcagaaaacatgctgaagttgttgttggtgacaaaaacgtattaaaagtattcagaagacattgcaagatggtagtaaccaagagcttgtttagacgaaggccaaatgctagacaactggggttcacctttcggagaaagcagatactgaaaggagtagctcaacaggagcatgattgtattccggatgaacattatgtgcagacattattttctatcaaaggacttgaagatgaactggagagaagaactttgacctatacctcgtggaaccaatcatcaaatccgaaagacaaaatgacttggcatcctatgaaatttgagtatgatacatctagccctgagcatatcaatgctatcaagagaattgatcatgtcaactatcaaatggagcacaggacagagtggtgccaatgcaatgcggtagctacagagacatggagtatcagagtattgacagcgaccagaatgcgcttagacagctaaggacttgaagagagttgatgcacaaactacagagcctcggttttgaagtttgtcagctctatcagtatgcgatttccaggggacagatggtagtgaaggacagagtacacacaacccttaccctaacaggacaggaaagttataacaatagcttgattttccttataaatattcttccccttgtatgattaaagaatagatagttttttttacttgcatacaggttatcagacatagcgaatagggaaacatgcaagaagatacatgtgtccataggacctactgtttagaacattggtcacattggcaagaagataagctgccttttcatgatctgc

SEQ ID NO: 113106 - DNA, 1169 bp, Zea Mays
ttttgatcttctccacaatcttcaatatttcagttatttgttctcaaatataataagttagtcttgcagctttgttgataagacggagaagcgttataatcaaaacatgtctcctgccattccaaaggataaatggaggaaaggatctcagtgggtagtattaatcagaaaacatgctgaagttgttgttggtgacaaaaacgtattaaaagtattcagaagacattgcaagatggtagtaaccaagagcttgtttagacgaaggccaaatgctagacaactggggttcacctttcggagaaagcagatactgaaaggagtagctcaacaggagcatgattgtattccggatgaacattatgtgcagacattattttctatcaaaggacttgaagatgaactggagagaagaactttgacctatacctcgtggaaccaatcatcaaatccgaaagacaaaatgacttggcatcctatgaaatttgagtatgatacatctagccctgagcatatcaatgctatcaagagaattgatcatgtcaactatcaaatggagcacaggacagagtggtgccaatgcaatggtacctcggccccatgttttttatttgccaggaagttctcctatagtgcggccatgcatcttttggaacaaggagccattggcacaccgaaatctgctcagctgatgattaacttttaacaaaattgtttacacaagtctgcgctcacttttttgatgggtcattataccgttcacaatttcaccagcctcaatgggagctgtacattagcagcggtagctacagagacatggagtatcagagtattgacagcgaccagaatgcgcttagacagctaaggacttgaagagagttgatgcacaaactacagagcctcggttttgaagtttgtcagctctatcagtatgcgatttccaggggacagatggtagtgaaggacagagtacacacaacccttaccctaacaggacaggaaagttataacaatagcttgattttccttataaatattcttccccttgtatgattaaagaatagatagttttttttacttgcatacaggttatcagacatagcgaatagggaaacatgcaagaagatacatgtgtccataggacctactgtttagaacattggtcacattgg

SEQ ID NO: 113107 - DNA, 120 bp, Zea Mays
aaggcgacggcgagccatgagaagaatagacggggcatcggtcgaatggtcaaggagcagaagtcgaggctgtacatcatccgacgatgcgtcgtgatgcttctctgctaccgcgactga

SEQ ID NO: 113108 - DNA, 380 bp, Zea Mays
atcccgttggcctggccccttcgccccctatcccccgtcgcctgagcggccctcctggccgcgccctgccctgctcctcccgccgccgcgtcgcctgctttggcggcctgcggccaccgccgaacacaaacctatcccaacccagtcgctgctgcttacttctcccagtcgtggtttcgtgccctagctatcccttcgcgtgtccgcgtggccctgtgctccctgagctagggtttaggccccacccatggaattcggagcaggcggctcccggtggccgttgccgcgaggcgatgctgccgaagcgcggccgccgccaccgccgggtgaccgcgaggaagtcgcctcgccccgcttcgattcgtctcgtgccctaaggt

SEQ ID NO: 113109 - DNA, 1050 bp, Zea Mays
gtggctaactctggcagtggaactgtcatgggcaatatcttcgaaacctacttatatgtttgctaaattgaaattaattaatagcaacaatttgatagctgggctgtcggcccaacctgacctaaattcctaagctaataagcccagtatgacaatcccagcccgtcccgcggcatcccaaaggtccaaatcattctccgaggagctgcggcgctgcggcgacggcggcagcgacggcgatgcggttgccatctgccgcctcggcgtcccgccttccctcttcccttttcttacaaccccgcgcaaggacaagatgcgtcccatcctcctccctcgcctgtcgggcatcttcttcatcagccgcgggcgctggtgacggcggctcgcggaagccgtggctcttcgtagggctgggtaaccccggaaaggtgtaccagggaactcgccacaacgttggattcgagatgatcgatgttatagcagaagctgagggtatatctctgagcagtatgcagttcaaggcaatggttggaaaaggcagatggaaccagcagtcaagcacagcacttgctgtggaccagcactaggacatgagcagactgcagcgagcagcatgtcctactcctgatatccattgtccgtggacatacaacagatggcgacacatcttcacgctgacgcaaatagcccaatcactcctgctgagataccagacgttgatcaagattgggagaagaaaagtcaaagatgaaagttgaattagtgctccaggattggaaacaatgcttccacttggggatttagctttgtgatgcagtacttaggccatgtttgaatgcactagagctaatagttaggtactaaaattagctgaagacatccaaatagtctagctaatagttaagctattacctatttttagcgaattagctaatatttagcttgctgtttgttagctagattttttttgaatgtaatggcaggagctctgcctctcgattaataagaagaaaggaattgacccagttttaagaaaaattgggcccaaaa

SEQ ID NO: 113110 - DNA, 1468 bp, Zea Mays
gtggctaactctggcagtggaactgtcatgggcaatatcttcgaaacctacttatatgtttgctaaattgaaattaattaatagcaacaatttgatagctgggctgtcggcccaacctgacctaaattcctaagctaataagcccagtatgacaatcccagcccgtcccgcggcatcccaaaggtccaaatcattctccgaggagctgcggcgctgcggcgacggcggcagcgacggcgatgcggttgccatctgccgcctcggcgtcccgccttccctcttcccttttcttacaaccccgcgcaaggacaagatgcgtcccatcctcctccctcgcctgtcgggcatcttcttcatcagccgcgggcgctggtgacggcggctcgcggaagccgtggctcttcgtagggctgggtaaccccggaaaggtgtaccagggaactcgccacaacgttggattcgagatgatcgatgttatagcagaagctgagggtatatctctgagcagtatgcagttcaaggcaatggttggaaaaggccgcattggtgatgcatctattatgcttgccaagccacaaacctttatgaatgcaagcggtgagtctgtcgggcagctggtttcatatttcaagataccacttagtcaagtcgttgtgatgtatgatgatctggatttaccctttgcaaaactgcgtctgctgccaaagggtggccatggtgggcataatgggatgagaagcatcgtcaaccatttgaaacagagccgtgattttccacgcctaagaattggcattggacgaccgcccgggaagatggatcctgccaatttcgttctccggccttttaacaagaaagagcagcaagagcttgattttgcgttgcataggggcttggaggcggtgcggataatggtgccggaaggattcaacaagagcgcgacttacgtgaacactgcacaatcatctgaaatgctgaataggtgatgggccaataaactgccatatgcgatttaaatcccataccaaagggatttaatcgaggaagcagtcgcagcttcgcttgatgcatcgtttgttcggtggccatcccccctctcctggcaagaaagttctgacagctgaattacttgttagatcatactgtatgatctgagcaacttagggggtgtttggtttgagaaatcattccatctaagatgagatggtgcatcacgaatcaattcctcaaatttggtggaatgacctcattcctcatgttattactaactaattaactataaagaatgaggtggtgattgatcaactcattccattatacaaactaaacaaaaaagtgaggaataagtgatggtggactagtttattcctcaaaacaaacatcctattaaatactgacaccattctacgcaccccacaccttaaaaatccggcacgctgcttagtgccttagtttcagcttccacgtactt

SEQ ID NO: 113111 - DNA, 1967 bp, Zea Mays
accgcctctccaaaaaaaagcctaaaccctcctcgacgtcaccagcgtccgcccctatcgccccccttcggccttccccactgtactctccaatctcgccgccaagcctcaccgcaccatggcgaccttcaccgcggcctcctccctctccctcctcttctcccacccgcactcccactcccgccaaccatccgcccaggggcccaccgccagctcccacctccacctgcatccgcgcgccagccgcgcgcgctgcgcctcttccgacacgacggccacgaagcaccgccgcccagcggaggagaacatccgcgaggaggcggcgcggctccgaggcccggcccagggtttctctgcgtggtacgagcccttcccgccggcgcccggcggcgacccgaacgagcgctactcgctggacgaggtcgtctaccgctccagctcggggggcctcctcgacgtgcgccacgacatggaggcgctggcccgctacccggggtcctactggcgtgacctcttcgactcccgcgtcggccgcaccgcctggccctacggctcgggcgtctggtccaagaaggagttcgtgctccccgagatcgactccgaccacatcgtctccctcttcgagggcaactccaacctcttctgggcggagcgcctcggccgcgagcacctcggcgggatgaacgacctctgggtcaagcactgtggcatctcccacacgggctccttcaaggacctcggcatgacggtgctcgtcagccaggtgaaccgcctccgccgcgcgccgctctcgcgccccatcgccggtgtcggctgcgcgtccacgggagacacctccgccgcgctctcggcctactgcgcagccgcgggaatccccgccatcgtgttcctgccagcggaccgcatctcgctgcagcagctcatccagccgatcgccaacggcgccaccgtgctctctctagacactgattttgatggctgcatgcggctcattcgcgaggtcactgcagagctgccaatctaccttgccaattcgctcaacccgctccgccttgaggggcagaagacagcggccatcgagatattgcagcagttcaattggcaggtgccagattgggtcattgttccaggaggcaatcttgggaatatctatgcattctacaaggggtttgagatgtgccgcgttcttggacttgttgatcgcgtgccacggcttgtctgcgcacaggctgcaaatgcaaatccattgtaccggtactacaagtcaggttggactgagtttgagccacaaactgccgagactacatttgcatctgcgatacagattggtgatcctgtatctgttgaccgtgcggtggtcgcgctgaaggccactgacggtattgtggaggaggctacagaggaggagctaatggatgcaacggcgcttgctgaccgcactgggatgtttgcttgcccacatactggggttgcacttgctgctttgtttaagcttcagggtcagcgtataattggccctaatgaccgcactgtggttgttagcacagctcatgggctgaagttcacgcagtcaaagattgactaccatgacaaaaacatcaaagacatggtttgccagtatgctaatccaccgatcagtgtgaaggctgactttggttctgtgatggatgttctccagaaaaatctcaatggtaagatataaagttatatgattaattaaccctccaaactgtttttttttgttttttcgttccaggaattttattcctgagtctttcaactttgtttggtgaacatggtatggtgctaaaatctagacctaataccttgtagtactagttctggaggctcttttggttgtaggtcgaagtggatagagctgttccttgtactttatctgtttcatgtaatatgaataataaattatggtctaaatatttgaataaaaaatcgtttggaatgaccca

SEQ ID NO: 113112 - DNA, 497 bp, Zea Mays
ctcgccgctcacgccgctctactccctgctcgcggcatcgctctgctccttgctcgcggcatcgctctgcatcaccgacgactccctgttcctggccgactgctcacgccgctctgctccctgttcctggccgacggcggcgacaacggcgaggttctaacctagaggttgtgaagaaccaaaagctgttttgggatttgccgtctcaagtttcatctagctacctccaacaaatccttcaatctccatggctacatcgatatcaactcaatatactaacgaggaggaaattaaaaggaatagaaagaagcgaaagagagttgttgtattagttgtgtctattatggctattattgcaaaccggtatcaacggaggagacttagacacatcgtagatgctaacgaagttcaagagagaaatgtcgagtgcagaaaacaaatgctacgtaatatgtaccagggttcaaatgtctattgctatgacagtttgcgcctaa

SEQ ID NO: 113113 - DNA, 1787 bp, Zea Mays
agtccccagaagaaaagaactacgccgcgctctcttcactctcctccagtgagtctccacccacccaccgagcctatatatccctctgcatcctcccttccctcccagcctatcctacaacacctcccgcaacagaagcatacgccgtgcccagctatctatagctagcactagcagtggtgcacactgaaatggacagcgccagcagcctcgtggacgacaccagtagcggtggcggcggcggcgcgtccacggacaagctaagggctctggccgtcttcgccgccgcctcggggacgccgctggagcgcatgggcagcggcgccagcgcggtcgtggacgcggccgagccgggcgccgaggcggactccggttccggtgccgccgcggtgagcgtcggcgggaagctgccgtcgtcaaggtacaagggcgtggtgccgcagcccaacgggcggtggggcgcgcagatctacgagcgccaccagcgcgtgtggctcggcaccttcgcgggcgaggccgacgcggcgcgcgcctacgacgtcgcggcgcagcggttccgcggccgcgacgcggtcaccaacttccgcccgctcgcggacgccgacccggacgccgccgccgagctccggttcctggcgtcccgctccaaggccgaggtcgtcgacatgctccgcaagcacacctacttcgacgagctcgcgcagaacaagcgcgccttcgccgccgcgtccgcgtccgcggccaccgcctcgtcgctggccaacaacccttcttcctacgcgtcgctctcccccgcgaccgcgacggccgccgcgcgggagcacctcttcgacaagacggtcacccccagcgacgtgggcaagctgaaccggctggtgatcccgaagcagcacgccgagaagcacttcccgctgcagctcccatccgccggcggcgagagcaagggcgtgctcctcaacctggaggacgccgcgggcaaggtgtggcggttccgctactcgtactggaacagcagccagagctacgtgctcaccaagggctggagccgcttcgtcaaggagaagggcctccaagccggcgacgtcgtcggcttctaccgctccgctgccggcgccgacaccaagctcttcatcgactgcaagctgcggcccaacagcgtcgtcgtcgcctcgacggcaggcccgtcgcctccggcgccggtggcgaaggccgtgcgtctcttcggcgtcgacctgctgacggcaccggccaccgccgcggcgccggcggaggccgtggccgggtgcaagagagccagggacttgggttcgcccccgcaggcggcgttcaagaagcagctcgtggagctggcactagtgtagattaatgctacggagcgatcgatctttccctggctagctagtcttttttttttttgctcgatcgctcaactcagatggtagcatcaccgagctgaatttagttccctctcggcatctcacttagttggttcgtttgttaatttccagtttcaccatcctttttgctttgctttgatgtaaatcttctcatcaactgtatactgctaatgaaaaaaaaacagtccaagaaggctagatgatggtcaactggcacagaaggaacagaaacattctaaattaacatcatggttaataactgtcaattgctcgtgcatcagatcgaaagatattacgacatttcgaatttccagattccagatgctccctgccatccatgatccatctacatctacaggtggcaggggagctgtatgtaggagtcttcag

SEQ ID NO: 113114 - DNA, 639 bp, Zea Mays
atgtatcagtatcaccatcagccgggcacctcttcttgttatggtgaggttacaggcggtggtggcgatgccatccttccttctccagctcgaccggacgccatgcttgccgacggaggagcagcattcttgcaatcgccattgccattgccgccgtcgagctacatgctaccaccacactgcccctctcctctgcttgttcctccacctccagtacccatgtccatgtggcagtcggacgagcagcaaattaccagggtggcggcgccagtaaggtacagcgcggaggagcggcgggagcgcatcgacaagtacaggagcaagcgcaaccagcgcaacttccaaaagaagatcacgtatgcttgcaggaagacgctcgccgacagtcggcccagggtgaagggccgcttcgctcgcaacgccggcgactacaccgatgcagatgctgcagtcgaccatgtcggccaaccagctgaaatcgaggtgccatcaccagcctcgcccgagtggtggccgccagcagttcagcttcaagacttgcctgccggcatcgacccagcagacgaagagatgctggccgcctaccttggcgtctcctccatcactatagatgatcaccagtatagctgccagccgtag

SEQ ID NO: 113115 - DNA, 681 bp, Zea Mays
tgctagtaaaaatacagatatacagctggtgctcgtacagtactccgcaagtccgcatacatacacagccacttcatttttaaagcattttacctgtgagctcggattttttaaagtgcagaacatgttcccatcgcctcaaatccagcgccgcaccaaatccgggacaagaatttaccacctctccatccatctcgttgcctgcctgcctgcctcgggctgcgactccactggacgaccctacttcaccctggtcttccaccccaccccacgcacacgaagacagagagagccctccgggcgtcgattccgccatactgccaccattactgacgccccctcaccgcctccgggcccaacgagcaagccagggaaggggagccgaggcctcgcctacgcctaggcacgcccctccccctgcgcgacatgtcaggggaccgctcgcccacggtagagcgccggcgggggatccggcgcctcctgctgcatccccgcggcgaggcctcctcgtcctcgcctccgccgccggcgccggcgcctgaggaggggaggcggaaggggttcgccacggcggcgctgcgcggcctgggctgcacgtcggcgtccgcgtcgcaggcgtacgcgcccggggaggccgcggcggcggcggccgtgcggtcgtcggcggactggcaaggtcgg

SEQ ID NO: 113116 - DNA, 782 bp, Zea Mays
attctataatgttacgcaagtggaatctttgccatgttctgctgtattgatgagctctctctcacctgaacagaggccgtgcttgtcccggagggtgaccgtgcaggagcagatatcctcgtccttcatggactcgccgccgccgccgcacctcgatgcccccttattcggcgccgatctcatcccctccggccgcctccgccggatgcgcgggtggcgccactcccccggaggactcgaggaagagataaggatgtttcagacaagagtgttactgggaggaatgaacatgtatgaccgctaccaggattggcgccttgacgttgataacatgacatacgaggagttgctcgagcttggagacaaaattggatatgtcaacacagggttacgtgacgacgagattactcgcaaccttcggaaggtcaagcacccatccttcagttccttacggttcgcaacagaaatggaaagaaaatgcagcatttgccaagaagaatttgaaacaaatgaagagatgggaaggctagactgtggccatagctaccatgtgtactgcatcaagcagtggctctcgcagaagaacatttgcccagtttgcaagactgccgtcagcaagaattgaaatccaaactccagtcacgctgtctgtagatctcggtgaaaacagcaaattctgttgtcctgtacagtccgttatatatattattattgtatgaacacaatccatttgtttcatcttgcagaaagaaaatgccatgttttggtcatgttccagcaaa

SEQ ID NO: 113117 - DNA, 1223 bp, Zea Mays
tggcaaatttctcgctactaatagtcaaacaaagcatcccagctgatcaacgccaccgccagacagcaacacactgcacacacacacattgcaatggcagcggctggaggcggggtaggagatagcgagctgcggctgctgggcaagtcgtcgagcccttgggtgttccgggtgagagtggcgctgggactcagggggctgagctacgagtacatagaggaggacctcggcaacaagagcgagctcctgctccggtccaacccggtgcacaagaaggtgccggtcctcatccacggcggccgcccggtgtgcgagtccctcgtgatcctccagtacgtcgacgagatctggcggggcaccggccctccgctccttccgtccgacccctacgaccgcgccacggcacggttctgggcggcctacgtcgacgacaaggtacgatattcaggaggggatgaatccgttctcgagctctcggactcagccgttctcccgttcccctttcctgtctctagttcttcccggcgttcagcgcgctgttcaggtcgaggacggacgagcagagagcggaggcgctccagaacgccctcctcgtggcggagacgttggagcgggcgttcacggagtgctccagggggaaggcgttcttcggcggcgacgccgtcgggctcgtggacgtcacgctcgggagccacccgatttggatcagagcggtggaccagacggcgggcaccaaccttctggacggggccaggttccctgacctggcggcgtgggcggagcggttcatggccctcggcgccgtcaacgaggtggtgccggacgccgggaagcttttggagcagtacagggcgtctcgggccaaatggactgccgctgctgattctagctgaactgatgaacacactggacgcctgctgcttgcattggctacttgtgctggacaccttcagtgatacggtctcgaaccgaaataaatacataaaggctagtttggaaacattagtccttctgcgattcttgaaaattgagtagaaaattattcaatttattactcaatctcaaagaatctcggaagggatttatgttttcaaactagtcctaagatcaactactttacctgacaattagttacgggggatttgtacttggagcagtattttgtgtcaggtgatcttcgattttgtctaatactaagacctatgaaacggtgagatgatcaa

SEQ ID NO: 113118 - DNA, 753 bp, Zea Mays
agctgatcaacgccaccgccagacagcaacacactgcacacacacacattgcaatggcagcggctggaggcggggtaggagatagcgagctgcggctgctgggcaagtcgtcgagcccttgggtgttccgggtgagagtggcgctgggactcagggggctgagctacgagtacatagaggaggacctcggcaacaagagcgagctcctgctccggtccaacccggtgcacaagaaggtgccggtcctcatccacggcggccgcccggtgtgcgagtccctcgtgatcctccagtacgtcgacgagatctggcggggcaccggccctccgctccttccgtccgacccctacgaccgcgccacggcacggttctgggcggcctacgtcgacgacaaggtcgaggacggacgagcagagagcggaggcgctccagaacgccctcctcgtggcggagacgttggagcgggcgttcacggagtgctccagggggaaggcgttcttcggcggcgacgccgtcgggctcgtggacgtcacgctcgggagccacccgatttggatcagagcggtggaccagacggcgggcaccaaccttctggacggggccaggttccctgacctggcggcgtgggcggagcggttcatggccctcggcgccgtcaacgaggtggtgccggacgccgggaagcttttggagcagtacagggcgtctcgggccaaatggactgccgctgctgattctagctgaactgatgaa

SEQ ID NO: 113119 - DNA, 1103 bp, Zea Mays
agctgatcaacgccaccgccagacagcaacacactgcacacacacacattgcaatggcagcggctggaggcggggtaggagatagcgagctgcggctgctgggcaagtcgtcgagcccttgggtgttccgggtgagagtggcgctgggactcagggggctgagctacgagtacatagaggaggacctcggcaacaagagcgagctcctgctccggtccaacccggtgcacaagaaggtgccggtcctcatccacggcggccgcccggtgtgcgagtccctcgtgatcctccagtacgtcgacgagatctggcggggcaccggccctccgctccttccgtccgacccctacgaccgcgccacggcacggttctgggcggcctacgtcgacgacaagttcttcccggcgttcagcgcgctgttcaggtcgaggacggacgagcagagagcggaggcgctccagaacgccctcctcgtggcggagacgttggagcgggcgttcacggagtgctccagggggaaggcgttcttcggcggcgacgccgtcgggctcgtggacgtcacgctcgggagccacccgatttggatcagagcggtggaccagacggcgggcaccaaccttctggacggggccaggttccctgacctggcggcgtgggcggagcggttcatggccctcggcgccgtcaacgaggtggtgccggacgccgggaagcttttggagcagtacagggcgtctcgggccaaatggactgccgctgctgattctagctgaactgatgaacacactggacgcctgctgcttgcattggctacttgtgctggacaccttcagtgatacggtctcgaaccgaaataaatacataaaggctagtttggaaacattagtccttctgcgattcttgaaaattgagtagaaaattattcaatttattactcaatctcaaagaatctcggaagggatttatgttttcaaactagtcctaagatcaactactttacctgacaattagttacgggggatttgtacttggagcagtattttgtgtcaggtgatcttcgattttgtctaatactaagacctatgaaacggtgagatgatcaa

SEQ ID NO: 113120 - DNA, 940 bp, Zea Mays
ggcacgcatacaaatggatcccaggtcccaacagacagcggcacatgatagaacaaagcaaacatctgcaaactgtaatggcggctccagtaggtgccaatgccataggagcgggcgacgagctgctcctgctgggcacatggtcgagcccatgggtgatccgagcgagggtggcgatggggctcaagggcctgagctacgagtacctcgaggaggacctcggcaacaagagcggcctcctgctccggtccaacccggtgcacaagaaggtgcccgtcctcatccacggcggccgcccattgtgcgagtcgctcgtgatcctgcagtacctcgacgaggcatggccgacggccggtcctccgctcctcccggccgacccctacgaccgcgccacggcacggttctgggcggcctacatcaacgacacgtttttcccggcgttcagggcgctgttcagatcgctgacggacgagcagagagcggaggcgctgcggaacgccctgcctgcggtggagacgttggagcgaacgctcgcggagtgctccgcggggaaggcgttcttcggcggcgacgccgtcgggatcgtggacgtcgcgctcgggagccacctggtctggatccgagtggtggatgaggttggaggcaccagccttctggacgcggccaaggtccccggcctggcggcgtgggcggagcggttcttggccgtggacgccgtgaagaaggtgatgccggacgcaacgaaggtcctggagcagtacaaggggtttcgggctaaatggattgcgggcgccggttgtacctgaaacgtacggtatgtatgtgtacctctacttgattggagatgcaccctgctggatacgttagggtttgttcgatacatatggattggataagattggaaaaattgagaataagtttgatttatttgagattcaaa

SEQ ID NO: 113121 - DNA, 573 bp, Zea Mays
acgaggccacgacagagctgacgcaaaatcgctgcccgccgcgccgacaagcaacgtgggttcaccagtaaacaattcaaattcgacttctcagctcgttaaatatacggtcggctccgctcgccccttccgctcgactcaaatcgtgaaactattgagaaaattccattccaacgacatcgaaggagcctgcgaagcgagcgagagtctataatggcggacggaggcgagctgcagctgctgggctcatggtacagcccctacgtgatccgcgccaaggtggcgctggggctgaaggggctcagctacgagttcgtcgaggaggacctctcccgcaagagcgacctgctgctgaagctcaacccggtgcacaggaaggtgcccgtgctggtccacggcggccgccccgtgtgcgagtcgctcgtcatcctgcagtacgtcgacgagacctgggcaggcaccgggacccctctcctccccgccgacgcctacgaccgcgccatggctcgcttctgggcagcctacgtcgacgacaaggtaataacggtgactgcagaggccggccggccggcc

SEQ ID NO: 113122 - DNA, 937 bp, Zea Mays
ctcgcccagtcgccccttccgctcgacgcaaatcgtgaaacagtttagaatttccaacgaaagtcctacgagcctgcgagtgctaaactgctaactgctaagactgcaatggcggccggaggcgagctgcagctgctgagctcatggtacagcccctacgtgatccgcgccaaggtggcgctggggctgaaggggctcatctacgagttcatcgaggaggacctcttcagcaagagcgacctgctgctgaagctcaacccggtgcacaagaaggtgcccgtcctggtccacggcggccgccccgtgtgcgagtcgctcgtcatcgtgcagtacgtcgacgagacctgggcagcaggcaccgggacccctctccttcctgccgacgcccacgaccgcgccacggctcgcttctgggcagcctacgtcgacgacaagttctgcaaggagtggatcaaactgtacaggtcgacgacggcggagaaggcggcggaggcgctcggcggcgtggtccccgtggtggagacgctggagcaggcgttcagggagtgctccagggggaaacccttcttcggcggcgacgccgtcgggctcgtggacatcgcgctcgggagcttcgtggtgtggatcagggtggtggacgaggcggccggcgtaaagcttctggacgaggccaagttcccggccttgacggcgtgggcggagcgcttcttggcggtggacgccgtgagggaggtgatgccggacgctggaaggctgttggagcactacaaggggtttctggctaaacgggctccaccttcacctgctggttactgatcgctgtaacaggaagctcagtgttcgtgtacttttccgtgcgttaataggtgtgtactggggttcaagaaaggctttgattgtgtccagacgaataaacggatgtctttgggggctaaaa

SEQ ID NO: 113123 - DNA, 330 bp, Zea Mays
cagaggcagagcaacaagcttcagttactggcacgagttgacgagcggcagcgggagcggggttgctgctggctgctgctgggggagtaggcgattggctgagcgcgtactgcatctgcatacggccatacgggtgaagcaggcgctggcgcctggcgatgaagggggtgaccggagggaggacctggagcaggagagcgagcggtgctgtgctgcgccgccgctgcgctgcgccccgtgcctgcacttctaccgtggacgaggcgtgggccgggcctgccgtacgagcacttttaggctcgcttctgggccgcctacatcgataacaag

SEQ ID NO: 113124 - DNA, 511 bp, Zea Mays
agcgaagcaagccgcaaggggagaacgcgagcagccaggggcatggactccaagccggcctcgaagaagtggcaggcaggaggaggcgtgcgcggggccggcgtgtccccggcggcgccccccgcggacgccgccggcagcggcgcggcgatggcggagtgcgcggcggcgtgctgcgtgctctgcgcgtgcctccccgtggccgtgctctgctgcgtggcgcgcgccccgctccgcgtcgcgcggcggtgctgcggcaggtggacgcggcggcggctcgcgccgggggtctcgtcgtcgttctcggacgccgaggtcggggagttcctgcagggcggtgccggcgggcgggcaatgggggcagcagccctcggcgcggtcggaggaggtagcgccaagttagccagttactgacacttttcatcatcttctctctgtttttttttctcctctgcgattttgtgggctgtgtgtaacactcactgatacggcttcgaagtggactgaggtc

SEQ ID NO: 113125 - DNA, 869 bp, Zea Mays
gatccgcgccaaggtggcgctggggctgaaggggctcatctacgagttcatcgaggaggacctcttcagcaagagcgacctgctgctgaagctcaacccggtgcacaagaaggtgcccgtcctggtccacggcggccgccccgtgtgcgagtcgctcgtcatcgtgcagtacgtcgacgagacctgggcagcaggcaccgggacccctctccttcctgccgacgcccacgaccgcgccacggctcgcttctgggcagcctacgtcgacgacaagttctgcaaggagtggatcaaactgtacaggtcgacgacggcggagaaggcggcggaggcgctcggcggcgtggtccccgtggtggagacgctggagcaggcgttcagggagtgctccaaagggaaacccttcttcggcggcgacgccgtcgggctcgtggacatcgcgctcgggagcttcgtggtgtggatcagggtggtggacgaggcggccggcgtaaagcttctggacgaggccaagttcccggccttgacggcgtgggcggagcgcttcttggcggtggacgccgtgaaggaggtgatgccggacgccggaaggctgttggagcactacaaggggtttctggctaaacggtctccacctgctggttactgaacgctgtaactgtaagcctgtaacagcaagctcagtgttcgtgtacttttccgtgcgttaacgtgtactagagttcaggaaaggctttgattctgtccagagtccagacgaataaacgaatgttttttatacttcctccgttgcaatttatactttatttgacttttttacttaaagttttatcggtttgttttattaaaaaattctaatttattattaa

SEQ ID NO: 113126 - DNA, 107 bp, Zea Mays
ccaacaaacaatagttaatgtcagatttgaacaagattaatctgatttacgtcaaacagaaacacaaagcacaaatatactacattctactcgaaataacaaggcag

SEQ ID NO: 113127 - DNA, 2430 bp, Zea Mays
cgccaaggcgaatttccgacaggacactccccactccccagcaacgaccttataaacagacacagaggaagggagaaagaagaaggaagaaaaagaaaaactcttctgacttattcagccatggcggctctctgctcgccacgccgccgcctgccgctgccgctgctgctgccgcttctcctcgccgtcttggttgccgcttcccgcggcgacgacccttccggcgacgagtacttcaaccgctccatatgcaagctgcaaccatacagatgcggcgaagtgaatatcacctacccgttctacctttccgacgacacggcggacgtcctggggaactcctcctcctactgcgggtaccctgggctggccatcgactgcgtggacgacgagtaccccaccatccagctcggcggcggcagcagcacaggctactcctacaacgtgacggacatcgactatcccacctccaccatctacctcgccgacccggacgtcctcgacgacgcgagctgcccgcgggtcgaccacaacgtcaccgtctcgccatcgccgaccttgtggctcaacctgtcggactacaccgtccgttacctgctcttcttcaccaactgctccgtccacgttctccacgttcccaaccagtctgacatcagcccgatcgcgtgcgcgagcggctctgacggggacgactactctttcgtggttccttcggagatgccccaccagcttctgtcgcagcagtgcggtcaagtaaccctggtgccggtgcttcagaacgccacgctgacgccggtcgatcccctgtggagcaccagcgggtaccgcgacgctctcaagcagggcttccagctgcagtgggactcggacatgaagaccgagcggtgtgatgactgcgagagatccagtggaaagtgcgcctacaacacatccggggagttcgtggcctgcctgtgcgccgacggccacgtgaccgaccatggctgcaccaacgggccaaaaagtaaaacagcagttattgccggtgtcgcggctggcgctggtgttgcaatacttgctgctgccatttttttgttcgtgaggcgcaagagaaagcagaagagagtggtcaactcgtcttcgaagctcctcaagtacagcggctctggcgggaccccgcgttcacgggtcggtgacatggagtccggcagcatcgaggacccgcctacgcatctcttcacctacgaggagcttgaggaggcgaccagttgcttcgacgaaaacagagagctcggtgacggtggcttcggcaccgtctacaaagggtacctcaaggacgggcgcgtggtggcggtgaaacggctgtacaacaacagctaccggcgcgtggagcagttccagaacgaggcggccatcctgtcggggctacgccaccccaacctcgtcatgttctacggctgcacgtccagccagagccgcgagctgctgctggtgtacgagttcgtggccaacggcacggtcgccgaccacctgcacgggcagcgggccgccgagcgcgccctcccgtggccgctccgcctcggcgtcgccgtggagtccgccgcggcgctcacctacctgcacgccatcgagccgcccgtggtgcaccgcgacgtcaagaccaccaacatcctcctggacgccgactaccacgtcaaggtcgccgacttcggcctctcccgcctcttccccctcgacgtcacgcacgtctccaccgctccccagggcacgccagggtatgtagatccagagtaccaccagtgctaccagctgacggacaagagcgacgtgtacagtttcggagtggtcctggtggagctcatctcgtccaagcccgccgtcgacgtcacccggcaccgcaacgagatcaacctggccggcatggccatcagcaagatccagaagtgccagctggaggagctcgtcgacatcgacctgggctacgagaccgacccggccaccaagaaggcgatgacggcggtcgccgagctggccttccgttgcctgcagcagaacggcgagatgcgcccgccgatcaaggaggtgctcgaggtgctcaggagcattcagggcgaataccagacggggaaggacggagacaaaaacaaggacggacccctctctcccaccacggttcatgctccgtgggagagcagggccacgacgcccaacaccagcagggactagaccagtcggtcagtgtcaaggactggagaccggagaagttgctgctgctgtgtgactgtgaggcatgccagattgcctgtcatttgttttcaggcttcgcggtccggttcctgctgatgtatatatttgttttgttgggtctgtcagagctgagggaatgtacatatatgtgaaagagtggtgaatgatatatataatacacatataaataaatgagtactagtaaat

SEQ ID NO: 113128 - DNA, 2410 bp, Zea Mays
aaaacattgcctccaaaaaaaatataaaaaaaacggagccagcccaaaccgcgcgccagaaatccccgagagctgaacagagctcagagctgccatgcgttccccgagccaccacgaccgagacctcctcctcctcctcctcgtactcgcggcggccgtcgggtcccgcagcgacgatacgcacgcgtgccggtcgcggccgtacctctgcggcggcgtgaacatcagctacccgttccacctcgccagcgacgccacggcggtcccgggccacgatggcgagtcctactgcggctacccgggcctcgccgtcagctgcgacggcggcaacaaggccgtcctgaacctcggcgaccacgactacacagtctcgcgcatagactacgccaaccagaccgtctcgctcgccgacgcgggggccagcagcggatgccccgtcgtggaccacaacgtgacgatcccgcaggacgtccggctgtccctcctccacagcatcgactacctcctcttcttcgccggctgctccttcggcccgggcgccggccccgaccccaggccgccgaagccgccgtccatcgagcccgtcacctgcggcgagtctggcgacctgggcaagccggccgccgccatgacgttcgtgctcccgcgcgccgaggtgcctccgggcgactgggcgagcgcgtgccggaaggtcttccaggtgccggtgctcaagggctccgtcccgcccgacgcccagcacgacccgctgtggacgagcggcggcgggtacggcgaggcgctccgcgcggggttccagctcggctgggaccgcggctctggcccgtgcgcccgatgcgagcagtccggcggcaagtgcgggtacggccgcgccggcgagttcctgggatgcctctgcgccggcagccgcgtggacggcggcggcgactgcagtaagatgtcagccggctcctccgatctgccttggttcgggccaaaaagtaaaacagcagttattgccggtgtcgcggctggcgctggtgttgcaatacttgctgctgccatttttttgttcgtgaggcgcaagagaaagcagaagagagtggtcaactcgtcttcgaagctcctcaagtacagcggctctggcgggaccccgcgttcacgggtcggtgacatggagtccggcagcatcgaggacccgcctacgcatctcttcacctacgaggagcttgaggaggcgaccagttgcttcgacgaaaacagagagctcggtgacggtggcttcggcaccgtctacaaagggtacctcaaggacgggcgcgtggtggcggtgaaacggctgtacaacaacagctaccggcgcgtggagcagttccagaacgaggcggccatcctgtcggggctacgccaccccaacctcgtcatgttctacggctgcacgtccagccagagccgcgagctgctgctggtgtacgagttcgtggccaacggcacggtcgccgaccacctgcacgggcagcgggccgccgagcgcgccctcccgtggccgctccgcctcggcgtcgccgtggagtccgccgcggcgctcacctacctgcacgccatcgagccgcccgtggtgcaccgcgacgtcaagaccaccaacatcctcctggacgccgactaccacgtcaaggtcgccgacttcggcctctcccgcctcttccccctcgacgtcacgcacgtctccaccgctccccagggcacgccagggtatgtagatccagagtaccaccagtgctaccagctgacggacaagagcgacgtgtacagtttcggagtggtcctggtggagctcatctcgtccaagcccgccgtcgacgtcacccggcaccgcaacgagatcaacctggccggcatggccatcagcaagatccagaagtgccagctggaggagctcgtcgacatcgacctgggctacgagaccgacccggccaccaagaaggcgatgacggcggtcgccgagctggccttccgttgcctgcagcagaacggcgagatgcgcccgccgatcaaggaggtgctcgaggtgctcaggagcattcagggcgaataccagacggggaaggacggagacaaaaacaaggacggacccctctctcccaccacggttcatgctccgtgggagagcagggccacgacgcccaacaccagcagggactagaccagtcggtcagtgtcaaggactggagaccggagaagttgctgctgctgtgtgactgtgaggcatgccagattgcctgtcatttgttttcaggcttcgcggtccggttcctgctgatgtatatatttgttttgttgggtctgtcagagctgagggaatgtacatatatgtgaaagagtggtgaatgatatatataatacacatataaataaatgagtactagtaaat

SEQ ID NO: 113129 - DNA, 988 bp, Zea Mays
cggccatggaggccgcaagcccgcaagcaatcaggagccggggagatgtggagacgccggcgacgaggcgaagaagaaggaggcggcgcttgcatcaagcaggctcctcgacccggcgttcaagccctccaaactatcccaggaccggctcgacaagtttaaggaattacacaagaaacggttacagataactgaaaagccgaagtataaaagaaaactgaaaggaaccgctgggagaagtaccaaagtaaccagtgattacaaattcactaatacggatgcatctgctgatagttctccaagagatgtacatcatacgtcatcaattacaggaatccaaggggatcctgcatcaggcctgtcctcgaggaacaaaagaaagctacattgggggcttgatattaaaggacgatggggaaggaaggcaaacatgtaaaaatctgaagacccaaccgcaaaagcatatccacagttccacaccccacttgattcagatttgaaaggagaaggacagaggaaagtggcaggccttttccacggatcatcaggttgcttgtaaggttcatgtttgtgacagcaaccagaaacactggagcgtggacagcagtctcagaactaagcagtaagctatagtatccaaacttacaagtgcgatgatagtttgtttatcggtttcgcttgctgtgtggtgtagtttgtctgtttttgtttgttttttttttggtgaaaaaaacactgatggtgcaagtgcaacagaggcccacgtggctcgtcaaccttttgcaaggcctggcaggcccgcgttgatttagcccttttcccttgtaccttatgtttatgatctgggggttgagcctattatgatcaagatgttgttgaggtatatattaagattattctctcacacaaatagcctgaggtgccgtttgaatctgttcattttttgaggaatttgaatttacataataaagtacgctatttgacttgg

SEQ ID NO: 113130 - DNA, 110 bp, Zea Mays
tttatttatattaaaattgtagctttcttttgttttgatctctatagacataatctgcagctgggtccaagtctcagaacacaaaaaataggcggacaaaatcataaacc

SEQ ID NO: 113131 - DNA, 5351 bp, Zea Mays
atggcgatgggagcgacggttcgcgcagcggctgcagatgccatggtgacgttcttgtgggtgttgtgcgcctccgcgctcgatgtctccatagcagccgtcacgtcgtaccaggggttgcaggagggcaccggccactatgcgctcctcgtcaccacgtccctcctctcggtgctcctcttcaccttcgacctcctctacggtgtgctcggtggtgccagcttcaacttcactgactttgccacctcctattccgccggactcgatagcccctccctcttctctgttgcgctccacttcctggcacggactgtcgtggtggtgaagaggaccactttgcgcgtggctcggaaggatgcctatatggcagagttagatttgtttgctaaaggattgcatgaaaggctggttcctttcctgggtcactgtcttgataaagaagaagaaaaggttcatgtgtataggtttgtccaaaatggtgacttgtcaagtgcactacacaaaaagtcaagggaggaagatgaaggcttgcaatctttggactggataaagaggttgaagattgcaacgggggtagctgaggctctttgctatctgcatcatgaatgttctccaccgatggttcatagggatgtgcaagccagcagcatccttcttgatgataaatttgatgtacgccttggtagcttgagcgagcttcctgcaattgaatcagtcttgaatgctatgaagagcaatacaaatcagcgagtatctccaatatttgctcttgtcctatgccctacaagagagcttgctattcagcttacagctgaagcaaatgtcttgttaaagtaccatgaaggaattggtgttcaatctcttattggtggcactagattcaagcttgatcagagacgattagaatctgatccatgccagccagatcatctattagatgaaaccaaccgtgctggaagcaagattagggtggaaagggctgagcgaagctcctacacgtttcaatcacagttagatggcggtgcacagttctgtgtatcacaagaggcatctaggttgacctcgctcttcttagtgttcatgcccactgcgcaagacaacaccacaacgccgatggagttggaagatttcatcaggctcgactcgatctggatgagatggactctgctcgctgaggaccgaacaccgaagccaggcagccagccgaggaagccaggcgacaggcgacgccaagtcgagaacaccctaggtggtcgctcgcaggctgcgagtgagagccgtggcggagtcgccgtccttgcccacggaggaggacacagccgccggcgcagtgggatggcgacgccgacgcccatgcccggaagcgaggggacgctcgtggcggtgatgccgcggtccccgtccccgacgccggcggaggcggggacctcggcgaccgagacgcccgtgctaatattcctttacttccacaaggcgatccgcgcggagctcgaggcgctgcacggcgccgccgtgctcctggccaccgagcgcaccggcgatgtcgcggcgctcgccgagcgctgccgctttttcttcagcatctacaaacaccactgcgatgccgaggacgcggtcatctttccagcacttgacatccgagtaaagaatgttgcagggacctattccttagagcataaaggagaaagcgatctttttagccagttatttgatctcctggaattggacatacagaatgatgatgctcttcgtagggagcttgcgtcatgtacaggcttttctttccttcctctccctgcttctgttctgctgtttatcaggctggtctttccattgctgacaaagaaattttcatgtgaagaacaagctgatttagtgtggcaattcctctgcaacattcctgtcaatatggtagcagagttccttccatggctttcaacttctgtcacatctgatgagcaccaagacatccgtgactgcttatgtaaagtagttcctgatgagaaacttctccaacaggttgtattcacatggatggaggggaaagcagcaagagaagtggcagagagctttgccactggtaatttagtaagaaatcatagtgctgaggatgtctcagaccatggggagatttatgtttgttcacagcaagaatctaaacttgggagtaaaaactgtgcagaatctaatggttctcaagccgacaggcatcctatagatgatattttatactggcacaacgctatccgcatggagttacatgatataaaaaaagaaacaagaagggtgcaacagtctgggaatttttctgatatatcagccttcaatgagaggcttcagttcattgcagatgtatgcatctaccacagtatcgctgaggatcaggttgtttttcctgcagtcgatagtgagctgtcctttgtgcaggagcatgctgaagaagaacacaggtttaacaatttcaggtgtttaattcagcaattccaaatagcaggagccaaatcaactgcactggacttctactcaaaactgtgttcacatgctgataaaatattggagacaatcgaaaaacacttcagcaatgaagaaaccaaggtgcttcctcaagctaggatgtttttctctcctgaaaagcaaagggaactttcgtacaaaagtctgtgtgttatgccattgaaattattggaacgtgttttaccatggttggtgtcaaagctgagtgatgagcaggcaacttcatttcttcagaatatacgattggcagcatcaccatctgaaactgcactggtcactcttatctctggttgggcatgcaaaggccgggacaaatccaaatctggagaatatttatgcttaacatcaggtacagcaagatgcctgtcagatgatgtagatgatcagggaaaatgccgatcattctgcccatgtgcttcacacaacagctcagatctttctctgcagctacaaactgaaaatggttctaggccaggcaagcgaggaaaagatgcagtatcttttcctggtactaatggaagctactgctctcaaactgctgacattgatgcaagtccatgtagcaaaaagccttgttgtattcctgggttgagagtaaagagtagcaaccttggtattggttccctggcttctgtgaagtcctttcgctctttaccatacaattctactgctccttcaatatattcgagcctcttctcatgggagacagatgcatcattgtcttgttcggatggcatttcaaggccaattgatacaatattcaaatttcataaggcaattcgcaaggatttagagtacttagatgttgaatctggaaggctcattgatggtgatgagtcttgccttcgccaattcattggaaggttccgtttgttatggggtctttacagggctcacagcaatgctgaggatgaaattgtgttcccagcattggaatccagagaaacattgcacaatgtgagccattcatatactcttgaccacaagcaggaagaacaattattcgaagatatctctgatgttctctttcagctttcacaactacatgatagccagggccatgcccagactaaagttaatgaagtaaagcaaagctgtttccattcatctaatgacgttgattttactaggaagtataatgagcttgccacaaaacttcaggccatgtgcaagtctatccgggtcgccttgactaatcatgtccatagagaagaacttgaattgtggccgttgtttgacaaacatttttctgtggaggagcaagataaacttgtaggtcgtataattggttcaacaggtgctgaggttctccaatctatggtaccctgggttacatcagctctcactcaagaggagcagaacaaaatgcttgatacctggaagcaagcaacaaaaaatacaatgtttggggaatggctaaacgagtggtggaagggagctggaacatctgattcttcagcagaggcaccctctgctccagaagatagtcatttacaagataagcttgaacaaaatgaccagatgtttaagcctggctggaaggacatatttcgaatgaaccagagtgaacttgaggctgaggtgcgaaaggtttcacgagatcctacacttgacccaaggcggaaggcctatctaattcaaaatctcatgacaagccgctggatagctgctcagcaaaagttaccggaaccaaattctgaagaatgtagtgatgatgctagtatacctggatgtgcgccttcatatcgagaccaggagaaagaaatttatggttgtgaacattacaaacggaactgcaaacttgttgctgcatgctgcaacaagctgttcacatgcagattttgccatgataaagttagtgaccatacaatggaaaggaaagcaacacaggaaatgatgtgcatggtgtgcctaaagattcaacccgttggtccgttctgccaaaccccatcttgtaacagactatcgatggcaaagtactactgcaacatctgcaaatttttcgatgacgaaaggactgtgtaccactgcccgttttgtaatttgtgtcgtcttgggaaaggtcttggtgttgatttctttcattgcatgaaatgcaactgctgtcttggaatgaaattaactgagcacaaatgtcgggaaaaagggctagagacaaattgtccaatatgctgtgacttcctgtttacatcaagtgccgcagtcagagccctcccttgcggccacttcatgcattcagcttgctttcaggcatacacttgtagccactacacttgtcctatctgctgcaaatctctgggagatatggcggtgtattttggcatgcttgatgccttgttggctgctgaagagcttccggaggaataccgtgataggtgtcaggtagcccagttcttctgttcgcgatttttattgtttcgaccgctggagtatatttaccaatttttattgcatcgctcgtccaggatatactgtgcaatgactgtgagaggaaaggcagatgtcgatttcactggctataccacaaatgcggctcctgtgggtcgtacaatacccgagttatcaagactgacactgcagattgctccacaccaaattagctggagggaacatttgtgcttatttgtagcctttttttttctcttatgtaaatatcttctagcgggaaggaaaaaagagatgtcctgtaggatagttaacataatttcattcgtagcgatatcagttttgtaagtgtagcagtttacaatttactaggtctagtgcgttgtactgccaaaatggacggttctgctggacaaaggacataatccgagaaaataggctagttagaacaa

SEQ ID NO: 113132 - DNA, 993 bp, Zea Mays
cctaaattcatgtgtccaaacctaaaaagtcaaatattttgggactgaggtagtattttcttgttctactttctccaattcaggtttatagttgatagtccaatactccaatgccatcaagtgatcaaatgagttgaaacctgtcaactttcccagtagtctcatcttccattgctaccactccatgttttgaaataaacatttggatttggaaataagcaatgtgtctcttctgacattggggtgttcttcaggactgtgtaccactgcccgttttgtaatttgtgtcgtcttgggaaaggtcttggtgttgatttctttcattgcatgaaatgcaactgctgtcttggaatgaaattaactgagcacaaatgtcgggaaaaagggctagagacaaattgtccaatatgctgtgacttcctgtttacatcaagtgccgcagtcagagccctcccttgcggccacttcatgcattcagcttgctttcaggcatacacttgtagccactacacttgtcctatctgctgcaaatctctgggagatatggcggtgtattttggcatgcttgatgccttgttggctgctgaagagcttccggaggaataccgtgataggtgtcaggatatactgtgcaatgactgtgagaggaaaggcagatgtcgatttcactggctataccacaaatgcggctcctgtgggtcgtacaatacccgagttatcaagactgacactgcagattgctccacaccaaattagctggagggaacatttgtgcttatttgtagcctttttttttctcttatgtaaatatcttctagcgggaaggaaaaaagagatgtcctgtaggatagttaacataatttcattcgtagcgatatcagttttgtaagtgtagcagtttacaatttactaggtctagtgcgttgtactgccaaaatggacggttctgctggacaaaggacataatccgagaaaataggctagttagaacaa

SEQ ID NO: 113133 - DNA, 983 bp, Zea Mays
atctgtttctctatcatcgcccacgtttccttccttccttcctccctccccattccttcccttccacgcgcccctccctcccatggtcctcatggccgccgtcgagaacgaccaccgccgcggagccaaggccacctctgcccagtcgaattccataggtcccgcgccgcggccgtcgtcccgcgcgcggctccacgatttctccttcctcaccctcagctggggcacgcaccgcgtgctccgctgctccaagagcggccccggctcgtcgccctcttccgcgtctccggagaccccgtccccggacaaggagagagcccaccgacccgagggcggcggctcgctgcggcagcgccagcgcttcgctcagcggccgtggaaccttcggacccgccgctccgccaccgccgccccgacgcgccaggcgggatcggacgaggagtctgaggccgcggagcgcgcgcctccgccgacggtggaggcgaagaagcgggcgctctccatcgccttgtccaagcaggagatcgcagaggacttcgcggcgattcgcgggacgcggcccccgcgccggcccaagaagcgcccgcgcacggtgcagcggcagctcgacttgctgtacccgggattgtgcctagcagatgtggcgcccggctcctacatgattgaagagaggtgattgttgctttggtggagcttccgatggacgggtttccagacgttgtgattttcttcttcttctttttgtataaatcttattctgatagctaacgcgtctgtctcataagtgttttgttttcggtgggttggaggaagttggggtggaatttcctgtgattatgtactgcggcgtcctcaatttgatttttagacatgtaggattgtttgtgtaaagtattctgatcactaggtgggatggatgtcttgtcctggcgccctgcagtgtacatggtttaatatatgaagcagttttatttaggtgttca

SEQ ID NO: 113134 - DNA, 747 bp, Zea Mays
cgtttccttccttccttcctccctccccattccttcccttccacgcgcccctccctcccatggtcctcatggccgccgtcgagaacgaccaccgccgcggagccaaggccacctctgcccagtcgaattccataggtcccgcgccgcggccgtcgtcccgcgcgcggctccacgatttctccttcctcaccctcagctggggcacgcaccgcgtgctccgctgctccaagagcggccccggctcgtcgccctcttccgcgtctccggagaccccgtccccggacaaggagagagcccaccgacccgagggcggcggctcgctgcggcagcgccagcgcttcgctcagcggccgtggaaccttcggacccgccgctccgccaccgccgccccgacgcgccaggcgggatcggacgaggagtctgaggccgcggagcgcgcgcctccgccgacggtggaggcgaagaagcgggcgctctccatcgccttgtccaagcaggagatcgcagaggacttcgcggcgattcgcgggacgcggcccccgcgccggcccaagaagcgcccgcgcacggtgcagcggcagctcgacgtaaggatttcggacctacgcttaaagccgtgttggttttcctcccgtccgaattcggtatctcatgggtttcttttttcgtttgtggttttcctggattgcagttgctgtacccgggattgtgcctagcagatgtggcgcccggctcctacatgattga

SEQ ID NO: 113135 - DNA, 672 bp, Zea Mays
gtaagaaaagagagagagagagaagtaacgcgcgcggagaagcaaactgaaaacagcacccgctcatgcgttcgcgctgcacacctgtttgctgtttttcttctcccgttcacctcgcgtgcgcgacaactagggcgaccgccgacgctctacgtccagctgcccatgtcttcgtcgggctctttgccggcgacaggaacccacaacaccaggtcaacaccatttcatgtaattcatattttgggaaacttcatgaggatttggtctgtttactccttgtatagctccttatccaacagtggagattcaatagttggctttatcttcagttgtcttgtacccagttcaatcatattcttggtcttacagaaaccttggagaggccggcctttgcccaactcacaggttgttcctacagttgtcaatggaggaatcatggcattctactttgtcttatggggtaaaggacttcttgcttgtggcccactagtgtatgtatccagttctcttagcaccatgattttttcacgtagctgcatggtctatggtgccgtgcatttatgccagggaatatctagttcaatcaccacatatgtgcaatgtttaaaccttgctgcgagctagtggtcatcagatcattgtggaaacaatttacacttgatggacatcaac

SEQ ID NO: 113136 - DNA, 1392 bp, Zea Mays
gtaagaaaagagagagagagagaagtaacgcgcgcggagaagcaaactgaaaacagcacccgctcatgcgttcgcgctgcacacctgtttgctgtttttcttctcccgttcacctcgcgtgcgcgacaactagggcgaccgccgacgctctacgtccagctgcccatgtcttcgtcgggctctttgccggcgacaggaacccacaacaccaggtcaacaccatttcatgtaattcatattttgggaaacttcatgaggatttggtctgtttactccttgtatagctccttatccaacagtggagattcaatagttggctttatcttcagttgtcttgtacccagttcaatcatattcttggtcttacagaaaccttggagaggccggcctttgcccaactcacaggttgttcctacagttgtcaatggaggaatcatggcattctactttgtcttatgggtgctctactggcagagtatgcaggtgctgttcttggagttctctctgctgctttatatggaaggaaagttaacatctggaaaaagattggtggacttgctgctatgttagtagcatattatctattgtcaattggatggtctacaagaacacattctcctttatatagctttggaagtgaaccaattgagaaggcaagacaaacatttggagtgaaagaaatggtggtgccaattaccgctgggatcttatctgctctgaggagagtattagctcggcgtgtctctctcaagaatcaacttaaaaggcggctccatgctataactattgcttctgctacttgttttctttttccgtttgccatgtgggatacaatcctaggctcagcgtccgacagcatagttaaatttcagctaccaaattgggcatacttgagtactgttttgttcggaatggtgcttatattctatgtcgacaatgttactgaagaaaagttgcatctggtcttctcttctccaaggcacttaatggtttcaacagggtgcatcatcgtgttggagatagtgtaccaaatggatttctccctttttggatttctggtctgttctgttattttgggattaggtatttttgaaacaacctccttggaacgctcaaagaaaagccctttggagacccatgaactatcgaatggggtgttccacaatcaattgccaattacagaacttccaagctgaagaatatatgacctgggtgagtgagatgcattgaaaaaaatttgtgtttgcttaagtatgatttttgaatgatttatctgttaggtcgagattgtggtgcaagttaatattagatagcatgtttcaatggtggactgttacggtttgagcattagtatcgattgcggaagaatttcttcctgacatgtttatatag

SEQ ID NO: 113137 - DNA, 1507 bp, Zea Mays
gtaagaaaagagagagagagagaagtaacgcgcgcggagaagcaaactgaaaacagcacccgctcatgcgttcgcgctgcacacctgtttgctgtttttcttctcccgttcacctcgcgtgcgcgacaactagggcgaccgccgacgctctacgtccagctgcccatgtcttcgtcgggctctttgccggcgacaggaacccacaacaccaggtcaacaccatttcatgtaattcatattttgggaaacttcatgaggatttggtctgtttactccttgtatagctccttatccaacagtggagattcaatagttggctttatcttcagttgtcttgtacccagttcaatcatattcttggtcttacagaaaccttggagaggccggcctttgcccaactcacaggttgttcctacagttgtcaatggaggaatcatggcattctactttgtcttatggggtaaaggacttcttgcttgtggcccactagttgctctactggcagagtatgcaggtgctgttcttggagttctctctgctgctttatatggaaggaaagttaacatctggaaaaagattggtggacttgctgctatgttagtagcatattatctattgtcaattggatggtctacaagaacacattctcctttatatagctttggaagtgaaccaattgagaaggcaagacaaacatttggagtgaaagaaatggtggtgccaattaccgctgggatcttatctgctctgaggagagtattagctcggcgtgtctctctcaagaatcaacttaaaaggcggctccatgctataactattgcttctgctacttgttttctttttccgtttgccatgtgggatacaatcctaggctcagcgtccgacagcatagttaaatttcagctaccaaattgggcatacttgagtactgttttgttcggaatggtgcttatattctatgtcgacaatgttactgaagaaaagttgcatctggtcttctcttctccaaggcacttaatggtttcaacagggtgcatcatcgtgttggagatagtgtaccaaatggatttctccctttttggatttctggtctgttctgttattttgggattaggtatttttgaaacaacctccttggaacgctcaaagaaaagccctttggagacccatgaactatcgaatggggtgttccacaatcaattgccaattacagaacttccaagctgaagaatatatgacctgggtgagtgagatgcattgaaaaaaatttgtgtttgcttaagtatgatttttgaatgatttatctgttaggtcgagattgtggtgcaagttaatattagatagcatgtttcaatggtggactgttacggtttgagcattagtatcgattgcggaagaatttcttcctgacatgtttatatagcccctcaaccaatagactttaagccccttttccctattcttgtaccccagctgccacatggtgaatggccgcggttgcacacct

SEQ ID NO: 113138 - DNA, 1517 bp, Zea Mays
gtaagaaaagagagagagagagaagtaacgcgcgcggagaagcaaactgaaaacagcacccgctcatgcgttcgcgctgcacacctgtttgctgtttttcttctcccgttcacctcgcgtgcgcgacaactagggcgaccgccgacgctctacgtccagctgcccatgtcttcgtcgggctctttgccggcgacaggaacccacaacaccagttgtcttgtacccagttcaatcatattcttggtcttacagaaaccttggagaggccggcctttgcccaactcacaggttgttcctacagttgtcaatggaggaatcatggcattctactttgtcttatggggtaaaggacttcttgcttgtggcccactagttgctctactggcagagtatgcaggtgctgttcttggagttctctctgctgctttatatggaaggaaagttaacatctggaaaaagattggtggacttgctgctatgttagtagcatattatctattgtcaattggatggtctacaagaacacattctcctttatatagctttggaagtgaaccaattgagaaggcaagacaaacatttggagtgaaagaaatggtggtgccaattaccgctgggatcttatctgctctgaggagagtattagctcggcgtgtctctctcaagaatcaacttaaaaggcggctccatgctataactattgcttctgctacttgttttctttttccgtttgccatgtgggatacaatcctaggctcagcgtccgacagcatagttaaatttcagctaccaaattgggcatacttgagtactgttttgttcggaatggtgcttatattctatgtcgacaatgttactgaagaaaagttgcatctggtcttctcttctccaaggcacttaatggtttcaacagggtgcatcatcgtgttggagatagtgtaccaaatggatttctccctttttggatttctggtctgttctgttattttgggattaggtatttttgaaacaacctccttggaacgctcaaagaaaagccctttggagacccatgaactatcgaatggggtgttccacaatcaattgccaattacagaacttccaagctgaagaatatatgacctggctgccacatggtgaatggccgcggttgcacacctcaaaatcagtggctcgattctttgtgcgaaggtttagaaccacagacagaaagcacggatatttttgacctgcaaatttgtctttgtgatcttccattcttgttggccacctgcatcctgtacatgccaactactcccagccccagtagatgtgtatcggtatcccccttggagatattgcaattgtcacagcatcctgtctcccgacttgggtagttgcgaaattttgcttttctcgcttggagacgcagatggttaaaaggcggctgttttgactgctgtagcttgcattgatacatgtaagtatgtgacccgtccatgatatgattaacatgccgactttatctttgacctgtc

SEQ ID NO: 113139 - DNA, 1687 bp, Zea Mays
gtaagaaaagagagagagagagaagtaacgcgcgcggagaagcaaactgaaaacagcacccgctcatgcgttcgcgctgcacacctgtttgctgtttttcttctcccgttcacctcgcgtgcgcgacaactagggcgaccgccgacgctctacgtccagctgcccatgtcttcgtcgggctctttgccggcgacaggaacccacaacaccagttgtcttgtacccagttcaatcatattcttggtcttacagaaaccttggagaggccggcctttgcccaactcacaggttgttcctacagttgtcaatggaggaatcatggcattctactttgtcttatgggtgctctactggcagagtatgcaggtgctgttcttggagttctctctgctgctttatatggaaggaaagttaacatctggaaaaagattggtggacttgctgctatgttagtagcatattatctattgtcaattggatggtctacaagaacacattctcctttatatagctttggaagtgaaccaattgagaaggcaagacaaacatttggagtgaaagaaatggtggtgccaattaccgctgggatcttatctgctctgaggagagtattagctcggcgtgtctctctcaagaatcaacttaaaaggcggctccatgctataactattgcttctgctacttgttttctttttccgtttgccatgtgggatacaatcctaggctcagcgtccgacagcatagttaaatttcagctaccaaattgggcatacttgagtactgttttgttcggaatggtgcttatattctatgtcgacaatgttactgaagaaaagttgcatctggtcttctcttctccaaggcacttaatggtttcaacagggtgcatcatcgtgttggagatagtgtaccaaatggatttctccctttttggatttctggtctgttctgttattttgggattaggtatttttgaaacaacctccttggaacgctcaaagaaaagccctttggagacccatgaactatcgaatggggtgttccacaatcaattgccaattacagaacttccaagctgaagaatatatgacctggctgccacatggtgaatggccgcggttgcacacctcaaaatcagtggctcgattctttgtgcgaaggtttagaaccacagacagaaagcacggatatttttgacctgcaaatttgtctttgtgatcttccattcttgttggccacctgcatcctgtacatgccaactactcccagccccagtagatgtgtatcggtatcccccttggagatattgcaattgtcacagcatcctgtctcccgacttgggtagttgcgaaattttgcttttctcgcttggagacgcagatggttaaaaggcggctgttttgactgctgtagctgtggtgcaatccacaggaataaaatattgtagaagtagtagaagccggtatggattaaagttgtgaccgaagtgcattgatacatgtaagtatgtgacccgtccatgatatgattaacatgccgactttatctttgacctgtccgtgactgcaatcagcgagtctcctgcatgctcgacagaatgcacatgtaggcataccattatgggaaatggtttgaaccccttgattaataataaggtgtttgatttgaggagtgagttcatcatcta

SEQ ID NO: 113140 - DNA, 144 bp, Zea Mays
tttttcttttttataaggaccctctggcactattctatgatactatggcagggggaagggcgcacacgtctggagcccagctgacttccaagctggcacagcgcaaccacaacaccagctcacgcgtccagcacaatcccctgc

SEQ ID NO: 113141 - DNA, 77 bp, Zea Mays
ctcgaattaaaatacagggctatatacaggaaaactacttcaacagttcctcattttgtaaaatttggtaaaaaaaa

SEQ ID NO: 113142 - DNA, 1703 bp, Zea Mays
tctacaatgagttatctagagctacagcatagggtactggaaaaaaaaatctcatcgactctctcctgagtcctgactcctgacatctccgatcgtcaccgtccccgtccccggcgccgtccctctcgctcttgtcctcggtgccgcacctcctacatctctgtctcaccgctttagcacggccaccacgcccgcctgcgctagatcccatctgaagccggcggccatcatacccgtgagcgctagctgggctgcatctctcacctccacagccagcaagcgagcgtggttagcgccgcagtggtttcaccgaccttagatcgggccgtaagctcgaggactgaccttaatttcttgagcttaaggtctcagtgggtttaatcccgtagtgtatgaggttgacctttaaaggccttacggcccccttgtttcgcacgctacagatatcgagctgttgacatctgcgggtgcatctgcggacagccttgacgaggctgccgacgatgtcgtctctcaactcgctcttcaaccgctccaccttcggcacaaaatgaaatgcgagttgccactttgatgcccagtgctagatgttgtgggacaatttcagcaaaacatgtttaaatcttgtcatttcaagaatcaagctgctgcgcaacaggagggagttacaactaataaatatgcgcaaagaaatggttcaatatcttcagactggccaggaatcaatcgcgaggattcgagtggagcacattattcgggagcaaaatatattggctgcctatgagatcgttgagcttttctgtgaatttgttctggcaagagtccctattgttgaggtccaaaaggaatgccccttagaactgcgtgaagccattgctagtataatctttgcatcaggaaggtgttcagacttgcctgagctaatgcatctccgtaatttgtttaccaccaagtatggaaaggagtttgttgctggtgctatggaattgcgccccgacagcagtgtcaaccgcacaataattgaaaagctctcggtgaaggctccatcaggtgattcaaagctaaaagtcttgaaagctattgcccaagagtacaatattgaatgggattcatctaatactgaagcagaattcaacaagaaatatgaagatctactggacggctcgggatcttcggtccaccagatccagacacctatcattgagggctcagtgagctcaccagttgtttctgctccaagagataagacgccagcattgaattcacctgtcattgatgccgaaaaacaccaagttcgcgaatctccgacttcaccagctggaggtgcaagagctggtgttgtcactaagggcaatgtggtaaccatgggccatcactcccccgctgaggagatgccctccaccagcccaagttcatcagacgcgctggagaaagcccgagctgctattgcagctgccacccgcgcatctgctgctgctcgcgccgcagctgaacttgcaaaagttaaaattacaaatcaatgacacctccagttcgggcaaggcgtgtcaggaagtttaatctggcaactgatcaccaggacagactgaaatgtatttcattgaataaattgttactgtatattccctttgtgagcacttggcacatcatataaggagcgtggctcctcgcctttcttcgaatgtactcaaagagaactatct

SEQ ID NO: 113143 - DNA, 1745 bp, Zea Mays
tctacaatgagttatctagagctacagcatagggtactggaaaaaaaaatctcatcgactctctcctgagtcctgactcctgacatctccgatcgtcaccgtccccgtccccggcgccgtccctctcgctcttgtcctcggtgccgcacctcctacatctctgtctcaccgctttagcacggccaccacgcccgcctgcgctagatcccatctgaagccggcggccatcatacccgtgagcgctagctgggctgcatctctcacctccacagccagcaagcgagcgtggttagcgccgcagtggtttcaccgaccttagatcgggccgtaagctcgaggactgaccttaatttcttgagcttaaggtctcagtgggtttaatcccgtagtgtatgaggttgacctttaaaggccttacggcccccttgtttcgcacgctacagatatcgagctgttgacatctgcgggtgcatctgcggacagccttgacgaggctgccgacgatgtcgtctctcaactcgctcttcaaccgctccaccttcggcacaaaatgcaaaacatgtttaaatcttgtcatttcaagaatcaagctgctgcgcaacaggagggagttacaactaataaatatgcgcaaagaaatggttcaatatcttcagactggccaggaatcaatcgcgaggattcgagtggagcacattattcgggagcaaaatatattggctgcctatgagatcgttgagcttttctgtgaatttgttctggcaagagtccctattgttgaggtccaaaaggaatgccccttagaactgcgtgaagccattgctagtataatctttgcatcaggaaggtgttcagacttgcctgagctaatgcatctccgtaatttgtttaccaccaagtatggaaaggagtttgttgctggtgctatggaattgcgccccgacagcagtgtcaaccgcacaataattgaaaagctctcggtgaaggctccatcaggtgattcaaagctaaaagtcttgaaagctattgcccaagagtacaatattgaatgggattcatctaatactgaagcagaattcaacaagaaatatgaagatctactggacggctcgggatcttcggtccaccagatccagacacctatcattgagggctcagtgagctcaccagttgtttctgctccaagagataagacgccagcattgaattcacctgtcattgatgccgaaaaacaccaagttcgcgaatctccgacttcaccagctggaggtgcaagagctggtgttgtcactaagggcaatgtggtaaccatgggccatcactcccccgctgaggagatgccctccaccagcccaagttcatcagacgcgctggagaaagcccgagctgctattgcagctgccacccgcgcatctgctgctgctcgcgccgcagctgaacttgcaaaagttaaaattacaaatcaatgacacctccagttcgggcaaggcgtgtcaggaagtttaatctggcaactgatcaccaggacagactgaaatgtatttcattgaataaattgttactgtatattccctttgtgagcacttggcacatcatataaggagcgtggctcctcgcctttcttcgaatgtactcaaagagaactatctggaatgcataatgttgcatttactgttcactagttagttattgtatcattacggtttttttacaatacaaaccaatctaaattgcagtggttagag

SEQ ID NO: 113144 - DNA, 1579 bp, Zea Mays
ctcatcgactctctcctgagtcctgactcctgacatctccgatcgtcaccgtccccgtccccggcgccgtccctctcgctcttgtcctcggtgccgcacctcctacatctctgtctcaccgctttagcacggccaccacgcccgcctgcgctagatcccatctgaagccggcggccatcatacccgtgagcgctagctgggctgcatctctcacctccacagccagcaagcgagcgtggttagcgccgcagtggtttcaccgaccttagatcgggccatatcgagctgttgacatctgcgggtgcatctgcggacagccttgacgaggctgccgacgatgtcgtctctcaactcgctcttcaaccgctccaccttcggcacaaaatgcaaaacatgtttaaatcttgtcatttcaagaatcaagctgctgcgcaacaggagggagttacaactaataaatatgcgcaaagaaatggttcaatatcttcagactggccaggaatcaatcgcgaggattcgagtggagcacattattcgggagcaaaatatattggctgcctatgagatcgttgagcttttctgtgaatttgttctggcaagagtccctattgttgaggtccaaaaggaatgccccttagaactgcgtgaagccattgctagtataatctttgcatcaggaaggtgttcagacttgcctgagctaatgcatctccgtaatttgtttaccaccaagtatggaaaggagtttgttgctggtgctatggaattgcgccccgacagcagtgtcaaccgcacaataattgaaaagctctcggtgaaggctccatcaggtgattcaaagctaaaagtcttgaaagctattgcccaagagtacaatattgaatgggattcatctaatactgaagcagaattcaacaagaaatatgaagatctactggacggctcgggatcttcggtccaccagatccagacacctatcattgagggctcagtgagctcaccagttgtttctgctccaagagataagacgccagcattgaattcacctgtcattgatgccgaaaaacaccaagttcgcgaatctccgacttcaccagctggaggtgcaagagctggtgttgtcactaagggcaatgtggtaaccatgggccatcactcccccgctgaggagatgccctccaccagcccaagttcatcagacgcgctggagaaagcccgagctgctattgcagctgccacccgcgcatctgctgctgctcgcgccgcagctgaacttgcaaaagttaaaattacaaatcaatgacacctccagttcgggcaaggcgtgtcaggaagtttaatctggcaactgatcaccaggacagactgaaatgtatttcattgaataaattgttactgtatattccctttgtgagcacttggcacatcatataaggagcgtggctcctcgcctttcttcgaatgtactcaaagagaactatctggaatgcataatgttgcatttactgttcactagttagttattgtatcattacggtttttttacaatacaaaccaatctaaattgcagtggttagag

SEQ ID NO: 113145 - DNA, 935 bp, Zea Mays
ttttttggacttgtggatctggtctaatcttatgtcaccacaattaggatgtcaaacaatctggtaatgtagaaggtttgttggctgtttactgtgaatcggggcctaatgattttgtaaacatgatgcagttaattaaggaatttagaagagaatgagaaccaactaactgcaagaatatatatgcctccacaagaccacaactccatcttgaactaaatgtgcagctaagtttgaaatgagagtaatctagaaatcacttcatttattatgtgctggtatgatgtatgcaggacggctcgggatcttcggtccaccagatccagacacctatcattgagggctcagtgagctcaccagttgtttctgctccaagagataagacgccagcattgaattcacctgtcattgatgccgaaaaacaccaagttcgcgaatctccgacttcaccagctggaggtgcaagagctggtgttgtcactaagggcaatgtggtaaccatgggccatcactcccccgctgaggagatgccctccaccagcccaagttcatcagacgcgctggagaaagcccgagctgctattgcagctgccacccgcgcatctgctgctgctcgcgccgcagctgaacttgcaaaagttaaaattacaaatcaatgacacctccagttcgggcaaggcgtgtcaggaagtttaatctggcaactgatcaccaggacagactgaaatgtatttcattgaataaattgttactgtatattccctttgtgagcacttggcacatcatataaggagcgtggctcctcgcctttcttcgaatgtactcaaagagaactatctggaatgcataatgttgcatttactgttcactagttagttattgtatcattacggtttttttacaatacaaaccaatctaaattgcagtggttagag

SEQ ID NO: 113146 - DNA, 1501 bp, Zea Mays
atatttgctctaagttagtactttttcagaaactgtagaccggagcaatggaggaagagaaagcggcggcgtactacgacgagctcaatcgcaagggcgagggcgcccgccgcttcaagcaggggcttggcttctcctcctcatccgccactgccttcccttccaagcccaccgcctcctccttcctatccggttttgttcgcgcgggcgcagcccctggccccgccaaacagccgttaccgcattccaggaccccatccagtccgcaccatcgctcaagttcaccgcctctttcgcgtcccaggatccgctccaggtccaggtccaggtccccgtctcgctccagccggcgccaatcgagatcgaggtcccggtcgagggagcgcaggcgccgctccaggtctagggagagggaccgcagggcatcctgtagacgctctaggtcgcgggggtcgagatcgccttctcgccggagcggcaggagcctgcacttggaagcccggcgggaacggcatggggatcagcggcggcggcacgacgacggccatcagagctctaagggtcgcagtgatagggacgggggcaaaatggactactcgcggctcataaaaggatatgataaaatgactccagctgagagagttaaagcaaagatgaagtttcagctttcagagacagctgcaaaagattccactcttggaactgcaactgtggggtgggaaagatttcaatttaataaggatgctccacttgatgaagataatgacgatgttgaagttgctaatgatgatgcttcactggtgaagaatattggaaagagcttccggctttctgctgtggaggtagagtgaaaagcaatgagttatgtattccgcacattttacattattcttagccattattgctttccctcccattccttgttcttcacctatcctagtcaaagcgcgaagataaaatcagagatgcgcatgatgaggctatatttggtgtacctacaacttcatttgttgatgttgaaattggtggggacgagcttaaaaccaatcatgaagacgggaaagttgaagacacagaatctgatgaacctagcagctccctcatcagcgataaagtactggccatgcaaaaaggttcctggagggatcgggctcagaagttgcggaagaatttgaacacatgaactttgtccttgcaactgctcaagttcgaatttgccagcgtgtgacagagatctggcatcttgtgaagatttgagcctgaagttgaacttagccccacccatcccttagaatagttgcataatgtaagttgtaagatttgcgcctgctttctgtttcctcgagtcagcgcgcaagtgacaccttgtagtgaactgagtttggaaattcatttggttattgtgatttggcaaatggcctgaatctattcatgtttaaaaagatgtatgtgcttcttgctccctccattagcagtgccattttcaagttggccttcaact

SEQ ID NO: 113147 - DNA, 1403 bp, Zea Mays
atatttgctctaagttagtactttttcagaaactgtagaccggagcaatggaggaagagaaagcggcggcgtactacgacgagctcaatcgcaagggcgagggcgcccgccgcttcaagcaggggcttggcttctcctcctcatccgccactgccttcccttccaagcccaccgcctcctccttcctatccggttttgttcgcgcgggcgcagcccctggccccgccaaacagccgttaccgcattccaggaccccatccagtccgcaccatcgctcaagttcaccgcctctttcgcgtcccaggatccgctccaggtccaggtccaggtccccgtctcgctccagccggcgccaatcgagatcgaggtcccggtcgagggagcgcaggcgccgctccaggtctagggagagggaccgcagggcatcctgtagacgctctaggtcgcgggggtcgagatcgccttctcgccggagcggcaggagcctgcacttggaagcccggcgggaacggcatggggatcagcggcggcggcacgacgacggccatcagagctctaagggtcgcagtgatagggacgggggcaaaatggactactcgcggctcataaaaggatatgataaaatgactccagctgagagagttaaagcaaagatgaagtttcagctttcagagacagctgcaaaagattccactcttggaactgcaactgtggggtgggaaagatttcaatttaataaggatgctccacttgatgaagataatgacgatgttgaagttgctaatgatgatgcttcactggtgaagaatattggaaagagcttccggctttctgctgtggagtcaaagcgcgaagataaaatcagagatgcgcatgatgaggctatatttggtgtacctacaacttcatttgttgatgttgaaattggtggggacgagcttaaaaccaatcatgaagacgggaaagttgaagacacagaatctgatgaacctagcagctccctcatcagcgataaagtactggccatgcaaaaaggttcctggagggatcgggctcagaagttgcggaagaatttgaacacatgaactttgtccttgcaactgctcaagttcgaatttgccagcgtgtgacagagatctggcatcttgtgaagatttgagcctgaagttgaacttagccccacccatcccttagaatagttgcataatgtaagttgtaagatttgcgcctgctttctgtttcctcgagtcagcgcgcaagtgacaccttgtagtgaactgagtttggaaattcatttggttattgtgatttggcaaatggcctgaatctattcatgtttaaaaagatgtatgtgcttcttgctccctccattagcagtgccattttcaagttggccttcaact

SEQ ID NO: 113148 - DNA, 1482 bp, Zea Mays
ggagatcagatgagccaagaaagcacccccgcgtgccatgcagtcgtggcccctcccccgccccacgtcctccttgtctctgccccttttcagggccacgtcaacccgctactcgccctcggccagcgcctcgcttccatgggcctcctcgtcaccttcaccaccgcagtccacacgggcctcagattcaagcaccagcagcacggcgaggacggcgcggccgtggacgccgtcgggcgcggcgcgatgcgtttcgagcacctgcgtggaggcgaggtttgggccccggatgacccacgctaccacgtcgccgacgacgtggggcgcaacctcgacgccgtggcctcggtggcgctctccgagctcatccgtcgccaggccgacgcagggcggccagtcacctgtgtcgtagccaacgttttcgcaccgtgggcgctccgcgccgcgggagccatgggcgtcccgggcgccatgctgtggacgcagtcctgcaccgtcatgtcgctgtactaccactacttccaatcactggcggcgttcccctcgaaggaggctgggccggacgcgcccgtcgatgtccctgggctgcccacgctggcggccggggatctccccgcgttaatccatgagcctgaggagaacatatggcgccaagcgctcttgtcggactttcgcagcctccgcgagacggtgtcgtgggttcttgtcaacaccgccgacgagctggagcacgcagccatcgaagcgcttcgcccgcacctgccagttctaccattaccagtcggtccgctcctcgacatggagaaaataagcgccgccgacgatgccgacgacgaatgcacggcgtggctcgatgctcagcctccgcgatcggtggtttttgtggcgttcgggagcctcgtgaagctggatcgcgacgagatggcggagttggcaggcgggctggcgtctacgcggcgaccgtgcctgtgggttgtgcgcgacgacagccgtgacctcctcccggacaccgccgtcgcgagcggcgacagctggggccggggtaagctggtgtcctggtgcgaccagcggcgtgtgctctcgcacagcgccgtcggatgctttattacgcactgcggatggaactcgaccacggaggcactcgcggccggcgtgcccgtcgtcgcgtaccccgtgttctccgaccagcgcaccaacgccgcgttcctggtggacgtgtgcggcgtcgcggtccggctcccgacgtctcccacgcgagacgccctgcgccaatcggtcgaggtggtaatgggagatggcgcgcaagggaagcatatccgcgcaagggcccaggggtggagagacaagacctgcgcggcgttggctgaaggcggctcgtccgacatggccacccaggagttcgttgatgctgtactgtccataggaatgaactactcaagtatgccttttgtttagggttattttctttaaaaaaaacacatg

SEQ ID NO: 113149 - DNA, 618 bp, Zea Mays
atgtcaacatttttcccattgtcatccaggggaaacaatggatggatagtcatcaaggtccaggtcttcagctctgaagcttggtatgaaacgtccagttggaatgatgtcaacctttttcccattgtcatccaggtacttatttgggatgttgaagcacaaccaaatagacatgctgtcctaggagcaagcgagtctcgccctgatctggaaattgtggaatttgcgcttgccatgtgtccagcagaaccatatgtcctatcagaaggaaaggacaaatctgttgtcttgtggagcatccaagaccatatatctgcccttggggattcctcatcttctcctggagcatctgacagcaagcagtctgttaaaacaacaaatgaaaaggagagccctaaagttgatcctagaggtatatttcatggacatgatagcagagttgaagatgttcagttctacccttccagtgcgcaggagttttgtagtgtgggtgatgatgcttgtcttattctgtgggatgctcgaactggcactgctccagctgttaaggttgagaaagctcacagtggagatgttcattgtgttgattggaatcccttgatgttaactatatcttaa

SEQ ID NO: 113150 - DNA, 2815 bp, Zea Mays
aagtttggaacgaattttaaaaaaccagtggtttaaccggttttataaaccatggttgccagttgcctgagcctcacagcgcgcgccaccaccaccgcgccatgccgttctccgccaccgccgccggcgcctccaaaccctaaacccgccgcagcaatcaatggcgtccctcctctcctcccccgacgattccaagtcgctgtccgtcaccacctcatcgctcttcctctcctccatcgcctctctcccctcttcccatgccttctccatcttcacctccgcctccacgcctcttccccctgtcccggtctctgtgcctcccgccgcactcatcccgggctcccgcttccttgtcgatgccttccgccatgccggaaacttctctgtcgcctacttcctctcgcacttccactccgaccactacagtggcctcggcccttcctggcgccgcggccttgtattctgctccgcgccaaccgcacgcctcgtctcatccgtgctctctgtcccgcctcaacttgtcgtctccctcgatatcggtgtccgtatcaccgttgatgggtggggcgtcaccgccgtggacgccaatcattgtcccggtgccgttcagttcctcttcgcctctcctgggccgagagccgagagatatgtgcacaccggtgactttcgttacacagagtctatgacgcgtgatcctaacttgctggagttcgtccgtgctgatgcggtgtttctggacaccacatactgcaaccccaagtttacattcccttcgcaagaggattctgtggattacatagtgaatgcaatcaaacgtgtgaaagaggagagttcagtatcaggagagcgtgtgctatgtctgatcgccacctatgctgtcggcaaggagaagattttgctggaggtcgcacagcgctgtgggtgttcaatccatgtggacagtaggaagatgaagattttgacactgttggggttcggtgggaagaatagcgtttttactgaggacgcaacagggacggatgtgcatgttcttgggtggaatttgttaggggagacttcgccctacttccagccgaattttgtgaaattgaaggagatcatgatggagagagggtatgctaaggctgttgggtttgtaccaactgggtggatgtatgaaaccaagaaggaaggttttgctgttagggtgaaagattcactcgaaatccatcttgttccttatagtgagcactcaagttacaatgagttgcgcgactatgttaagtttttgcacccaaagagtgtgatccctactgccggagtggatgctgggaagctcgatagtaaggaggcagttgctctgcagaagcattttgctgggttggttgatgagacagcaaacaaacaggagttcttgatggcattccatcgtaggtcaatagatgctactcgtagctgcaaagatgtggttgttaattgctcgagccagcttgatggggaggatgctgctttgttaccagcaatctcttctgcttctgaacaacaggataaactgatggagaatactatgcaggaaacacttaaagaactgtcagatttcttaccctcgtgggtgagccaggaacagatcacagacctgctgatgagttctgaaggtgatgttgttaaagcagcatcgattttttttgagcgggaaagagatttctttgaagaagcaaatgtttcttgtaatggcacacccaagacagagaaaaaccattcttctaatcatgggtcgtctgctgatgtaagtagtcagcaagaatcttctttattttcacagaagcctgtggaatactctgcaaaactggtaaatttgtctcctatgagaatgaaaccaaatactcccaaaaaggtaaataagaggggttccagcaatacaaacaagccaaaaaagaaaggccgattaacttcctcaacagaatctggtgggcggaagcagtccacaattacaaattatttcattagagctactgaagctgcttttaaaaggtgtagacctgaaagagtaactgtggaggcacatcaaaataacgtggaaaacagtgatcagttagctgatactgaaaaaacacaagatcagattgtagaccagcttctccagattgtagatggtagcatgtctagagaatatgcagtttatttgcttgagaaggcaaacggagatgtggctgtagcagttgacatattttacagttcaagtgagggtaataatgtaattgaggttgacaagaatattatgctgcagaatgcacaaggtgaaactgcagataattgtagtgaaacagacatggctagtggttattctcaggctactccaaaaatgtcaaacttacatgtaggaacttctttagcacatggagattctgccaacacatcactgctaattgaaaagtatctacctattgaacatgcttgctggatagcaggacagcctgcaccatacttgcatttggctcgcacatttgacttggttgaaaaggaaaaaggaaagatcaaaactatcgcaatattttgcaacatgttcaggagtttgcttgctttatcccctgatgatgttctacctgctgtttatctatgtactaataaaatttctcctgaccatgaaaatatggaactgaacattggtgggagtctagttgtaactactctggaggaatcattaggaaccagcagatctaaaatacatgaaatgtacaaaacttacggtgatcttgaatgtcgtcagaatcaaacactaattgctcctccccgttctctctcgatttgtgatgtatattccacgcttcggaaacta

SEQ ID NO: 113151 - DNA, 610 bp, Zea Mays
ggttatgcctttgatatttggaatttgatctacagatgaaggagttctattcgggggaaaggatactgcccaagaagcctgtttactacaaaacagacgagcaaccagagctgtggttcaccgcagaacaaatctgggagatccgaggtgcagacctgacgttgtcccctgtccaccatgcggccattgggcttgtccatccatcgcgcggcatctcggtgaggatgccccggtacatccgttcagttccagaccggagcccagaggactgcggcacggccgccgatattgctagcatgttcaaagcccagacccggaagatggatgtcagcagcgagggccaggagtagtaggcaatgcaaagctcagcccatttcctcgtcctagctttgcttatgttcaccagttctgtatatacacagaacgaaccagggtgaagtgaaccaccctactgatcaaatggtgaaaactgaagcgtaggacaggcagcactgatcccactggctttcaatttttctttgtacagaaactgaatgcagttggaacgcggaaggaagcccacgagttgcacgttcggggggaaaaaaacaatgcataagtacatcaggta

SEQ ID NO: 113152 - DNA, 2375 bp, Zea Mays
tagcaaactttgctgtatttatatatgagagagaaagagagcgccggtctgtgtgtgttgggtgtgactttgaccttttacggcttgacacgtgctgtcgttacgacgagtcgacgcggtgccgtgccgtgccgtgtcgtgaccggccctgatacaaagcgcttcggacaaacacgacgaactcgatcgcttggcccaaataagttcgtgcgcacaggcgacaggcccatccacacatgcagctccaagcatcggtacggcactgagcatcggtgaggcaggcgacgcgcgccgcgcgagagaggcgcctcgcctggggagacagggagggtggccgagcccgagatggccgccgcgagggaggaggacgaggcggcacggccgctgcttctgctgccgcggacggcgcaggaggaccagaagtggtggaggcggtgggcgcgcgaggccgggtgggtggggtacctggccctgcccatggtggtggtgaacctgtcgcagtacgccgtccaggtgtcgtccaacatgatggtggggcacctccccggcgtgctcccgctctcctccgccgccatcgccacctccctcgccaacgtctccgggttcagcctcctgatcggaatggcaagtgcactggagacgctatgcggccaggcctacggtgcgaagcagtaccataagctaggcctagacacctacagagcggtcgtcaccctcctggtggtctgcgtccccctctcgctcctctgggtgttcatggacaagatcctggtcctcataggccaggaccctctcatctcgcaaggcgccgggaggtacatggtctggctgatcccggggctcttcgccaacgcggtgatccagccgctcaccaagttcctgcagacgcagagcctcatctacccgctgctgctgtcgtccgcggcgacggcggcggtccacgtccccctgtgctacgtgatggtgttcaagaccgggctcgggtacacgggcgccgccctgaccataagcatatcgtactggctgaacgtggccatgctcgtcggatacatcgccttctccagctcttgcaaggagacgcgcgcgcgcccgacggtcgaggtcttcaggggagtcgacgcgttcctgcgtctcgccctgccttctgcgctcatgatgtgtcttgaatggtggtcgtttgagctccttactctcatgtcagggcttctacccaacccagagctgcagacctcagtgctttcgatctgtctcacgagtgtaacattactcttcactataccttttggccttggagctgctggaagcacgcgagtggcaaatgagctgggcgctgggaaccctgacggagctcgatcagcagtccgcgtggtgctgtccatggcggggatcgacgcggtcgtcgtgagcggaagccttctggcggcccggcgcctcgtgggcatcgcgtacagcagcgaggaggaggtcatatctgcggtcgccgccatggttcctctggtctgcatcaccgccataactgactgcctacaaggaatcctctcaggcgtcgcccgcgggtgcgggtggcagcacctgggcgcgtacgtgaacctcggctcgttctacctgctggggatcccgatggcgatcctcctcggctttgtgctgcgcatggggtcgagggggctctggatgggcatcgtctgcggctccctgtcgcagaccacgctcatgtccgccatcacgttcttcaccgactggaacaagatggctgagaaggctagagagagggtgttcagcgacaagcagccacaagagccggggccatgatttgtacgccgactagcggcagctgcacatttttccagaccggttttgcaggggatcggaaggcgtttgcttgtcattccgtcgcattcacgaggagggagggggtcatgcctccctcctgcaaagtttctcacaaggcaaatgggttcttgctttgaacttcgccttcctacgtttgatttttgtatcatgtaaagtggagaggaacatggaacgaacaaattggacctcatatatgactaacaaggcgaaaatcatctcactaaactctatgtactatgtatcgttgatgtacatcggggctccaccccgtctgttttccatccaggtagagccatgaaaaaatttaggacgggttgaattaaaccgctatagtgacatgatcacactaaactactcaaaataaacagatataatagtttaaagtagttttatattgaaataggatcggagactcagagctaacattttagagatttggggccaactcaaatattggggccttttctatataaatataattttacttacgtacttttttatcagtagaaattaacatggtatta

SEQ ID NO: 113153 - DNA, 725 bp, Zea Mays
cttctactcgtcacactcacactaaactagagagctactcaagaaaataaatgcctcttcttcttgctctcgtcgtcctcgtctccgtcccaatggagttgagcgccgtcacctgtcgcactgccgctgctccagttgcagcctgggcgccatttgggcgtccaagggagcagacgacgaagcgaacaagcctcacagacaggcgaggcggccggccggcgagcagctcgcgttgagccctctcgcaccactacatacgctgttgcatgctttgctgcgagctgtgcgcgcggagcatggagatgcatggaggcggcagaggtggtgggtgtgagcgcgtacgtggggaattgaggcgtcatggtccgagatatatacatgtctctcttgctaggtaccttagattattcttagattattcttagttctgttgttagtacgtacttcgtccgacgatcctggaatattgtgttttatttcattgctagctctcttgtttctgtttcatatttcctgccttttttccccctctggtattaagatttaagaagctgtaagtgacgcatcctttggtgtggagagctcgttctgtgatgtttgggcatcgttcccaacagtcttctcgagcagtatttctagtatatatctatatatgatatatttatatatgtgtaagcagttgaggaggaagactaaagccttaagccctggaatgcatcacttac

SEQ ID NO: 113154 - DNA, 296 bp, Zea Mays
ctaggattcctcccttcgtctatgtcgatgaccagtagatggtctggctttgaaccattcggtccctctttgtacaacttgggcaaatatgcgtggtatgctggtaggtagcgtgatacaaaatccctcctcatcagacattccaggttttccatctgctctcatagctatctccgcctgcacctccactgatagacagaactaggttctcttatttttataacgatccacgagtcgatgaacctgtcccaagcgtcatagtatgcttcaaggttgttgttaaccacctcgagctg

SEQ ID NO: 113155 - DNA, 1679 bp, Zea Mays
atacagcaacatagaccggatgtcacagtgaccaccgccctctagctcgtcgcctcgtcggcgtgcccagcttctggtccagcgcgtcgcctccgctgctgctgggcccgacgcccaactaccgtgccgaggtcccaggcaggaagcatcttggcgtacgtgccgccggcgacaagcacccaccacaccagtcatgaagtcgttagccaagcaagagacacagccaaaatcgcggctcattgtgcgccttggtgtattccttgcatctcaccacattctgttcagtgttatatgctgctatgcaggcattatcgcgctactactccttccttcacttgcaaaaaacacatacctctcggagaatgctcttatacctggctctgcaaatccattattttctactgaagatgccattgaagcaaacagatttatgaaagcaattgaagctgtggctagagactcaagcagtgtaataggcatggcaaatttcatagcacaacaaatagaagatctaggtgcagaagtgtgttaccaaaagtttctccctcatggcaagaattttcaccctctgaagttcttcacctccatgacaaatgatattgcaattcaacctaatggcactgccaccaattttgggataaatactatcggcattttacgagctcctcgtggcgatggaaaagaagcaatagtgctggttactccttataattctcaaagagttcagtcgaatgaattattatcgctggctcttggtttctctgtcttctctctcttaagtcgagcagcatggctgtccaaggatgttgtgtggttatctgcagactcacagtttggagagtatgctgcagtctctgcatggctaaaccagtatcataatcccgtgtttttgagtcactcagtggtgtcacataccaagatgtacggtgcaaacaatatatatgatggtaattcagaaaaaacagaagccacggctttcaaacgtgctggaacaatggctgctgctctcatatttaaagttggggaaaccagaagatacagtgacagggatagtgttacgatttatgcagaggcatctaatggacaaatgccaaacttggaccttctgaatgtggtgcactatttggctgttcacagacaaggttttcgtgtgaacatcgctgcatttagttctttgttgagctctgcatggctcagggttattgctgaaattttgcatactattggtagtgtgttaagaaaaataaatcctgactggaagcttgatattgcagtccctgattatgtggaagggactgcaaatctagctaactctatgtacaaccaggctcttggagtgcccacagggtcccatggtgctttccgtgattatcaagttgatgcggtttctttagaattttcaccaacatttcatgtcaaaaatgagaatgctaaatctttgtttcttctgaagggtggaaggtatcctaatgtgtttcaattgtgctgtttaatgcttcatcgttattagagcatggggggggggcaccttttgattttactaatgaagtagaagagtttgcattcatgctttgaggcatggaactgtttgtactgtaacttcacaacaatggtaacataacagtaaacaaattatttcaactgtttttgatgtaaatgtaacaattgctgaggttata

SEQ ID NO: 113156 - DNA, 3333 bp, Zea Mays
atacagcaacatagaccggatgtcacagtgaccaccgccctctagctcgtcgcctcgtcggcgtgcccagcttctggtccagcgcgtcgcctccgctgctgctgggcccgacgcccaactaccgtgccgaggtcccaggcaggaagcatcttggcgtacgtgccgccggcgacaagcacccaccacaccagtcatgaagtcgttagccaagcaagagacacagccaaaatcgcggctcattgtgcgccttggtgtattccttgcatctcaccacattctgttcagtgttatatgctgctatgcaggcattatcgcgctactactccttccttcacttgcaaaaaacacatacctctcggagaatgctcttatacctggctctgcaaatccattattttctactgaagatgccattgaagcaaacagatttatgaaagcaattgaagctgtggctagagactcaagcagtgtaataggcatggcaaatttcatagcacaacaaatagaagatctaggtgcagaagtgtgttaccaaaagtttctccctcatggcaagaattttcaccctctgaagttcttcacctccatgacaaatgatattgcaattcaacctaatggcactgccaccaattttgggataaatactatcggcattttacgagctcctcgtggcgatggaaaagaagcaatagtgctggttactccttataattctcaaagagttcagtcgaatgaattattatcgctggctcttggtttctctgtcttctctctcttaagtcgagcagcatggctgtccaaggatgttgtgtggttatctgcagactcacagtttggagagtatgctgcagtctctgcatggctaaaccagtatcataatcccgtgtttttgagtcactcagtggtgtcacataccaagatgtacggtgcaaacaatatatatgatggtaattcagaaaaaacagaagccacggctttcaaacgtgctggaacaatggctgctgctctcatatttaaagttggggaaaccagaagatacagtgacagggatagtgttacgatttatgcagaggcatctaatggacaaatgccaaacttggaccttctgaatgtggtgcactatttggctgttcacagacaaggttttcgtgtgaacatcgctgcatttagttctttgttgagctctgcatggctcagggttattgctgaaattttgcatactattggtagtgtgttaagaaaaataaatcctgactggaagcttgatattgcagtccctgattatgtggaagggactgcaaatctagctaactctatgtacaaccaggctcttggagtgcccacagggtcccatggtgctttccgtgattatcaagttgatgcggtttctttagaattttcaccaacatttcatgtcaaaaatgagaatgctaaatctttgtttcttctgaagggtggaaggtatcctaatgtgtttcaattgtgctgtttaatgcttcatcgttattagagcatggggggggggcaccttttgattttactaatgaagtagaagagtttgcattcatgctttgaggcatggaactgtttgtactgtaacttcacaacaatggtaacataacagtaaacaaattatttcaactgtttttgatgtaaatgtaacaattgctgaggttatattatgttccagtaacaaatagctgatcagtaaatagttttgtatctgtgaccgtgcaagttattgcagaaaattatttcatcagggatatgattgcatgttaaaccacataaaaggtaaaaattaacttgagtccagtcttattttataagaattttagcatattacggttttgtcgagggcagtacatagacattgtgtgcataaaaaatatttaatataagtgggacgaatgtgattattagcatgaactggtaaaatttggagaaacaccataattagttggtcttgttttttttttttttgcatgactataacaacccaacaggaaatatgtgcatggatggaagtgttttatgcaaatgttgcactgaagtaaacacaggaacgtgatcttaggttgccacttggtgataggctgagggtgtttaacagctttactttcatttcctgcaaaatattcctcagcagaattcgtttgactcgtgagagacttttgattcaggttaattgaaggagtggcacgttctgtgaacaatctgcttgagaagttccatcagtcctttttcctgtacttccttacaggtccaagcaagttcatttcggttggtgtgtatatgattccgtttgcattgcttttggcacctctcccaatagttgctgctgcccttgctgatggcagtagaagcatggaaaaaacagcggataagttgataggcgacggtaaaacagatggcattgctgatatttcgcagaacaagggtggatcatggaaatggcttcgagctgcaaaagtattgcttgttgtccaattatgggcagtacttgtttcactacttccatattacattactcagatacctgatgccacacctacgcaaagcacactcatttgggttgtgctctccatcgtcgtactgatctccctatctgtcttgtttggctcaccatactcaactggtgttgaatggaaacttctgaaggctaccatgatcacttccatctccatcggattggggcttatgtcgataataaatttcgccactgctcagcttggtgctctgatagtgatcccaatgtgtttgttttctcggcctctgaaggcatcagggatgaatttccttcctcgggcagttttgttggcttcaaatgtagcttttgctgtgttgggttttcctccagttgcgttgctgattatgaaaggagtgtccaagggatcgaggtcgtggacaatagatgttggagatttctgggtatggatggagttcctgtgggaaaggagcagcgcgacgtatctttacctatttcttgtacatcttccctgctggcttttgtgcgtccttgtgttcctgcacccatgtcaccaatcagaatataagctgaagcaggaatagctgtttggcatccatagtcttgtctttttggatggtaaatcttgtagactagtgtagaaatttctcactttcacaaacttttggttacccataattcggaaattattcacccagttggagacgacttgtagacgatgtatcctgcctaatgtactgtctgcaacattttcgaaggcatgtttttaaagctgcttgttgcagtaattgatttctaagttttttgttgatagcagccgagaaataaatcgaagttggaggtaa

SEQ ID NO: 113157 - DNA, 2593 bp, Zea Mays
cagtgaccaccgccctctagctcgtcgcctcgtcggcgtgcccagcttctggtccagcgcgtcgcctccgctgctgctgggcccgacgcccaactaccgtgccgaggtcccaggcaggaagcatcttggcgtacgtgccgccggcgacaagcacccaccacaccagtcaaatgaatagttgatttcatttcaagcaattcctgaacaactatattacagtcatgaagtcgttagccaagcaagagacacagccaaaatcgcggctcattgtgcgccttggtgtattccttgcatctcaccacattctgttcagtgttatatgctgctatgcaggcattatcgcgctactactccttccttcacttgcaaaaaacacatacctctcggagaatgctcttatacctggctctgcaaatccattattttctactgaagatgccattgaagcaaacagatttatgaaagcaattgaagctgtggctagagactcaagcagtgtaataggcatggcaaatttcatagcacaacaaatagaagatctaggtgcagaagtgtgttaccaaaagtttctccctcatggcaagaattttcaccctctgaagttcttcacctccatgacaaatgatattgcaattcaacctaatggcactgccaccaattttgggataaatactatcggcattttacgagctcctcgtggcgatggaaaagaagcaatagtgctggttactccttataattctcaaagagttcagtcgaatgaattattatcgctggctcttggtttctctgtcttctctctcttaagtcgagcagcatggctgtccaaggatgttgtgtggttatctgcagactcacagtttggagagtatgctgcagtctctgcatggctaaaccagtatcataatcccgtgtttttgagtcactcagtggtgtcacataccaagatgtacggtgcaaacaatatatatgatggtaattcagaaaaaacagaagccacggctttcaaacgtgctggaacaatggctgctgctctcatatttaaagttggggaaaccagaagatacagtgacagggatagtgttacgatttatgcagaggcatctaatggacaaatgccaaacttggaccttctgaatgtggtgcactatttggctgttcacagacaaggttttcgtgtgaacatcgctgcatttagttctttgttgagctctgcatggctcagggttattgctgaaattttgcatactattggtagtgtgttaagaaaaataaatcctgactggaagcttgatattgcagtccctgattatgtggaagggactgcaaatctagctaactctatgtacaaccaggctcttggagtgcccacagggtcccatggtgctttccgtgattatcaagttgatgcggtttctttagaattttcaccaacatttcatgtcaaaaatgagaatgctaaatctttgtttcttctgaagggtggaaggttaattgaaggagtggcacgttctgtgaacaatctgcttgagaagttccatcagtcctttttcctgtacttccttacaggtccaagcaagttcatttcggttggtgtgtatatgattccgtttgcattgcttttggcacctctcccaatagttgctgctgcccttgctgatggcagtagaagcatggaaaaaacagcggataagttgataggcgacggtaaaacagatggcattgctgatatttcgcagaacaagggtggatcatggaaatggcttcgagctgcaaaagtattgcttgttgtccaattatgggcagtacttgtttcactacttccatattacattactcagatacctgatgccacacctacgcaaagcacactcatttgggttgtgctctccatcgtcgtactgatctccctatctgtcttgtttggctcaccatactcaactggtgttgaatggaaacttctgaaggctaccatgatcacttccatctccatcggattggggcttatgtcgataataaatttcgccactgctcagcttggtgctctgatagtgatcccaatgtgtttgttttctcggcctctgaaggcatcagggatgaatttccttcctcgggcagttttgttggcttcaaatgtagcttttgctgtgttgggttttcctccagttgcgttgctgattatgaaaggagtgtccaagggatcgaggtcgtggacaatagatgttggagatttctgggtatggatggagttcctgtgggaaaggagcagcgcgacgtatctttacctatttcttgtacatcttccctgctggcttttgtgcgtccttgtgttcctgcacccatgtcaccaatcagaatataagctgaagcaggaatagctgtttggcatccatagtcttgtctttttggatggtaaatcttgtagactagtgtagaaatttctcactttcacaaacttttggttacccataattcggaaattattcacccagttggagacgacttgtagacgatgtatcctgcctaatgtactgtctgcaacattttcgaaggcatgtttttaaagctgcttgttgcagtaattgatttctaa

SEQ ID NO: 113158 - DNA, 1302 bp, Zea Mays
gcatgactataacaacccaacaggaaatatgtgcatggatggaagtgttttatgcaaatgttgcactgaagtaaacacaggaacgtgatcttaggttgccacttggtgataggctgagggtgtttaacagctttactttcatttcctgcaaaatattcctcagcagaattcgtttgactcgtgagagacttttgattcaggttaattgaaggagtggcacgttctgtgaacaatctgcttgagaagttccatcagtcctttttcctgtacttccttacaggtccaagcaagttcatttcggttggtgtgtatatgattccgtttgcattgcttttggcacctctcccaatagttgctgctgcccttgctgatggcagtagaagcatggaaaaaacagcggataagttgataggcgacggtaaaacagatggcattgctgatatttcgcagaacaagggtggatcatggaaatggcttcgagctgcaaaagtattgcttgttgtccaattatgggcagtacttgtttcactacttccatattacattactcagatacctgatgccacacctacgcaaagcacactcatttgggttgtgctctccatcgtcgtactgatctccctatctgtcttgtttggctcaccatactcaactggtgttgaatggaaacttctgaaggctaccatgatcacttccatctccatcggattggggcttatgtcgataataaatttcgccactgctcagcttggtgctctgatagtgatcccaatgtgtttgttttctcggcctctgaaggcatcagggatgaatttccttcctcgggcagttttgttggcttcaaatgtagcttttgctgtgttgggttttcctccagttgcgttgctgattatgaaaggagtgtccaagggatcgaggtcgtggacaatagatgttggagatttctgggtatggatggagttcctgtgggaaaggagcagcgcgacgtatctttacctatttcttgtacatcttccctgctggcttttgtgcgtccttgtgttcctgcacccatgtcaccaatcagaatataagctgaagcaggaatagctgtttggcatccatagtcttgtctttttggatggtaaatcttgtagactagtgtagaaatttctcactttcacaaacttttggttacccataattcggaaattattcacccagttggagacgacttgtagacgatgtatcctgcctaatgtactgtctgcaacattttcgaaggcatgtttttaaagctgcttgttgcagtaattgatttct

SEQ ID NO: 113159 - DNA, 228 bp, Zea Mays
atggaggagccgtcaaaggagaggagctcgtctagcaaggagtctgacccgacctgggcatatcgatctccagccgcgattgctgcacgagctggcagatccattcgtcgccgtcgtaacagcagcgtggtccggcatcgtccatacgtccgcaagaatttctccaagccacgaagaggtgctctgttgagagatcttgatgaggacgaggtcgactctgggaaatga

SEQ ID NO: 113160 - DNA, 7016 bp, Zea Mays
cggcaggcagggcatcccgcgaggccgcgacagaggcggcactccgctcccaccaacccacaacaccgatcccctcctcgccgagccgccgccggggataagcgtggggaagtgagcagccaaaatctaagacaccgatccccgggcgtgagtcgcgaaggtagcggcggagaaaagggcggagccacaacgcggtcgtgagcccgcagccaccgcatgacaggttgcgaggcttgctgttcagccatgtcgacggcgcaagggacagcgttgaggtcggcgccgctgggcgcaggtcgttgggcccgacgcggccgccccgtggcggcgccgtaccgttcgggctggcaagcctacggtggcgtttccctcgagggcagcggattccttggccgcgtgcaccgcaccgaggagcgcgtcgctccgcgggcgccccacgcggcggcacgcgacgccgaggtggtgaggccgctctcaaagctcccgaacagcagcattgggctctacgattcctcattcgagcgtgacgcttgcggcgttgggtttgtcgctgagctatctggcgattacaaacgcgagactgttaatgatgctattgagatgcttgagagaatggctcaccgtggtgcctgcggctgcgagaagaatacaggagatggtgccggcatcatggtcgctctaccacatgacttcttcaaagaggtcgcaaaggatgctgggtttgagctacccccaccaggcgagtatgctgttggaatgttttttatgccaacagatgaaaagcgtcgtgagaaaggcaaagctgagtttatgaaggttgcagaatcactgggacatgtaatactcgggtggcgtctggttccgactgacaactcagacttgggtgaatctgcactcgagactgagccagtcattgagcaggttttcgttaccaagagctcaagatcagaggctgagtttgagcaacagctatatatccttaggagactctcaatcatctctgttcgagcctctctgaacattaagcgtggtggagagagggatttctacatgtgctctctatcttctaggactattgtttacaagggccagcttaaaccgtcccagcttaaggggtactactatgcagacctaggtcatgaaaacttcatgagttatatggctctggttcactcaaggttctccacaaacacctttcccagctgggaccgtgcacaaccaatgcgtgttttaggtcataatggagagatcaatactcttagaggaaacaagaattggatgacagcacgtgagggtctcttagaggctgagaagcttggattatcaaaggagcagctctcaagaattctgccaattgttgatgctacctcttccgattctggcgcatttgataatgttcttgagcttcttgtccgaggtgggcgaagcctgccagaagctgtgatgatgatgatccctgaggcatggcagaatgatgtaaacatggatcctgagaagaaagctctctacgagtttctgtcagcacttatggagccttgggatggacctgctctaatatcgtttactgatggtcgttaccttggagctaccctggaccgtaatggtttgaggcctggtcggttttatgtgacgcacagtgggcgtgtgatcatgggtagtgaggtcggtgttgttgatgttcctcctgaagacgtgctgagaaaaggcaggctaaaccctggaatgatgttattggttgattttgagaatcacactgtagtggatgatgaagctctgaaagcacaatattctaaagctcacccgtatggagaatggctcaagagacaaaaaatatacctcaaggatattgtagaatcagtaccagaaaccgatagagtcgctccaagcatttctagctcactttcacaaaagaatgagaacatagatcatgttggtatcagtgggattttgactcaactgaaggccttcgggtacacggtggaagccctcgagatgttgctactgccaatggctaaggatggagtggaagctcttggttccatgggaaacgatacaccacttgcggtgatgtcaaacagggagaagttgacttttgagtacttcaagcagatgtttgcacaagttacaaaccctccgattgaccctattagagagaaaattgttacatctatggagtgtatgattggcccagaaggtgacttgttggaaacaactgaaaaacaatgcaaccgccttgcacttaaaggtcccttggtttctattgatgaaatggaggctattaaaaagatgaattatcgaggttggcgaagcaaagtgcttgacataacttatccaaaaaagtctggaaggaagggcttggaagagactttgaacagaatttgtgctgaagctcgtaaagccatacgcgagggatacactattttggttctctcagatagaggattttcctcagaccgtgttgctgccagttctctcttagcagtgggagcagtgcatcagcaccttgttgcaaatcttgagaggacacgcataggattgttggttgagtcagctgaacctcgtgaagtgcaccatttctgcaccctggttggatttggcgctgatgctatatgcccttatttggctattgaagcaatttggtgcttacagaatgacgggaagattactcctaatggagatggacaaccttactcaaaggaagagctggtggcgaagtatttctatgcttctaactatggaatgatgaaagttcttgcaaagatgggaatatccacccttgcatcctacaaaggtgcacaaatttttgaagctcttggtctttcttctgaagtggttggcaagtgtttcgaaggcacacctagcagaattgagggtgcaacatttgaaatgcttgcacgagatgctctccgtcttcatgagttagctttcccatcaagagcccttccagctggcagtgcagatgcaaaggcacttcctaacccaggggattaccactggagaaaaaatggtgaaattcatctcaacgacccacttgcaatgggaaagttacaggaagcagctagagtcaacagccgggcagcatacaaggaatattcgaaacgaattcaggagctcaataaggcgtgcaatctacgtggcatgctgaaatttaaacatgtttctgacaagatatctttggatgaggttgaacctgcaagtgagatagtgaaacgcttttgtactggagcgatgagttatggttctatttcattagaagcacatactgcccttgctattgccatgaacaaacttggaggaaaatctaatacaggtgagggaggggaacagccctctcggatggaaccacttcctgatggctcaatgaatccaagacgaagtgcaatcaagcaagttgccagtggacggtttggagtttccagctattacctgactaatgcagatgagctgcagataaaaatggctcagggtgccaagcctggtgaaggtggtgaacttccaggccacaaggttattggtgacattgctgtcacaagacactccacagctggtgtaggactgatcagtccacctccgcatcatgatatttattcgattgaggatcttgcgcagcttatacatgaccttaagaattcaaatcctggagcccgcatcagtgtcaaactagtttctgaggctggtgtgggagttgttgctagtggtgttgtaaaaggacatgcagaccatgttcttatatctggccatgatggtggcactggagcttcaagatggaccggtatcaagaatgctggacttccatgggaacttgggttggctgagacacatcaaactctagtagcaaatgggcttcgtggtcgagctgtcctgcaaacagatggacagttgaagactggtagagatgttgctgttgcttgcttgcttggggcagaggaatttggtttcagcactgccccactgattacacttggctgtattatgatgcgaaaatgccacatgaacacttgtcctgttggtatagctactcaagacccagtgcttcgagaaaagtttgctggagaaccagagcatgtcatcaactttttcttcatgcttgctgaggagctaagagaaatcatggcaaaccttgggttccgcaccattactgaaatggttggacgttctgatatgcttgaggttgatccagaagtagtgaagagtaatgagaaacttgagaacattgatctctcactaatcttgaaaccagcttcagagattcgtccaggtgttgctcagtactgtgttgagaagcaagaccatggcctagacatggcattagataacaaactaatagatctgtcaagaactgctattgaaaagcaagttcgtgttttcattgagactccaatccagaacacgaatcgagcagttggaactatgctcagtcatcaagtcacaaaacgttatcacatgaatggattgcctgctggtacaattcatgtgaagtttactggaagtgctggtcaaagttttggcgcttttctttgtcctggaatcactcttgaactggaaggagacagcaatgattatgttggtaaaggattatctggtggaaaaattgttgtgtacccaccaaggaacagttcttttagtccagaggacaatattgtcattggtaatgtggctctgtatggtgctaccatgggagaggcatatttcaatggtatggcagcagaaagattttgtgttcgcaactcaggtgctcaagcagtggttgaaggaattggagatcacgggtgtgagtacatgactggaggcactgttgttatcctcggaaaaacagggcggaactttgctgctggcatgagtggaggcattgcctatgtttatgatgttgatgggaaattcagtgctcgctgcaacaatgagttagttgatctatatcatgtggaggaagaggatgacatcatcacattgaaaatgatgattgagcaacatcgtcgcaacactgagagtgttttggctagagatatactctccgattttgataaccttcttccaaaatttgtaaaagtatatccaagggactataagagggttctagaaagcatgaaggtggaaaaggctgttgctaagcatgcaaaggagcctaagatggcaaatggaatttctgtgacaactaagaaagtacaacctgatcagtcagcaagccgaccaacacatgttgccaatgccaaaaagtacaggggctttattacatatgagcgagagagtatttcatacagagatccaaaagagcgtgttagagattggaaggaagttgcaatcgaatctacacctggtccactattaaatacacaatctgctcgttgcatggactgtggcactcctttctgtcatcaggaaagctcaggtgctggttgtcctcttggaaataagatcccagaattcaatgaattagttcaccagaacagatggcgcgaagcattggatcgactacttgagacaaacaacttccctgaattcactggacgagtttgccctgctccttgtgaggggtcatgtgttcttgggattattgagaatccggtgtctatcaaaagtatagaatgtgcaatcatagacaaaggttttgaagagggatggatgattccacgacctccacttcaaagaacaggaaggaaggtggccattgttggcagtggaccatctggtttggctgctgcagatcaactaaataaaatgggccacttcgtaactgtgttcgaacgtgcagatcgaattggaggtttaatgatgtatggtgtgccaaacatgaagacagacaagattggcgttgtccagcgccgtgttaatttaatggctgaagagggtgtcacatttgtggtgaatgccaatgttggtagtgatcctttgtactcgattgaacgtctacgttctgaaaatgatgcggttattttggcttgtggagcaacaaaaccgagagatctcaccatccctggacgcgagctatctggagttcattttgcaatggaatttctccatgcaaatacgaaaagtttactcgacagcaacctggaggatggtaaatatatctccgcccgtgggaaaaaggtggtggttattggtggaggtgatacaggcacagattgcattggcacatctattaggcatggttgcaccagccttgtaaatcttgaactcctgtcaaaaccaccaagcactagagctgctgacaacccatggccccagtggccaagaattttccgtgttgactatgggcatcaagaagctgctaccaagtttgggaaggatccaagaacttacggagtcttgacaaagcgttttattggcgatggaaatggcaaggtgaaggcccttgaggtagtgcgtgtgaagtgggagaaagtagatggaagatttcaactcaaggagatggaaggatcagaagagattattgaggctgatctcgtcctcctagctatgggattcttgggtcctgaagcgacaatagctgagaaattgggtttggagaaggacaacagatcaaacttcaaagcgcagtttggagacttcgctaccagtgtcgatggtgtgtttgccgccggggactgcagacgtggacaatcactggtggtttgggccatcacggaggggcggcaggctgctgcagcggtagacaagtacttgtcaaggtatgatcagaatgctgctgctacaggcgacagcactccctccgggacagggctcgttcagccggttgcggcatagtagcataaactggagcaagttttacgtttgtcagtgtatcctgtggttccacacagcaaacaccgttcttgtagttgtctaaaagaaacagagaaatccgggctcattaaggaatgaaagcccttctatattttttttgacgatagataaacagttgaaagttttggtggctattgtctcttttttctgctgcatgtggttttgtagtccaaacaatgtacagtttcccctttcttaaatagatgtaaatttgtcgtgtgatatgtcggtta

SEQ ID NO: 113161 - DNA, 375 bp, Zea Mays
atgggcaacaccgtgaccgtgacgccgcgcatctgccccgcagaggccggcacggccagggggaggcgtcccaagagcttcgtcaccgaggcgtcggcggctccggatgccgcgcctagacgcctgacagtcacgccgcgcaagcagcggcgggaggactatcgtgggcgggcggcgtcggtgaagatcgtgttgaagaggaaggatgcggaggcgctggtggcgaggctgaacgcgctgagcgagcgggagcgcaaggctcggatggccgagctcaagggcgagttccgggccggggactgcgccggcggcgcgagcccgaggccgtgccgggacgcgtggaagcccagactcgttccgataagggagaactaa

SEQ ID NO: 113162 - DNA, 840 bp, Zea Mays
gcgaacaccacccacaatctcgtgtcactccctagtaaccacgcactcacttggccagtgccgctccacgcacgcacgcacagacatgggcaacaccgtgccgccgcgcgtgtcccgcgaggccaccggcggcaggaggggcgccgggaccgcgcgcaggcgcaggcgctccgagaacgttgccgtcaccgaggcggcgcctcctgccacgccgagccgcgtggtgggcacggcgcgcaagcaggacggcgacgttgaggaggaaacgacgcgcgcgggacgagctctgcgggcgggtggtggcgacggcgcggccgcgtccagcaaggtgctggcggtgaggatcgtgatggagaggaaggacgcggaggcgctggtggcgaggctgatggaggcgcagagcgcgcgggtgcgcaaggccaggatggccgagctcagaagcgagctacgggccgggagctgcagtggcgcggcggcgcgcgccgagacgctgggactgggaggcaaccgcatgctcccgccgatagactgatagaggagaacaggtgtgagcgcgcgcccagtggtgccacaccactagctttgagcgccggagcttgcagtttgctttagtacgtgaacaacttgcagtagtgttttaagttagacgtgaacaactttttagcttttacctaggacagtcgcggtttcaggtgagtagtgtatgattcgttggtcacccgggccgtgcctgtacatatgtgtaggagtgctgtggagatgattctatggcagcatggccagtctctagtctctacacaagtagtggtgcagctcagctagcttcttagttcatgatca

SEQ ID NO: 113163 - DNA, 2398 bp, Zea Mays
gcgccgctcgtctcgacagacacacgcccacggagactcggagagggaggagggagggaggaggggagaggccgagagcacagggaacagacagacatggtcacgggatccatgaagcacctcgtgcaggtggagccggcaagggaggcggcggcggagggcggggcgccatcggcggggcccacgtaccgatgcgcggccggtggcaacgccgcgtcgccgcccgccgtgccggggctcgagtgctgctgggacatattccgcttgtccgtggagaagtgccccgacaacaagatgctgggccgccgcgaaatcgtccacggaaaggctggcagctacacatggctgacttacaagcaggtatacgacaccgtgctcgatgttgggtctgccatccggagctgtggcgtcggcaagggcggccggtgtggcatctatggagccaattctcctgagtgggtcatcagtatgcaggcctgcaatgcccatggcatctactgtgtgccactatatgacacgcttggtgccggggcagtagaattcgtattgtgccatgcagaggtacaaattgcttttgttgaggaaaagaagatcggagagatgctcaagacatttcccaatgcgaccaaatatctgaaaacacttgtaagcttcggtaaggttgatcctgggcacaaggaaaaagttgaacagaatggcttgtccatctactcatgggaagagtttctgcaactgggaggtaaagagaagtttgaacttccacccaaggaaaaggatgacatatgtacaataatgtacaccagtggaacaactggtgatcctaagggagtactaatctcgaacaagagcattgttaccattgtttcagcagtagatgagttcctcaacaactcaaacgagcagcttaacatggatgacgtttacatttcctatcttccgcttgctcatatatttgaccgggtgattgaagaggtgttcattcgtcatggtgcttcaattggattttggcgtggggatgtcaaactcttggttgaagacattggagaactcaaaccaacagttttttgtgctgttccacgtgttctagacagaatttatggaggattgcaagataaaattacagctggtggtttcctaaagaaaaccttgttcaatgttgcttacaaatacaaacaaggcaatatgttgaagggaaacaagcatgaagaggctgctgccatgtttgatcgcctggtcttcaccaaggtgaaacggggactaggtggaagggttcgcctgattctatctggcgcagctcccctatctagacatgttgaggagtatctgcgtgtggtaacatgctcccatgtccttcaaggatacgggctaacggaaacctgtgctgggtcctttgtttccctgccgaacaacatgtccatgctgggaactgtcggccctccagtcccgtatgtcgaagtacgcctggagtctgtccctgagatgggttatgatgcactgtcgagcgagacgcctcgtggggaaatttgcatcagaggggacaccttgttctcgggatactacaagcgagaggacctaaccaaagaagtcttggtcgatggctggttccacacaggagacattggtgagtggcagtctgacggaagcatgaagatcattgaccgcaagaagaacatcttcaagctctcacagggagagtacgttgcggttgagaatctggagaacatctttggtcaaactcctgctgttgattcgatttgggtctacggcaacagcttcgagtcgagcctggtagcagttgtgaaccccaacacacaagcactggagcgctgggcagagtcgaacggggtaactggagaatttgccacgatatgcgaagaccctagagcgagagagttcatcttgggagagcttacaaagatgggtaaagaaaagaagctcaaaggctttgagctcatcagggctgttcatctggaccccgcaccgttcgacatggagcgcgaccttatcaccccgacgtacaagaagaagcggccacagctgctgaaacactatcagaccatcattgacggtatgtacaatagcatgaagtaggctctgcacggctccacctgttgcctcacggcatggagaatcaaaatgctttgctagccgtcacctcggcaagcagactccaatgtgaattgagattatttcattagattgtgtcattaaaaagttatgctacatgatgttagctaggttttttttatccctcctggctcctgaaattggcgtacaagctgcgtgaatgcacccgtgtcagtgttgccatctaaataccttagataagcgtatgccctgtgcctcgatttttttaattttaccttttaaaaaaacatatttacatcccctagtgatc

SEQ ID NO: 113164 - DNA, 2115 bp, Zea Mays
cccgcagccgcaggtcgcgccgtcgcggccgccccggtggactattccacccgccccacgcagaccacacccagtggctaggctcgcacggaaccgagcgcatgcagtgggcaagtcgcaagcgagagagcgcgctcggttttcttttcttactacttcccctgcacgtgcacggacgccactgctaactagctaatctagcagtcagcataggagactggttggagagaagagaacctcagtgcgcgaaaaaagaactcaagcctcaaggagggtatacgccgccgcgccgagtcgtccacgtccgaggaggaacgcacgcgctcacgcggcgccgatggatggaagcggtgccggcaccggcagcgccacgctgctgcggaagcggccgctgtccgtgaacacagcgtcgtcgacggcggcggcgattgagctcgggagcaagcaggccgccggggttgtggcggccatcgaggaggagccggtgagcccgacggggcggctgttccgggagccgaacttccgctgccacatcgtgtccgtgttcggcctcggcgcgccggtggacctgccggcgctgcgggccggggtcgccgccacgctcgcgcgccaccctcgcttctgcagcgtccaggtggtaaatgagaaggacgccagaccgaagtggatacggacagcggtgaacgtggacgaccacatcatcgtccccgagctgaaccccgccaccacgtcggccgacccggacaaggcgctggaggactacgtgtcgtccctgtcgacgcggcccatggcgcactcccggccgctgtgggaggtccacgtcctggacttccccaccgccgacgccgcggcggcgctggcgctccgcgcgcaccactccgtcggcgacggcgtctccatgctctccctcttcatggcctgcacccgcagcgccgccgacccgggcgcgctcccttccctcccgccggcccggcgcgcgggccccgtccacgctgtgcggcggcccgcgggcgcgctggcggcgctggccgcgtggctcctgtccttgctcgtgctggcgtggcgcacggcggtggacgtggcatgcttcgtcgcgacggcggcgtcgctgctgggcgacgcgcccacggtgctcaagggcaaggagggcaccgagttccagcccaggcgcttcgtgaaccgcacgctcagcctggacgacatcaagctcgtcaagaatgcagtgggctgcactgtaaacgacgttcttcttgggataacctctagcgctctgtctcggtattattaccggagaacaggtgaaagcgacagtaagaggagcatcacggtgcggtcggctgttctcgtcaacttacgggcgacgcccggcatacatgcactggcgagcatgatggagtccggcaacgacaacaacaacggcgccgcgaggtggggaaacaagctgggctacatgctgatccccttccacctggccaagcacgacgaccccacggagtacgtccgtacggcggccaaggtgacgcgcaggaagaagagctccatggagtcggccttcaccttctggagcggggacatggttctcagactcttcggcatcaaggcagctgctgcgctctgctacggcatgttcacgcacaccaccctgtccttctccagcatggtcgggccgactgagcaggtgctgttctgcggcaaccccatcgtctacatcgcgcccagcacctacggccacccacatgccctgactgtgcactaccagagctacataaactccgtgaagctagtcctgtcggtagacgaagcgcagtttccggatggccgtcagctcctggacgacttcgccgagtccctcaggatcatccgcgaggcagctccaggaaaaccaggggacacgcaggatgctgcttccacttgaacgtagactatagccatcaggcagaagctccaagcattcttgtcgtgctccagttgtgtctgatcatgtgtgtgtgtgcgcgcgcgtgagcgcaattgagatctcgttgctggccgtcacagactttttgggtgcgcggcttgatagcactccaacagagggttcaggacttcaggttacttaatctttcaacttggata

SEQ ID NO: 113165 - DNA, 906 bp, Zea Mays
tctgccacgtgtcctctttgatcacacagcacgccagctgcggggaagattatcctcttcttgctgttgctcacagctagccataacaaccggtaggcactggcgagcatgatggagtccggcaacgacaacaacaacggcgccgcgaggtggggaaacaagctgggctacatgctgatccccttccacctggccaagcacgacgaccccacggagtacgtccgtacggcggccaaggtgacgcgcaggaagaagagctccatggagtcggccttcaccttctggagcggggacatggttctcagactcttcggcatcaaggtgcgtgcgctgggtttcctttcctatctcgatcgacccggcgctattgattcaccggtgatcaccgcgcgcggccgcgcgcgcacccctgacagacagagtttggtgcaggcagctgctgcgctctgctacggcatgttcacgcacaccaccctgtccttctccagcatggtcgggccgactgagcaggtgctgttctgcggcaaccccatcgtctacatcgcgcccagcacctacggccacccacatgccctgactgtgcactaccagagctacataaactccgtgaagctagtcctgtcggtagacgaagcgcagtttccggatggccgtcagctcctggacgacttcgccgagtccctcaggatcatccgcgaggcagctccaggaaaaccaggggacacgcaggatgctgcttccacttgaacgtagactatagccatcaggcagaagctccaagcattcttgtcgtgctccagttgtgtctgatcatgtgtgtgtgtgcgcgcgcgtgagcgcaattgagatctcgttgctggccgtcacagactttttgggtgcgcggcttgatagcactccaacaga

SEQ ID NO: 113166 - DNA, 1796 bp, Zea Mays
gacaacatggctagcacaacccaagaaagatccatagggagggtagcgcgtgcacggtgcacacacatggatcctttggcttgttctagatctagcgacttgggacgcttgctcacaggagattctccattctcgtaagaacagcccaccgtcactagcaacatgccaaattgccaatgacaatatcataagctgcatccaggtcggagatgcccacacagccaccaacacgtacccaactcccacgcagctcggttcagtaaaagctactagcagtagtgggcggtggttggcacatcgcagttgatacggaggcgtagcgtaggctgtactggttctcccgcgtcggcgtcgacggccgtgtccttctcgggaagatggtaatgggggccgcgtccgtcggcacgctgctcgtcgcgctcgccgtcctcgctccggcggtgatgacgcagagctgcgacgacgagctgccggctcagctcgccggcaacttctcggggctcgcctgcgcccccgtctggaacagcttcgtgctccggtacgcgcaggacaaggacaacgtgctgcgggtggtgctgtcgaccatgtacagcacggggtgggtggggatggggttctccaagaacggcctcatggtggactccagcgccatggtggggtggatcggcaagacggggctcccgcacatcaagccgttctcgctgcggggcaagaccccctcccaggtggtcgcggaccagggcttcctcgtctccagcgacaaccacaagcccaccgtgctcgtgcagcaggccaagatctacctcgccttccagctcagcttcaccgagccgctcaggcgccagaacgtgctcctcgccgtcggctccgccatccccgtcaacgaccgcctcgccgagcaccaggataagacctccatcgtattcgatttcaccacaggcagctcatcaggctcgtcatccttcccggaaggtctgaaaaggacccatggggcgctcaacctgttcgcctggggcgtgctactgccgatcggcgccatcgtcgcaaggtactgcaggagatgggaccctctgtggttctacctccacgccggcatccagttcgtggggttcatcctgggcctagccggcgtcgtggctggagtatccttgtacagcaagatccaggccgacgtccccgcgcacaggggccttggcatattcgtgctcgtgcttgccattttgcagatcctggcgattttcctgaggcccaacaaggactccaagtaccgcaagttctggaactggtaccaccactgggtcggcaggctcgccctcttctttgcagccatcaacattgtgctcgggatcaaggtcggcggagcaggcaactcttggaagatcggctacggtttcaacctggccgtccttctgatcaccatcgtcaccctggaagtcctgctctggacgaggtggaaaaacagcaccggttccacgggggcatattagctacttaaccgatttttataggtgtttgtgatggtcagtgaaggaggttcgtattcttttgttcgaatattttcgcgtgtatgcagttgctgtaatgtccgcgtttgctgcgtgatgtgttttccttttggtgcatgtgtcctggacttgccgttccgatgccttttgtgctgctcggaatggagatggaatgatgatttccgcaattccgccgcatttcccatgctgcgaatggtggtagatctggtatattctgttgtgacactgtgactgacttagagtatctatacgagactatatttttgactc

SEQ ID NO: 113167 - DNA, 1920 bp, Zea Mays
gcagaagggtgattggtgagccacgctcgagggcacaacggggagagcgcaacagataaatcctctatttggacccgtcgctgcttcccgtcgccattgctgcctcttctcctccttcctccgtccctccctccctcgctctcccatcctcctctgttctcacaatttttgcttctgaatttcctgccggtgtgccggcatcttctttctactgaggcgtagaccaaggaggagagtaattggcgagcggttggagaacgaatacgagacggctccggcggccggaggcccattttttgatgcgtggtgccgtcgaggtccacacgattcgcagagacgtcgccacgccgagtcccctgaggctcagagaccctccggcattggacatgatgaggtagccggcagatctccggcctctcacctctccctctctgttcacttggttcctccggttatcacgcggtggttctcgctgcagatcgaagtgtaccaaaggctgagcccggactgcctcccgctcggcaacggcggtggcggaggcggaggcgccgtgccccgcaagcaggcgtccagatcctcctacatcagagaggacgacgccccggccgtggccacggatggctcccgcctcgcatcgtacctggcggcctcctcgcacgagcccaagccgctgcgggcccgcgcgccgcagccggcgcctctctcctcggtggccggccggagcccagcgcgcgaccacgcacaccaccaccacacctccgactcctccgacaccgcctccccgagctccaccggcggcggcggcggcgccgtcgtcggcgacgtgctgctgcagtgggggcacaagaagcggtcgagctgccggcgcgactcggccaccgccgcggcgccgtccgcgcagcgccgacagtctgccgtcggtggcggggtcaagatccagcggcgcgcgtcggcgccagcgcacgcggagaagctcatgccgccgccgccgccagccgccacgcgtggatctaacttgcggtcggcgtcctccttcccgtcccgcgcctccgcctccaccgctgccaccggcagccaccacccgccccaccaccacaggaccgtcgaggatcgatcaggcgggcagaagcggtcgtcgccggacaagacgcataggtccaccatggatggcgtctaccaccatcaccaccaccaagagtcgccgttgacgggcaacggcgtcgccaccgccggtgagaagctaggcgtggagcggttcgagctgccgctgatctacatctcgctgtcgcggaaggagaaggaagacgatttccttgcgatgaagggcaccaagctgccccagcggcccaagaaaagggctaagaacgtggacaagaccctccaatttgtcttcccgggtatgtggttgtccgatttgacgaggggacggtacgaggtgcgggagaagaaatgcgtgaagaagaagcgaagagggctgaaagggatggagagcatggacagcgactcggagtaataaggtggaggcgcggcgcagccatcttccatgggggtgggagtcgaggaagaaggggccctagagaaggaggaaaggaggagacgttgagggcaagagtgagcggtcgcgcctgctcaccttgagccgccgccgcgctggaagcgtcggaggacggcggtgcttgccacacacagggctgtgtttctggcggtcgtgaggtttttttgttccttgatgctgagctgcgtctccgcggccgctgtttgcagcatgtaaccctgaaactctgcgatccgtctatctctgccttcttcattttttctcatgcgctttcgagccacctgaaacgagacggttggattcattcgattgcaccggtgacggtaaggtgaaaacgacacaccaccggtggctagttgttggac

SEQ ID NO: 113168 - DNA, 1677 bp, Zea Mays
gcagaagggtgattggtgagccacgctcgagggcacaacggggagagcgcaacagataaatcctctatttggacccgtcgctgcttcccgtcgccattgctgcctcttctcctccttcctccgtccctccctccctcgctctcccatcctcctctgttctcacaatttttgcttctgaatttcctgccggtgtgccggcatcttctttctactgaggcgtagaccaaggaggagagtaattggcgagcggttggagaacgaatacgagacggctccggcggccggaggcccattttttgatgcgtggtgccgtcgaggtccacacgattcgcagagacgtcgccacgccgagtcccctgaggctcagagaccctccggcattggacatgatgaggtaccaaaggctgagcccggactgcctcccgctcggcaacggcggtggcggaggcggaggcgccgtgccccgcaagcaggcgtccagatcctcctacatcagagaggacgacgccccggccgtggccacggatggctcccgcctcgcatcgtacctggcggcggcggcggcgccgtcgtcggcgacgtgctgctgcagtgggggcacaagaagcggtcgagctgccggcgcgactcggccaccgccgcggcgccgtccgcgcagcgccgacagtctgccgtcggtggcggggtcaagatccagcggcgcgcgtcggcgccagcgcacgcggagaagctcatgccgccgccgccgccagccgccacgcgtggatctaacttgcggtcggcgtcctccttcccgtcccgcgcctccgcctccaccgctgccaccggcagccaccacccgccccaccaccacaggaccgtcgaggatcgatcaggcgggcagaagcggtcgtcgccggacaagacgcataggtccaccatggatggcgtctaccaccatcaccaccaccaagagtcgccgttgacgggcaacggcgtcgccaccgccggtgagaagctaggcgtggagcggttcgagctgccgctgatctacatctcgctgtcgcggaaggagaaggaagacgatttccttgcgatgaagggcaccaagctgccccagcggcccaagaaaagggctaagaacgtggacaagaccctccaatttgtcttcccgggtatgtggttgtccgatttgacgaggggacggtacgaggtgcgggagaagaaatgcgtgaagaagaagcgaagagggctgaaagggatggagagcatggacagcgactcggagtaataaggtggaggcgcggcgcagccatcttccatgggggtgggagtcgaggaagaaggggccctagagaaggaggaaaggaggagacgttgagggcaagagtgagcggtcgcgcctgctcaccttgagccgccgccgcgctggaagcgtcggaggacggcggtgcttgccacacacagggctgtgtttctggcggtcgtgaggtttttttgttccttgatgctgagctgcgtctccgcggccgctgtttgcagcatgtaaccctgaaactctgcgatccgtctatctctgccttcttcattttttctcatgcgctttcgagccacctgaaacgagacggttggattcattcgattgcaccggtgacggtaaggtgaaaacgacacaccaccggtggctagttgttggac

SEQ ID NO: 113169 - DNA, 1828 bp, Zea Mays
gcagaagggtgattggtgagccacgctcgagggcacaacggggagagcgcaacagataaatcctctatttggacccgtcgctgcttcccgtcgccattgctgcctcttctcctccttcctccgtccctccctccctcgctctcccatcctcctctgttctcacaatttttgcttctgaatttcctgccggtgtgccggcatcttctttctactgaggcgtagaccaaggaggagagtaattggcgagcggttggagaacgaatacgagacggctccggcggccggaggcccattttttgatgcgtggtgccgtcgaggtccacacgattcgcagagacgtcgccacgccgagtcccctgaggctcagagaccctccggcattggacatgatgaggtaccaaaggctgagcccggactgcctcccgctcggcaacggcggtggcggaggcggaggcgccgtgccccgcaagcaggcgtccagatcctcctacatcagagaggacgacgccccggccgtggccacggatggctcccgcctcgcatcgtacctggcggcctcctcgcacgagcccaagccgctgcgggcccgcgcgccgcagccggcgcctctctcctcggtggccggccggagcccagcgcgcgaccacgcacaccaccaccacacctccgactcctccgacaccgcctccccgagctccaccggcggcggcggcggcgccgtcgtcggcgacgtgctgctgcagtgggggcacaagaagcggtcgagctgccggcgcgactcggccaccgccgcggcgccgtccgcgcagcgccgacagtctgccgtcggtggcggggtcaagatccagcggcgcgcgtcggcgccagcgcacgcggagaagctcatgccgccgccgccgccagccgccacgcgtggatctaacttgcggtcggcgtcctccttcccgtcccgcgcctccgcctccaccgctgccaccggcagccaccacccgccccaccaccacaggaccgtcgaggatcgatcaggcgggcagaagcggtcgtcgccggacaagacgcataggtccaccatggatggcgtctaccaccatcaccaccaccaagagtcgccgttgacgggcaacggcgtcgccaccgccggtgagaagctaggcgtggagcggttcgagctgccgctgatctacatctcgctgtcgcggaaggagaaggaagacgatttccttgcgatgaagggcaccaagctgccccagcggcccaagaaaagggctaagaacgtggacaagaccctccaatttgtcttcccgggtatgtggttgtccgatttgacgaggggacggtacgaggtgcgggagaagaaatgcgtgaagaagaagcgaagagggctgaaagggatggagagcatggacagcgactcggagtaataaggtggaggcgcggcgcagccatcttccatgggggtgggagtcgaggaagaaggggccctagagaaggaggaaaggaggagacgttgagggcaagagtgagcggtcgcgcctgctcaccttgagccgccgccgcgctggaagcgtcggaggacggcggtgcttgccacacacagggctgtgtttctggcggtcgtgaggtttttttgttccttgatgctgagctgcgtctccgcggccgctgtttgcagcatgtaaccctgaaactctgcgatccgtctatctctgccttcttcattttttctcatgcgctttcgagccacctgaaacgagacggttggattcattcgattgcaccggtgacggtaaggtgaaaacgacacaccaccggtggctagttgttggac

SEQ ID NO: 113170 - DNA, 1944 bp, Zea Mays
gcagaagggtgattggtgagccacgctcgagggcacaacggggagagcgcaacagataaatcctctatttggacccgtcgctgcttcccgtcgccattgctgcctcttctcctccttcctccgtccctccctccctcgctctcccatcctcctctgttctcacaatttttgcttctgaatttcctgccggtgtgccggcatcttctttctactgaggcgtagaccaaggaggagagtaattggcgagcggttggagaacgaatacgagacggctccggcggccggaggcccattttttgatgcgtggtgccgtcgaggtccacacgattcgcagagacgtcgccacgccgagtcccctgaggctcagagaccctccggcattggacatgatgaggtaccaaaggctgagcccggactgcctcccgctcggcaacggcggtggcggaggcggaggcgccgtgccccgcaagcaggcgtccagatcctcctacatcagagaggacgacgccccggccgtggccacggatggctcccgcctcgcatcgtacctggcggcctcctcgcacgagcccaagccgctgcgggcccgcgcgccgcagccggcgcctctctcctcggtggccggccggagcccagcgcgcgaccacgcacaccaccaccacacctccgactcctccgacaccgcctccccgagctccaccggcggcggcggcggcgccgtcgtcggcgacgtgctgctgcagtgggggcacaagaagcggtcgagctgccggcgcgactcggccaccgccgcggcgccgtccgcgcagcgccgacagtctgccgtcggtggcggggtcaagatccagcggcgcgcgtcggcgccagcgcacgcggagaagctcatgccgccgccgccgccagccgccacgcgtggatctaacttgcggtcggcgtcctccttcccgtcccgcgcctccgcctccaccgctgccaccggcagccaccacccgccccaccaccacaggaccgtcgaggatcgatcaggcgggcagaagcggtcgtcgccggacaagacgcataggtccaccatggatggcgtctaccaccatcaccaccaccaagagtcgccgttgacgggcaacggcgtcgccaccgccggtgagaagctaggcgtggagcggttcgagctgccgctgatctacatctcgctgtcgcggaaggagaaggaagacgatttccttgcgatgaagggcaccaagctgccccagcggcccaagaaaagggctaagaacgtggacaagaccctccaagtattaaacgcctgccctgagatcgatttgatcctctatttctaacccgatttccaaatcgatctctgctctcaaaacttaacatgtgctcttcccccttgatttttatcatgcagtttgtcttcccgggtatgtggttgtccgatttgacgaggggacggtacgaggtgcgggagaagaaatgcgtgaagaagaagcgaagagggctgaaagggatggagagcatggacagcgactcggagtaataaggtggaggcgcggcgcagccatcttccatgggggtgggagtcgaggaagaaggggccctagagaaggaggaaaggaggagacgttgagggcaagagtgagcggtcgcgcctgctcaccttgagccgccgccgcgctggaagcgtcggaggacggcggtgcttgccacacacagggctgtgtttctggcggtcgtgaggtttttttgttccttgatgctgagctgcgtctccgcggccgctgtttgcagcatgtaaccctgaaactctgcgatccgtctatctctgccttcttcattttttctcatgcgctttcgagccacctgaaacgagacggttggattcattcgattgcaccggtgacggtaaggtgaaaacgacacaccaccggtggctagttgttggac

SEQ ID NO: 113171 - DNA, 982 bp, Zea Mays
acgcacaccaccaccacacctccgactcctccgacaccgcctccccgccgccgccagccgccacgcgtggatctaacttgcggtcggcgtcctccttcccgtcccgcgcctccgcctccaccgctgccaccggcagccaccacccgccccaccaccacaggaccgtcgaggatcgatcaggcgggcagaagcggtcgtcgccggacaagacgcataggtccaccatggatggcgtctaccaccatcaccaccaccaagagtcgccgttgacgggcaacggcgtcgccaccgccggtgagaagctaggcgtggagcggttcgagctgccgctgatctacatctcgctgtcgcggaaggagaaggaagacgatttccttgcgatgaagggcaccaagctgccccagcggcccaagaaaagggctaagaacgtggacaagaccctccaatttgtcttcccgggtatgtggttgtccgatttgacgaggggacggtacgaggtgcgggagaagaaatgcgtgaagaagaagcgaagagggctgaaagggatggagagcatggacagcgactcggagtaataaggtggaggcgcggcgcagccatcttccatgggggtgggagtcgaggaagaaggggccctagagaaggaggaaaggaggagacgttgagggcaagagtgagcggtcgcgcctgctcaccttgagccgccgccgcgctggaagcgtcggaggacggcggtgcttgccacacacagggctgtgtttctggcggtcgtgaggtttttttgttccttgatgctgagctgcgtctccgcggccgctgtttgcagcatgtaaccctgaaactctgcgatccgtctatctctgccttcttcattttttctcatgcgctttcgagccacctgaaacgagacggttggattcattcgattgcaccggtgacggtaaggtgaaaacgacacaccaccggtggctagttgttggac

SEQ ID NO: 113172 - DNA, 1050 bp, Zea Mays
ctttctatttagagtcctaggcaccacatagtatatagcagcagtgctttgctcagtccactttgttgaggctgggttgagagtgtaggagtaaagcctcaagtctctttggtagacgatccaccacaccatccgaccctcaaccctttttcctcaacttgtcaaccgccgccccatctactcactccaccacggtcatcattaacatttcttctccattcttttcaggaccgtcgaggatcgatcaggcgggcagaagcggtcgtcgccggacaagacgcataggtccaccatggatggcgtctaccaccatcaccaccaccaagagtcgccgttgacgggcaacggcgtcgccaccgccggtgagaagctaggcgtggagcggttcgagctgccgctgatctacatctcgctgtcgcggaaggagaaggaagacgatttccttgcgatgaagggcaccaagctgccccagcggcccaagaaaagggctaagaacgtggacaagaccctccaatttgtcttcccgggtatgtggttgtccgatttgacgaggggacggtacgaggtgcgggagaagaaatgcgtgaagaagaagcgaagagggctgaaagggatggagagcatggacagcgactcggagtaataaggtggaggcgcggcgcagccatcttccatgggggtgggagtcgaggaagaaggggccctagagaaggaggaaaggaggagacgttgagggcaagagtgagcggtcgcgcctgctcaccttgagccgccgccgcgctggaagcgtcggaggacggcggtgcttgccacacacagggctgtgtttctggcggtcgtgaggtttttttgttccttgatgctgagctgcgtctccgcggccgctgtttgcagcatgtaaccctgaaactctgcgatccgtctatctctgccttcttcattttttctcatgcgctttcgagccacctgaaacgagacggttggattcattcgattgcaccggtgacggtaaggtgaaaacgacacaccaccggtggctagttgttggac

SEQ ID NO: 113173 - DNA, 171 bp, Zea Mays
gttgcgttgcatttgcaaatgaaaagcttcttgggattcattcagttgttggtgaggagcttgaagttttaactggaatggagtcaatctgtttagcttagctcttcaagaactcctaaacgtttctcaactggaaggattaattaatatccagaatttgatgtggttgtg

SEQ ID NO: 113174 - DNA, 1633 bp, Zea Mays
tttacaccccatccttctatccgtccatccatgcacagtaacactaaaccttaaacctcacaaacaagtaaagcaccaccaacctctctctctctttatctcatggactgatcaacactgtgtagtatatgtacacaatatttgtctagtgccatgcatgcctagtttatgttacatgcattgtgcaactagctatacgatacgacacagttaatggatgtacccttcatgtgctgccgtcttctccttcacttcacatctccattgtttcagcatgcatgtactatgtgctgtagcaatgagaaaggccagcgtccagcgagctcatcaaacggtttcaactgcacctccgcctcctcctgcgccaccactaccaacactcttgtgccccgcgccgccgcctccgttggacgcggccgccgccgccaccttgccgtcgccgtcctgcgcctgctgcgtgctgctgtactcaccgtacaggtaggaggagaagccccagacgcagagcgccgtggccacggccttctcccaaccgaacgggtcgcggaacaccaccacgccgccgatcacgttggcggtcagcacggcggccatgcacacgccgctgtgcagcgacgacgtcaggtacaccatccccgcggtgcccatgaagcaggcctgccacgtcacaaccagcgcggccaccagggcccagtacgcggccggcgagaggtcccagcgcgccagctcctcccgccacccgccagccgcggccagcccggccaccgccagcgccgtcgcggcggcctgcatgatcacctgcacctccaccgccatgcggaacccgccggacaccgccctgcggtacaccagctccatcaccggcaggtaggccgcgaacagccccgcggcgccgagcgtcaccgcgaagcccgcgaagtacctggcccggctcccgccgtcggggcgctcgcccgagtcggacgaccggagcgccagcagcacggagctgagcgtgaggagcaccacggcattgaggttggagaaggtgagcgggtggcgcacgatgacggcggccagcacgagcgtgaaggccagctgcgtggacagcagcagcgaggaggtggacacgggcaggtacgaggagctgtacgagaagagcaggttgttcacgcccataagcacgccgatgaccacgcacgcggccagcagccgccgcgtgaaccacgcgaacggccggggctgggaggcggaccggccggcgtagacgggcacgagcaggactgggaacccgaccgactgcaccagcgtggccacccaccgatcgcgcccgccgtgcgcgaagtagtaccgggacagcaggctggacgccacggagccaccgagaagcgcggcgtagttggcgcacagcagcagcagccgacgacgacgacgacgactcgccgcgccatcattggccgtggcgtccgtccaaggctccggcatgtcgaggagtggggccggggtagtggtggtggtggtggtggtggtggtgggcattggagagcggagttggttgtgatgggcgaggtgaggcgtgaggagagtgcggtggtggtggagtatttaagcgagataagtgcgggtgatttgcgtgaggttagttatgctcttt

SEQ ID NO: 113175 - DNA, 987 bp, Zea Mays
atggcgtctccgtcagaccggacatcaggcttctctatatcgtcccacggcggagcgccggaggccaatggcgacgcgaaggacaacgtgccctacacttcttcttttgtttattacagcctacattttgtagagaaaaaagagactaatagagaaggcagaggaagaagagtgtttaagaaaagagaaggaaaaaagagaataaaagaagaagctgaaaagcgagctactattgaaaagggagtgtctgatacctctctggatgtagattctaaggaaactcatgaccgtgtgcaagaaggtgaaaacaaggttggtcatgtgaattgcatcaaacagggagttagggacgatattgaagttgtggctgtggatgacccttttgttgatgctaagtacatgctttggaagatacacgattggtcaagcttgagcatggatgaaaattcccagatgatcgcaaagattgttgtggtttgtaatgatgcaatcattggccactctgagcatcaatatgttgctacagggatgcccacaaaagctgctttgaagccactctcgctgtcgtttgcctccctcttccacgataggttctcccgcaccgagcctagacgcaaacagctctcgaccgtccgctacagcactgtccaagagacggtaatggaggaggcctcgcccgggacggtggaggagctgctgctagtgagcgcaatcagagggaaaaaggttgagagggcaccaatctggctcatgaggcaagccgagagtgcctcaagattctgaaggtttccgtcaacctgacatgcaccatggaatggaggttcgccttggtttgtccaagggacctatctgccctagcttcagttgaggcagtgaatgtagttctgcggttctgccgcacgttgatgcaccttagtccattacacttgggtcaataaaagaccacattaggatggtgaaacggtgaaaactgatggcttgcatatg

SEQ ID NO: 113176 - DNA, 1298 bp, Zea Mays
gcttcaaagaaacctcttcgacccgcgcgctcccacccaccagtgaagaaaaagagaagcccacacgcgacgcgaggttattgagcggtagggaaggaggagcaagaaggccggccaagcggaggcatcagcatcacatcgagcatgctggagctcctgctcgtggggtgcagcggcgtggtggtgctcctccacggcgccagcctcttcctccgcgcgctcttcgccccgcgccacgccgtcgccaggcccatcagcttcctcgggttcgtggcctgatcgttcgcaatggccatcgggcgcggactgcggagatgatcgtttcgagtagctgccaccgaagatccatcgactgatgcagctgtgtgtgtgtgcccacaagttctcgttcgtttgtgtgtcagtgtgtgtggcatagccgtcggttcagacgttggcaccggccagggaaggggagcgccgatgttgttcagtgatataccaaacccacggcagggagtaaaatacaatttcagtccttaaacttatcggactatattattccggttcataaacttgtaaagtatatcttttaaagccttaatcgttattcaggtctatatgaggttcaaatcggattgaaacagctccggtagcaagccttaatccatgcccaattgctatgctcttttacccatccatgaatatctacaaaagctgtccagcctctgctcttccatgttcgtcgtcgggcaggtggtgatgggcctgccgcccttcttccacatctacgcatcaccggcatctgctccgccacgctgcggcacaagagatcccctcagctccaggtccgtcatgactcatgacagccgccgcaccgctcgcgtcggacctcgtggcgccgttcaagcggaagttcccgggcgtgcaggtggaggagacgtacgggctcacggagcacagctgcatcacgctgacacacgccggcggcggcgaggacgtggggtcgacggtgcaggtcgccaagaagaagccggtcggaatcatcctgcctaacctgacctggaggtgaagttcgtggacctcgacacggggcggtcgctgcccaagaacacgccgggggagatctgcgtgcagagccaggccgtgacgcacggctacttacactacaggaggaaggaggagacggagcgcaccatcgacgccgcggggtggctccacaccagcgacatcggatacatatcttcgtaaatggttaaagtcctaattatttttaattcaaaaataaatagaattagggcacgatattaatccgattc

SEQ ID NO: 113177 - DNA, 343 bp, Zea Mays
attctgccaaggtagtagctttgggtcgttgctttgaaccagatttagctttggctgcaagtgaatattttaccaggtggtcagataaactggattgcagtggtctctattacgcttcatgtacaaccactaaggtagccgcctttgattttctttcttttaactactgcatgaatatgatgtacttagccttgttgtatttggcatgacaaccgacaacctctccatttcacctggttaggctagatttgtagggccataagctgctatgataggaacatgagaactctgtacttgcggtttgatcttctctgtggaattctgaactatttgaggacataat

SEQ ID NO: 113178 - DNA, 3094 bp, Zea Mays
gtcggcatgggaccatccattgcccatgttcaagaaactagagcactgaagagcatgcattctctatccattcacacgccatatgcatgattaacttgctcgagattattctttgaactggtggttagagtaccaacttgttgcaacattttatagcgaaaaccgccagctgaggtgatttggcatatcctacggtagggaaacaaatttttatatatatacatctctgaactgtccactccatagtacttcaaaataactccaacgaccatgtaaatctctcttacgtatgagctgcactgcaacctacgcgtgcttgacttgcttggtagtcgaccagcaattattgtaagggattggccctcatcgcactgctgtctccggcccaatgatttaggcttctcatcaatggattctctgtatgaccattgacaaattccaaaccgtggcatgtatagcctccgccaaagaacccttctccttctgcttgtataaagctacctatagcagaagaggctgatcggctgagctcatcgcacaaaagatatataagaaccaccaattggtaaccacaagcaagcaatatatagagagtcaaccttgcagcggcgatgaagatagtgcttaaggtggcgatcacctgcaagaagtgcaaaacctgcgtccttgggatcacctcgaaagttaatgggatcaagtccctgacatacgacgacgagaagagcactcttacggtggtcggagacgtggacgtggtggtcatcgtggacgcgctgcgcaaggcgaagcatccggcggaggtggtgtcggtgaccgacgagaagaaggaggccgaggagaagaagaagaaggaggaggaagagaagaagaagaaggaaaaagaggaagaggagaagaagaaaaggtgctgccccaagccgccgtgcaagccgtgccctccgcctccttgcagtccgtgccctccgcctccttgcacgccgtgccctcctccgccgtgccctctgccaccgtgcccaccgccgtacctcaagccgtgctacatccccatcgaagacgagtatcccgggccctgcaccatcgtctgagactgagagagcaacaccgtggccatccataccagttcctcgctgatggaaaagccaccacgcactcttccagaagaaggcatttgagtttcagctgtagcgccatgcgtcaatcatcggtttggaagaaatggtttccaattttccatgcacattctctttctgtccttctcgttctatggttctagcgtgctctttctccatctaccatattattgtaaattgataggtgtctgaataatatgatataacagacacgttcaggtacataccatgtgtatagctctggaataagcttcccatcgaactccaagcatccaaagttgtttatgttacatttataggatctagcttttcaccattaatcgttagaacacatagatcaagctctattgccttcgatcatagatacgctaaaatccacgtgtccgcgtgattgcgggcttcgtccttgagccgtagatgtacaatgggtctgaggcttcggacaactacaccaaggccggtggtggcagcagtaagggtgcagaggcgatagcctttaccttactaactgtggataggatcttgtttaggtttatagggtcgaggaggtagtaccgaacattgatttgtgtgttacctcgtccccgttttatgtatgcactataaagggggtccgcaaccagctgtcgcgcttcctgattatgacgtgaaagatagagtcaggcttggttagttgattgagaccaacttgaaattaacccaagattctctcccattgatctcatgcttattcacttatacttagaactcaatttcttaattgctttatttttagcttacaatttctactccttagattagtacatcaagatcaaagctttacaacaactagttacatgccagtgaactaaatgactaatgcactttcctacatcaaagcagagaaattatttttgaggaagatggctgcatcatgactccttaatctagaaccataggtacttcatcaaacctatggctaggtattttctaaacatgttgggtgaaagtcctttagtgagctgatttgcaagtatttgctctaactttgtataattaaatacaattgtttgatcttaatgtttcttctttataaattaatacttgatgccaatatgttttgcagtagcacttgacttgttataggactaaaatattttcgatgtattatcatagtatatcttcactagttttgttatgttgtctaccatttttaaactagatatgaactttttaagccacaaccttcctcgttgcctcatgacatgcaaaaaaacttaacatacattgtcattgatcgatgtagtgatagtttgttttgagattttccatgatatagatcctcgtgtgagtgtggatatataacatgacatgcactttctatcttcttcacatcacgcataatatgaatctaattaaacataatctcaatgctacttgactttctatatgttaatataaggtcttgtgtatcctttaaatattgcaagactttcttaacgactttctagtattctatctctatttttttaaacaatctacttagcattctcgattatgaataccaagtccgaataaggacatatttgagcatatatcatgttttcgatagttgaagcgtattaaaccaatttcatttgattgatctcatattggttcttggtgacatgatcactctccaacttgtcctttttaactactggaggaggtgtccggttacatgcatgcatacaaaatttcttacaaaatgtttgtatctatgccttttgcgatatatgtagtacccttctctatcttggtgaatctcaattctaaatacataatgttagatacccgtctcttgtaatgggcctggcccagttttttggtctattaatacactgtccaaccctattctagggttatggtttttcccattcaacatggtaacagagccactgtagtttttttctcctctcctctccagctgccacccttcaggcgcc

SEQ ID NO: 113179 - DNA, 1109 bp, Zea Mays
atagtacttcaaaataactccaacgaccatgtaaatctctcttacgtatgagctgcactgcaacctacgcgtgcttgacttgcttggtagtcgaccagcaattattgtaagggattggccctcatcgcactgctgtctccggcccaatgatttaggcttctcatcaatggattctctgtatgaccattgacaaattccaaaccgtggcatgtatagcctccgccaaagaacccttctccttctgcttgtataaagctacctatagcagaagaggctgatcggctgagctcatcgcacaaaagatatataagaaccaccaattggtaaccacaagcaagcaatatatagagagtcaaccttgcagcggcgatgaagatagtgcttaaggtggcgatcacctgcaagaagtgcaaaacctgcgtccttgggatcacctcgaaagttaatgggatcaagtccctgacatacgacgacgagaagagcactcttacggtggtcggagacgtggacgtggtggtcatcgtggacgcgctgcgcaaggcgaagcatccggcggaggtggtgtcggtgaccgacgagaagaaggaggccgaggagaagaagaagaaggaggaggaagagaagaagaagaaggaaaaagaggaagaggagaagaagaaaaggtgctgccccaagccgccgtgcaagccgtgccctccgcctccttgcagtccgtgccctccgcctccttgcacgccgtgccctcctccgccgtgccctctgccaccgtgcccaccgccgtacctcaagccgtgctacatccccatcgaagacgagtatcccgggccctgcaccatcgtctgagactgagagagcaacaccgtggccatccataccagttcctcgctgatggaaaagccaccacgcactcttccagaagaaggcatttgagtttcagctgtagcgccatgcgtcaatcatcggtttggaagaaatggtttccaattttccatgcacattctctttctgtccttctcgttctatggttctagcgtgctctttctccatctaccatattattgtaaattgataggtgtctgaataatatgatataacagacacgttcaggt

SEQ ID NO: 113180 - DNA, 1330 bp, Zea Mays
ggtcacaatttctacaaaagtttgtaattgcctcgacctggtgttgatgggtgcgcaccggattttgtctacaactgcagcagagggtctcagaaagaacacatgtgacaccaagcatgctgactggtccctacacaaagtagtcttgccacacaatagtgatgaattcgcatgcaagggagtcatcctctctttgcttcccaacatcgccgttcccttgatatgccagtatactttttgcgggagtggtgcaaacaggtctgcagtaatcaacagaaaagataatgagaataatttggagaatatacttgctctaccaagctctaccaaatccattccacggagctaggggtcctctattggggagcatgtagaatgatcatcgttgacccaacaatgcagagatcatagcccagcacgcccatccgatgcaacttgcaacttctcattcagtgtgaaatgtgctagaacagcactgcacacataacaaaactcatcagaaacataaaaaaacacctgaggcatccaccactatacctcacaataatgctgagtgcgcccagtggcgtgccgaggatcgctggtacaaacatgtgagcgatgaaatttgcaatctccccaacaagcactcctaaatttcattttatggtaaaattccagcacactcttgggctttggcaattgtcatataattatgatgctagtggggaatctggcgcggcttcagaatcgaagaagaacactaggaatgaagtcgtaaagaaatagatgaatcctatctgcctaggcgtggcatcgctgtccctcctctgcgcagagctggagatgcaggagagcccctcccgaaccacgtcattgaccccgtcacgacctccgctacagcaatagcgtagggacagcacaatccataagaaccatcccgagatggtgcccacctagtggagcatgttgtcgccccagggaacgccgacacgcctgggtcgtcgcccatcaacagcgccaacagctccgattgcagccgctgcaccaccgactgaccattcgcgcccttcccggcccccgctgatgccgactttggtcctggtgccgccgtagatgcagcagagacattctatgtccctagtgaggacacggggagcggggggtgacggcgaagtttcggggcgcaggggcagcggtcgcggcgcgggcgagatttccaggggaatcgcgggtggggcggcatggacgaactcggtgaatgtctgtcacgacgtggggatcagcgacaatctcgggtgtggggtttgtttcagaagccactgactcgtgacaggggattggcgacaat

SEQ ID NO: 113181 - DNA, 3011 bp, Zea Mays
aaaaataatggaggctgctcaaataaaatatatatactctgtacgttattcttacactgcatgcattgctgcgcaccgcggattgtgctccacttgcactatccaacgaagagtctggacgacaaacatgtacgattgcgataaagaaatgcgccgtggcaacgaggattgtggtttggaagaggcacgcgagaccgatccgtgaatccgtcccgtcctcacgttcacggccataacgtgccaagccctttcatcgtctaaagaggagagaccatctcgtactcacccaacctcctccgcgaacggaacaatggtgccgccgagccaacccgctgctgcaagaacaccagggccgcaagcacgatcgccgtgcacggcacgatgacgtcccaggcgacgccgtaccggtcgtaacgcgggctcgcgaagacgatggacggcctggagctcggcacgtagccctgcgccctgatcacgtcgtacacgtggggcatcgcgcggaccacggtgctgccgatgtagaaccacggcgtcagggctccggccctgacgccgccgggcgagagcgcgttcatgacgacctgcgggagcaggaacgcgtcctgcgccagccccgcggacgacacgaggtcctcccacagcgtcgccggctccgggccgatgcggacggtgagggagttctcccgcgctgctcggagcgcgttcacgacgtggacgacgatggtcagcgctccgccgatcaggtacagcggcgcgcacagccagagcgctctcctctcggcgcgcgacgctgacgactcggccttgctctgctcggcgtccgccttccgcgccgacaaggccagctgaatgaggcgcagctgtagcagcagggcgatcagagtgggcgccctcagcatcgcctggctcagctcgtacggcacgtagctccggaacggcagcagcggcgcgtactgcctcctcctgctcagaaacagagcctcggagctgaccaccagaggcgcgacgtaccccagcgccaggacgacgagcatggtgaccgatgtggccgctgctgcctcgcttctcctcttggcgtggaagatctgcaggacggtgaagacgcacggcagcgtcgtcgagaccaccagcaggatgctctcgaagtccatcctcgagatcgactccgagatctgctcggagtacatcccggacaacatgatgtcgaccttctcgaagaagagagggtccgccgccgtcttgtttctcaggctgctgatcgctccccttccatggccttgcgccttcccgtccatcagcgaggctagataaacggtgatcagtatctggcagtccgtcgtcgagctgttgtactctcggcaggcgatcatggacaggatgcccgtcttcggattaaagacaccctctgctgccattctccgttcttcaaggctgatcatgtacgacccgttcttgggacgcacccagcccgcaggtggaacatgctcacgtatgtcgtagctgacgttcaacagctcctccgtattcatgtcgaccacggccttccgtgagaaggaatcgtcggcggccagctgatcaccatagaccatcgccgggccgatagcaaccgggtaggcgatcccactacccatcgtgccgtctttggtgtcgaagaaatggaactcgaggtcatgatcggtgtagttattaggagcgacgaacgaccccttaaccttcttcttgggcttgctcgatgcgggatcctggagacaatgctttttcgcctcctccaccatcgtgtagttgtactcgtacttcacttcagagatgttgcctctatggatgctgccatcgacgctcgacgctgatacaacaccactgacaccagagccatcacccgctttgctcgagttccagagcatgccggcgacggcactccggtcccgaatcgtccagactcccgggaaccagaaactcatgcccatgtcgcactcctcgtccaccgccatggactcccctgagcccaccaccacacggcacgccctgaggcagagcatgctccgagctgaatcccagtgcccttcggcgacgaccgcctcatctttgaccatgaatggtgggcgtggcggcaggtgcctccccatctccgtgtcgttggagaacgacgcgtatgcgcgcacggacccgtccgcggcgcactgcacctcgctgatgtgcaagcaccgatccggcggggagaccggcgcgtgcccgccgccgccgtcctgctcctgcagcttgtaagatgccgccagatggtctttcaggtgcgcgcacgagaagttggcgccaatagcctggagcgcgcccctcgcggccgcggcagaagatggcggcagcggcgagcaggaggcgcgcttgccatagcggtaggtgtcgccttcggcgtacgcgacgagagagatggcgtcgaagccagcgcccttgaggctgccggtgatgaaggggtccgtgatgctagatgggttggggacgcggaggtggagggcgacgtcgcggaggcgtttggtggagccgttctcctcgggataggagcctgagccagtcatgcaaagctccccggaagtggtgccggtggagtagtaaccgtcaaaggagaaggtgacagagtgactgcccacgtagcgatggtggcgtcgccgccgatgggctcccatatagtggttctcgcggtcgcggccgccggaaagggtcaacatggcgacgacgtggaagacggcggtgttggatgtccgatcggcgtggagtgggagcagagagaatgagcgggtgacataggagtaggaggatgtcacgttgctctcgtctttgaactcgatatctttgcctccgaagaagtagccggtgttgagctccaaggagcggaggagcgggagggcgtcctcgccgtctgctggcaggttttcgggagtaggggagggcttggtgcagaggggggaacctgaggcggagagagtggcagtggacaggaggaggaggaggacgcaaaggct

SEQ ID NO: 113182 - DNA, 634 bp, Zea Mays
aacagcagatacatttataccacagcagatacattatcaataaccggacgacgataccacatttggctcgctaattacttaatctgagtcgacccatatccctctactaaacatatgttttgccccaaatattagggagcactaacacgcgatgcaaaattcatggagaaaacaaacgaaatccgatgcacaggcgcagccaccgccgcacgtcctcctaccgtgcggttgtgagaggtccagctactccggtggacacttgtgtattgtcgtgccaaacgcgactggcattcgtctccgagccgccttcgttctcatttgtgtaccttcacccacgcggccttgctcggcacgcctttcgctatgacgtacaacaggtagtatcccggcggcgcgagctcaggctttcccggagcgtcgaccgttatcgtgtacctctgcccgttggccgcgaacgcggtgacggacagcaccagcagccgctggttcatggagtagccgtgcgtcgtgaacggtggcgcgtacatggtcacctttaggtcgggctcggccacggcctgcacgggcgtcgagaactggaacgtgaacttggccccgtacgccatgccgtccccggggacggtggccacgtcga

SEQ ID NO: 113183 - DNA, 261 bp, Zea Mays
atggcgacgacgacgacagcgaggacgtcgacgcccgtgcatcctcctgctagatcatatcgatccattccaaaagcacaagaaatcaggatcctagtaatacatgatggccgcatgcccgcagactacacacagagaagggaaacgttttgcaaagacgacgcctgcatcgtcgcttaccaagctgaggctgcccgttctgtggatcaagctggggtgctggccgagaggatggaagtactccaccatttcgctctgtaa

SEQ ID NO: 113184 - DNA, 110 bp, Zea Mays
cggacggatattatctatcaccgtggatatggttgtgggcggatatttgtaatattcgatccgaacccggcccgttgtcatccctatccggccggttctttttcattaac

SEQ ID NO: 113185 - DNA, 1236 bp, Zea Mays
atggctccgccctcctcccccgctaatcaccacgccgcgcacgcgccgcgcgaggcccgtcttcgttcccccaccgctaatctcgccgcggcatccatggcgccgccctcgccctccccccacatgtccacgccggcgccccctccctcgcgccccacctcaatctcctccattgcgcgcccgagaacgcgcaaatcccccattcccgcgcctctccctcgcgcctcgatggaatcgccacggcatccatggtagggtcctcaggatccacctccaccgcgtcgccacagtccgcaggggccgagggtgccccgacggtggggacctagactgtggtcaggtgcacgcgtattcaagcaggcgctcttgcttttcgtccacaacaagttctccatgtgccctgggcacgcgacacatgttcggggtggtgggcattaccgtcacctccctcacgtcccgtgccgccgcggccgaggtctgcttcctcgccttccgcaacgagcagtccgcggggtacgccgccgcctacgacttcctgacgggctccccgggcgccctcctcatcgtctccggcccaagatacatccacgggctcgccggcctctcccacgccaccgccaacgcctggtcgctcctcatgagctccggatcctgcgaccaggctgacgccggcaggggcgacttccaggagctcgaccagatcgctgccaccaagcccttcgccaagctcgccgtcaaggcaacaaccatcctcaacgtatctaggtcttccctgccaacaagaacaaatggcacgcccgccgtgccgatttgaggtggttttggaggtgaggaggggtacgatttcggtgaccctaggccttgcgggtccggtggatggaagcggtggagctgccattaccagctaaggtggagttcaggaagccaaggtaacgacagcaaaaatatctcttctggcgtgtaaccgtgtattgtgaagttgccataggttcagcgagaaacactgaagaacttactgttctggctatggttgctgaaaagtttggtcatcagcagttggatttgttaccagttggtgtatctcttgtgcttcgccatatgagtctactctctattctatgttttgatatggtgcagttgaatttttcttgagatatggtgcagttggtgtatctcttgtgcttcgcaattgcatgataaatagcatgttcaacggatatcattttaatttccaag

SEQ ID NO: 113186 - DNA, 2127 bp, Zea Mays
caccacgccgcgcacgcgccgcgcgaggcccgtcttcgttcccccaccgctaatctcgccgcggcatccatggcgccgccctcgccctccccccacatgtccacgccggcgccccctccctcgcgccccacctcaatctcctccattgcgcgcccgagaacgcgcaaatcccccattcccgcgcctctccctcgcgcctcgatggaatcgccacggcatccatggtagggtcctcaggatccacctccaccgcgtcgccacagtccgcaggggccgagggtgccccgacggtggggacctagactgtggtcaggtgcacgcgtattcaagcaggcgctcttgcttttcgtccacaacaagttctccatgtgccctgggcacgcgacacatgttcggggtggtgggcattaccgtcacctccctcacgtcccgtgccgccgcggccgaggtctgcttcctcgccttccgcaacgagcagtccgcggggtacgccgccgcctacgacttcctgacgggctccccgggcgccctcctcatcgtctccggcccaagatacatccacgggctcgccggcctctcccacgccaccgccaacgcctggtcgctcctcatgagctccggatcctgcgaccaggctgacgccggcaggggcgacttccaggagctcgaccagatcgctgccaccaagcccttcgccaagctcgccgtcaaggcaacaaccatcctcaacgtatctaggtcttccctgccaacaagaacaaatggcacgcccgccgtgccgatttgaggtggttttggaggtgaggaggggtacgatttcggtgaccctaggccttgcgggtccggtggatggaagcggtggagctgccattaccagctaaggtggagttcaggaagccaaggtgagaccgctgctgaggtaatggagcgcatccagagaaaacttagagttcatgatgatgaattgtccaagttgaagcttgcattcatttccatgaacaaacaagagtacctccaagacactaacgttgtatcaacatgtttttaggcaagtgatttctttataatgcttacatgcataccttctcttgttcactatgttcatacacgatgctttgctttttactatacgagagatgtatatggtgcttgggaacaataccttggcttggagcacactgatacaacattgaaacaataccttggcttgggatcaataccggcaaggacccaacaagcccaagagggcacccaacgcttacttcgtgttcatgaggaatgggtggagggacgagcaagatgtcaatgttctattgaaacaaactgccttaattattaggctatcactactgaaacaaactacctctgtcgtcaacctactaacttccatattcttcacactcagctttgcaaaatttacttgactggctttttttggcttaaaatataactcagggagacgtgattttgggacgatcaaactgttgggattgcgcttggacattccgggcagcgtgcacccaagattgaccaagctgattcgacggtgctaggacaaagatcctgatgcgtgtctgacttttgcagagattactatagaactccaagatagtctacaccatatcgaggcacccaagggagccagccgtcgttcttgagcaaagatgtagaagaaataagaggaagaaaaagaataagaatacatacgtagggcaaggtttcctacttttttgtgtgttacacaagttgcagtatgagtgtttgtggtgtatgtcatagttataaatatttcaaggccaagtaagtataaaaaccgaccttagctcagttggtagagcggaggactgtagtggattccccatgtcatttgttcttgttggcagggaatacctagctacgacaaagatggggatggctaggaaagaaaaccaattgtgggacaatgataattgatatcaatgtcagccccttatatgctacacctgcaacctgtaatcataccgtcaactgcacctgacatccgtgcatcagaagtttttaattctgatgatttagattatgtctataaatctgttgaggatggcatggaacatatttttacttcaacaacacaactccaatttggtc

SEQ ID NO: 113187 - DNA, 1913 bp, Zea Mays
caccacgccgcgcacgcgccgcgcgaggcccgtcttcgttcccccaccgctaatctcgccgcggcatccatggcgccgccctcgccctccccccacatgtccacgccggcgccccctccctcgcgccccacctcaatctcctccattgcgcgcccgagaacgcgcaaatcccccattcccgcgcctctccctcgcgcctcgatggaatcgccacggcatccatggtagggtcctcaggatccacctccaccgcgtcgccacagtccgcaggggccgagggtgccccgacggtggggacctagactgtggtcaggtgcacgcgtattcaagcaggcgctcttgcttttcgtccacaacaagttctccatgtgccctgggcacgcgacacatgttcggggtggtgggcattaccgtcacctccctcacgtcccgtgccgccgcggccgaggtctgcttcctcgccttccgcaacgagcagtccgcggggtacgccgccgcctacgacttcctgacgggctccccgggcgccctcctcatcgtctccggcccaagatacatccacgggctcgccggcctctcccacgccaccgccaacgcctggtcgctcctcatgagctccggatcctgcgaccaggctgacgccggcaggggcgacttccaggagctcgaccagatcgctgccaccaagcccttcgccaagctcgccgtcaaggcaacaaccatcctcaacgtatctaggtcttccctgccaacaagaacaaatggcacgcccgccgtgccgatttgaggtggttttggaggtgaggaggggtacgatttcggtgaccctaggccttgcgggtccggtggatggaagcggtggagctgccattaccagctaaggtggagttcaggaagccaaggtgagaccgctgctgaggtaatggagcgcatccagagaaaacttagagttcatgatgatgaattgtccaagttgaagcttgcattcatttccatgaacaaacaagagtacctccaagacactaacgttgtatcaacatgtttttaggcaagtgatttctttataatgcttacatgcataccttctcttgttcactatgttcatacacgatgctttgctttttactatacgagagatgtatatggtgcttgggaacaataccttggcttggagcacactgatacaacattgaaacaataccttggcttgggatcaataccggcaaggacccaacaagcccaagagggcacccaacgcttacttcgtgttcatggattgcgcttggacattccgggcagcgtgcacccaagattgaccaagctgattcgacggtgctaggacaaagatcctgatgcgtgtctgacttttgcagagattactatagaactccaagatagtctacaccatatcgaggcacccaagggagccagccgtcgttcttgagcaaagatgtagaagaaataagaggaagaaaaagaataagaatacatacgtagggcaaggtttcctacttttttgtgtgttacacaagttgcagtatgagtgtttgtggtgtatgtcatagttataaatatttcaaggccaagtaagtataaaaaccgaccttagctcagttggtagagcggaggactgtagtggattccccatgtcatttgttcttgttggcagggaatacctagctacgacaaagatggggatggctaggaaagaaaaccaattgtgggacaatgataattgatatcaatgtcagccccttatatgctacacctgcaacctgtaatcataccgtcaactgcacctgacatccgtgcatcagaagtttttaattctgatgatttagattatgtctataaatctgttgaggatggcatggaacatatttttacttcaacaacacaactccaatttggtc

SEQ ID NO: 113188 - DNA, 2254 bp, Zea Mays
accttcctgacggcgactgcgcagccatatcctcctgacctcctctccatctcctctctttcgctgtctaccctcaccaactcctacctcccgagacaaattccgaggtcgacacaagaaaagggaaagaaccacaggtaattgccttcctgtgtcgggattgtagctccaatccactccgcgccggccgggtgcgctgccatccggatcagacgccctcgcatctctcgcccttccggcatcgtatcccctgggcggcagcggagtaaagatccgacccgcttgggattgtttgcttctcctttttgcggtgcgccgctggactccagtgctgcacatgctcgacgacggtgctgagctcctgcaatggcccgaagaaatgccggcgcaatgcagcgggagggttccgcggggtcggttaaggactggtcggaattcgacccttcgccgtctcccaagctggcgtactcgcagtcctacgtcgccatgagagggctgttgacgtcggtggcttctctggaccctgtcctgacgtcgagcagcctcaagtctctgtgggcagccttgtcatcgcacaggcacgctcggtccttggagaggccaaagtacaaggggatgaactggaagaggcccatgttccacctgcttgtgtgcttcttagtaggagttttcattggattcacaccactcttctctctcgatttatccagtaacatagattctgaaaacgagacgcttccgtttgacggggatgtggttaacagacagatgctggaacttaaaagtacaaggttggagccgattgtggctgcggcagagactgaagccgcccaagaacaacaggttgatgagagtcctccagttcctgcgatgctggatgatgaggcggacttcattgaagcgtcacatgtccaaccttctgttaatgattctgacattgttgcaaagaagcagctgataattgtgacaacaacttctgttcgaccacaccaagcttattacttgaaccgcctggctcatgttttaaaaaatgtaccacctcctcttctgtggattgtggcggaatggccatatcagtcccgtgaagcagcggagatcctgaggtcttctggggttatgtacagacatcttatctgcaatcggaacagtacaaatataaggaagattattgtctgccaaaagaacaatgcaatttttcatatcaagaagcaccgtttagatggtatagtacattttgctgatgaggagcgagtgtactcagttgatttatttgaagacatgcgaaaaatcaggcgctttggtacgtggccagtagcgacacatgttggagccaggtacaaggtggttttggaagggcctgtctgtaggggtaatcaagtcactggatggcatacaaacaagagagggggtgtacctcgtcggtttccaattggtttctctggttttgcttttaacagcactatactttgggatccccagaggtggaacagccccactttagagtctattatactccattcaggtggcagaggtggcttgcaggagtcaagattcatcgagaagcttgtcgaggacgagactcagatggaaggcctcgcagacaactgcactcgggttatggtctggaatttggacttggaacctccacagctgaattaccctactagctggcagctgcagaagaacctagacatcgtcgtgccaataacataaaccgcgatgctgctgctgccctttttgttcgcgcctcctagtgagtgtggtggaatgatgacgacaatgcccatgccttcctgaacttggtagcgtccaggatcacgcgaagctgctctgccaagacctggttcgaataatgtggtactagtaacaacagttggaaagcgaagaagcctgcctgacaaaaggaaaaattctttctccccccgttgcgctgcattaccaatgatcctcaacatagataggcttgtatatttcttttccttccatttttcgattattcctgttcgttacatataccatgcatacatacatacatacataaatacatatacaccttcattcattcataagtacatacatacatcttacagtactttacagatgtgaacgaaagcgttctcgatgagatgatggtgtatgctgcattgtgcttgtgcaatggtggtgttaggaacgatcgatcaaccgatgtccattttggatgaggcaattaagatgcagtatatcgtgatagtagggtactgattaacaactt

SEQ ID NO: 113189 - DNA, 1883 bp, Zea Mays
cacgcgcacgcccgttcccctccctacgcgcgcgaatcacgcgcccgccgcacaggcccgccgccatcgccgattcccctaccccgcggatcacgcgcacgcccccacccccccaaccgcaattcccctccctacgtgcgcggatcacgcgcccgtcgccttgcccctacgaatcctgccgcaaaacccacctaccggcgccactacagcacacccgccgccatgccgctccctacgcccgcaacgatcgcctccctacgcgcgggtgaccggcagcacctcgtctctctcgatgtgccaatggcgccgcctccatcctacccagtctccacctctgtcaccgcgttcgtcaaggaggaggacgccccaacccctttggtggcctccccgatggcgccgcctctgtcctacccgacctcgagttcattgagatccagaaggagcaggcgcaaacttctccatgcacgggaggtcaagcggagtatgcgcgaacttctttgtgttgtcgcccgaggctgactccagcatctccttcctggccagatccatggaggcatcgcaagcccagatcccgctgtcgttaggagctaatggttggtgctcgtgtggcacggcaacgcgacgacggagcaaatcggagagcctcggtacaaggttttcataaatccgagcattagtgatgtcctgtgcacaacaacaatagaggctctttcaatggggaaattcatgatctgcgcaagacatccatgaaatgagtttttcatgtcattttccgaactgtttgacatacaagacttcagaggagtttgttgcgagagtgaaagaggcaatggatagagaaccccaacagctaacccctgagcaaagatacaacctttcatgggaggcagcgactgagagattcatggagtactcagaccttgacaaggttctgaacaatgaggctgctcagcctaaacaaggtaggaaaagaaagaataaaagaacctcacagcctaatttgttcgacatcatggatggcggtctagcgttggcccatcgatgcttaaccggcaatgaggttctcaggctggcaaccgaagccattcctggtacccgggactacgataagagcaatgtgtggatatgggtctcttgcctcctcaagtacaacaccctgtatatggctggtgatgactgatgagcacccaaagctaatcgtagaaatgtgtagtacatggacatcaaaagttcatgactccagaagactgtcagcacaatattgtctgcttttgccattgaattagagaaacatagtcttaaaaatttaagagcatctctggccgcagagggcgcgcctgtgccaacgacggaagcaaagaagctggcgtcctccatcgcgaggtccaagcaggagatcacagaggacttctcgtcgattggcaggacatggcccccgcggcggtctaagaagagaccaggtgcaacgacaactcaatgtaagaattgctggattttgtctcccctccaaattcagtgtttcatgagattttttcccttttcctttaattttcctatatcacaaagaagaaccgaaaggcgagaggatttcatttcacaggtcgacttgcttctaccatctggttgtttgtggacagtattttggtgctgatttcgttatcatgtgttatgtttgttttattttaacatcactccagatttgatgaatcatagctcggcttctacacgatgctaaccccaggctcgtcgggttttttcaagaaggaagcccgaattcctatgctagatccaccatgccatttaatgttgcaggtcatgacgaatcttgtgattggtctgtgtcaaagcaatggatacacatatgttcgcattgcatcatttct

SEQ ID NO: 113190 - DNA, 1586 bp, Zea Mays
cacgcgcacgcccgttcccctccctacgcgcgcgaatcacgcgcccgccgcacaggcccgccgccatcgccgattcccctaccccgcggatcacgcgcacgcccccacccccccaaccgcaattcccctccctacgtgcgcggatcacgcgcccgtcgccttgcccctacgaatcctgccgcaaaacccacctaccggcgccactacagcacacccgccgccatgccgctccctacgcccgcaacgatcgcctccctacgcgcgggtgaccggcagcacctcgtctctctcgatgtgccaatggcgccgcctccatcctacccagtctccacctctgtcaccgcgttcgtcaaggaggaggacgccccaacccctttggtggcctccccgatggcgccgcctctgtcctacccgacctcgagttcattgagatccagaaggagcaggcgcaaacttctccatgcacgggaggtcaagcggagtatgcgcgaacttctttgtgttgtcgcccgaggctgactccagcatctccttcctggccagatccatggaggcatcgcaagcccagatcccgctgtcgttaggagctaatggttggtgctcgtgtggcacggcaacgcgacgacggagcaaatcggagagcctcggtacaaggttttcataaatccgagcattagtgatgtcctgtgcacaacaacaatagaggctctttcaatggggaaattcatgatctgcgcaagacatccatgaaatgagtttttcatgtcattttccgaactgtttgacatacaagacttcagaggagtttgttgcgagagtgaaagaggcaatggatagagaaccccaacagctaacccctgagcaaagatacaacctttcatgggaggcagcgactgagagattcatggagtactcagaccttgacaaggttctgaacaatgaggctgctcagcctaaacaaggtaggaaaagaaagaataaaagaacctcacagcctaatttgttcgacatcatggatggcggtctagcgttggcccatcgatgcttaaccggcaatgaggttctcaggctggcaaccgaagccattcctggtacccgggactacgataagagcaatgtgtggatatgggtctcttgcctcctcaagtacaacaccctgtatatggctggtgatgactgatgagcacccaaagctaatcgtagaaatgtgtagtacatggacatcaaaagttcatgactccagaagactgtcagcacaatattgtctgcttttgccattgaattagagaaacatagtcttaaaaatttaagagcatctctggccgcagagggcgcgcctgtgccaacgacggaagcaaagaagctggcgtcctccatcgcgaggtccaagcaggagatcacagaggacttctcgtcgattggcaggacatggcccccgcggcggtctaagaagagaccaggtgcaacgacaactcaatgaggtgaaggatgaggtcccatgggccatggtccatccactcagcgttcttcagatgttgttgagactttgaccacaacaattgaataaacatgtgcttatcatgaac

SEQ ID NO: 113191 - DNA, 109 bp, Zea Mays
ctcactttatcttctttacgtgggttccactttggtctttgatatatgtataaccgacgtgtgcatacaccttcattttttatacaactttagacctttttagcataag

SEQ ID NO: 113192 - DNA, 1503 bp, Zea Mays
aaacagggaaacgaaacgttcgttgttggctatcactatgatcgatgctgatagtctgatacggtgaaatggaaattcgaaccactgcacagaaggggagagcatccaactcacaacgttacaactctgccatcaacgcagcgcacgccgttccaactgcagggatcgctgtcgcgcgggctccagcctaccatggcgccatacggatcctcctccactcttgactggaatttgagcagtatcgaccctgcgcacgccacagggaacgcgcggcaagtcagtaggacaatgcaagcgccgaaaccatgcaccggtggcgagacgcaggcccgtaccttcaaggttgaccgccgagcagccatccacgctaagatgaagcgccagcacgacgagcgccaacgacgacgagatgaagccatccatcctccgcatgcttccccgtcccgcaggcgcgcgatggtcgaaacgacggcaaggtgccgtcacatgatcctcttcgcgagcctcttgagcagcctggaatgcatggcatctaagcaaaaagctctcgagtctagaaaacttgctcaacaaagtgtgcctcagacaatcatgaacgggataaaaggtgatagaatggatgttgacccaatgtcagttgaagcatttgatgatcaaccatctgttccaaaacgcttgaagacgcatcatccatcacctagtggcctagagaatgatatgtctgtagtctccaattatcatgtaaactcaggctttgcattgcaggaaacacagcctgagcagcttgaccacaataacaagacatcatatctgaaacgagaggttgatgcaaaggctgacatgcgagctcctcaaaagcccataaaaattagttatggtattgatggaaatctgtctgcatcaaggtgtaatgtgattcctggtgttcccagtgagattaattctcatatcaagcaagaaaacttgtcggttgacaaagagacaagtgaaaccgcccttgaggttaagaatgaaacaaatggtccaactgatgcgactgtgtctaaatcaggaaaaccaaatgtgaatgttggcaacatcaaatttgtgctttatttaatggaagaaggaacgatggaggacaagctgaatattcttgccccaattgctatgttgaggagtcatgatattgaatctggtcaaggctggcggtgcgagatttgtccagattttgatgtgtgcaactcttgtttccaaaaaggagtggttactcatcctcacaagttaacgaaccatccatcaactgctgtccgtgatgctcaaaacgcagaagctcggcaaatgcttctccagcagctaagaaagatgcttgatcttctggatgcagcggtgcaacaacaacgccagcgcgcggagctcattcagcagcaacagcggcggtctgggcagctccaggcgcagctacctggacgcccacgggaagcggaggcgcgaggagtgcgcgacactggagcggaaccgtag

SEQ ID NO: 113193 - DNA, 521 bp, Zea Mays
aagaaacacataatttattattcacctcaatatctcacattatttgacgagaatagataagtcataaccatatacattgaaatctgatcattcaccatgtttgcagaagcatgtgaattaggctacatcagcaaacctaatttatactgacaacagtctatatgtataaacaacatagtcatctcaggttaattcatcgtcctagctacctagaaaaaatattcagcaacctagagtctttgcgccaatcaattgaacaggcatctaagcaaaaagctctcgagtctagaaaacttgctcaacaaagtgtgcctcagacaatcatgaacgggataaaaggtgatagaatggatgttgacccaatgtcagttgaagcatttgatgatcaaccatctgttccaaaacgcttgaagacgcatcatccatcacctagtggcctagagaatgatatgtctgtagtctccaattatcatgtaaactcaggctttgcattgcaggaaacacagcctgagcagcttgac

SEQ ID NO: 113194 - DNA, 459 bp, Zea Mays
atgctgcttgcagcttgcttgcttgttgcatacatgctgccgagcaaagtggcacaaccacacattgcacactcgcacaggccacaccgtcaaagactcacagttacaggctcacagccacacaaattacctgcagagagcacgccgattgcacagtcagagtaccagctcagggagcaggccagggcgggtacagcaggtggctaccgtgcgcaggcagcaggacgctgccggaggtgccagcgcccgccggagcgccaagctgtggagcggccgagcgggggaggtgcgaccgtccgccgtcgtgtgctcatgtgcgtgcaggtcccgatgcgggactggatggaggagcgattgtgggaactgagactaggaagtcgccggccggaggcacagcccgacagccacagagtcgcctcttgcccgatgcgggactggatggatggaggagcgatttag

SEQ ID NO: 113195 - DNA, 1302 bp, Zea Mays
agtccactccacatttccactccaccgtttcagcagcaccagcaacacagccaaagcccaaagaggcggcagcagcacagcagctcggcctgttcccatggctcctctgctgttcagggacatgaaggggctgtcgtgctcgtccccggcgtccacggcgatatgcccgagcctggagcggcagccgatggtccggccacacaaggccattgccagtgccactgccagccccctgtctcacgtccctgccgcgcccaggacacaccggcacgacggtaagaaagggcggcagcaggaggagcagcagcagcgaaaggctgtcgtcgtcggaaacgccggtggcctcgtcagcccggctggctcgtcccgctacttgctgagcggccgcttcgccgccaccgaggagatccaggaggtggagtctgccccggccgtcgacgtcaagcccaagcgggaggaagcaggtgaagctgctgctgatgcgaagagcgcgcaggcgcaagagcaggcgcaagagcaggtggttgtgctcaaggtatccctgcactgcaaagcatgcgccgggaaagtgaagaagcacctctccaagatggaaggcgtgacgtcgttcaacatcgacttcgcggcgaagaaggtcacggtggtcggcgacgtcacgccgctgggcgtgctcagcagcgtgtccaaggtgaagaacgcccagctctgggcggcgccgccggcgatagccgcctgaaggaaggacgagaaggaaacgggggcccggaaaccgaatcagcagccttttaggcccccctatccgttgcggttggccggccgtggctggtggtagggggaggaagaggagtgcgtgcgtaggcgtagctggagaaggtgtccgtacgtacgtagccaggcacggcacgcgtgacgcgtgtgggggcactgccggccagcacgctgggccagtgcgacactgtgagcctgcgctggtgtgtctcctcgaccagcatgcgtccaccgcgtgtccgtgtgctgccacttgaatgcagatttggttctttcctgtggtcgtcttgtgagttgtgttgtgaccctcctttcctctccttgtttgctgtggttggttggcgacatgcagtggtggtggtggtggatgcgatcttgcttgctgctgcttgagtgctttcatctgtttctgttatgatgaacaggtaactctgcctttttttcccttctatgctgcaagcctgtaattaatataagaatgcatggcactgcattgttgtctgttcttcatgggaaaatgagtggcatgtagtt

SEQ ID NO: 113196 - DNA, 206 bp, Zea Mays
ggtgtcaaaataaagaaaacccatcctagtggatccgtgtggtaaggaaaaatgggtaatctattccttaacaaaaaaattttggagattatgtaatgcttactctcaaactttttgtttatacagtagtgatattttttgtttccctctttatctttggattcttatctaatgacccaggacgtaatcctgggcgtgaggagtaa

SEQ ID NO: 113197 - DNA, 1798 bp, Zea Mays
actcgtcagctacaattctacggtccatacaagtagatcgagggtggtcgagcgtttctttctctcttcggctgaacgcggttttgcacaagcgagcaaagagagggagagagagaaagaaaagaaaagaaaagaaggggagggccgcgactgtagtggggagatgcctcggcatactgcgcccgcggcgccgccatcggagcgcggcgagatggacgaggtggtagaggcggatccggacacggaggcggaggatcaggaggagaggtgggcgacgctgctaccagagttgctctccgacgtgttgctgcgcgtcgaggcctccggcgccgagcagtggccggcgcggaaggacatcgtctctttcgcctgcgtgtgccgctggtggcggaaggccgcagtctccgttgtgcgtcctccggcggagtccgccaagatcaccttcccctcctcgctcaagcagccagggcctagggagaacccaatgcaatgctttatcatgcggaataagaactctacattctacctctaccttggcttcacaagttcacctgtgtataaagggaagtttctcatggctgctagaagattaaggcgtggtccccatactgagtacattatatctcttgatgcagaggacttatcacaagggagcaattcatacatgggaaaactgagatctgatttctgggggacaaacttcaaaatatatgatagcaagccaccatatgacggcgctaaagcatcaagtagtcgatctagtcgtcgtttcggaagcagaaggattagtccccaagtatcgtctggtaactatgaagttggacaggtttcatacaaatacaacttgctcaaatccagaggccccaggagaatgaattgcactcttgaatgcccttcagcgcaagagacctgggaaaactcactcaagacaaagttcaggaggcccttgggtcccacaactttacgaaacaaagcgccccgctggcatgagcagctgcagtgctggtgcttaaacttccatgggcgggtaacagttgcatcggtcaagaatttccagcttgtgactgctgccggccccagtgaccctactagcaacgtggacgaggaaacggttctgctgcagtttggtaaggtcgacgatgatattttcacaatggattaccggcaaccgctctctgcgttccaagcttttgccatcagccttagcagctttgggaacaagctagcctgtgaatagcgatacggttcgatgctcgtcgcgtggctatatggtttgcggtggtgggtgcttgctcgccgttgttacaatgtgatctgttctttttttttagttgagtatcgacgtactatttgtaccatgctgttgtacaagagatgcactatactgcattactgctgtcttgtcaaaaggacttgttcaagaaggaaatactgtgtcataaactttttgctctgattccatgcaaaaggcattccggtgctcatatatgctcatggtgaagtgatattttccccttcttgataaatattatttttgttttgtttgggtaactactgctactagtgctgggatgctgagcgcatcttagggaaatcttcttatgatttcactagtatagtgaccgtgcgttgctacggcatgtcaattatttgataaaatgttagttcacaacgattacaatgttttgtgacaatatgttaggatgaaaacagacaatttacattgacaatactttcttaaacatggagttggataggtagagggagactggtattgcagccaagaagcaagaaaata

SEQ ID NO: 113198 - DNA, 1639 bp, Zea Mays
tgaacgcggttttgcacaagcgagcaaagagagggagagagagaaagaaaagaaaagaaaagaaggggagggccgcgactgtagtggggagatgcctcggcatactgcgcccgcggcgccgccatcggagcgcggcgagatggacgaggtggtagaggcggatccggacacggaggcggaggatcaggaggagaggtgggcgacgctgctaccagagttgctctccgacgtgttgctgcgcgtcgaggcctccggcgccgagcagtggccggcgcggaaggacatcgtctctttcgcctgcgtgtgccgctggtggcggaaggccgcagtctccgttgtgcgtcctccggcggagtccgccaagatcaccttcccctcctcgctcaagcagccagggcctagggagaacccaatgcaatgctttatcatgcggaataagaactctacattctacctctaccttggcttcacaagttaggacttatcacaagggagcaattcatacatgggaaaactgagatctgatttctgggggacaaacttcaaaatatatgatagcaagccaccatatgacggcgctaaagcatcaagtagtcgatctagtcgtcgtttcggaagcagaaggattagtccccaagtatcgtctggtaactatgaagttggacaggtttcatacaaatacaacttgctcaaatccagaggccccaggagaatgaattgcactcttgaatgcccttcagcgcaagagacctgggaaaactcactcaagacaaagttcaggaggcccttgggtcccacaactttacgaaacaaagcgccccgctggcatgagcagctgcagtgctggtgcttaaacttccatgggcgggtaacagttgcatcggtcaagaatttccagcttgtgactgctgccggccccagtgaccctactagcaacgtggacgaggaaacggttctgctgcagtttggtaaggtcgacgatgatattttcacaatggattaccggcaaccgctctctgcgttccaagcttttgccatcagccttagcagctttgggaacaagctagcctgtgaatagcgatacggttcgatgctcgtcgcgtggctatatggtttgcggtggtgggtgcttgctcgccgttgttacaatgtgatctgttctttttttttagttgagtatcgacgtactatttgtaccatgctgttgtacaagagatgcactatactgcattactgctgtcttgtcaaaaggacttgttcaagaaggaaatactgtgtcataaactttttgctctgattccatgcaaaaggcattccggtgctcatatatgctcatggtgaagtgatattttccccttcttgataaatattatttttgttttgtttgggtaactactgctactagtgctgggatgctgagcgcatcttagggaaatcttcttatgatttcactagtatagtgaccgtgcgttgctacggcatgtcaattatttgataaaatgttagttcacaacgattacaatgttttgtgacaatatgttaggatgaaaacagacaatttacattgacaatactttcttaaacatggagttggataggtagagggagactggtattgcagccaagaagcaagaaaata

SEQ ID NO: 113199 - DNA, 1607 bp, Zea Mays
ctagtttttgctacaaattaacctagcagatggaaatgcgggggttagcattttctgggggttactttggttatttaagattctaatgagataaataaccaggcaggtcgattgcatggtttgcgttatatggcgacatcagtattttttatacgatcagccattcagatatttaggacatagtttgagaagtttctttgcaaattcagtgtcatagtgtttcttatttgacatctgtgttcctaaatcttacaccatttctcaaaacacagccagggcctagggagaacccaatgcaatgctttatcatgcggaataagaactctacattctacctctaccttggcttcacaagttcacctgtgtataaagggaagtttctcatggctgctagaagattaaggcgtggtccccatactgagtacattatatctcttgatgcagaggacttatcacaagggagcaattcatacatgggaaaactgagatctgatttctgggggacaaacttcaaaatatatgatagcaagccaccatatgacggcgctaaagcatcaagtagtcgatctagtcgtcgtttcggaagcagaaggattagtccccaagtatcgtctggtaactatgaagttggacaggtttcatacaaatacaacttgctcaaatccagaggccccaggagaatgaattgcactcttgaatgcccttcagcgcaagagacctgggaaaactcactcaagacaaagttcaggaggcccttgggtcccacaactttacgaaacaaagcgccccgctggcatgagcagctgcagtgctggtgcttaaacttccatgggcgggtaacagttgcatcggtcaagaatttccagcttgtgactgctgccggccccagtgaccctactagcaacgtggacgaggaaacggttctgctgcagtttggtaaggtcgacgatgatattttcacaatggattaccggcaaccgctctctgcgttccaagcttttgccatcagccttagcagctttgggaacaagctagcctgtgaatagcgatacggttcgatgctcgtcgcgtggctatatggtttgcggtggtgggtgcttgctcgccgttgttacaatgtgatctgttctttttttttagttgagtatcgacgtactatttgtaccatgctgttgtacaagagatgcactatactgcattactgctgtcttgtcaaaaggacttgttcaagaaggaaatactgtgtcataaactttttgctctgattccatgcaaaaggcattccggtgctcatatatgctcatggtgaagtgatattttccccttcttgataaatattatttttgttttgtttgggtaactactgctactagtgctgggatgctgagcgcatcttagggaaatcttcttatgatttcactagtatagtgaccgtgcgttgctacggcatgtcaattatttgataaaatgttagttcacaacgattacaatgttttgtgacaatatgttaggatgaaaacagacaatttacattgacaatactttcttaaacatggagttggataggtagagggagactggtattgcagccaagaagcaagaaaata

SEQ ID NO: 113200 - DNA, 1104 bp, Zea Mays
aaagcaacgttctgtgcacattttatacatacaatgatataaatggcactgcactcttcttagtgacctgtttgatcatgatgtcgtgctacaaagcatattgctggtaccagctgcctacaaaatttcctcgagctgcctatcaaccgattattccacccaatctttacacacccccttaaatgtacacaaaagaataactcaaccagccaccaggaagcagcatttgccacttccgagtttgaacagaacgaccttgtgtactgtacacacaaaaaacatgcacaactcagatagtcagatcaaagttctttaattgtgtcaccaacgattgcatgctctcgagcttttcgctaagctgcctgatgtcctcggcacggttttgatcctcagtgctgcttgcctgagaaatcagtgccatacatttggccttggattcggaaatctcgccttgtaatgaggaaatagttgcttccagtgtggttttcgaactcatgacgtctgcaatggcttgcatagttggagtccgaggagtgcctatgctaccaaaactgttcagcctgctgagcctcctgggtgaaaagatattgtccatgcctccacttcctgttacgtagttgttctatagttccttgcccaagagatttgtcaagtttaaggagacgaagaattccagcagtgatcctccccattgcatcagcctcagatctgcaaagcatcacaaggtgctctagttcttcttttgttgcaaccgcctcgatctgcaaagctcaaatggataaatagttcagaaagcagattcaaatcgacaggtttagacaattgactaaaatgagctcattctggttctttgatagaaaatttgacattatccattgtccatttggcaccctcaatctcgacttcgccaatgaccatggtagcttcaacatcaactccatggtcaccaacataacttgaactattaaaatctctgcccatctcatgattgtttgatggtccttttttattgcactgatctctcagacgaggttttattgcctgcaaaccttcaattccagtctgcaagcacagaacatcaaacaattaaacgagagagtgcca

SEQ ID NO: 113201 - DNA, 204 bp, Zea Mays
atgtgggagattgttagagaacttgagctcatcttgaggatgatgcttgaagaggacctgattctgctataaacctcagagacatattcgactgatgtcactaagtcgtcatcatcaacgacagggaccctcttcgtctcgtcacaggcctctaggagtcttgacgcgagcaacaacctgatctctggaagggtaacccctcgg

SEQ ID NO: 113202 - DNA, 3286 bp, Zea Mays
cgacgcctcccacagctggagaccgtactttactggcactggcagtaatcttcccacccgcctcggcgcctcctccctctctcccaacatcgcccgctctctcctcgctgttctccgctgtcatctcccccggagaagcgtggctcctgtagccggcctcctacctgcccctcctccgcgcgccgagcaccagacgacgcgacacggccgagcacggtcgctgcttccgcggcggcgccgctccactctcgtgctgcagctagcggaacagagatccgtggggacatgaacagggtttctcctctctgttggtatgaactaaattgatcgatggtcctattgaatatagagctactattatatggcatattctgtcatgcaaatgatggtggttgtaagttgtgattgaggaactccattgtttgagaaatggatgaaacaccaactagttctgggcaatctgaagatagttcatgtgaacctaattggtggccaccagacttattagagaagatagagtctgcttccatatcaaggaaacatgatgttttgggtaatctaaggtcctcatcctggaaggcatcacaattactgtggtcaacaggatcttattcagggttaatccctaatggtttctattcaatcatcccggataaaaagttgaaggagactttcccaacaattccatcggtagatgacctgcaaactcttgaagcagatgggcttaaggctgacataattattgtagacactgagagggataagaaggttttcatgttgaagcagcttagtgctgcacttgtgaaagggttaagctctagcccagcattagtgataaagaaaatagcaggtttggtttttgactgcttcaagcgacaaaatcctgacgccagtccagcaaaaggctcgattgaagatactcatttctttggatataaaggaccacaacttctagggcagataagacatggatcatgccgacctcgagctattctatttaaagttcttgcagatgctgttggccttgagagtaaacttgtagttggtctacctgatgacggtgccgttggatttgtggactcctacaaacatatgtctgtggtagtttcgctaaactctatggaactgctagtggatcttatgcgatttccaggccagttgattccattttcagctaaggctatctttatatcgcatatatctgctgcgggtgaaagtgactcagctgaaaatgactcctgtgattctccccttgagcccaacagccctctgtatggattgtctgataaagttgaaactgaaggaattgaatcttcatcaaatctatctggacgatcactgcgtaatatgatgttgagatcaaggacattttctgaggggaaattaagcacgtcatgtagtgaaccgaatatagcgaatgccttttggaggcacagtcaaaggagaggagttgccgaggaaccccgtggtgctagttccagtcctgagcatccattaatgagagcaaggggaagatctatacttggtggtgagaagcaatcatttcaagaatacacagaatctggagctgcttcaagatcagatggtcttgggggcacttcaacctctaatgctcgaagaataaggcgtagaagcattagcatcacccctgagattggagatgacattgtgagggcagttcgggctatgaacgaaacactaaagcaaaatcgccttcaaagggatcatgtcgaaggttcatgctcatatgttacggaagaccaaagcaacgccaatgactgcccaaataaagatgatgcatctcggataattggtgctactgacagtgactcaagaaaccgaactggtcctactcaaaaggccatgtcattgccttcttcgcctcatgaatataggggtcaagatacccaaaaaggtgatgattttataagtaaagagaagatggcattggcatggaacaaagttttccagagctccccatttcttaacaagcccttgctgccgtttgaggaatggaacatagatttctctgagataacaattggcacgcgggttggaataggattcttcggagaagttttccgtggtatatggaatggaaccgatgttgccatcaaagtatttctagaacaggacttgacaactgaaaacatggaagatttttgcaacgagatatacatcctgagccggttgcgacatccaaacgttatattgtttcttggtgcatgcattacacctccacacttgtcaatggttactgaatatatggaaatgggatcactgtattatctcatccatatgagtggtcagaaaaagaaacttagttggcgtaggaggttgaaaattattcgtgatatatgcagggggttgatgtgcatacaccgcatgaagatagttcacagggatctcaaaagtgcaaactgcctggtgaacaaacattggactgttaagatatgtgactttggtctatctcgagtgatgattgatagtcctatgactgataattcctctgctggcaccccggaatggatggcccctgagcttatacggaatgaaccttttacagagaaatgtgatatattcagccttggtgttatcatgtgggagctgtgcacattgagtcgcccatgggaaggcatctccccagttcaagtggtgtacgcagttgctaatgaaggttcgcggcttgagattcctgaaggacctctcggcaggttgattgcagattgctgggcagagcctgagaatcggccgagctgccaggagatcctaacccgtttgctggactgcgaatacactgtcagctgaaatggaagctgctcgctcgtccactcaattcctgcacaggtggaaacatttcttgtataaaacctgtaaaaaaggctgccgattctgcggacttgaggtcacatatcgaagcgctgtgtttttttttaaacaatggcgaccctttctcaaaaaaaatgtaaaaatgattccctggttatagaagaacatgtctgattcgatagacgtgccttgcatcgcagggcaagctggttgttgtaccttattctagataagtagcacgcccgcgaatgctgttcggctttcaaatagctgcagctgcaaatttttacctgttgctacagtatttcctttctatataaccaggcggcagcagcagccgaatgttgccagtacgttggagatggcataagcaactccatgttgtgaactgttccctcgcgaccataaagaacatgccatcctagatttggaataaaaatattgtcaaaatttgtat

SEQ ID NO: 113203 - DNA, 1678 bp, Zea Mays
aagtgtaaatgttagttgaatctcgcatggtttttgaggcgtcgcctaggcgttgaggcataccctagatgctgcaggacgccacagggttttagttatccaggcatacccccagcgcctcaggatgccgcaacgcctaaaaaaccaaggaatcgcagcagcttgggctgaaaatttatatttgtgcttaggatgatgcatctcggataattggtgctactgacagtgactcaagaaaccgaactggtcctactcaaaaggccatgtcattgccttcttcgcctcatgaatataggggtcaagatacccaaaaaggtgatgattttataagtaaagagaagatggcattggcatggaacaaagttttccagagctccccatttcttaacaagcccttgctgccgtttgaggaatggaacatagatttctctgagataacaattggcacgcgggttggaataggattcttcggagaagttttccgtggtatatggaatggaaccgatgttgccatcaaagtatttctagaacaggacttgacaactgaaaacatggaagatttttgcaacgagatatacatcctgaggtaccagaatttctcttgattttttactcgatattcttctatttttcattatatactaacattaattgtggcaacttattctttcctttcagccggttgcgacatccaaacggtaaccatcccttttaactgttgtgaaacagttctcaaactgctccacactagatgcctaaactaccttatttcttgtaagattgttttctaaccgtgtgtgtgtgtgtgtttctgttctgtagttatattgtttcttggtgcatgcattacacctccacacttgtcaatggttactgaatatatggaaatgggatcactgtattatctcatccatatgagtggtcagaaaaagaaacttagttggcgtaggaggttgaaaattattcgtgatatatgcagggggttgatgtgcatacaccgcatgaagatagttcacagggatctcaaaagtgcaaactgcctggtgaacaaacattggactgttaagatatgtgactttggtctatctcgagtgatgattgatagtcctatgactgataattcctctgctggcaccccggaatggatggcccctgagcttatacggaatgaaccttttacagagaaatgtgatatattcagccttggtgttatcatgtgggagctgtgcacattgagtcgcccatgggaaggcatctccccagttcaagtggtgtacgcagttgctaatgaaggttcgcggcttgagattcctgaaggacctctcggcaggttgattgcagattgctgggcagagcctgagaatcggccgagctgccaggagatcctaacccgtttgctggactgcgaatacactgtcagctgaaatggaagctgctcgctcgtccactcaattcctgcacaggtggaaacatttcttgtataaaacctgtaaaaaaggctgccgattctgcggacttgaggtcacatatcgaagcgctgtgtttttttttaaacaatggcgaccctttctcaaaaaaaatgtaaaaatgattccctggttatagaagaacatgtctgattcgatagacgtgccttgcatcgcagggcaagctggttgttgtaccttattctagataa

SEQ ID NO: 113204 - DNA, 2015 bp, Zea Mays
tccgtcccagcgccaactgctaatccggtaatccctcgccggcttggtgtcccggtcaaacctgccccgaccgacgggaggatccaacggcggccgctcgcccacacaacaaccatgcatctgcaccgctcctccacgtgccgcgtcgcggtcgtcacggcccacggcccggcgctcctcccccctcgccgaccaccccctctcccttcttctattccccaccccccgcctcgtctcctccaccgccgcccccacatctattcacccgtccgtccgttccttcgtctctacgcgcaaacgagagaaggctaggtcgtcgtcgtcgttgtcgtcgtgacgcggagagatctgggaggaggagcgatggacgggaagttgccgccgccgaacccgaacctgccgtaccgggaggactgctggagcgagggcgagacggccgcgctcgtcgacgcctggggctcgcgctacctcgacctcaaccgcgggagcctccgccagccacagtggcgggaggtcgccgacgccgtcaactctcgccccggggcctccgcgcgccgccgcccgccgcgcaccgacatccagtgcaagaaccgcgtcgacacgctcaagaagaagtacaaggccgagcgcgcgcgcggcgggccatcgcagtggaacttctacgcccagctcgacctcctcgtcgggcccacgctcaccggcatcaagaagccgtccccaccgcgcgccgcgctgcccgtgttccggaggcgcctgacgccgccgcgctccccgtcgccgcaatcaccgccgccgcttcccgtggcgctccccctgcacaattaccgccgtggctccgacctcccctccgcaaacctcatccataaggcggccgctgccgccgccgctgctgccgcggagtccgactcagaagatggctacaacaacaacgactatgacgatgacgaaggatctcagcagtcgccgtcgcgttctgtatcttcgggctttggtggtggtggtggtggtgctcctcctgctgttggcagcaagaggaagatgagcagtggcagtggtggtttcggggagctagcgagggcaattgagactttcgcggatatgtacgagcgcatggaagccgctaagcagcagcacgcggaggagatggagaggcagcgaatcaagttcctcaaggatctggagctgaagcggatgcaggcttttgtggacatgcagctacagctcgcgaggacaaagcacgccaggaagggtgacgcttcctcggatacgctcatgtctctcgctgcactgccattcctcagcagccctgcttatctctaaattggaagagttaggtaaaggaatgctttggccttaaattaggatacagtctgttggttgatgtgatagagttgttagtggattgtttatgttcttgctaagatactgtcgttgtttcatacgaaccacagaggtactaggtctttaaattttaaatgtaccttgcaatgcattatgctcaagtttttcttagatgagaaggaatttttactggtttgtgacatgtaactttcaatgtattacgaatttaatctcagctaccttttgttctgtatcatttacattattttttttggcaatttttgttatgcatgattggtttacaactttgcatgttgagaaacctatgctttgtttatgacaccacagtattttatgtctgtggtatgctatttcttgtcactggcctttctagttggggaagggaactatggttttttagtgtatgtgagcagtgagcctttgctataattctacatcaagatatgtgttcccattttctctcatttgagatgcttggttgccccagatgatatagggtaatttatttacctttcgatgtgtatttgaacatctactacatcaacaatgtgtatttttttgttctggttttagcttttcttttgagatgcacatgcactattgctgaaaactttctgatacgatctttaaagactggctggaaccaggattag

SEQ ID NO: 113205 - DNA, 114 bp, Zea Mays
gtgttctttaggttttatggatctattcatgtatttctgtttttggtggatctattcgtgtatttctgtttttggcctatgtaagttggctttgtgttcgtgttgttctagtcc

SEQ ID NO: 113206 - DNA, 1304 bp, Zea Mays
cgagatcctggtgggcccggagcaccctccggcttccagttcctttgttcctcgcgaagtctcaccgcgctgcagagcgcatcgccgagcccccgcctcacctcgaattcttctcgcgtagttcgttgccctcctccttccccttctctcctcgacaagtacacggcggcttggatctatacgaattcggcatctgtattttacctcattggggatggaggtgcaggtgtttgatttgtcttccgactccgagggcgaggtgacggcgcactcgcccgatcacaagcgcccttctcgacagccgggtgcagaccctaatcgcgggggtggcgagacaggttccagcgccctggacagcctcttcgagcaagcgggcgcggcgaagccacagcgtcaccccagtgacgcgctgaagaaagggaaggagaaggccgtcgagggggagagcgcggggcctccgaagcacagtggagaattgctcggtgctgctggccgcgtcctgggatctgggagtggtccgtggagcgcactgatgagcaagtgcaaggctggagacggtgggaacaatggagctgggtgttggggtagttggggtgaccggggtgatcagcttactaactcaacccccatgccgcgtctagggtcagagaggaaggggtttgatgagacatatgaactgcgagggatgcctcagcttcacagtgattctgcagcatcgagtgaccactggaagggtattcttggtgcaagccctggtgatgtcagcccactgtggtgctccagggatactagcatgaaagataatgaggatgaaaccttctctcaaaggtctgtgtctgcacgtagctgtgattattttcttgtcgaagatactagcccgtcatggctgtcgaaggtcaaagggctgaacttcccacttcctgatgagcatcagtcgagaaccaggcagattgaaactgatgagatgtttgcccgcagacttcaggagcagctcaatcagcaacagctaggatctcagcattccgaagcggttgttacactggactactcaagccttatagcttatagggtgtttggtttgagaaataagctaatccgttattttctcactcaatttttttgtttaatttgtggaatggaataagttaatccatcaccacctcattcttcatcatagttagttagttcgtactaacatgaggaatgagtttatcccatcaaatttgtgtgatagacttataatgcagtaatgcaccacctcatcttgaatgtagtgattcatcaaaccaaacatctccttaatg

SEQ ID NO: 113207 - DNA, 1783 bp, Zea Mays
atggaggtgcaggtgtttgatttgtcttccgactccgagggcgaggtgacggcgcactcgcccgatcacaagcgcccttctcgacagccgggtgcagaccctaatcgcgggggtggcgagacaggttccagcgccctggacagcctcttcgagcaagcgggcgcggcgaagccacagcgtcaccccagtgacgcgctgaagaaagggaaggagaaggccgtcgagggggagagcgcggggcctccgaagcacagtggagaattgctcggtgctgctggccgcgtcctgggatctgggagtggtccgtggagcgcactgatgagcaagtgcaaggctggagacggtgggaacaatggagctgggtgttggggtagttggggtgaccggggtgatcagcttactaactcaacccccatgccgcgtctagggtcagagaggaaggggtttgatgagacatatgaactgcgagggatgcctcagcttcacagtgattctgcagcatcgagtgaccactggaagggtattcttggtgcaagccctggtgatgtcagcccactgtggtgctccagggatactagcatgaaagataatgaggatgaaaccttctctcaaaggtctgtgtctgcacgtagctgtgattattttcttgtcgaagatactagcccgtcatggctgtcgaaggtcaaagggctgaacttcccacttcctgatgagcatcagtcgagaaccaggcagattgaaactgatgagatgtttgcccgcagacttcaggagcagctcaatcagcaacagctaggatctcagcattccgaagcgactgatacgacaatagcctggacattacatgagcaagacgctgagcatgccagatttgctgcaagagaaggccagtctagttctagccagagggacagatcaatggcacacctatattcttatggacgtcattcacccgttcaaaatttttctccttgggcatccaatcgtactccaattccaatgccaagaagaggaggtttgcaaagaaactccaactgtcctcaagtggagcaacgcaatatgcttatctctcagttaaccaggggatgtttcagagaagacatggatctcgaaacgaggttggctgtactggactcactttctgaagcatttaagaactgcgaggacacactttctccagattctgatgatgatgattatgaggacctcatagcacttgacgatgacaaccatcacagaggtgcttctgatgaccaaataaacagcctgccactatcactgatcgagggtgaaaattgttcagatgaaccctgtaatatatgcttggattgcccttctgctggcgattcactccggcatttgccttgcttgcacaagtttcacaaagagtgcattgacaggtggcttgggatgaagatatggtgtccgatttgcaaattaaatgtattctcccagtaggcactgggcatctcatacttttggggtagcatcgaaggtagattatagctcactaataggaatgatgactgtggagagtttttctggtagcagagaagggcagaaggcacggaaatcctcctgttcccgtctgttatataccttatcgtagtctgatatgcccaacagtatgtcagttttaggcggtgccataggacatgaggctggatccagtgccatttctcgatcatactttttatctattatactgttccagtgtatagtctctctttagcttacagtcactttagcgttatattagtttttatgttacatatatttattt

SEQ ID NO: 113208 - DNA, 1241 bp, Zea Mays
gcaagcttccggccgtccggcatcacgcgggaaggaaggcggagccctaccccgcgcccccctacgaccgccgagtcaacgcggcccgcccacctcctcggcggctgcgggggcggacgacgcggcggcagcgacgggcgccgatcgggcggtggggcgcggcctgcggcggcccggggacgcggaggccacgcggcggagcgcgccgccggccgtccagtagcggcggcaggcgcggcagaggtggcgcggctgccgcacgttgtagttgttgaagtagcagaacttggtctcccggctgccgcaccgcgggcacggcagcggctcggcgccgggacccccagccgcgggcgcctgctgcgggggcgggggcgggggagggggaggaggaggaggaagggccgtctgtggcgtcgggtcgtcgccctcgtccgccccgcgtttttgcgcgtcggggggctggatgaccttgccgaacagcttgaaccccgcggcgtcggcgtccgggaggttggcggccatggatggagcgggaggaggggcccggggtgggtgggtgggtaggggacgacggccggcgccggctttttatacactactagggaggagagggagtggagatggtcatcgcctcgcctccccgctcttctcacttttgcttcatgcgcctgacttctttgcgtgaccacccgcccggccccggtactagtagtaataagccatgtggtcggatagatggatggatcatgcacggatttggtctctctctagtagtctccctcccagctgttaagattggaaggtctggctggaggctggactggagcggagatttggccgcgcaagggtttgattggtccgccagggccaggccacacagatcgatcgctcgctcgcccagaaccaccagtgccactttttggtcgccagcctctcgtcgggttgacctttttgatgagtatcatagtaattcataaccggttgactttcatggtcgcagcttagttttttttttctttttttgtgaataaaatggattgggcgcatgtggggaagcgattcttgtgtgtgggagactcaaagctcgatcggaagcggcaggggaaataaaggggtcttgtttagtcgctaagcaaacacggacagtacagtactgcatggttcatggaagggattgcctggttggtactagtacttgctacgaggccgacatgtgccagagagtacccaactgatctctc

SEQ ID NO: 113209 - DNA, 107 bp, Zea Mays
cgttattatgatattcccgtcccgcggtttctctgttttgttatggcgcagcgtggactcgctaagtccgttgtttgctataaaatttaaggatcgaataggtttag

SEQ ID NO: 113210 - DNA, 1155 bp, Zea Mays
gccaaaaccgcgtccactttcaataacgagcggccaacccaacccaacccaacccaccactgcctccctccccgttccccagtccccaccccgaccggctgctcctcctcctttccccgcgccatcctcgaggcatcaccggcgccgcaacttcgttgaggaggaagcccgcacccgcccccgatccgatggccaacagcaacctcccgcggcggatcatcaaggagacgcagcgactgctcagcgagccagcgccggggatcagcgcgtcgccctcggaggagaacatgcgctacttcaacgttatgatccttgggccggcgcagtcgccctatgaaggtggagtttttaagcttgaactctttttacctgaggaatatcccatggctgccccaaaggttaggtttctgaccaagatttatcatcccaacattgacaagcttggtaggatatgcctcgacattctcaaggacaaatggagcccagcacttcagattcgaacagttcttttgagtatacaggctctactgagtgcaccaaatccagatgaccctctctccgataacattgcaaagcactggaaatccaatgaggtagaagctgttgaaacagccaaggagtggactcgcctgtatgcgagcggtgcatgagagcgcagtgctgttcttggtgtaataaccccatcatacttcagtcctaatccgttgccatttgcttgataaaaatagactggagatatttgccatggaatgaagtctctaaatgactaccactctgaattgtttggttgtacacctgtggtcggttccctttacctttgggcacctttgactaatcagtatatgtggtagaacttgcagttactctaatatatttgtcacttcatgtagaagagcttctcaactgttcataatgttggaactgaggctggttagcttggttgcattttcgctgtaccttcctctgttcgcctgtcgactgtcgcctgagaacgaattttgccgaaactcgagttgcacctggtcatgttttctacgatgtgctttcttattaggtgatcacaggttggttttatcacaacacttcggctgttttgcggggatttgttttatcgcaatacattttggcagtcataatctcgaggaatatgaaaat

SEQ ID NO: 113211 - DNA, 1353 bp, Zea Mays
gccaaaaccgcgtccactttcaataacgagcggccaacccaacccaacccaacccaccactgcctccctccccgttccccagtccccaccccgaccggctgctcctcctcctttccccgcgccatcctcgaggcatcaccggcgccgcaacttcgttgaggaggaagcccgcacccgcccccgatccgatggccaacagcaacctcccgcggcggatcatcaaggagacgcagcgactgctcagcgagccagcgccggggatcagcgcgtcgccctcggaggagaacatgcgctacttcaacgttatgatccttgggccggcgcagtcgccctatgaaggtggagtttttaagcttgaactctttttacctgaggaatatcccatggctgccccaaaggttaggtttctgaccaagatttatcatcccaacattgacaagcttggtaggatatgcctcgacattctcaaggacaaatggagcccagcacttcagattcgaacagttcttttgaggtctctatatttgtctatgtgtgtcagtatacattatgtttttgccaacaaaaacgttgtttcttcttttttaacctaataaaccaaatgtacaaaggggagctgtttctcttttgttcttgtgcagtaccaaaatacgactttataaaccttgttccatgaacatgctagctattctgacactattctggctttcagtatacaggctctactgagtgcaccaaatccagatgaccctctctccgataacattgcaaagcactggaaatccaatgaggtagaagctgttgaaacagccaaggagtggactcgcctgtatgcgagcggtgcatgagagcgcagtgctgttcttggtgtaataaccccatcatacttcagtcctaatccgttgccatttgcttgataaaaatagactggagatatttgccatggaatgaagtctctaaatgactaccactctgaattgtttggttgtacacctgtggtcggttccctttacctttgggcacctttgactaatcagtatatgtggtagaacttgcagttactctaatatatttgtcacttcatgtagaagagcttctcaactgttcataatgttggaactgaggctggttagcttggttgcattttcgctgtaccttcctctgttcgcctgtcgactgtcgcctgagaacgaattttgccgaaactcgagttgcacctggtcatgttttctacgatgtgctttcttattaggtgatcacaggttggttttatcacaacacttcggctgttttgcggggatttgttttatcgcaatacattttggcagtcataatctcgaggaatatgaaaat

SEQ ID NO: 113212 - DNA, 1207 bp, Zea Mays
caccgctgcaccgccacccccaccccgcccacgccagatttcgccagatctcaggccacatgtggacgggctccgccgagagctgaagcaaagagcttggcattatccgtctcgctctccgaggtccaccacgctcgctctccgcttccccagccccaccgccatttttatcccacttgctcggcgctgcccccatttttattcctccccgcgcctcgaaccccaccacggtacccacagctctcgccgctatagctccgccgccgctttgcttgcctcctcagttttcaccctcgcagtcacggacatctggctgtttttacattgggactctgctttttcctgcctgcaacagcgactcctctttccccgcctcttcctcctcccgcttcggattcccaacccccccgctcaggcctcttcccttcacagcaccaacccaaaaccctagccgcaacgcctacgcatggcttcccccgcgcgccccgccgccacctccgtctccggcgccttcggccttccccccgacgcgcgctgctcctacgaccagccccgccgccgcgaggtgcccgcactctgtgctctgctcccgtcgcgatctctcggtttcgaatttccttccttcactcggcgcctgacagaccgactcttctggtggtgggggtgcggggtgccgcgccgggcagggcttgcaggacgagaggatggtgcagacgttcgtggccgcctacgcgcagccgccgccgcatcaggacggcttctacccaaaggaagccgtgatggcggccgtggaggagtgcatgcggaagcaggccgacgcgctgctgcactcgctcgacggcatcgggggcaggctttcgcagctcgagctctactgctacaagctcgagaggtccatcggggaactgcgcagcgacgtcatggactaccacagcgagagcaccaccaacttcagatgcatcgacaagaacctcggacaggtgcgtccgcgcgtgccttctccgtgcatcttggatcccggtgtgcaccacctggcttctggagtactactggtgtgctagtgttctggtaatgtcgccgagtaatggcagacaatgacagtgcgagatttccaatttctcactaatatttggtgtaaaatgacttaactgattatttatttccctgaaagctagtacattcagtggagtcaacttatggttcccgg

SEQ ID NO: 113213 - DNA, 2489 bp, Zea Mays
caccgctgcaccgccacccccaccccgcccacgccagatttcgccagatctcaggccacatgtggacgggctccgccgagagctgaagcaaagagcttggcattatccgtctcgctctccgaggtccaccacgctcgctctccgcttccccagccccaccgccatttttatcccacttgctcggcgctgcccccatttttattcctccccgcgcctcgaaccccaccacggtacccacagctctcgccgctatagctccgccgccgctttgcttgcctcctcagttttcaccctcgcagtcacggacatctggctgtttttacattgggactctgctttttcctgcctgcaacagcgactcctctttccccgcctcttcctcctcccgcttcggattcccaacccccccgctcaggcctcttcccttcacagcaccaacccaaaaccctagccgcaacgcctacgcatggcttcccccgcgcgccccgccgccacctccgtctccggcgccttcggccttccccccgacgcgcgctgctcctacgaccagccccgccgccgcgaggtgcccgcactctgtgctctgctcccgtcgcgatctctcggtttcgaatttccttccttcactcggcgcctgacagaccgactcttctggtggtgggggtgcggggtgccgcgccgggcagggcttgcaggacgagaggatggtgcagacgttcgtggccgcctacgcgcagccgccgccgcatcaggacggcttctacccaaaggaagccgtgatggcggccgtggaggagtgcatgcggaagcaggccgacgcgctgctgcactcgctcgacggcatcgggggcaggctttcgcagctcgagctctactgctacaagctcgagaggtccatcggggaactgcgcagcgacgtcatggactaccacagcgagagcaccaccaacttcagatgcatcgacaagaacctcggacaggtccacaaatccttgcaggttcttcaggataggcaggacttggctgaaactccaaaagaactcagcaaacttcaaatagcacatgaggcaccctctcatcagaagggtgaggccaccggttttcccatgcttgcgccaagggaaaatgaccacatcacacaagctccaaaacatgaggttgcccttttgcgacttcaccaagttaatgggatgcagtcccctgccgtgcaggtccaaaccagcggtggctttgttctgcagcacctggtgcctgtctctttgagcacgcagcatgatcagcagcaattgaaccaggctcctgtgtactatgtgcaaagccaggatcatgctaaatccacagagagcaaggcgttggaacctttggttcaaggtgtgcagccacttgtccacaaccctgaagtcatggctcaagttgagctacctcagaaacctaatcaagcaactgaattgtaccctcaacctcagaatcacagactacagatgcctacccagcaggttgattcgcatacatggcatccccaacagcccatggtgcaacagcaccaatacattatccaacaagtttcacgacacatggctcaacagcagtcctcgtctcctcattctcagagtgctcaagccacacccttgtttcctccattcagctccccgaagcctgctagttctaacactgatccaattacaagaagtatggctgggcaacctccatactcttcatcgcagcagcagcatgaagtcgcccattcattttatggccaaggcaatacaatattggttcctgtagctgatcataatgctcagcatcagcaatcgcaatcagtgcagctacacagccagggcacctgtctacctcaaccaagcaagcccagtcactgcagtgttgcatcctatgctgttcaaggaaatggtcagacctacagctccacatacaagaacccttctaactgccctgcaactgtcgtagctcttctgcctcagcctccagctactgcttctatggcgtatcatcccttgggaccacaggtcgtgcacaatcatccatttggaaatatggttgaaacggctagtgtggtagggtattcacgggaccaaggtgagatactcccagtggtgactgcagtacaacccgtgatggttgataagcttaatgctggcagcaacgtaacatcccctcgtgaatggtcagcatagtggacgatgtgccatcgtacacttcactgcttccacaacttactactgcacatattgcagttggaagctcatcaggtctattttatctggctcctttttttccatcagccagcagattagaatagatccttctacctttttcagctgaaggtcagtatgaaataagaaaagtaggttagctgagtgatcactgttggcatatgtcctcacttttaatgggcatatcttcttgtaaccggttgcgaacttatatgccttatatgaatacatgatgggtttacatcagcttgccagatg

SEQ ID NO: 113214 - DNA, 2801 bp, Zea Mays
caccgctgcaccgccacccccaccccgcccacgccagatttcgccagatctcaggccacatgtggacgggctccgccgagagctgaagcaaagagcttggcattatccgtctcgctctccgaggtccaccacgctcgctctccgcttccccagccccaccgccatttttatcccacttgctcggcgctgcccccatttttattcctccccgcgcctcgaaccccaccacggtacccacagctctcgccgctatagctccgccgccgctttgcttgcctcctcagttttcaccctcgcagtcacggacatctggctgtttttacattgggactctgctttttcctgcctgcaacagcgactcctctttccccgcctcttcctcctcccgcttcggattcccaacccccccgctcaggcctcttcccttcacagcaccaacccaaaaccctagccgcaacgcctacgcatggcttcccccgcgcgccccgccgccacctccgtctccggcgccttcggccttccccccgacgcgcgctgctcctacgaccagccccgccgccgcgagggcttgcaggacgagaggatggtgcagacgttcgtggccgcctacgcgcagccgccgccgcatcaggacggcttctacccaaaggaagccgtgatggcggccgtggaggagtgcatgcggaagcaggccgacgcgctgctgcactcgctcgacggcatcgggggcaggctttcgcagctcgagctctactgctacaagctcgagaggtccatcggggaactgcgcagcgacgtcatggactaccacagcgagagcaccaccaacttcagatgcatcgacaagaacctcggacaggtgcgtccgcgcgtgccttctccgtgcatcttggatcccggtgtgcaccacctggcttctggagtactactggtgtgctagtgttctggtaatgtcgccgagtaatggcagacaatgacagtgcgagatttccaatttctcactaatatttggtgtaaaatgacttaactgattatttatttccctgaaagctagtacattcagtggagtcaacttatggttcccggagatgagatttgtatcacttggctctgagactaacagctactagcatctttggtaactagatctacattttggatgccaggtccacaaatccttgcaggttcttcaggataggcaggacttggctgaaactccaaaagaactcagcaaacttcaaatagcacatgaggcaccctctcatcagaagggtgaggccaccggttttcccatgcttgcgccaagggaaaatgaccacatcacacaagctccaaaacatgaggttgcccttttgcgacttcaccaagttaatgggatgcagtcccctgccgtgcaggtccaaaccagcggtggctttgttctgcagcacctggtgcctgtctctttgagcacgcagcatgatcagcagcaattgaaccaggctcctgtgtactatgtgcaaagccaggatcatgctaaatccacagagagcaaggcgttggaacctttggttcaaggtgtgcagccacttgtccacaaccctgaagtcatggctcaagttgagctacctcagaaacctaatcaagcaactgaattgtaccctcaacctcagaatcacagactacagatgcctacccagcaggttgattcgcatacatggcatccccaacagcccatggtgcaacagcaccaatacattatccaacaagtttcacgacacatggctcaacagcagtcctcgtctcctcattctcagagtgctcaagccacacccttgtttcctccattcagctccccgaagcctgctagttctaacactgatccaattacaagaagtatggctgggcaacctccatactcttcatcgcagcagcagcatgaagtcgcccattcattttatggccaaggcaatacaatattggttcctgtagctgatcataatgctcagcatcagcaatcgcaatcagtgcagctacacagccagggcacctgtctacctcaaccaagcaagcccagtcactgcagtgttgcatcctatgctgttcaaggaaatggtcagacctacagctccacatacaagaacccttctaactgccctgcaactgtcgtagctcttctgcctcagcctccagctactgcttctatggcgtatcatcccttgggaccacaggtcgtgcacaatcatccatttggaaatatggttgaaacggctagtgtggtagggtattcacgggaccaaggtgagatactcccagtggtgactgcagtacaacccgtgatggttgataagcttaatgctggcagcaacgtaacatcccctcgtgaatggtcagcatagtggacgatgtgccatcgtacacttcactgcttccacaacttactactgcacatattgcagttggaagctcatcaggtctattttatctggctcctttttttccatcagccagcagattagaatagatccttctacctttttcagctgaaggtcagtatgaaataagaaaagtaggttagctgagtgatcactgttggcatatgtcctcacttttaatgggcatatcttcttgtaaccggttgcgaacttatatgccttatatgaatacatgatgggtttacatcagcttgccagatgtttgctaggtaacattagttttaagcggtagctgctgctttctcacagaatctgtcacgcatgatctagttggttatgttactgtgtatgtcatgaagacattagctatacttgaaaattttgttg

SEQ ID NO: 113215 - DNA, 946 bp, Zea Mays
tatccgtctcgctctccgaggtccaccacgctcgctctccgcttccccagccccaccgccatttttatcccacttgctcggcgctgcccccatttttattcctccccgcgcctcgaaccccaccacggtacccacagctctcgccgctatagctccgccgccgctttgcttgcctcctcagttttcaccctcgcagtcacggacatctggctgtttttacattgggactctgctttttcctgcctgcaacagcgactcctctttccccgcctcttcctcctcccgcttcggattcccaacccccccgctcaggcctcttcccttcacagcaccaacccaaaaccctagccgcaacgcctacgcatggcttcccccgcgcgccccgccgccacctccgtctccggcgccttcggccttccccccgacgcgcgctgctcctacgaccagccccgccgccgcgaggacgagaggatggtgcagacgttcgtggccgcctacgcgcagccgccgccgcatcaggacggcttctacccaaaggaagccgtgatggcggccgtggaggagtgcatgcggaagcaggccgacgcgctgctgcactcgctcgacggcatcgggggcaggctttcgcagctcgagctctactgctacaagctcgagaggtccatcggggaactgcgcagcgacgtcatggactaccacagcgagagcaccaccaacttcagatgcatcgacaagaacctcggacaggtgcgtccgcgcgtgccttctccgtgcatcttggatcccggtgtgcaccacctggcttctggagtactactggtgtgctagtgttctggtaatgtcgccgagtaatggcagacaatgacagtgcgagatttccaatttctcactaatatttggtgtaaaatgacttaactgattatttatttccctgaaagctagtaca

SEQ ID NO: 113216 - DNA, 1015 bp, Zea Mays
tatccgtctcgctctccgaggtccaccacgctcgctctccgcttccccagccccaccgccatttttatcccacttgctcggcgctgcccccatttttattcctccccgcgcctcgaaccccaccacggtacccacagctctcgccgctatagctccgccgccgctttgcttgcctcctcagttttcaccctcgcagtcacggacatctggctgtttttacattgggactctgctttttcctgcctgcaacagcgactcctctttccccgcctcttcctcctcccgcttcggattcccaacccccccgctcaggcctcttcccttcacagcaccaacccaaaaccctagccgcaacgcctacgcatggcttcccccgcgcgccccgccgccacctccgtctccggcgccttcggccttccccccgacgcgcgctgctcctacgaccagccccgccgccgcgagggcttgcaggacgagaggatggtgcagacgttcgtggccgcctacgcgcagccgccgccgcatcaggacggcttctacccaaaggaagccgtgatggcggccgtggaggagtgcatgcggaagcaggccgacgcgctgctgcactcgctcgacggcatcgggggcaggctttcgcagctcgagctctactgctacaagctcgagaggtccatcggggaactgcgcagcgacgtcatggactaccacagcgagagcaccaccaacttcagatgcatcgacaagaacctcggacaggtgcgtccgcgcgtgccttctccgtgcatcttggatcccggtgtgcaccacctggcttctggagtactactggtgtgctagtgttctggtaatgtcgccgagtaatggcagacaatgacagtgcgagatttccaatttctcactaatatttggtgtaaaatgacttaactgattatttatttccctgaaagctagtacattcagtggagtcaacttatggttcccggagatgagatttgtatcacttggctctgagact

SEQ ID NO: 113217 - DNA, 2265 bp, Zea Mays
tatccgtctcgctctccgaggtccaccacgctcgctctccgcttccccagccccaccgccatttttatcccacttgctcggcgctgcccccatttttattcctccccgcgcctcgaaccccaccacggtacccacagctctcgccgctatagctccgccgccgctttgcttgcctcctcagttttcaccctcgcagtcacggacatctggctgtttttacattgggactctgctttttcctgcctgcaacagcgactcctctttccccgcctcttcctcctcccgcttcggattcccaacccccccgctcaggcctcttcccttcacagcaccaacccaaaaccctagccgcaacgcctacgcatggcttcccccgcgcgccccgccgccacctccgtctccggcgccttcggccttccccccgacgcgcgctgctcctacgaccagccccgccgccgcgagggcttgcaggacgagaggatggtgcagacgttcgtggccgcctacgcgcagccgccgccgcatcaggacggcttctacccaaaggaagccgtgatggcggccgtggaggagtgcatgcggaagcaggccgacgcgctgctgcactcgctcgacggcatcgggggcaggctttcgcagctcgagctctactgctacaagctcgagaggtccatcggggaactgcgcagcgacgtcatggactaccacagcgagagcaccaccaacttcagatgcatcgacaagaacctcggacaggtccacaaatccttgcaggttcttcaggataggcaggacttggctgaaactccaaaagaactcagcaaacttcaaatagcacatgaggcaccctctcatcagaagggtgaggccaccggttttcccatgcttgcgccaagggaaaatgaccacatcacacaagctccaaaacatgaggttgcccttttgcgacttcaccaagttaatgggatgcagtcccctgccgtgcaggtccaaaccagcggtggctttgttctgcagcacctggtgcctgtctctttgagcacgcagcatgatcagcagcaattgaaccaggctcctgtgtactatgtgcaaagccaggatcatgctaaatccacagagagcaaggcgttggaacctttggttcaaggtgtgcagccacttgtccacaaccctgaagtcatggctcaagttgagctacctcagaaacctaatcaagcaactgaattgtaccctcaacctcagaatcacagactacagatgcctacccagcaggttgattcgcatacatggcatccccaacagcccatggtgcaacagcaccaatacattatccaacaagtttcacgacacatggctcaacagcagtcctcgtctcctcattctcagagtgctcaagccacacccttgtttcctccattcagctccccgaagcctgctagttctaacactgatccaattacaagaagtatggctgggcaacctccatactcttcatcgcagcagcagcatgaagtcgcccattcattttatggccaaggcaatacaatattggttcctgtagctgatcataatgctcagcatcagcaatcgcaatcagtgcagctacacagccagggcacctgtctacctcaaccaagcaagcccagtcactgcagtgttgcatcctatgctgttcaaggaaatggtcagacctacagctccacatacaagaacccttctaactgccctgcaactgtcgtagctcttctgcctcagcctccagctactgcttctatggcgtatcatcccttgggaccacaggtcgtgcacaatcatccatttggaaatatggttgaaacggctagtgtggtagggtattcacgggaccaaggtgagatactcccagtggtgactgcagtacaacccgtgatggttgataagcttaatgctggcagcaacgtaacatcccctcgtgaatggtcagcatagtggacgatgtgccatcgtacacttcactgcttccacaacttactactgcacatattgcagttggaagctcatcaggtctattttatctggctcctttttttccatcagccagcagattagaatagatccttctacctttttcagctgaaggtcagtatgaaataagaaaagtaggttagctgagtgatcactgttggcatatgtcctcacttttaatgggcatatcttcttgtaaccggttgcgaacttatatgccttatatgaatacatgatgggtttacatcagcttgccagatg

SEQ ID NO: 113218 - DNA, 754 bp, Zea Mays
atcagggacatgaaacagctgcgacttaggttccagttctttgcaagtgccatgtcattcaacatcatgccagaggagcagcaggtgaatgagagcttcttgcccagccgttttcgcaatttctggcagcgattacagctaaggtatggtttcagcagatcctttcggaagattgagtcaaatcaggtggaggcacggcggtttgcacttgtttggaatgagataataagcaagttccgggaggaagacattgttagtgatcgtgaggttgagcttcttgagctgccacctgagctgtggaatgtgcgtgtaatccgttggccttgtttcttgctctgtaatgagctgtcacttgcacttggtcaggcaaaagaagttacaggatctgatcgtaggctatggaggaagatatgtaagaatgattatcgtcgttgtgcagtgattgaggtctatgatagtgcaaaacacatgctgcttgagatcataaaggaggggactgaggagcatggtattgttacacaactgttcagcgattttgatggatccatgaagatggagaagttcactgtggagtataagatgactgagctgcacaatatccatacaaggcttgtagctctattggtcctcatcctcaaacccaccaaagatgttaccaagatagttaatgctttgcagactctctatgatgttgttgttcgtgatttccaagctgagaagaggagcatggaacaactgagaagtgaaggtcttg

SEQ ID NO: 113219 - DNA, 1313 bp, Zea Mays
ttcacggaggagcgaaatatcgagccactggcagaggttttgttgtggagcataagaagtttgctgaaaactataggctctatgctcgcagccatttcatcaaagctatagaacttggtgttatattaactctttatgcatcttatggcagtgcatctgggaatacattggtgtatattctgctgacactttcaagttggtttcttgtgtcatcatggattcttgctccattcatttttaatccctctggttttgactggctgaagaattttaatgactttgaggattttctaaactggatatggttccggggtgggatctcagttcagtcagatcaaagctgggagaagtggtgggaggatgaaactgatcatctccggacgacaggtctatggggctgcatcttggaaatcatattagaccttcgatttttcttttttcagtatgcaattgtatatcggcttcacattgctgataatagtagaagcatccttgtctatcttctttcgtggacatgcatcctcctagcttttgtggctcttgtgacagtggcttactttcgagacagatattcagcaaagaagcacatacggtatcgccttgtccaggcaatcattgttgggagcactgtggctgctattgttgtgctgttggaattcacaaagtttcagtttgttgacacttttactagtcttttggcttttctgccgactggctggggaatcatatctattgctctggtattcaagccatatctgaggagatctgagatggtctggaaaactgtggttaccgtggcacgtttgtatgacatattgtttggagtaattgttatggcacctgtggctgtattatcatggttgcctgggcttcaggaaatgcaaacaaggatcctgttcaatgaagctttcagcaggggacttcacatttctcaaatcattactggcaaaaaggcacatgtgttttgagctaaatacatattccaactgaccattttccaaagtgagctgcttcgtcattctggaggactagtttgtctccatggcctatggtttatacaagctttatggcgtgtagagtagatggatgatagctcttccctgtacaggcaatctatttgtcgccgattcttcttaactttcgatatacacttggatgttcatgctagagatgatagtccatctaatgagatgtcgatgctgtccgtattcgtaaaatcgtaactccagatttttggtagcctttagatatctagttaaggctgtacaaaacttcatcatgagcgctattcaagctatggtttctgtccccta

SEQ ID NO: 113220 - DNA, 1008 bp, Zea Mays
tctgccaagttccagaagccacgccaccgatcgtgattattatccatcaatcgatcattccggtagtatccatccaactcttcataacaggcgacctgagagcagagcagacagagagcgttctggcagccgttgcggagcttgaacctctgcaaccaccaacagctaaactaaaagcagcggcggacggcgcgcggtactggacgaccggccgacgatggctacgccggcgcagcagcagggtgaccagcaccagccgaggctgcagaaggtgatggtggctgtagacgagagcgagtgcagccggcacgcgctggagtgggcgctgcggaacctggcgcccacgctggccccaccgctactggtgctcaccgtgcagccgcacttcccgctcggatacgtctccgccgcgtccttcggcgcacccctgggcaccgtccctccggtggctccggagctcatcaggtcgatgcaggagcagcagagggagctcacgcaggagctcctcgacaaggccagggccatctgcgccgagcacggggttgctgtagaggcaattgtcgaggtcggagatgcaaaggaggtgatatgtgaagtggctgagaagaaaaatgtcgatctgctggttcttggaagccacagtcgtgggccaatacagaggttgttccttgggagcgtcagtaactactgtgtacatcattctaagtgtccagttcttgtggtgaagaaccaaggctgatgaaggattcaactcccagctgctagtcctaatcatgttcgggtatttgtcaacgtatttgtaatgtgtagtacttgctttagccaaacgcattggcgaataaagtagcttgctttgcttcttggaagggccgaggctggactggaggagagttctttttctttttcttttttctggtcagtgtgcctttgctccggaatggcagagttgtaaataagaactacgaactttgtgcgtatttatggttgttgtatttatgattgttccct

SEQ ID NO: 113221 - DNA, 1921 bp, Zea Mays
tgtatgggctgaattgaacgggatggtccggttggtttgctagtgggcaccgtccctccggtggctccggagctcatcaggtcgatgcaggagcagcagagggagctcacgcaggagctcctcgacaaggccagggccatctgcgccgagcacgggagcaggttttagctagaagcctacaactagctgttccttagctagagccatagagggattgaggttaccactcgacccctgtttgaactgcactgcaggttgctgtagaggcaattgtcgaggtcggagatgcaaaggaggtgatatgtgaagtggctgagaagaaaaatgtcgatctgctggttcttggaagccacagtcgtgggccaatacagaggttgttccttgggagcgtcagtaactactgtgtacatcattctaagtgtccagttcttgtggtgaagaaccaaggctgatgaaggattcaactcccagctgctagtcctaatcatgttcgggtatttgtcaacgtatttgtaatgtgtagtacttgctttagccaaacgcattggcgaataaagtagcttgctttgcttcttggaagggccgaggctggactggaggagagttctttttctttttcttttttctggtcagtgtgcctttgctccggaatggcagagttgtaaataagaactacgaactttgtgcgtatttatggttgttgtatttatgattgttccctaaaccctaaaccaatcaatcaagcaaatagagttgtaagctatatttagctaggattttaaataagcaatcaaacaaataaggcagccgttgccactatccatttctcatctctcccagatccgatcgcggccactgccatggcagaagcagccggcggcggacccctgctccccgaggaactcgttatctgggagatcctgacgcgtctgccggcgaagcccctcctccggtgccgcgccgtctgcctctcctggcgccgccgactcacctccgacgctaagttcctcctcgcccaccaccgtcgccagccgtcgctcccgctcctcacccaaggggacaggagcaccgaggacaggaggatcgacgccctggactaccgcaccggcgagcggctccccgtcgcgcggacgacgggccggaccgccgccaacgccgacgacctgaacgtgctcgcttcctgcgacggcctcctcgtcctcatcgccaacggcggcctccacatctgcaacccggcgacccgccagcgcgcgccgctcgcccttctccacggcgcctcctgcatctccgcgctttacccttaccgcccgtccgggtcgtaccgggtggcgggtgctctgctgcttcgagagagccgaggacggccacgccgtgtaccacgtgcacaccgtcgggtcgcgcgagctcaggtgcgtcggagaacctcccgcgctgtgggcgtccggagacgtggcgatggcgatgccgatgatgttgtgctttcacccgcacgtcgtggcaggcagcaggatctactggcagccggtaaagctgcccggcggcaacgggaaggtcaacaacatgctcgcgttcgatacagtgaccgagtccttccagcaacagctgtcgcccccgcccgtggagggccccttccttgaactgtttcagatgaacagcggcgcccttggattgtaccactgccgcgccggcaaggctgatctttgggtgctacaagatcacgagagctggtcctggtcgatgaaccatcggatcaaatttgacgtgctgtttttctctctgctgccggtgctggacccggaaggagatgtgctagtgctttctaacgaaggggaaacaggcatcctgtggcaacgtctgtatcacatttctggtgccaatggcagtttgctggcccagtatcaatggagcgcttatctgaagc

SEQ ID NO: 113222 - DNA, 1916 bp, Zea Mays
tgtatgggctgaattgaacgggatggtccggttggtttgctagtgggcaccgtccctccggtggctccggagctcatcaggtcgatgcaggagcagcagagggagctcacgcaggagctcctcgacaaggccagggccatctgcgccgagcacggggttttagctagaagcctacaactagctgttccttagctagagccatagagggattgaggttaccactcgacccctgtttgaactgcactgcaggttgctgtagaggcaattgtcgaggtcggagatgcaaaggaggtgatatgtgaagtggctgagaagaaaaatgtcgatctgctggttcttggaagccacagtcgtgggccaatacagaggttgttccttgggagcgtcagtaactactgtgtacatcattctaagtgtccagttcttgtggtgaagaaccaaggctgatgaaggattcaactcccagctgctagtcctaatcatgttcgggtatttgtcaacgtatttgtaatgtgtagtacttgctttagccaaacgcattggcgaataaagtagcttgctttgcttcttggaagggccgaggctggactggaggagagttctttttctttttcttttttctggtcagtgtgcctttgctccggaatggcagagttgtaaataagaactacgaactttgtgcgtatttatggttgttgtatttatgattgttccctaaaccctaaaccaatcaatcaagcaaatagagttgtaagctatatttagctaggattttaaataagcaatcaaacaaataaggcagccgttgccactatccatttctcatctctcccagatccgatcgcggccactgccatggcagaagcagccggcggcggacccctgctccccgaggaactcgttatctgggagatcctgacgcgtctgccggcgaagcccctcctccggtgccgcgccgtctgcctctcctggcgccgccgactcacctccgacgctaagttcctcctcgcccaccaccgtcgccagccgtcgctcccgctcctcacccaaggggacaggagcaccgaggacaggaggatcgacgccctggactaccgcaccggcgagcggctccccgtcgcgcggacgacgggccggaccgccgccaacgccgacgacctgaacgtgctcgcttcctgcgacggcctcctcgtcctcatcgccaacggcggcctccacatctgcaacccggcgacccgccagcgcgcgccgctcgcccttctccacggcgcctcctgcatctccgcgctttacccttaccgcccgtccgggtcgtaccgggtggcgggtgctctgctgcttcgagagagccgaggacggccacgccgtgtaccacgtgcacaccgtcgggtcgcgcgagctcaggtgcgtcggagaacctcccgcgctgtgggcgtccggagacgtggcgatggcgatgccgatgatgttgtgctttcacccgcacgtcgtggcaggcagcaggatctactggcagccggtaaagctgcccggcggcaacgggaaggtcaacaacatgctcgcgttcgatacagtgaccgagtccttccagcaacagctgtcgcccccgcccgtggagggccccttccttgaactgtttcagatgaacagcggcgcccttggattgtaccactgccgcgccggcaaggctgatctttgggtgctacaagatcacgagagctggtcctggtcgatgaaccatcggatcaaatttgacgtgctgtttttctctctgctgccggtgctggacccggaaggagatgtgctagtgctttctaacgaaggggaaacaggcatcctgtggcaacgtctgtatcacatttctggtgccaatggcagtttgctggcccagtatcaatggagcgcttatctgaagc

SEQ ID NO: 113223 - DNA, 116 bp, Zea Mays
cttgagtttcttactatatttagagttgcatattttatattaaaggcagaagaagcaaaaaaatttcttaatgacccttacaaacaaccactctaactccagtaggagatcagacg

SEQ ID NO: 113224 - DNA, 1822 bp, Zea Mays
acacacagctggccgagcgcgcgcgcgcgcacgcagcctacaggggctcgccggggtagcttttaacagggacaagcctcctccccccggccggccctccttttctctttgttctcttcccggccgctttgttccctctcgctcgccctcttcttttgcgcggccctgtcattcccctggggatcagccttagcgttgcctcatatgggggcgagctagctagctgctgagcaaagcggcgggacaacaagaggctttccatctccctccctctgatctgctatcgtccccttccctgcttccctccccctcttcttgtacaaagaggaggcgagggccgccgcgccggccgggacgtggtgacaagctaggctagctgggggccggagatcgagagggcgagatcgtcgattcgcgtaatacgtcccgtcgccggccatgacatggtgcaacagcttcaacgacgtgcgcgccgtggagaacaacctggccaccgccgccgccgtggccgccgccgccgccaagaaacagcagcagcagcaggcatcctcgcacgtcaacctcatcaggacctgcccctcctgcggccaccgcgcacagtatgaacaggtgcaggcggcggcgacgatccaggacctgccggggctgccggccggcgtgaagttcgatccgacggaccaggagctgctggagcacctggaggggaaggccaggccggacgcccgcaagctgcaccacccgctcatcgacgagttcatccccaccatcgagggcgagaacggcatctgctacacgcatccggagaggcttcctggtgtcggtaaggacggcctcatccgacacttcttccaccgtccgtctaaggcttacacgaccgggacgaggaaacgacgaaaggtccataccgacgagcagggcggcgagacgcgatggcacaagacgggcaagacccgcccggtgttcaccggtggaaaactcaagggctacaagaagatcctggtactctacaccaactacgggaagcagcggaagccggagaagacaaactgggtgatgcatcagtaccacctagggtccgatgaggaggagaaggacggcgagctcgtcgtctccaaggtgttctaccagacgcagccgaggcagtgcggcagcggttcggcgacggctaaggacgccatcccgctcgctgccaacgcagcgactgaccaccaccaccaccaccaccatgacggtggcaatggcggcggcaacaacatgttgaaggaggcaggcattgtagatttctacagcccagcagcactaattagctacaaccaggcagcttctaacagcagggttgccgcttctgctcacctggtgcctaactttgaggtgcacactacatcgggggctgctggctttggtccctgaccaagacgcgcaagaggaactattcgactgatataggttagaggggagggaaatgcaggcagataatggcaacttcatgaatgcaataacttactacaaatggtcgacgagtttactgaaccgtaatggtggacaataagaggatgagtacgtgttgagtgagtggttggacatacaaatactgaagtgtaggaatccatacaactatacattgttcattaattgttacacatatatgtaacttgatgctatcaattttttgtttaatgatctttgttccataataagaatggagtttaatattgtacatcagttctttattacctaaaggacttgtatatgtatacaaatcattgtacacctttttttggaagaacatatctgttgtatcattttgttgattgttgctcaa

SEQ ID NO: 113225 - DNA, 2701 bp, Zea Mays
ctccccaccacttccctcccttccccgcctacaagcaagccgccccagccattcatggccatcaccaccaccatgtgtcgccgccactccacctccacctcccacccactcctctcaccgcaccactaaacccgcctccctcgctcctcacccgctccctgtccgtccatccatcgcctcgccgccgctctgctgccgtttgctccagctgcggccgacgggggccatggcgggcatcgacctcaacaccgtggaggaggaggacgaggaggaggcggaggcgctgcctttgcccggacccggtggccgtggcgccgtgtgcctggagctgtggcacgcgtgcgcgggccccgtcccgccgctgccgcggaagggcagcgccgtcgtgtacctgccgcagggccacctcgagcacatcggcggcgacgcggcgcgaggagcagcagcttcggcggtgccgccgcacgtgctctgccgcgtcgtcgacgtcaccctccacgcggacggcgcgacagacgaggtgtacgcgcgggtgtcgctgctgcccgaggacgaggacgcggagaagcgggcgcaggcgcaggcgcgggtccgggaggacgaggaccgccgcgacggcgaggacggcggcgccatgaggccgctcgcacggacgccgcacatgttctgcaagacgctcacggcatccgataccagcacgcacggcggtttctcagtgccgcgccgcgccgccgaggactgcttcccgccgctggactacagccagcagaggccgtctcaggagctcgtggccaaggatctacacggcacggagtggaagttccggcatatctatcgaggtcagccacgaaggcatctcttaaccactggatggagtgcatttgttaataggaagaagctcatttctggagatgcagttctcttccttcgaggcgaagatggagtgcttcgactgggagtgcgccgagcagcccagctaaaaattgtaactcctattcctgcacctcataaccagtgctcaagtaatagcaatcttggaaacgttgcacaagctgtggccacgaagactgttttccacatctactacaatcccaggttaactcaatctgaattcattgtaccctattggaagttcacaagaagcttcaatcaaccaatttctgttggaatgaggtgcagaatgcgatatgaaagtgacgatgcttctgaaagaaggtgcactggtataataattggaagcagagaagctgatcctatatggtatggttcgaaatggaaatgcttggtggttagatgggatgatggtatagagtgccgttggcccaatagggtatctccttgggagattgagctcacaggatctgtttcaggatctcaaatgtgcgctcccagttcaaaacgtctgaaaccatgcctcccccaagttaatccggagattgtgcttccaaatggaagtgtttcttcagattttgcgggatctgccagattccacaaggtcttgcaaggtcaagaattgttgggtttcaaaacccatgatggtcctgctatttctgcttctcaggcaactgaagcaagaaatttgcagtacagtgatgaacggagtaacaataacttagggatcccaagacttggtgttaggtctccaactggaatccctgggtttccctaccattgctcaggctttggggaatctcaaagattccaaaaggtcttgcaaggtcaagaagtgtttcatcctttccgaggaggatgtttggctgatggccatataagaactgctggcatgtatcaacctgacggtaggcatgtatctggtgcagcttataaatggtctgcaccacaagggtatgatttcccacagccagcaaaaccggtttttctgttgcaagaatcatccccatcatctgtgatgatgtttccacaaactagatctaagataactcacttggaatatgagtactcaagacatgaggatggtagacttgataggactgttcctactcaagacatgggaagaagcaatcaaacattatctctttggcctcatcttgtttcaggcgaagcaatagaagaatgtactggaactgtgaatatgcactcccccgtcagtggtgcagagcatgaatcaaacaatgagagtacagttgaaaatggctgcaaaatctttggtatctcattggctgaaaagatccgatcatgcgatgaagcagactcttgtagtgcaaaatgtaattctcggctccagcctttgaagtcacaaatgccaaaatcgctaggcagctgttgggccactgttcacgagcaaaggcctgttgttggcagggtggttgacgtctcggcgacagatatgtgatctgatccacatggcatatccttgtagaatatgcaggaaggactaccgagtgcaactttcatggcctgaaccacatcctggatgaaagattgctgaaggtgaccttatgattcttgaaacagggatgtttgacaaatttgtaatgtacttttgggctttaagtatcttattatcttaagctacctagtaatcagcacttgtaccttaaggtgtgcgttatggcaagttcttttagagggcttgtttggactagcaccatctcccaagtactcgttgcattgtttctttgccccgggaaacaagtccgttttggaagttcggctccagtcctgttggtaccatttgttg

SEQ ID NO: 113226 - DNA, 2734 bp, Zea Mays
ccaagctctccgaggtccaacaatggctgcgctgctctatctccatccctatctcgcggttcttccacttctgatctccccgatctgctctggcgcttcgccatggcgaaccatgaccaccggctcgcacatgagaggagaggaccacgacaaggtcaccctcctctcgcccgacgctaccttctcctgcggcttccacgaggtgggcacgaacgccctcaccttctccatctggtacacccccagcgccagcgccagcgccaccgagaggaccgtcgtctggacggcgaacccctactccgcagagcgaggccagcactctccggtgaacaagtacggctccagactgtcgctgaaccgcgacggcaacctggtcctcacggacaccaacgggtccacggtgtgggagaccaagacgtcgtcgggcaggcacacgacggccgccctcctcgacagcggcaacctcgtgatccgcgactccagcagcggcagcaacaaggtcgtgtggcagagcttccgctcgccgaccgacaccctgctccccgggcaggagctgaccaaggacacgaggttagtctccggctaccaccacctctacttcgacaacgacaacgtcctgaggatgctctacgacggcccggagatcaccagcatctactggccgagccccgactacaacgccctcaagaacggccgcaacaggttcaacagcaccagggtagcggtcctggacgacctgggtactttcgtatccagcgacgggttcaggatagaggcttcggattctggtccaggggtcaagaggaggatcacgattggctacgacggcaacttcaggatgtacagcttgaacgcgtcgacgggggcgtggcgcgtcacggggcaggctgtcatacagatgtgctatgtgcatggactgtgtgggaggaacgggctctgcgactacctgggtggcctcagatgcagatgccccccggactacgagatggtcgatccgacgaactggaacagaggatgcaagcccatgttcttgacgaccgacgacggaaaggagttcaccttcgttgagcagcctcacgctgactactacggcttcgacctgtcctccaacgagtccgtcccgttcgaagcctgccgggacatgtgcttgaacagcagcgcctgcttgtcgttcacgtacaagggcggggatggctggtgctacactaaaggcctactctacaacggccaggtgttcccgtacttccctggagacagctacatgaaggtaccaaagagtttcaacagctcggcggcctactcatcgatctccaaccagaaagaagccctcacctgtgggccggcgggttctgctgagctgatgctgggaccggcgagcatgtacggaacaaagaaggacaacatcaactggacatacctgtacgtcttcgctgcagtgctgggagctctggagatgcttgtcatcgcgacaggctggtacctgttcttcaacaagcacagcatacccaaatcgatggaggacgggtacaagctggtcacaaacccgttcaggcggttcacgtaccgtgagctggcggaagccactgggaagttcaaagaagagctcgggagaggaggcgccggggtcgtctacaggggagtgcttgaggacaagaaggtagtggcggtgaagaagcttacggatgttcgtcagggagaggaggagttctgggcagaagtgaccctgattggaaggatcaaccacataaacctggtcaggatgtgggggttctgctcggaggggaccaagaggctgttggtgtacgagtacgtggagaatgagtcgctggacaagtacctctttggcgagagaagcgccgaaagcctgcttggctggagccagagatacaagatcgcactgggcacggcgagaggcctcgcctacctacaccatgagtgcctcgagtgggtcgtccactgtgacgtgaagccggagaacatacttctgacccgggatttcgatgccaagatagcagactttgggctggccaagctcgcgaagcaagggagcactagtctgaacttcacccatatgagaggcaccatgggctacatggcgccggaatgggcgctcaactcgccgatcagcgcgaaggttgatgtgtacagctacggggtcgtgcttctggagatcgtgactgggatcagggcttcgagtggcatagtgctagatgagaggcagatagactttcggcagtttgtacaggaggctaagcatatcctgtctactgggagtgtcagtgatatcgttgatgatagattgcaaggccattttcacgcggaccaagcggttgcgatggtcaaaatagccttttcatgcctcgaggaaagacgcaagaggccaacgatggatgagattgtcaaggtgctcatgtcgtgtggtgatgacgatgactaccatcctgcttattcatattgacttgcaacagatgtgaaggtttcccaaaagaaaacagatgcaaagatttgagaggcagaggcaagtgtacctttgatcaatgatagaagctgaactgaactgactgatgaaatatattcgaaagcgtgccaaattgtgatatttgtgtagagtatgttggggtatctccatatctggtagattaaaattgagtaatgttgttttgctctatttctaagggaggtgtcttgccctataagtggaatactataatattctctccgttccaaattataa

SEQ ID NO: 113227 - DNA, 103 bp, Zea Mays
ccaaataacagttcatcacactaaaaatggatgatttagacagttcaaattataatcatgctaaactaacggttttaggaactttgatgccttgtccctcttc

SEQ ID NO: 113228 - DNA, 1744 bp, Zea Mays
atttatcatcgtgcaccacctggacagcgtgcggacaggcagtaacacgtcttctccagcgaggtgtatccattccacccctcgccgcgccccggcaccgagccggacggcggacgccctggacctcatgtcctcctgctcacgtaattggagcaacggccattatctgctccgtcgcgcacgcatgttctcatattccacgcgcccccgccggtcgtaaccaccgggcaaccaccgcccggctcactcagtacgccccgccccaccaccagctcagctccagccgtgcgacgctgtaccccgcccccgctttcagccgagcccctatatcaaccaaccccaccactctctaccctctgtacccatcgctcactacgcgaccgctagctactccgatcggatcctgaccacgcccgcctaccaggccaccaccaccaccaccacccacaaatccccaatggcgaggcgcatcgccgtggcggcagcgttcctggcgctggccgtggtggctcccgccgcgctggcgcaggctcccgggcccgcggcgacgcctagcgggccgccgaacgtgacggcgatcctggagaagggcgggcagttcaccatgttcatgcggctgatgaaggagacgcagcaggacacgcagctgaacagccagctgaacagctcgtacgccagcagcggcggcgggtacacggtgttcgcgcccaccgacaacgccttcaacaacctcaagcccggcacgctcaactcgctgacgcagcagcagcaggtggcgctggtgcagggccacgtcctgccccagttctacagcatggactccttccagaccgccagcaaccccgtccgcacccaggcctccggccgcgacgggccctacacgctcaacatcaccgccaccgccaacaaccaggtcaacgtctcctcgggcgtcgccgaggtcaccatcaacaacgcgctcagcgccgtcaagcccctcgccgtctactccgtcgacaaggtgctcctgcccctggagctgttcggggccaaggcgcccgccgccgcgcccgccgcgtcccaggggaagcccaagaagggcgggtcctcggacgctccctccgggtcggccggttccgacgacgccgcgcccacgggcgccgccggcgccagggtcgtcggctggagcttcgccggcctcgccgccgtccttggctgtctgttgtgagagtgagaccgtgcgtcgtttctagggacggacggacgacaagctagttgaagatgagaatgctatgcccgggttcccttccccttctttctctctgtttatttaaacttctttcatctcgctagtttctttaatttgtactattggtggtttgtaagattggcttatgtgattcaatttatgcgcctgccgctgttgatactgcatcactagtcttgagtcatttgtgggtacaaaactacaaatccttgtaagaggtcacatccagtgatccatcattttcttagctgcagtgaaacgtggtgcttttctcttgttcggtgggacacaatgatccagaaaattgacgcaacgtttattagttggtccaaatgtgttctctgattgatggcattagacgttagttttcggttttggatttatcaacgaatgggggtcagtcaggctagtaatggagttggttggtgctggtggaacggagcgcaaaaggtttgggcgagcacgtggtgccaggttcgctcgtttggtaatcagtcg

SEQ ID NO: 113229 - DNA, 84 bp, Zea Mays
cgtgcattgctacgaataaaaatgttatgataagatatatacaaacaattgatctcaatgctatttatataaaaaagaaaaaga

SEQ ID NO: 113230 - DNA, 1101 bp, Zea Mays
cacccgcccacctcacctcccctctatatatcccccgcgtcccgcccgcgccgtttacaccggcgccccaacccaaccatcgctccacgcccgcgtggaaaagacggagagagaccgggagagaagaagaagaagaaaaaatcaggggaggaggagactcagcggccgggaccggaacgtgaaacgcggacgcacgtcgggaaagtaatgtaccaggccatcccctacagcagcgcccgggcgtggctgatgccggcggcggcggctgaggcgggcgtcgccgctgtgaagccggagccggtggcgaccgtcgcggagcctgcggcggaggaggagcgcgcccggccggacgccgcggccggggacgacgacgacggcggcagggcggaggtggggagggccgtggcggagaggccggtgctggtggtggggcggcgcgggtgctgcctgagccacgtggtgaagcggctgctgcaggggctcggggtgaacccggccgtgcacgaggtcgcggacgagtcggcgctcgcggggctcgtcccggccggcgccggcgccgccgccggcgcgctgcccgcggtgttcgtcgggggcaggctcctgggcgggctcgaccggctcatggccgtccacatctccggcgagctcgtgcccatcctcaagaaggccggtgccctctggctctagtttctattactaatcaatccgtacgtcggcgtgtttcttccttcctgcctcttctgtcttctctcagaaacgatggcgccgtggtttcgcccgtggccgttggatcgagcatcacaacaccacaccgcggctgatgcatgatatgagtttggaaataggactttggtttcttttttatctgtttatttatttaggcgaagcaaaaaaaaagaatggtgagaattcgaaccacagagtaattttattgtccgctaagcgtgtgcgtgcgatgacaagtggtcgcttcgcttcttccatcatgtgaatacggaagacgggcgagagacagaggggacggacgtttgtttgctgccggcatctgtacaatcctttccgtttcagattttaatgagggatgagctgtccagtttccca

SEQ ID NO: 113231 - DNA, 2094 bp, Zea Mays
gccccgtagcgtgtagcgagaaggtgcgacagcagggtagggagctcactgttagtcgttcctccgatccacagatgaatcagtggtagactgctggtagtagtatatatacaatctctagctgtgccgctgttttagagtatcgtcgtgagagctcacaaggagaagatctggtgctgcgaaagggagaagaaaagaagaagaagaaatcagctcagctcagcatggcttcctcgtccttcaacaacagtcactggccgagcatgttcaggtccaagcacgccgccgagccgtgtcagacgacgcagcctgacatcagcagctcaccgccgtccctcctctcagctggcggcgcgagcaccaccaccaccaccggccgctgcctcaaacactccatctcagtaggcggcgaggagcgggccccggatccgaagccgcggtggaaccccaggccggagcagatccggattctggaggccatcttcaactccggcatggtcaacccgccgcgcgacgagatcccccgcatccgcatgcgcctgcagcagtacgggcaggtcggcgacgccaacgtcttctactggttccagaaccgcaagtcccgctccaagaacaagctccgcagcagcaccgcgggcaccggacgcctagggctgcagggcctcgcgcgcgcgccgggccgcggggccgctgcggcgccgccgcccgtcgagccgccgccgctggtccagaaccaattccacatgctcgcctcgcccgcgcaggcgcccacttcctcgtcctcgtcctcctccgaccgctcctccgggtccagcaagccggctgcggagccggcgatgcccgcgacggcggcgcctatggacttgctagggccgctcgccgcggcgtgtccccagatgtactaccaaggcagccccgtggcgccagcgcacaaggtgctggacctcgtagcctccgtcgagccggtcttccagccgtggccgcagggctactgcttgtcggctgccgaggtcgctaccattctcgggggacagtacatgcacgtgcccgtgcaacagcagccgccggcgccgttgcccgcgggagcattattggggctgtgcaacgacgtgacagagccgaccgccgtcgtcactggccacaagacatgcgcctggggcccggcggggctcgggcagtcctggccctgtggcggcgctgatcatcatcagcccggcaagaacaacaacaccgcggcaagggagttggcgcacgaggacgacgccacgaagctggggttgctgcagtacggcttcggagctaccacggccatggaggcggctcctgcggtagcgcctcttgctgcatcgccggcgggcggcgctgttaccatggcgagcgtgtctgcctctaccgctggcctcacaggtttccctgcaagtactaatggtgtcgtcgccaactatgatctgctgcaaggactggcagtgcccgggggcggggccggggccggccgtgcgcctgccgccgttgccgttgccgcggacgcggcgcccacggcggctcaggagggcgtcgtggcgctgtgcatcacggacagcatcacaggcaagagcgtggcgcacaacgtcgcggccgcgaggctcgacgtgagggcgcagttcggcgaggcggccgtgctgctccgctgcggcggcgagcgcggcctcgacctcgagcccgtccccgtcgacgcgtcgggctgcacagtcgagccgctccagcgcggcgccttctactacgtgctgctataatgacaaattgaacgtgacgcgtgaataagctacagtcccggtgtggcgcgcggatggcaagtggtttagggtatcagctggcatataggtgtgtgccgatttatctagtcttcgtttaatttgcctcgtatactatatgtatgcttgcactgccgtgcacttagaacagtatcgtattattgcaatctctgtgtcttgcaagatagtagtatggcttaaccgtatatagtatgttcgatctgcaagtataattcttagtactatcgttttaagaaaatgctattattaagccttggcaatagaccatgcatctgcaaactca

SEQ ID NO: 113232 - DNA, 2085 bp, Zea Mays
gtagcgtgtagcgagaaggtgcgacagcagggtagggagctcactgttagtcgttcctccgatccacagatgaatcagtggtagactgctggtagtagtatatatacaatctctagctgtgccgctgttttagagtatcgtcgtgagagctcacaaggagaagatctggtgctgcgaaagggagaagaaaagaagaagaagaaatcagctcagctcagcatggcttcctcgtccttcaacaacagtcactggccgagcatgttcaggtccaagcacgccgccgagccgtgtcagacgacgcagcctgacatcagcagctcaccgccgtccctcctctcagctggcggcgcgagcaccaccaccaccaccggccgctgcctcaaacactccatctcagtaggcggcgaggagcgggccccggatccgaagccgcggtggaaccccaggccggagcagatccggattctggaggccatcttcaactccggcatggtcaacccgccgcgcgacgagatcccccgcatccgcatgcgcctgcagcagtacgggcaggtcggcgacgccaacgtcttctactggttccagaaccgcaagtcccgctccaagaacaagctccgcagcagcaccgcgggcaccggacgcctagggctgcagggcctcgcgcgcgcgccgggccgcggggccgctgcggcgccgccgcccgtcgagccgccgccgctggtccagaaccaattccacatgctcgcctcgcccgcgcaggcgcccacttcctcgtcctcgtcctcctccgaccgctcctccgggtccagcaagccggctgcggagccggcgatgcccgcgacggcggcgcctatggacttgctagggccgctcgccgcggcgtgtccccagatgtactaccaaggcagccccgtggcgccagcgcacaaggtgctggacctcgtagcctccgtcgagccggtcttccagccgtggccgcagggctactgcttgtcggctgccgaggtcgctaccattctcgggggacagtacatgcacgtgcccgtgcaacagcagccgccggcgccgttgcccgcgggagcattattggggctgtgcaacgacgtgacagagccgaccgccgtcgtcactggccacaagacatgcgcctggggcccggcggggctcgggcagtcctggccctgtggcggcgctgatcatcatcagcccggcaagaacaacaacaccgcggcaagggagttggcgcacgaggacgacgccacgaagctggggttgctgcagtacggcttcggagctaccacggccatggaggcggctcctgcggtagcgcctcttgctgcatcgccggcgggcggcgctgttaccatggcgagcgtgtctgcctctaccgctggcctcacaggtttccctgcaagtactaatggtgtcgtcgccaactatgatctgctgcaagcaggactggcagtgcccgggggcggggccggggccggccgtgcgcctgccgccgttgccgttgccgcggacgcggcgcccacggcggctcaggagggcgtcgtggcgctgtgcatcacggacagcatcacaggcaagagcgtggcgcacaacgtcgcggccgcgaggctcgacgtgagggcgcagttcggcgaggcggccgtgctgctccgctgcggcggcgagcgcggcctcgacctcgagcccgtccccgtcgacgcgtcgggctgcacagtcgagccgctccagcgcggcgccttctactacgtgctgctataatgacaaattgaacgtgacgcgtgaataagctacagtcccggtgtggcgcgcggatggcaagtggtttagggtatcagctggcatataggtgtgtgccgatttatctagtcttcgtttaatttgcctcgtatactatatgtatgcttgcactgccgtgcacttagaacagtatcgtattattgcaatctctgtgtcttgcaagatagtagtatggcttaaccgtatatagtatgttcgatctgcaagtataattcttagtactatcgttttaagaaaatgctattattaagccttggcaatagaccatgcatctgc

SEQ ID NO: 113233 - DNA, 1701 bp, Zea Mays
gaacgagagcgctgagcatcgcgataggatgcgctgcaacctcgtcagtttgcggcggacaacacgtccccctcggccctcgccgactcctttcgtaaaatctccggggtccagacaacgctactccttccgccgcgggttttcgcctcgcggccgcgccagccctcctcttccggcggctcctcggccctcgcggaactcgccacatcccccattgcccccgtcgcccgttcgctccccgtccgaattatttactcaaatcattcatcgccggcccgtcccactcccacctccccaagcaacctgaccacgccaccccgcgaggtccgcgataccgtccaaatccacgcgataacaaccaggccgtcccccttccttccttccctcccgtatatagctagcgaggggcgtggcaatggttcttcagctccgcctgatcccgcgcctggctgccgcagccaggttgacgcccgcgacttcctgcgctccccggctgctcctgcggcgcgcgccgttaccaccggccctcgcgatggcgtcggcgtacagcgccggttacggcgcgggcaggaggctgctattcaggcagctgttcgagaaggagagctccacgtacacctacctcctcgccgacgtcgccgaccccgacaggcccgccgtgctgattgaccctgtcgacagaacagttgacagagatcttaatcttatcaaggaattgggcttaaagctcgtgtttgctatgaatactcatgtacatgctgatcacgtcactggaacaggactaataaaaactaaggtacctggagttaagtctgttatttcaaaagctagtggagcaaaagctgatcattttgttgatcatggggacaaaatacactttggtaaccttttccttgaggtgcgagctactccaggccatacctctggctgtgtgacttatgttacaggtgatgctgatgggcaaccttcaccaaggatggcttttactggtgatgccttaattatccgggcatgtggaaggactgacttccagggaggaagttctgagcagttgtatcagtcagtgcattcacagattttcacattgccaaaggatacactactttatcctgctcatgactataaaggtttcacggtaagtactgttgaagaggaggctgcctataatgctcgactcacaaaagataaggaaactttcaagacgatcatgaataacttgaatttgtcatatccaaagatgatggatgtagctgtacctgccaatttggtctgcggtatccaggatccaccaccgaagatctgagctgttcccgtggaagcctgcaactgcacttctggttgtttatgaactctggatcgccaccagaggcttgcagctgagttgttcattaaataatttgtttgctgcatcctgtgatatcgcgagaaaataatctaaccaatggccggtgtagcctctggttgtatgtggcaaagcactattgtttagagagatcaaaaggaacaatgctgatagtcaatgaagtttgattgcctgacaacatctctagaaatacttcgctaaccgcaatcatgttatttggatgttctttttaaaacggtgaaaggatgttcttttttttaaaaaaaatagtgaaaacaacatcaagctgtctgttttcttcaggatgctaaccatcaatgcagaccagtcatattccc

SEQ ID NO: 113234 - DNA, 537 bp, Zea Mays
atggtggccttcaggttccatcagtaccaggtggtggggcgcgcgctgccgacgcccggcgacgagcaccccaagatctaccgcatgaagctctgggccaccaacgaagtccgcgccaagagcaagttctggtacttcctgaggaagttgaagaaggttaagaagagcaacggtcaggtcctggccatcaacgagatcttcgagcgtaacccgacgacgatcaagaactacggcatctggctgcgctaccagagcagaaccggctaccacaacatgtacaaggagtaccgcgacacaaccctgaacggcgctgtagaacagatgtacaatgagatggcttctcgccaccgcgtgaggtccccctgcatccagatcatcaagaccgccacggtgcacttcaagctgtgcaagagggacaacacaaagcagttccacaacagtgagatcaagttcccactcgtgtaccgcaaggtcaggccgccgaccaggaagctgaagaccacgttcaaggcttcgaggccgaacctgttcatgtga

SEQ ID NO: 113235 - DNA, 1530 bp, Zea Mays
cgacgcggtcggtccccccacgtagagctaacgaaccgaagcgcgccataatatattgcagggcagcgcagcgagcaaaaggggcgcttcttccatgatcatcataccataccaaaaccttccacaagcttcagggcaatcttgtgcggctgtgccccatccaagctgcttttgtgctgctttttattcattttcggattggtttcgtttagtttccctgctggtctagtagagcgttttgcgaggtaaaaggcctgagcatttcagaagtttggaagaaaaaaaagatgcccctggatttttgaggtgggcatgagtggagagtatacagggcagagatacagccatacaggtccagcttgctgctgctgctcctcctctactcctgccattgtttagtacacgcaacaagggttcgtatctgtgccttacttctgaggaggggtggtcgagaattggttagcacagatgctgctagggagaagaaggctcctccttgtgtgcgcaagcctcgtgcttctttcactcctcgggccatccaatggcgcatcgaactccacggggaataatctcggcgagagccgcaacaggaccagcagccatcctctggaggtgacaccgggagtgtcgttccagctcaggctgcacgcgctgttccactggtcttcgtttgggttcttgatgcctctggggataatcctggtgagaatgtccagcaagtgccgcggcggcagatgcgtcagagccctcttctactgccatgccatctcgcagactgtggccgtcctcctcgccaccggcggcgctgttctgtcgctgatgaacttcgagaactccttcagcaacagccaccaaagagtggggctggcgctgtatggagtcatgtggctccagccaattctcggcttcttcagaccagaaagaggcgtcaaggtgaggagcctatggtacttcttccactggctcctcgggatcgcgatctgcgccacggggatcgtcaacgtctacatcggcctccgcacctaccacgagaggaccgccaagagcgtgaggctctggacggcgctcctcaccgtcgaggtcgccttcctcgccttcttttacctcatggtagacagatggagctacatgctgaagcaaggccgcgccaccgtcgagcagctaataaggccgaccgatagccgcagaacctacccgaccacccttcggaaggagctgaccgtggtgcaggagtgagtgaatctccgaacagaaaggcgagaggtgctttcagacttgctgaagaagacggtagagtgctgctgatggtcttttgtggcttgtttgctttgagagaggtgtggagttctttaatttagaacatgtctcatgtgactgagagcgtgcattccggttccagaatgtatattgtacagcttttttcacggttgaattgaggatgcagtctgttgccagcagacagacagtacaggtgcagcatgatactaccaggtttttactgctggtgttcagtatatatattctgcattt

SEQ ID NO: 113236 - DNA, 1123 bp, Zea Mays
gcccataccgacttttcttctccccccttccccccccccccccccccccccaccggcgagccgacgaacccaccctcgtggcacgtacggcaccgccgcgatgtcgttgccggcagcgaccgcgccgtcctcttcgggggcgacgcagcccacggagcagcagggaggctcgagggagcggcgggtggagtcgctgggatggctgacggagtcggcggtgatgccgaagaagcacaaggccatcgagggggtcggcgccgcttcgatcctcgacctcaaggcccagctctaccgcacccaggaggaggcccgaaaccccacagcccccggcgccgctgcttccggcggggagttccgccgcgcaaagatacgctccgcacccaccgaccctctcggggccaagaactccggcgttgaatcccgggcccacaaggataagctggagcttaaagccgtgaaagacggttctgcaagctatgctgctctagaaaagaaagcagagttgtatgaaaaattatacagaggcgagctacctgacgaagaagacaaagagaaatactgtgtggatttcttccaaaaaagttccgatcgtatctatgagcctcagatgccagagattagccacagagccactgatgctgcagagccggtaaatgatcatgaagattctatgcctaatgcgaaaccgttggggcttggccgagcaggcactacaatcgacagagatgagcacaagcgctttgtgagggaagttcatgaggaagtaactgaggcaaggcagaaggcctcaacagtaagatctcgacgacaagagcaggatgctgctcgtagagagaaactcaggcaagcttacctgaagaaacggttggaaaagttgattgctgaaaaacaggcctcttcagccagtgatgacctacccagctagctagtatatgtgcttgcatgtccttcccaagtagcagtctagcagctgtaatggtctgttttcatgcattctcatggaacgcttactgtaaagtctcttttgacccagtacagtcatattcaagatatagcgtttgcaagtactgccggtgttgcagaatattgttgtacacaaatctagataatgccacaatgattt

SEQ ID NO: 113237 - DNA, 1193 bp, Zea Mays
aagaatcccaggagcaaggcaacgtacgagagtacgacaccggcgccggcattgttcgatcgtcttctccttcttggcttcttgctaggcggctcaatcgaggtcgtcggcgcattgttactccgcaccgcgcgaggtccccggcgaattgaaggtcaacctgcagccagttagttgctgtcgttccgctggagatgccgcaggccgccgccccggcgtgcgcgctgccgctgccgacgatgcccagggtggcgcggtcgcacgcgtgggactgggtggcgctgctcctcctggtcgccgtcgacgtgctgctcaacgtcatcgagccgttccaccggttcgtcggcgccggcatgatggcggacctcagataccccatgaaaggcaacaccgtccccgtctgggccgttccgatcatcgctgtcattgggcccgtgactatcttcgccgtcgtctacatcaggaggaggaatgcgtacgatctgcaccatgccatcctaggtatcttgttcgccgtgctgataacgggcgtcctgaccgacgcgatcaaggacgccgtcggccggccgcgccccaacttctactggcgttgcttccccgatggagaagcggtgtacaacaacatcacaacgggagtcgtatgccatggcgatcctagcgtgatcaaggaaggctacaagagcttccccagcggccacacctcctggtcatttgcggggctaggcttcctgtcgtggtacctggccgggaagatgacggcgttcgaccggagagggcacgtcgccaagctctgcgtggtcctcctgcctctgctcgtcgccgcgttggtcgccgtctcgcgggtggacgactactggcaccactggcaagacgtctgcactggcggcgtcctcggattggtggtcgcttcagtctgctacctccagttcttcccagccccgtcagatgagaaaggattctggccgcacgcgcacttgaggttcgtcagcgagatggtggaggaggaggagagccgaacgcagcggtccaccgaaaccgccggggcgcgcacgagccacgaactggacgcgttggaagccggcagcaggagatgttagaacaccgacgagggtggataaaatacacgagcaagtgtttggtgctgtcaagcgacagcttttctggtgtctctctattcattatatagaagatac

SEQ ID NO: 113238 - DNA, 1693 bp, Zea Mays
gggagggtgaagtctaacccactgatgacctttgtaccttgcgatggaaacaagcgcatagctccaggggatgggaaagaaagaggccgggaaatggacatgtcgtttgggtctaatcaattagtactactagctagtagtttctgtcacaaaaagctggatcaattaaacaaaaggccaacccaaaaagcagctggtaaaagagatacgaaagaaaaaacaagaaaaatcctctaccccaaccaaccatccatccatctctctctctttctctccatctagactagcagtatatctgcagtatgtgtgcatcatcttcctacacacctagactctctctctctcgcgcgcgcgcgagcaccacgtacacataaacacacccccatccctttcgccccctttgcctcacatgcatcactacgcccccactaccatatagccgaatacgctcgcttccctggccccgtattgatctccctctcctccctcgtccctcgtccttgataagtgagcaagcggcaagaaccagcggcgcgcccatgtcgtcgagagacttatacttccacgacgagctggcgtcgctgttcgcgcagcggccggcgccggccggagaggcgatgatgacgcaccagcaccagcagcagcaacaggcgccggcgtcgtggttcgcggactacctgcacgcgggcgccccaggcatggggatggactacgacctgctgtgccgcgcgctggacctgccgctgccgggggacgacgtcgtcaagagggaggaggagctgctgctggtggacacaggcggggacggaggaggcttcgccgcgcccacgcccacgcccagcgggggcggcacggcgccggtcacgcccaacaccacgtcgtccatgtcctcctcgtccagcgaggcggcgggcggcgccgccggaggaggaggaggaagggaggaggactcgccgcaggggaggtgcaagaaggaggaaggggatggggaggagagcaaggcgctcgacaagggggaggaagacgctgacaagggcaagaaagggtcagcggcggcaggcaagggcaagggcaagggcgagaagcggcagcggcagccgcggttcgcgttcttgaccaagagcgaggtcgaccaccttgaggacggctaccggtggcgcaagtacggccagaaggccgtcaagaacagcccataccccaggagctactaccggtgcacgacgcagaagtgccccgtgaagaagcgggtggagcggtcgtcccaggacccggcggtggtgatcaccacgtacgagggcaagcacacgcaccccatcccggtcacgctccgcggcagcacccacatcctcgccgcgcagctgcaccaccaccacaaccaccacctcggcgccttcccgacgccgctgccgcagacgggcgcggcgccgttcgggcgggctgcaggcggaggcgtcatcgacatgctggggctcctgcccccgcgcaaccacggcatgagcggcggcccgatgagcgccgtggctggcgccgcgacgacgacggccgccaccattactactacctccaccacaccgtcgtatcccccctcgctccagatgcagcacttcatggcgcaggacttcgggctcctgcaggacatcatgctgccgtccttcggcggcggcggcggtaacatccagccctgaatcgatcc

SEQ ID NO: 113239 - DNA, 792 bp, Zea Mays
atggccgacgtcgcggcgcactacgatgacctggaggtcgctgtcggctccatcgaggccggcttcgtgcccttcccccgctacggcggctgtggcctaggaatatacatgttgaacatagtcgaaggaaagatgcagtacctatttgatgaggatggccgtcgttacctggatgctttcggtggcattgcaacagtttgctgtgggcactgtcatccagatgtggttgaagccatagtaaaccaggcgaagcggatccagcactccacagttctatatctcaatcatgcaattgcagattttgccgaggcattggcttccaaaatgcctggtgatctgaaggttgttttcttcacaaattcaggcacggaggcaaatgagcttgcactgatgattgcacggctttacaccggttgcaatgacattatctctcttaggaatggataccatgggaatgctgctggaacaatgggtgctactgctcaatccaattggaaattcaatgttgttcagactgaagtgcgtgcattcttcgacgtgcatgatcaagaaggaagtcacccaggaggcatccaccttgaaatgactgggcagaacgtgaccgagtgcattggtggatcaaggactgtgaccttcgatgacctgagcgaccgctaccacacccactgtgacccaaggctgaacgcctcccagtccctggagcttgccttcatcattgcagagaggctcaggaagaggaggatgcggtcggggctctacaacagcctgcctctgccaccactggctttctaa

SEQ ID NO: 113240 - DNA, 2402 bp, Zea Mays
attatttcttctagtggagtttgtatctaccaatgagattctagggctacaaataatctttaatcattattttacaagcctctttactatgtaactaggttattatatggacttactaatggaagttcctaacatacaatgcattcccaacacaaaactcaaaacatttacgagtagcgtacattgaattatggagggtcaaagatgttagaaagaaaaaagatgaaaaagaaaagggaaaaagataatatggacttttatttgcgaaggcacagccgccgccattacttcatcttcctcgcagcgccggcgccccatcctgcggccctcgtgatcgggctctcagcgacggcgtcagcggcttccccttccgcctctcgccagtcgcctcgcgccctcgcctccggccctccacacaccggcctgcgaccttgcgtgcctgcctctctctctctcctccttccggtggaacggcgcccggctgcgccgcgcgcgccttgagggtagcgggagccaacagccgctgctccaccaaggcggtcgcgccgctttgggagcgcttatgccccaaagcgaagcgtcacccgtccgcttagcgcgctgaagcgcgcgcttagtgccgcttcttggaaccctaacggctgtacctggcaaaaagagggcaattattgtgtgtgcaacagagcacatgcagaaagatctgattcaagtgtggaaactttgtgagacggctatcttttttttcaaagtcagcgtcttttcggtggatctgtagaggactttaattctctgaaggagtgcaatggtcaagttgcctgcactgagaatgaagaggatgtttcatggtgatgattgtgctaatgagttcaaaatcaggaccatgaaatccatgaaagtttcacactttcatgtcagcgagttagagcagtcagctatgtcgaacttatcagataaaactcctcaagatgagccagacccaaccattcaacttgctgaccaggatattagggtaacagaagcttctggcttgcatgatctgattggaggaaaatccatgctcgaggatttaacatccgaagtgatagattcaccaaattcagagggtgactcctctgctaattatgatgacaacaaatctgtgttacatgcagtgaattatgttggcaaagagtttgcagatgatggtgtagattcttcattccagaatttctgttttagtgatcatgaggcgaactggggtttgaatgagtgttgcagactgatggatatttatagtccagatgacgatttctcttatttgcttgatagtccacctgatcttctgcctagttatactggattttgtgatgaatttgtatcaatagatgcattgatgaatatgagtagcagatgtggaatcttcccacttattgagagcgctacggaagccagtgttgataataagccatgctcatctgaggtggatttgtgctttaataattctgaggtattagagtggctcaaccctaatctattggagggggatttaccagatcttgttgattttgctgagttaaattcaaatgctacccctgcaaaaaaagagcaatggaccaggaatgttactctcgtgcttgatttggatgaaacccttgttcattcaactatgaagcattgtgatgacgctgatttcacattttctatgttctatgatatgaaagagcatgttgtatacgtgaaaaagagaccgcatgtccatatgttcctccaaaggatggttgaaatgtttgaggtagtgatatttactgccagtcaaagtgtttatgcagaccagttgcttgacatgctggatccagagaagaaacttttctccaagcgtttcttccgggaatcgtgtttgatcacagacagcggctacagaaaagatctgactgttgttggagtcgaccttgccaaggttgccataattgacaacactccacaggtttttgagctgcaagtgaacaatggtataccaatagagagttggtatagcaaccccttggacgaggcgttacctcagttgatcccattcttggagaccctcgctgtagcagatgatgtccggcctatcattgccaagaagtttggcaatataatagataatcgctaaggttcttaaataagtatagggttagtcttgtttactggaagaacctagatgacatctttaactggtcaaggtgggggcatttttctcttaagggctagcaggttggcccgtaggaattaagagtaggaattaagagtttcggtgatggggctattccttagaagaactgtacatatcctaaattttgttttgcaactttgtacataggatggttggaattgaaagacaaacatctatgcaaagtttctttgcattttgctcaatgtggttt

SEQ ID NO: 113241 - DNA, 1667 bp, Zea Mays
tggcactgacgttatttggcaagttttagtggatctgtagaggactttaattctctgaaggagtgcaatggtcaagttgcctgcactgagaatgaagaggatgtttcatggtgatgattgtgctaatgagttcaaaatcaggaccatgaaatccatgaaagtttcacactttcatgtcagcgagttagagcagtcagctatgtcgaacttatcagataaaactcctcaagatgagccagacccaaccattcaacttgctgaccaggatattagggtaacagaagcttctggcttgcatgatctgattggaggaaaatccatgctcgaggatttaacatccgaagtgatagattcaccaaattcagagggtgactcctctgctaattatgatgacaacaaatctgtgttacatgcagtgaattatgttggcaaagagtttgcagatgatggtgtagattcttcattccagaatttctgttttagtgatcatgaggcgaactggggtttgaatgagtgttgcagactgatggatatttatagtccagatgacgatttctcttatttgcttgatagtccacctgatcttctgcctagttatactggattttgtgatgaatttgtatcaatagatgcattgatgaatatgagtagcagatgtggaatcttcccacttattgagagcgctacggaagccagtgttgataataagccatgctcatctgaggtggatttgtgctttaataattctgaggtattagagtggctcaaccctaatctattggagggggatttaccagatcttgttgattttgctgagttaaattcaaatgctacccctgcaaaaaaagagcaatggaccaggaatgttactctcgtgcttgatttggatgaaacccttgttcattcaactatgaagcattgtgatgacgctgatttcacattttctatgttctatgatatgaaagagcatgttgtatacgtgaaaaagagaccgcatgtccatatgttcctccaaaggatggttgaaatgtttgaggtagtgatatttactgccagtcaaagtgtttatgcagaccagttgcttgacatgctggatccagagaagaaacttttctccaagcgtttcttccgggaatcgtgtttgatcacagacagcggctacagaaaagatctgactgttgttggagtcgaccttgccaaggttgccataattgacaacactccacaggtttttgagctgcaagtgaacaatggtataccaatagagagttggtatagcaaccccttggacgaggcgttacctcagttgatcccattcttggagaccctcgctgtagcagatgatgtccggcctatcattgccaagaagtttggcaatataatagataatcgctaaggttcttaaataagtatagggttagtcttgtttactggaagaacctagatgacatctttaactggtcaaggtgggggcatttttctcttaagggctagcaggttggcccgtaggaattaagagtaggaattaagagtttcggtgatggggctattccttagaagaactgtacatatcctaaattttgttttgcaactttgtacataggatggttggaattgaaagacaaacatctatgcaaagtttctttgcattttgctcaatgtggttt

SEQ ID NO: 113242 - DNA, 2318 bp, Zea Mays
tcctcctcccccctccctttgcttcccctttactccccccctctctccttcatgtacgcaggtgcgcgccgtgctgggtttgccggtttctcctctttcgccacggagcaaaagccgctcgcccttgtccaggctccgcattccggcgccactgccagcaagccggaacagtaaggcgcctggcctctctccagttctgactgaggcctgagggcgcgcataggggagctcgtcatggagttctccttcaatggggtttgatgcgaggtgctggtgctgccaaggtaaataaagcggttgggataagtttgtaaattgctttgtcaaaccaggacaaggttctgaatcaggggcaggcaacctctcgcgtagcctgttcatcttcatcagacaggcccaaggatatgtcgtcgtccaacaactctgtcagcgcggcgctgtcaggaacgacgcccgtgttccggctgagagtatggcagctgattgccatcgccgtcgggatagtcatggcgatcctgctcgtcattgcgttgtgcctttcgctgcggaggaaaaagaagacagtgaaagggttcgacaacacttcgctggccgagatcccgatcgtctccaaggagatcaacgtcgacagagtcgatgcgcagagcctacatgacggtgaagcgcccttcatgccggtgcaggataagtactcgcagaccaaaggcgcagggcagctgggagggcgtagatccgtcgacgtcgacgcgttcagccagtgcagctcggtgtacaacatagagaaggccgggagctcgtactccgaagattacagctacagcagctccggtccggctaggaaaggcagctcaccgtatgcgtattcagcgtcgccgctggttggcctgcctgagctgtcgcatctaggctggggccactggtttaccttgagggacctggagtgcgccacgaaccggtttgcgaagagcaatgttcttggggagggtggctacggagttgtctacaagggccgtctggtgaatgggactgagatcgccgtgaagaagatccttaataatgtggggcaggcagagaaggaattcagagttgaagttgaagccatcggtcatgttcggcacaagaatctggtccgccttctgggatattgcgtggaagggatacataggatgcttgtctacgagtatgttaataatggcaacctggaacaatggcttcatggcgtgaatcaacacggtgtccttagttgggaaaaccgtatgaaaattctccttggcactgcaaaagctctcgcgtaccttcatgaggccatagaccccaaagttgtgcacagagacatcaagtcaagtaatatcttaatcgacgatgaattcaacagcaaggtttctgattttgggttggctaaacttctgaattctgacaaaagtcatatcaatacaagagttatgggaacatatgggtatgtagcacctgagtacgcaaatagtgggatgctaaatgaaaaaagtgacatatacagttttggagtggtgttgttagaatgtgtgacagctagggatccagttgattacagtaagcctgcagatgaggtgaatctcatagagtggcttaagatgatggttaccagtaagagggcagaggaggtagtggatccaaacctcgatgttaagccaccaaaacgtgcccttaagcgggcaatcctggttggcttcaagtgcgttgatcctgatgctgacaagaggccaaagatgagtcacgttgtccagatgcttgaatccgttcagaacgcataccatcaagatcaaagaaagctcagccaggtgggaagcatagatatcgagtcgcagcagtcgctagaggagacttcaaacagtgctgatgcctgaacctctccgattctgaacaagcactggaatcatctgatagcaacattgaattgatcgttgctcggtactttatagagtgagtggatcaggcttacagtttgcatatactggaggaggaggtggttaaaatcaatcagtagcaagttgttcattccgtttttttacccatttttccgggtgtgcttctatactcccctaaaaggttcatctcttttacccttaggatatgtatagttttccttttgggagagcatagaagcaccttcatcttcttcttctttttcgtttgagttgccaggagcgactaacctcaggcatagtcactggatttcattacccgtgtgtagcggctttatggaaactcactgttaccctatatgaaaacatgaaatttcctgctgtgaagcgctgacatctgaatccttttttccccct

SEQ ID NO: 113243 - DNA, 3002 bp, Zea Mays
tcttggaatttggccgccgtctgcgttgcttgggtggggaaggagcaggcggccaggcgcagagccgcaaaagcagacgcgaaaaagcccaggcccgagccgaagcggggaggcgacaccgctgcacctgcactaccgctcgcacggtcagcgatttgccgcctcgcgggagccagctttggcgtcggcgtcggcgtcatcgtcggcggggagttcccggagagggattccggtgaggatgagcagcggcggcggtggagggggagccaggggaccgtcggggcccgtgccggcgtccgcgaggaagctcgtgcaggggctcaaggagatcgtgaaccgccccgacgcggagatctacgcagcgctgcgggagtgcaacatggacccggacgaggcggtcagccgcctcctctcccaagatacttttcaagaggtaaagagcaagcgtgataggaaaaaagaggttaaagaaactccagagccaagatctcgaggagcaagtaactccagtcgatccagtagaggtggtgtggaccgtgctggacgaggcaattcagttcagtctggatcgagtgattatatggcttcaaggtcatcaatattgggacctgctgtggcagctaccaatgccatgcagaagccaacagttcctagtttgtccacaaacaaagatgtggttcctaatggatcagttggagcacaacaatcatcatctggttttcagcacaattggtttggggtgccaggtcagatgtcaatggctgatatagtgaaaatgggaagacctcaagtgaggtcttctggcaagcctatggctaactcaaaacaatcggcaagcacagccctaccaactacttttgaccagggctttcctgctctcccagaccctattccacacacagtgaattctagtcatggttcagctgggaacaaccatacacatgagaatgattggtttcctcaggacgacctgccatctggagttcagcccacatgcattgaggcgtctggtgaccagtcgctatttgtggcatcactggaccaatctatgttggttgccgatgcttcttactcacaagaaatttctcatgcagaagagaacaactccactgcagttgaagcaacactgtcttccgaaagacacttggaaattgtggaggatgacaatcatttcaacgacgggttattgcagaactcaagcgcttaccaggctcaagtgcattcctatgttgataatgaagttgggatttccaatgttgatgcagaatcagcttcgatgaacttccagcatttaagcctgcagaatgaagatatagctgcaaccaagtctgctgaggataaccctgcggttatactccctgatcatctacaagctgcaaatgcagattgtgctcatttgagctttggtagttttgaatctggtgccttctctggcttgctttcatcaaaggtcccaaaaggcagtttggaggacgacgaggtgctcattccagatgaatcccgatcagttaatcgaatagatgttaggaatcaagattactatgatgacgatgctctaaattcttcagaaaatgtggatgttgagacaagaattggtaatatggataacattgatggaccttcagtttcagaatctgatgcactgaggcagggtgccatagatgtgcctggtcttcaatatgacctgccatcagtttcaagtcatgcatattcaaacacaacacagccaagtacaatggaagaaccacaaggaaacacacaagcacaacccctttcccatttttctggcttactgcaagcaaatactctacccaataacttgttggggtcaaatcttacccctcttcgggagtttgacttctcccagttccttcagacacagtcagctacaaaatataacccatctgttgcacctaataatctgccaccaatctccatgcaagagacttcaaaacagggaggcttccccaatactcagtctacgcaacatgttcccagtacaagcatttcgtcgggtcttcctctcccacaacaattgcctgtatactctcagccaactctgccccttgggccttttaccagcctggttggctatccatatttgcctcagaactattacctaccttcagcgccattccagcaagcgtactcaagtaatgggcctttccatcaatctgctgctcctgccgtgcctggagctggtatgaagtatccgatgccacaatacaagagcagccctcctgcttcgaccctaccacaaccatcatcactctctggttacggagggttcggaagtgcaaataatatccctggaaatttcagccaaaatcagggtgctcccgctgcacctacaactttgggatttgatgaagctttaggcacacaattcaaacaccccaatcattatgcagcactacagcagagtgataattcaacgatgtggcttcatggaggcgctggttcaagaacaatttctgcagttccgcctggtaacttctatggtttccagggccagagtcagcatggtggcttccgccaggcacatcagccatctcagtacggtggtcttgggtatccaagcttctaccagtcgcagaccagtctgccacaggagcacccccagaaccccactgagggaagcttgaacaatccccagggggtaccatcccagccttcacaccagctctggcagcacatctactaaaccttctgtgctctccttggagatgcctctctacgctgccagcttacctgcaagcgagcagactagctgagcccaacagcaatgaagtgtgttgtttttctttctttcttttttttctccagctgtgtgttctggaactaaattaggctgtcgtggtttttacttgatagtgagtggtgttgcagaggtgctatcttgtaacggtaaagtcctaactcatctaacagatctgcttttcataccctgtaatgtgccgttttgttcttgatgcctagaagcttctacgtgctgcagctac

SEQ ID NO: 113244 - DNA, 3315 bp, Zea Mays
tcttggaatttggccgccgtctgcgttgcttgggtggggaaggagcaggcggccaggcgcagagccgcaaaagcagacgcgaaaaagcccaggcccgagccgaagcggggaggcgacaccgctgcacctgcactaccgctcgcacggtcagcgatttgccgcctcgcgggagccagctttggcgtcggcgtcggcgtcatcgtcggcggggagttcccggagagggattccggtgaggatgagcagcggcggcggtggagggggagccaggggaccgtcggggcccgtgccggcgtccgcgaggaagctcgtgcaggggctcaaggagatcgtgaaccgccccgacgcggagatctacgcagcgctgcgggagtgcaacatggacccggacgaggcggtcagccgcctcctctcccaagatacttttcaagaggtaaagagcaagcgtgataggaaaaaagaggttaaagaaactccagagccaagatctcgaggagcaagtaactccagtcgatccagtagaggtggtgtggaccgtgctggacgaggcaattcagttcagtctggatcgagtggcactgattatatggcttcaaggtcatcaatattgggacctgctgtggcagctaccaatgccatgcagaagccaacagttcctagtttgtccacaaacaaagatgtggttcctaatggatcagttggagcacaacaatcatcatctggttttcagcacaattggtttggggtgccaggtcagatgtcaatggctgatatagtgaaaatgggaagacctcaagtgaggtcttctggcaagcctatggctgcaggagacacatcatatgctggtcaaaccccatctttatctagctctataaaccagaactcaaaacaatcggcaagcacagccctaccaactacttttgaccagggctttcctgctctcccagaccctattccacacacagtgaattctagtcatggttcagctgggaacaaccatacacatgagaatgattggtttcctcaggacgacctgccatctggagttcagcccacatgcattgaggcgtctggtgaccagtcgctatttgtggcatcactggaccaatctatgttggttgccgatgcttcttactcacaagaaatttctcatgcagaagagaacaactccactgcagttgaagcaacactgtcttccgaaagacacttggaaattgtggaggatgacaatcatttcaacgacgggttattgcagaactcaagcgcttaccaggctcaagtgcattcctatgttgataatgaagttgggatttccaatgttgatgcagaatcagcttcgatgaacttccagcatttaagcctgcagaatgaagatatagctgcaaccaagtctgctgaggataaccctgcggttatactccctgatcatctacaagctgcaaatgcagattgtgctcatttgagctttggtagttttgaatctggtgccttctctggcttgctttcatcaaaggtcccaaaaggcagtttggaggacgacgaggtgctcattccagatgaatcccgatcagttaatcgaatagatgttaggaatcaagattactatgatgacgatgctctaaattcttcagaaaatgtggatgttgagacaagaattggtaatatggataacattgatggaccttcagtttcagaatctgatgcactgaggcagggtgccatagatgtgcctggtcttcaatatgacctgccatcagtttcaagtcatgcatattcaaacacaacacagccaagtacaatggaagaaccacaaggaaacacacaagcacaacccctttcccatttttctggcttactgcaagcaaatactctacccaataacttgttggggtcaaatcttacccctcttcgggagtttgacttctcccagttccttcagacacagtcagctacaaaatataacccatctgttgcacctaataatctgccaccaatctccatgcaagagacttcaaaacagggaggcttccccaatactcagtctacgcaacatgttcccagtacaagcatttcgtcgggtcttcctctcccacaacaattgcctgtatactctcagccaactctgccccttgggccttttaccagcctggttggctatccatatttgcctcagaactattacctaccttcagcgccattccagcaagcgtactcaagtaatgggcctttccatcaatctgctgctcctgccgtgcctggagctggtatgaagtatccgatgccacaatacaagagcagccctcctgcttcgaccctaccacaaccatcatcactctctggttacggagggttcggaagtgcaaataatatccctggaaatttcagccaaaatcagggtgctcccgctgcacctacaactttgggatttgatgaagctttaggcacacaattcaaacaccccaatcattatgcagcactacagcagagtgataattcaacgatgtggcttcatggaggcgctggttcaagaacaatttctgcagttccgcctggtaacttctatggtttccagggccagagtcagcatggtggcttccgccaggcacatcagccatctcagtacggtggtcttgggtatccaagcttctaccagtcgcagaccagtctgccacaggagcacccccagaaccccactgagggaagcttgaacaatccccagggggtaccatcccagccttcacaccagctctggcagcacatctactaaaccttctgtgctctccttggagatgcctctctacgctgccagcttacctgcaagcgagcagactagctgagcccaacagcaatgaagtgtgttgtttttctttctttcttttttttctccagctgtgtgttctggaactaaattaggctgtcgtggtttttacttgatagtgagtggtgttgcagaggtgctatcttgtaacggtaaagtcctaactcatctaacagatctgcttttcataccctgtaatgtgccgttttgttcttgatgcctagaagcttctacgtgctgcagctacttttgatatgcatgcatgcttatgaagttgcagccctggtttgcagaatcgtacaggatgagaatgggtactgctagcctgctacaaatttcccatgggctttgtttgcttggagaagcattgaagaacccaacaatattgaagtcaccaatccggtggactcaactgcgatgttcacatgcaatgcaaatgttcatgcaaaccagtgtatcaatttataagcctgctatgttgttatcgaaccagtttt

SEQ ID NO: 113245 - DNA, 228 bp, Zea Mays
atgtcgttcgtctttcttgccttcgccctgttcttccaccccaacatgctgcccctgcccatgatcgcagccgcgagccaaccgacgctcgccaaagtgggtacagggcgagtcagtcatgctcctagcctttctccgtgtatgccgtcgaggaggacatggtggcgtctgccacgcttagattatcttagcagtgaggagtccaggtctgagatattggactactaa

SEQ ID NO: 113246 - DNA, 892 bp, Zea Mays
atggttatttgtgtagtcgagtcgagtagtacgtatcttactttgttttttgtttggtggtgtagcaaatatagacttcagagagtatatatagaaagtctgtctatctaggaggcatagttagatcgtttttccaatgcatggtaagtccaatgggctattattttcttcttaaagaaaggcaattacctaagtagaaatagcacaatccactctataagggcaatgcgcattaaattacgtcggctgtcaaggctttttccgctttttcactaaatagtcctcccttgctattattgccactctatatagcagtttgtaatcctaattttcaatctcgcgaattcaataaaaagaactcaaggctgcgacatccactttaagactagttaaaaagaaaaggttccacccttctagttagacaaccgatatgcgacatcatacttagtatgggagttgccgctgatctgcgacatcaatagataagcatggtatgcgaatatgtgttgttgatctctgcatcgcgatgctactttcgtaggggagagcagtcagtccccaccaaggtgggtctaagggctttttgggggggtaatttcgcttcgttcatcttcaagtgccgacagtttctattcccgagtgtgaaaagccagtactggatagacggtttagatacgtcactgagtgccccatgggtcatcttgtttcctatttattggaagctacataaagcatccctatattaagatgaagtaagaaagcatcagtcctctttttttctgtcttctatgaaagaatgtagctcggtctttcaaccctctgcggaactgtttgagttttagcattgaccccatttccttttgatcgtattacgcttgactcgctgcaaaac

SEQ ID NO: 113247 - DNA, 2047 bp, Zea Mays
tggatgtcatgctttgaacttttatatataattcaattcaaatattattttgaaaccattttcaactgctattaggttatgaactggtccaaacgtggtccaattcttctgtaaagaaaataacatttcaactgtatttggttaaacctgcaccaaattttgtgtacaattcaaactaaagcagactagatatcatatctgtatctgactattgagagcgtaatgcaatgtctgaaggcttgaaaacaaataggatcgtcaatttacctatatacgcagaacagaagatattgagattcccatttccatctagcccacgtgcactcacaacccttgtagtggatcctgagttcaaaacatgagaatctgtagcctttcaagctttgagccttctgcaaggaggacggcaacgtgtacagcagttcaccctcgtcaagcgcctataaatagtagccagcctagcaacaacgaaaacaaaacatcagagcttgcaagagctacaacttcagtccagctatctaacaagactctacacataaaaaatcagcactagttccgtttctgaggaagacaatccaaaccaaagatgtctgagtccaggagctctttccgcaacgttaacactgattgcaactggagcaaaaaggagaacaagctgttcgaggaggccctagcccgctatcgcgagggcacacctgaccgctggctcaaggtgtcccgtgccatgggtggcatcaagacagccgatgaagtccgccgtcattatgagatccttaatgaggatgtcacactcattgtatctggcggaattccattccccaactacaacacacagggagcttggaactgaggagtgaaggatgtgaagaaccaccatacatgaactagatatcttagctattgaaggaaatgtgctgatatgttattgtattaagaagtttatgattgcttgagtaagaaataaaagaagctagagaatatacataattgtgttatgtgtaaatagctatagactgtgagcaaatcatcagttatgctatagaaaccagggaaccctctgtctgcccatagctaatgtgtgctgtgcaattatggtcccctatgaatgaatgcttgtacagtaaagagtgatgtaaaactcttgtactagtttgctgattataaagttgtgctttgttaaaacttgaaagtaatcatgctcctcttgtgaggcataagatgtcaacattttgcaatttaaatgcattcattcttccttcctacagaaaaaggatgcaacacagttgtctaactcgagcaggcggtagtgacaaattgcaattttcaacctattctgaataatattatagacaccagtacaatttattataaagcctgaatcatatacatctcaccccaataatcccattaacccattgaggtttgaagtggaaccacgagcacatcaccctgaatgaattcagatacaagtctaggaactggttggaagagtaggccagctggcaacagcaacggccaacggaaatagtccaataccttatccccactgtgtatccatccgcacagccccaacaaaattaacaacattgagaacatatatgatatatagacagtgagattcgaatctactaacaggcacaaggtttcattattatagcatttcctagaacgctatcggggcatcaacttctaaaccatcatttgtcagcatcgcaagtctggttggctcgcatacgctataaactacccggaggcacttacctagccacctaggtagcttggccgcgtacctgatggtgacgacgctgtgcttgatcgcggttcccacgcatttgaaaggtgcgggacaagcggcgggacctggcctcggggcctcctgccacaattcgcacaggtgctacctcatctagtgatgtagggccagcggcgagttcgccggtcggccccggcagccttcatgccctctagcgattgaactcggcgtcggtcggtgagctccacgcgagccgttcgggaagacgagggttcggccacggacgggaatcgg

SEQ ID NO: 113248 - DNA, 594 bp, Zea Mays
aaaacaaaacatcagagcttgcaagagctacaacttcagtccagctatctaacaagactctacacataaaaaatcagcactagttccgtttctgaggaagacaatccaaaccaaagatgtctgagtccaggagctctttccgcaacgttaacactgattgcaactggagcaaaaaggagaacaagctgttcgaggaggccctagcccgctatcgcgagggcacacctgaccgctggctcaaggtgtcccgtgccatgggtggcatcaagacagccgatgaagtccgccgtcattatgagatccttaatgaggatgtcacactcattgtatctggcggaattccattccccaactacaacacacagggagcttggaactgaggagtgaaggatgtgaagaaccaccatacatgaactagatatcttagctattgaaggaaatgtgctgatatgttattgtattaagaagtttatgattgcttgagtaagaaataaaagaagctagagaatatacataattgtgttatgtgtaaatagctatagactgtgagcaaatcatcagttatgctatagaaaccagggaaccctctgtctg

SEQ ID NO: 113249 - DNA, 156 bp, Zea Mays
cttttatgtgtttccccgtttcgttgttttcggttctcctttgcctttgtttcccttttctgttctttggggttgagctccgaggttttcatacggggtttcatctctagcctaccccaacgtgcttgggacaaaaaggctttgttgttgttgttg

SEQ ID NO: 113250 - DNA, 1311 bp, Zea Mays
agccaacagccacaacccacgcgccacgcgcccacgcccactggccaccgccccacccccacccgtgcccgtcccgtgctagcttagctctcggctctcgccatggacgctgcggagaggaggctggctcgcgtcgctgcccacctcgttccgtccttcccggtcccacacgccaccgggcctcccctcgcgccttctcccgcggcagcgtcctcgtcgtcgtcctcgccggcgggggacagctacaggcgcgtgcacggcgacgtgccgtcggagccaccggagtggcgcaccgccacagacgagtcagggaaggagttcgtcgacatcatctacgagaaggccgtcggagagggcatcgccaagatcaccattaaccggcctgacagaaggaacgccttccgtccgctgaccgtgaaggaactaatgcgcgcgttcaacgatgccagagatgatagttcgattggagtcatcattcttacagggaagggaaccaaggcgttctgcagcggcggtgaccaggcgttaagagattctgatggatatgtggacttcgatagctttggccgcctcaatgtcttagatctccaggtgcagattcgccgtcttccaaagcctgtcattgctatggttgctggttatgctgttggtggtggacatgttttgcacatggtgtgtgatataacaattgcagcagagaacgcgatatttgggcagacagggcccaaggttggaagctttgatgctggttatggatcttcgataatgtcccggttggttggacccaagagagcccgtgaaatgtggtttctgtcacggttctacacagctgacgaagctgacaaaatgggactcgtgaacaccgtagtaccgcttgctgaactggagcaggaaactgtcaaatggtgccgtcagatcttaagaaacagccccatggctattcgcgtgctgaaatctgcactcaacgcggcagatgatggccatgcaggccttcaggagcttggcgggaatgccacgctaatattctacggcacggaggaggcaaaggaagggaagaacgcgtacatggagagacgacgcccagatttctccaagttcccacgcaaaccttgagtttcagctctttgctgaactggccaattattttactgatccccccaccccacccaacttggatcattatgcttactctacattgaggagacggacgataatcattttcactccaatcaattttcatatatacacgataaatgtattttgcatgaaaattcagatcaatgaaaagtaaatcttgatgtatttgattca

SEQ ID NO: 113251 - DNA, 676 bp, Zea Mays
cttcaatactcaaaagtttttattcttaataacacattcttaaaagttgacttgtacgctattccatttcatattatcgacatgctcgtgatacataaacagcatgctgttgttgctccaattatatatttctcatggacaggttggacccaagagagcccgtgaaatgtggtttctgtcacggttctacacagctgacgaagctgacaaaatgggactcgtgaacaccgtagtaccgcttgctgaactggagcaggaaactgtcaaatggtgccgtcagatcttaagaaacagccccatggctattcgcgtgctgaaatctgcactcaacgcggcagatgatggccatgcaggccttcaggagcttggcgggaatgccacgctaatattctacggcacggaggaggcaaaggaagggaagaacgcgtacatggagagacgacgcccagatttctccaagttcccacgcaaaccttgagtttcagctctttgctgaactggccaattattttactgatccccccaccccacccaacttggatcattatgcttactctacattgaggagacggacgataatcattttcactccaatcaattttcatatatacacgataaatgtattttgcatgaaaattcagatcaatgaaaagtaaatcttgatgtatttgattca

SEQ ID NO: 113252 - DNA, 1546 bp, Zea Mays
aacaacgcagagaaaagaaaaccgctccaatccggaagctgaaaatagcagaagaatccagaggcgactccaggtttgtcggcgatgctgcgagcgggaggcaggcggctcctcgccccggggctccgtcggctcggcctgggcacaggcgcctccggcgaggcgggtcctgccgcggcggcggcgggggtgagggcgtaccacgagcgggtggtggaccactacaacaacccgcggaacgtaggttccttcgacaaggacgaccccaacgtcggcactgggttggtcggcgcgccagcctgcggcgacgtcatgaagctgcagatccgcgtcgacgagaactccggcaagatcgtcgacgcctgcttcaagacttttggctgcggctccgccatagcgtcctcgtccgtcgctactgaatgggtgaagggaaaaccaatggatgaagttttgacaatcaagaacacgtaagttatctactgtcttctctaatatttttcggcttgcttaacattatccatttcgttaatcatctgaacatgctaatatcatattttgtaaatatgaattgttgtctgtttacatcttcactaattgcacacactccctgtttttcagttcctttgctgttctttgtaatgtgaataccagtgtgagaaccggtttgtatccgtgaagacttactggttgttatatgcttatatctctcttcggtggccattcgatacttcgattttattttttgttatataacaaaatatctggttaagcatgattagtatttcttaatgatgtctcattccgttttgatgggttctttgagttacaatgaaatgatcttttttcagctatcaggggggtaataatcattttaattttctcccttgttcttgggagtgacagaagattatctgatatgttagtttctaaagttcctattcagtaatattatggcacatctgacattgtttgagtttcagtaatcagaaatgctacatgtgcttattcctttagaggatgtgacttatggtcttatactccctttttttagaaaaagacgaattccttcatttaccttctcaccctcgctgtatttttagggtttggttgttgagatttttctgggcactatcagaatcccttagcaaagaccactgtaacttgttgtgttactcttttccagggagatcgcgaagcacttgtcccttccaccagtaaagctccattgcagcatgcttgccgaggatgcgattaaagctgctgtaaaagactacgaagccaagaagtcgaagatggggcagaagggtgaagacagcccttcagagaaggctgctgaagcatgaaaggttctgccgtgaagtatattgtgctgatacgtttctcagtccatgactatccgccgcatattgccaaagataaatgattctgtttgtgaggcgagggattgtgtgtaatgttcacgaagtgtggtagtgcggcatgtggctcaactgttttaaggatggtgacgactgatttcaaataaatttgctgtcatcgtagaatt

SEQ ID NO: 113253 - DNA, 924 bp, Zea Mays
aacaacgcagagaaaagaaaaccgctccaatccggaagctgaaaatagcagaagaatccagaggcgactccaggtttgtcggcgatgctgcgagcgggaggcaggcggctcctcgccccggggctccgtcggctcggcctgggcacaggcgcctccggcgaggcgggtcctgccgcggcggcggcgggggtgagggcgtaccacgagcgggtggtggaccactacaacaacccgcggaacgtaggttccttcgacaaggacgaccccaacgtcggcactgggttggtcggcgcgccagcctgcggcgacgtcatgaagctgcagatccgcgtcgacgagaactccggcaagatcgtcgacgcctgcttcaagacttttggctgcggctccgccatagcgtcctcgtccgtcgctactgaatgggtgaagggaaaaccaatggatgaagttttgacaatcaagaacacggagatcgcgaagcacttgtcccttccaccagtaaagctccattgcagcatgcttgccgaggatgcgattaaagctgctgtaaaagactacgaagccaagaagtcgaagatggggcagaagggtgaagacagcccttcagagaaggctgctgaagcatgaaaggttctgccgtgaagtatattgtgctgatacgtttctcagtccatgactatccgccgcatattgccaaagataaatgattctgtttgtgaggcgagggattgtgtgtaatgttcacgaagtgtggtagtgcggcatgtggctcaactgttttaaggatggtgacgactgatttcaaataaatttgctgtcatcgtagaattagaagaaagtactatgtggatttacaggagctgtttctggaatttgtgatatcatggtactttctttttgcaagaatgttactgttggtattgg

SEQ ID NO: 113254 - DNA, 926 bp, Zea Mays
ttacaaggaaagcaaaatgtccatttgtccaccatcatgaattaatgatagtgccaagaaggcaaatacacattaccagtttcgagcagatcacattcactgccaattcaaggcagagatatatcacgcacatacaagctagtgaatcgacacatacacaaatctcatatcatgaaacagcaattccttacgaacaacagtggggatacaagagattggggatgcaaacaaaagaaactaaagaaaaaaaaggagtactcgtatacctagtgtcacgcgatagacaccttggcgccgacctcctcgagctgcttcttggcgtcctcggcctcgtccttgctgacggcctctttgaccttcttggggagaccctcgataaggtccttggcctccttgagcgcgaggctggtgagcgcgcgcaccaccttgatagtggcgatacgcgcgctgctgggcacctcttcgatcatcacgtcgaactccgtcttctcgacgggggcctcctcctcggccgcggccccgccgcccgccccgggcgccgcgacgacggcggccggcgcgaaggccgcggcggtgacgccgagccgctcctggaggtggtcgacgaggctgcgggcctcctcgagcgtgagcccggcgatggcgtccccgagctccaggatcttgggggactcggtggcggtgcacgcgacggcgacggcgcggcggccccggcggatgtggggcgcggcgtgggaggacctcgggagcgaggcggcggggcacggggaggtggaggggcgggagaggagggtgaaggcggaggagagggtggtggacgccatggctagctcttgggagctcgtgcgtcgggactcagaagtgagcaacagcggcgggaggaccggaggaggcgggggataagatgaggagtgcgtgcgatgggt

SEQ ID NO: 113255 - DNA, 635 bp, Zea Mays
atcctctcccatccacctccctccgcacactccgccgcctcaccttctccccctctccctccccgccgccgcggtccccgccgccacgctgtggcccttcttcgacgccgtctgctccgacaccgccatcaccttcggctcgctcgtcgcgctccacgagtacctttgagaattcgtcggtctttactacgactgcaactttgaagtttggtattcatataatcaataggctcaacagtatgtcccttgtaaatggtaggatcagagtgcttctgctatgtcatcttcgacacttcctggtgtttgcaacaaacaaagtgcttctatgctgtgcagttcttgtttcttacaagtggtgatggtggtagtggtctggtctctatgtgagcattggtctagagtatcgtgaagctatgcggctcttctttcatgttcaagatgaagttcatgaagcttggatcgaatctggatacctttaatgatgatggcaatgaaatcagatgatcgatcgcttcttttaatttggcttttaccttgtttctttaatgttgcctttgaatccttgtgttgttcttagaatctgactgatttttatttatttcaattataaatggtatgatctgactaagaaattc

SEQ ID NO: 113256 - DNA, 575 bp, Zea Mays
atcctctcccatccacctccctccgcacactccgccgcctcaccttctccccctctccctccccgccgccgcggtccccgccgccacgctgtggcccttcttcgacgccgtctgctccgacaccgccatcaccttcggctcgctcgtcgcgctccacgagtacctttgagaattcgtcggtctttactacgactgcaactttgaagtttggtattcatataatcaataggctcaacagtatgtcccttgtaaatgttcttgtttcttacaagtggtgatggtggtagtggtctggtctctatgtgagcattggtctagagtatcgtgaagctatgcggctcttctttcatgttcaagatgaagttcatgaagcttggatcgaatctggatacctttaatgatgatggcaatgaaatcagatgatcgatcgcttcttttaatttggcttttaccttgtttctttaatgttgcctttgaatccttgtgttgttcttagaatctgactgatttttatttatttcaattataaatggtatgatctgactaagaaattcctagacgcattctccctgatt

SEQ ID NO: 113257 - DNA, 432 bp, Zea Mays
acaagaaaccttcaagacggcggggacaagttcaggaaaaaattcctctacaagaaacaaacaactaggcaagagacgagcatccacacaagaattcctctgcagctcgggaaaccgatcggtcgcggcatcctgtgctgggtatataacggtagaaagggcagtctacagcagggtggaaagaggcagtgagagtgattgacgtcgtgtgcagtttttttttgtttttttgttctttcttttgttttgacctgtacacgtttacggattcctagatttttttaagcggatatggctttaggatttgcaggcctatccctgtaaaactcttcgttaagcccttcaaagagaattttttacatgagcattaccttgtagacttgtagttgtagagagtgaggtaaatgatccaaaggtgaagtttttactact

SEQ ID NO: 113258 - DNA, 1405 bp, Zea Mays
ccaaaaccttccatttccatggggttttgcacattgccccgcatgtgtccgtgtccgcgcctccgtttgcaacatgtggcggcgttcccggcccgccactgtgccggaaaacgacacattcccgtcaggcctcagcggcagcgcaggcgcagcgcagtccaccactccacattattactgccccgcccccctttactcgccagccctcctccggcctcccgctgctcgctcgccccctcgaaaaccagcggcgaattcgtggccgcatcggcatcggaatgaggacttgaccggcgggcgcgccggggttcgtcgcggcggcggcggcggcgcgatggaggcgagccggcgcgggcggttccaccgccacgatgggcccgccgcgcccgtcccggtggtggaccaggcggactgcacggcgcagacgtgccggtcctgcgtggcggtgacgctggcggacgccatcgcgctcggctgctgcccgtgcgcggtggtcagcctgctggggctggcgctcgtcaaggccccgctcgccctggcgcgccgctgcctgcggcggctgcgcggcgagctgcggcacaggaagcgggtgcgcgacatgcacggccccgccgacaaggccaagtgccgcagctccgacgccggcgccgcgtcgaggggcgcgtgggccttggaggcggccgcgcgggcgagggcgagcaactcgtcgtcgtcaggctcaggcaggctcgacgcggagaaggtgtggatggaggagatgtaccgggtggggcactgggggttcggccgcctgtccgtctccgtctccgtctccgtcacccctcccccgcccgtctggcccggacgcagccccgacggcgacggcggcggcggcgggagaaaggacgtggacctgcggtgcgagtcgtgacaggggaagccgcgcgaccgttcgtccttctgccggacagctccgtggcaatgccggaagttgtcctctgactttgcacggtgaaatgagagtgcatggtccgtgcatcggagctccgaggagaatctgcttgggggaagaagcgctaagctatgattggacccgggcgtggggattgctgcttgattcgccgccttggcggcaggtcgtcgtgtcgcgcagccccagcccagccagaacgattcatcagacttccagtgcacagcggcaaacccggagggccttctgcagttgcccttccaagtggccgtgtcgtagtcgtagcttccatttgtttttcctcctcttggttctggaaccccggccctgtatttttacaagctgtacatattcgagcggccgagttcttccatgctgctgtaatttttttgggcgatctctgactctctgtatatactcgcctttctttttatttcccggaaataatgtgcatcc

SEQ ID NO: 113259 - DNA, 841 bp, Zea Mays
aaccgaaaaagaaattagaaaaccgcagccaatccagccgagtctgcaaaaaatcttggaagccgcgggagcgagagccatggaggacatcggcgagggacccgccgagaaccttccggagcccctgtctccagccgtggaggccgaggacgaggacggcgacgagttcagcttccccgttcctccggtcgccgccggcgcgtgcatcgtgcccgtgtacccgatcttcggccggcccccgtccccgctgcgggaggaggaggaggaggagccggagacggccaccttgcgggtgccgctgggccggctcctgctggaggagcgggagttccgcgcgcgggagccggacgggcgatcgtcgagtgcgcaggcgtggcaggacgaggacgaggacgacgcctccggcggcggcggcggcgccggggacgaggacctgcagggcgtgccggcggagagctactgcctgtgggcgcccggcgggcagtcgccggcgcccgcgtccccgcgccggtgccggaagagcggctccacgggctccgtcctccgctggcgccgcatcagcgaccgcctcgtcggccgcagccacagcgacggcaaggagaagttcgtgttcctcaccgccgttccggatccgcctcgtcctagtaggagtaacaaggaagtggatgaaggaggcggcgacggcgaggcaggcagcgtggcgcatcagatgagatattacggtagaggcggcggcggcggcggcggcagccggaggcgttcgtacctaccgtacaagcaagagctcgtcgggctgttcgccaacgtcagtgggctgcgccggagctaccacccgttctaa

SEQ ID NO: 113260 - DNA, 800 bp, Zea Mays
cgcatacgcccgcagccgccatcaacgcccgcggacccctcagcctcctccttaccgccgcgatccgccagaccaccgccccccccccgcacccgccgcagatctcgccatggcggcgcgcacgccccccaggtcgcagccccgtcaccttcctcccccaccccgaactccgtccccgccgtagatctcgccatcggtaacacacctctcgttcgcatctgacgcgagcggttgggttctcccgcgcgagcggccggcgggtgcgacagaggggtcttgtgaaggccatcggcaacacacctctcattcgcatcaacagcctctccgacgttacaggatgcgaggttcgcgcgtggactcggcgtcatctccgcgtggtcctcgccccccccccccgagacacccgctcgcaatgttcgggagtccgcgcccgccgtcgagaggtacgcctagcccccctcgacccaccgagacaaccgctcgcgatgtcctccctatcgagacagtcgccgggacgtacgcccagccgcctcctccaccgcccacctacagcgtcgagattgtcgtcgtcctcgcgtctgcctacccacccccgttgtgcccttgggcccggatctggcccgacgaacaacgaatccctctcgcgcgcgcagcgccacagtcgtcgatcgcagtggcagccgcctagccagacgattgagccccaccgctgctgccgtccgtggaatggagctgactgccgacgagttgagccgctcgtggaatggaactggcagcctcctcctcctcctccgccgccg

SEQ ID NO: 113261 - DNA, 3019 bp, Zea Mays
cccccccccgcacccgccgcagatctcgccatggcggcgcgcacgccccccaggtcgcagccccgtcaccttcctcccccaccccgaactccgtccccgccgtagatctcgccatcggtaacacacctctcgttcgcatctgacgcgagcggttgggttctcccgcgcgagcggccggcgggtgcgacagaggggtcttgtgaaggccatcggcaacacacctctcattcgcatcaacagcctctccgacgttacaggatgcgaggttcgcgcgtggactcggcgtcatctccgcgtggtcctcgccccccccccccgagacacccgctcgcaatgttcgggagtccgcgcccgccgtcgagaggagtgctgcatctgccttgcgtagtacggggagaaggaggaggttcggcagctgccgtgcacacacgtgtttcatctcaagtgcatatacaggtggctcaggatcatctcctcttgccctctctgcaagcaagagctcaagtgaactttatattcattacacacatgacattctcgcttattctttggatcaaggtgttagtatcctagacacaacagatattttccagctaacaagggaaatcaaggaagaattgatctttatattagcaggcggatgcaatcactaatcaaaaccacgatgcaaggtaacctaaatggattttaaattttattttggattgttaaatctttatttctgactactattgttttatgtcgtggatgccctcgtgaggttctacgccgacgccttcaggagggattcacagaggccatggtgaggatggccagcttgagtcggctcaccgggagcagcgcgagatccgctacaactaaatgataggaggtttcgctgccatttgcagcgactgtgttccagttcgaccgtttggggaaaaggtgagtcctcccatttcatgtagatgcatgggttgataaacatttgggagaaatgtcccctctttaattcgaaaaatagttgtgtatttgttcgacttatctgcggcgatgtacctttgtacgcgtacaaacatctatagacaaaaacaaaatgacacttcatggatgtagcaagagcgggctacgagaaactagcagatcatgcctaaaattcaattagcattagggtcagacaaaatactacattttctggattacaataatgtataggtgcatgaaaaaaacttgattccaatgtgtgacaaagtgtgaagatgaaagtgcactttcacgctgtcataacgcggatttgttttccttgctcatggaatgtgcatttgtgtgtttgcgtctactgtgcggctacaggcaaggaaacaggatctgtcacggaaggtatgtacacattacagtaaacgttgttcgtagaacatgcactttgtggagtggtctttgaatgagatgcgtttagaattaccttttcatgcagatctcttgttcagaacctggttgcttagtccattcttgttttgggttgctactacaaaaaagcggcaatgctttatatgaatcgcctcttactaatatccagggtcaaatggtggtccttcagtgaccagactaatatttgagcattaatcttatttgtttcacagtcatttcttgtttatcaatatgaatgctatttttttgcgagtggacttgttaactaataagctcatagatatttgaacaaaaaatagtgttttgttctaaaactgtcataaagagtgcatacatcatagctatggtttcaactgtgatttgatgtcctataatattgagtgtcctatagtgtgttgttctgaaacagtcacaaagagggcctaagaagctgatggaatcctcattcaccgccgctaaggagtttgagcgggatcggagaggagacgtcagttcttcctcctctgctcaatgcggccattcgccctgtcccccaaccctgaactccacactgccactccgtgctcattttttctgaaggggaaatattcatctccttgttgttttgtaccatggatactttagcatcattctcatactactaggagtgtaggtaaggagtccacacacgagtttgcaaacaccattaagcctattttgcttgattagtgccctgcaacacttcatatgttcaagacaaaatccatacccatgtctattgttgtatgatattatttgcattgaccgttgctgctcttcttgattgcagtcactaacattgcattaatctatgtgatacatttattcaggcgattcccatttctcagtgatgtcgatgtcctgtactcctgtatatttggattcaacaatatgccattagtatgctgtcaagcgtcctatttgcaagagataaatggcttacgcccgaggggcttattcttccttatcatgtgcattggtgccacaacactggatgagtataggaagcatatagagaaagatcctgccttggaaagaaggtttcaaccagttaaggttccagagcctactatggatgaaacaatacagatcttaagaggacttcgtgagagatatgaacttcatcacaaactgagatacacagatgatgctttaattgctgctgcacagctgtcttatcagtatatcagcgatcgttttctgcctgacaaagccattgacttgattgatgaagctggatctcgtgttaggctgaggcatgcgcagctccctgatgaagccaaagagctggacaaagagctgcggcagataagcaagcagaaaaatgaggctgtacgtggccaagattttgagaaggtatactgttgtttggcacagcggtgacaaagccgatccgctcccacctctctagcaacgtcgatatggttaataccaagcattatgttgtttccttttgagataaatattttgttactgattttaccttttgtctcctcttcttgttttttgttctagaatctgtagcaaatggctaacgatgaggatatccattactttgtttatgacaataaaactgatatgttcaagattccgt

SEQ ID NO: 113262 - DNA, 792 bp, Zea Mays
cgctcattcctggaggaaaaatcccgccgctgaaaactggcttcttcccagccgtgcttctctccctccctctatttctccctctgcgcgtcgagcttcttcctgctcgcgtccagttgcccctcctctttctactctctgcgcgcttccctctctctcctccatggccgtcgctgctccctggtccaagttcctgtgcgcgccctggagctcccctgcgcgcgtcccagctcgtcggtgcttcttccctgcgcccagccgctcctccctcctcccctgcgcgtcctcccagctccgctctgctcctggccggcgttcggcctcaagctcgcccccggccacttgcttcccccatggccggagctttttccccatcccagatctcgcccagttcgccccagcttggagctcgcccagcccaaccgcgcgtctctcccatgacgcttgcccagtccggccgtcggtgacagggccactcgcggcatcttcctcatgtccagctcggcctccaactccaactcgctcctccctcgtctccatggctgtgcgcgcgagctcgccagccgtgcgctcgcctagctcggatttcgtcagccgccgttctctggtccatgtgccggtcggcgtcgtggagttttgtttggtcggctcatcgttgacctcgctggtgtcgtcaaaccgtcgaaccccttcctcagtcgcttcgggtctccatgtcggttgtcgtcgttcgtcgtcgtgtcgtgtgtgcagcaacgtcgctgattcctccatagtgaacttcgcttcatc

SEQ ID NO: 113263 - DNA, 615 bp, Zea Mays
atgacggagagcgcgaccaggcagaacacggcggccgaaaccctaaaccctagctcggccctcctcagctcagcgcgccgcaccttctccgggacgccgcctaggagccacctcttggaccccacgccgccactgactcccccaacggtagtaacggcggcggcagcggcgagggacccagcgtcgctcggaggtgtaaccttgtccggcgtggccttagcctccatcgccgcgaggtcttcggcggagaggagcttcgcgatggtgacggccgattccttctgcggcgatctggttggggacgcctcggccgaggaggccttcggcggcgttgcatcttcagttttggctagaacgatggctagcgtcatgctccccgattcgctagccgattccgcctcctcctgctccgacttggcttccgaggacgccggcgctggagtaggcggggatactggagcgggtgagggagggggcgatgggcgcggcggtgacgtttcgccctgtcgcgaaagtggaggagaagcatcagcgctcggcggaggcggagatggtgggggctgtggcgccgagggatgcggagttgaggaaggagagctatcgtcgggagtatga

SEQ ID NO: 113264 - DNA, 1101 bp, Zea Mays
ttttttcttgaaaaccttttaaatttatatttaaagagttatttatataactattggacatactctaaaacactgttttgtactattttgtaccacatgctgctatacttataaagtgaggtttgatataagagatgagaccaccggagatagctttactcctgcgaaaaaaaaactgtgcggaaacgaaataaaagcaggagagagcatcttgtgtcgtctgcgcaagagagaaagaacactcggggttaggagatctgactcaatggccgcgaccaaggtgtgcaacgttaggttcgagggcaacgtgatcaccaccaccgtgacggcctccggcgcggccgtggagagctggctcgacgagatcctctccgtccaccgccgccgcctgcacaagctcgtcgtcgggctggacgtcgagtggcgccccagcttcagccgcgcctacagcaaaacagccatcctccagctgtgcgtcgggcgccgctgcctcatcttccagcttctccacgccgactatgtccccaacacgctggatgagttcctcagcgaccccgactacacattcgtcggcgtgggcgtggctgcggacgtcgagcggctcgagaacgactacgacctggaggtggcgaacgcggaggacctggccgaactcgcggcgaaggagatggggcacccggacctccgcaacgcgggcctgcagggcatcgcgagagtcgtcatggacgcccacgtcgagaagccgcagtgggtgaggacgggcccctgggacgcgtcatccctctccgacgagcagatcgagtacgccaccatcgacgcttttgtctctttcgaggttggccggatgctgctcagcggctactattgatcgatcgagccgttaatgcaggcggccgccgagagttccgcgttcttgaagtgcttttgattcgtcatgcatgtcctagtagattgctccctagcgcattagatgctctctcttaatcggtaaaagcaggttttaggggtttcggccctcctgggatggaagaaaataatcaaccagagtaccagacaatacaatcgtggtggattcgtggattaatcgaactattatgatgc

SEQ ID NO: 113265 - DNA, 958 bp, Zea Mays
gatacaaacaaggccggcgcatcggcattcctccttccttaaacccaccccggcatcgggcacgccgcacgccacgcctcaccgagtcaccttcccagccagctacccttccccctaccaattccaaatctctcacccggcttgaggatggcggcgcaggtggtcgcagcggcgggcaccccggtggccaggccgctgggcggtggatctggggccgacgcgctccggcccgcggcgaggatgccaagggagagaaggaccggtgctgtggccgcgagaggacgccgcgagtctcaggtggtatccgtcataagccgcgccccacgccccgatgccggggtgctgccggtgtcgcccgacgacgacgcggccgtaaaggaagaagcaaacttccagcaccttaaggctatccagcaacttgcaactgcagcaaatggcgtgtggtctaaaccaaatgtaaggcgcaagacaaagattgtgtgtacaatcggtccttcaaccaacacaagggacatgatatggaaactcgctgagactggcatgaatgtggctcggcttaatatgtcacatggagaccatgcatcacaccagaaagttattgatctggtaaaggagtacaatgcatcacatgctgacaatgtgattgctatcatgcttgacacaaagggaccagaagttcgaagtggagatttgcctcaaccgatatttctggaaagcggacaagaatttacttttacaatcaaaaggggagttgggactgatacgtgtgttagcgttaactatgacgactttgttaatgatgttgaagtgggcgacatgctccttgtagatggtatgctgatatttacattccttttctgttagaaaataagactacataaccccctgaactattaatatttgggtctactttaacccagaacctacataactatgtattctacaccctcacctattc

SEQ ID NO: 113266 - DNA, 2231 bp, Zea Mays
tacaaacaaggccggcgcatcggcattcctccttccttaaacccaccccggcatcgggcacgccgcacgccacgcctcaccgagtcaccttcccagccagctacccttccccctaccaattccaaatctctcacccggcttgaggatggcggcgcaggtggtcgcagcggcgggcaccccggtggccaggccgctgggcggtggatctggggccgacgcgctccggcccgcggcgaggatgccaagggagagaaggaccggtgctgtggccgcgagaggacgccgcgagtctcaggtggtatccgtcataagccgcgccccacgccccgatgccggggtgctgccggtgtcgcccgacgacgacgcggccgtaaaggaagaagcaaacttccagcaccttaaggctatccagcaacttgcaactgcagcaaatggcgtgtggtctaaaccaaatgtaaggcgcaagacaaagattgtgtgtacaatcggtccttcaaccaacacaagggacatgatatggaaactcgctgagactggcatgaatgtggctcggcttaatatgtcacatggagaccatgcatcacaccagaaagttattgatctggtaaaggagtacaatgcatcacatgctgacaatgtgattgctatcatgcttgacacaaagggaccagaagttcgaagtggagatttgcctcaaccgatatttctggaaagcggacaagaatttacttttacaatcaaaaggggagttgggactgatacgtgtgttagcgttaactatgacgactttgttaatgatgttgaagtgggcgacatgctccttgtagatggaggaatgatgtcattcttggtcaaatcaaaaactgaagattctgtgaaatgtgaagttattgacggtggtgaattgaaatctaggcgccatctgaatgttcgtggaaagagtgcaaccttgccatcaataactgacaaggactgggacgacattaagtttggtgtggataatcaagttgattactatgctgtttcctttgtgaaagatgctcaagttgtccacgaactcaaggattatctaaaaagttgcaatgctgacatacatgttatcgtaaaaatagaaagtgcagactccatccccaacttacattcaatcatcacagcatctgatggggctatggttgccaggggtgaccttggagccgagctgcccattgaggaggtgccgctgttgcaggaagaaattattagaatgtgcaggagcatggggaaggctgttattgttgctacaaatatgctcgaaagtatgattgttcatccaactccaacccgagcagaagtttcagacattgctatagctgtccgagagggtgctgatgcagttatgctttcaggagaaactgcacatgggaaatttcccttgaaagctgttaaggtcatgcacactgttgccctgagaaccgaggcaactattcctggtggggaaacacctgcagaccttggtcaggctttcaagaaccacatgagcgaaatgttcgcataccatgcaacaatgatgtcaaatacccttcgaacatcaatagtggttttcactaggacgggatttatggctatactgcttagtcactaccgtccatctggcactatttttgcctttacagatgaggagagggttaggcaacgattggctttgtaccaaggtgtatgtccggttcaaatggaattttctgatgatgctgagaagacatttggcaatgctttgtcttatttgctgaaacatggtatggttaaggacggtgaggaggttgcgctcgttcaaagtggtaaacatcccatctggagatcacaatcaacacacaacattcaggtgaggaagatctgatgcggaacgcacatagtattctgattgttggaggacatcgtttcttctagcaaaccgcaaggtcttgttacaatgataccacactggtagtaagtactggtattggtgagatagttggtgctgagctagtgttgtgattctttttcttacttgtgcactagtgctgttttccttccgtgtaaaaaggccaatccaattgccgcttggttttagctgtagctttgggaactgtaggcttgttgtaatacagttcgttctgtcaatgttaaggacttttgcctcgagagctaggcataactcgaagctcaccaaacagcaatctacctgcaaattgcaacgcattttgcgtctttacttc

SEQ ID NO: 113267 - DNA, 1614 bp, Zea Mays
cgtctccaaagtccaaactccaaagtccgaactccaaaccaaacgctccagccccgccgcacgcatacggcatacgcatccctcatctccctctcctcgccttcccgccgcggcgccgcctctcctttccgaattccgactcccgcctccccggggtgagtgtttccgcatccggctcgtccgccgatcctcgcgaggcctcctcgaccccgacccgacccggcgcggccaccggttcaagtcattcacaaaaaaacatgggtcatgatgaagctgtagttactcagaattcagtaaaagcaccatcaccacccaaggatcagccagctatttatccatgctttgattggtcgactgtgcaggcatattatggcccaggggtcttgccaccagctttctttaaccctggaatagcgcctggtcatgcccctccaccatatgtgtggggtccgcagactatgccaccggctgcctttggaaaatcatatgctgcaatatacccacatgctggtggtttcctgcatccactcatgcccctagtggtaaacccattgagtgcggagccagctaagtctgggaacagcaaggataatagtttaaacaagaaactaaaggaaattgatggatctgctgtgtcaagtggcaacagtgagaaaacaagtggggatcacagcctagaaggatccagcgatggaaacaacccaaaggtcagcggaactccaaagaagaggagcttagatgataggactacatcagaaacatgtggggaatcaggaagattgccagctttgtccagtgtgcgcattccagacacaatgatgaaaccatgtgtgagcaccggtagtgacttcaaagttagtggtgcgacatcaaccgaatggccagctaaggacgacaaggaatcgaagcgtgaaaggaggaagcagtcaaacagggaatctgcccggcgctcaaggctgaggaagcaggctgagactgaagaactggctagaagagtagagctactgaccgcggagaacacgtccctccgaagcgagatcagcaggctaacggaaagctcccagaagctaaggatggagaactcggctctgatggagaaactagcggacggtacatcagaccaagcacaagaagcttccgccggccaccagacgacaccaacggcgccatcgtcggctcgcgtcgtcaagaacttcctctggatgatggatggcgaaggcgcgtcaagaggcggcagcggcagcagcagccggcgcagggatcacggtgcgcccatgctccgccagctcctgagctcgggtcctctggcggctgacgccgtggccgctagctgatcagtgccgtgcttcccttgtgccgagcgcgtgtggactggcgatttttttaaaagagcgcacaagccgccacgcacggacgacctgtaaattacagtagctatgcctatgtatggggcatcgttccggccgctctgctgagagccgatatacggatcccatcactgagctttggtaactctctgtcgactgtcgttagagtggttgtgccaaactgaatcaactgacacgattcagcagtactaataataaccatcaggaggtttgcctctgaactcca

SEQ ID NO: 113268 - DNA, 2275 bp, Zea Mays
cgccgcgctggtggtgcacgtcgtggtaggcggtgttgttgcggaacgcggcgtggaacgggttccacggcgcggcgacgccgcagtggtcgtcgacgcccttgacggtggcgaagacgaagaaggccgcggcgacgcgcggggacatgccggaggccaggtaggccgcggcgcccgacagcgtctccgtgagcacggcgtccacggggtggccgtactgcgccgcgtacgcgtagggcgccgccacgcggtggtgccacgagtggaaccgccggtacatgtacgggacggagtgcatgagcctgtgcatgaagtactgccacgcgtccagcaccagcatcgccacgccgaaccgcgccgccgacaccaggaacggctccgcctccgccggcgccgcggcgagaccgtcggcagcggcaccgtgtccgtgtccgtgtccgtgtccgtgtccttccagctgcacaaatgacggacgcaaaaggttaaaaacaggtgcgtgcatgcatccggcgtaataaatggcggcggtcagaaacgaaaagagtgaaaaaaaaggacgtcacgtggccgcgataggtgatactacggcacgacacgagcgcgcaacaaatgaatagaatagctatgaagtgcacgagcgcgcgcgtgtaccttgtacagcacaggcggctggcctgtgcgtggccacgggctggtgcggtgcctgcgtggacatggtcagcatggaccacggtgaagagggcagagctgggcttcaatgcttgtcaggccatattcagacggcgccgtcctccatcaatgggatgggagatggagtggcagaggttactgcggtagctgcgtacgtggtcaagctgtgatatggggcgaatgggagtaccgctcggtgtcaaacctgagaaaccttgagccatgtgaaaggaatgcacaaaacacctaggggaagaaccaagaacggggtacgatgaacgtgagcctgacgccgctggcttggcagcagccgcgcgcgccgtttcaaactttggtgcttccctggtgcagtagtacagggggtggccggctactagcacttgcattgcatttgtttgtcaccggccggctgccctgaatgtcgtgcaagcacatgcttgaccctggttttgaccgatcctgctgatggtcgcctgtgcacgacgacagcgctggcatgcagcttcctgggcggcggcagtcgcaaactcgcacactcctcttgcctccatgggacatggctttagaatttaggtacgcaatcctgtcactgtataaagactgaccagagaggtcttcgcacaagaaaaagaaaaagaaaaaaagaatgaccagagagaaagcgatcgctgatcgagaacgagtatatatatatatatatatgataatttccagcaccgagcttctctttcgtcccttaagctcgcattgtcactatcttaccacgttttggttccttttttttcatcatgtcatgcataccggcataccgccaccggctgtgcttaaatatataacatctcgttccttctcgatcgaccagtctctccgattaaaaaaaacagtgccctattcattcacatcgaagctagtattataattgtctgtctcatatatctatatctctatgttacgggaaaacgccgctttttgtctccacgtcatgatgcatgcaaacacatggcgatgaggacagcaagttcttttttccctggttcagagatgcagcatcatgcgacgatgcatggacactgatgagaagtgtggagagagctccagcaccagcagctacatatatactgaccttgaggacggcgacggagatggcgacctggatacactgctgcaggagcacccctctgacgacgtccttccgggaggcgatgttcttggtctcctcgtcccgcctcgagtgcagcctgtacttgtccagcgccgtggtgcgcgccagcagcgcctcgtacatgcccgcgtacgcccagtacacggccaccggcgccagcgtcaccaccagctcctcggcgtccatgaaccccatcggtaggtcgccggccggccggatcggatcggatagcgctagcgcgcgcgctggccgacgacaccggcaaagcaagagaagcggtggactggtggtgtaagcacagcagatcgatcgagctagctctagctatatatgctagttgctgtcaacggcgacgcgcgcctgcgaacccggccctgcttgtgttcagattttttttgacagcttgtgcgctcgatcgaccgc

SEQ ID NO: 113269 - DNA, 513 bp, Zea Mays
atgtacgggacggagtgcatgagcctgtgcatgaagtactgccacgcgtccagcaccagcatcgccacgccgaaccgcgccgccgacaccaggaacggctccgcctccgccggcgccgcggcgagaccgtcggcagcggcaccgtgtccgtgtccgtgtccgtgtccgtgtccttccagcttgaggacggcgacggagatggcgacctggatacactgctgcaggagcacccctctgacgacgtccttccgggaggcgatgttcttggtctcctcgtcccgcctcgagtgcagcctgtacttgtccagcgccgtggtgcgcgccagcagcgcctcgtacatgcccgcgtacgcccagtacacggccaccggcgccagcgtcaccaccagctcctcggcgtccatgaaccccatcggtaggtcgccggccggccggatcggatcggatagcgctagcgcgcgcgctggccgacgacaccggcaaagcaagagaagcggtggactggtggtgtaa

SEQ ID NO: 113270 - DNA, 1459 bp, Zea Mays
atttcccccctcttctccagcgtggcacagagctagggtttctcccacccgccgcctccggcgactgcacccgccgtcgtccacggccgatcgctccagctcccgctgcgcgcgctcccgccgcaggccgctccagctcttgcacgcattcccggccgccgtcgcgcctgcacgccgctcctctgcggccgctccagcttgcccgcgcgtgctcccctcgactgctctagcttctgcacgcgtgcccggccgccgccgcgcctgcacgccgtcggtcaccaatcgtcacctactacgacccgtccttcaagcggcagcttcatccgcgacgtccgtgtcgccgtcttgcgccacgacctcactcgagcgctctgcctactcccgaagccctcctccgcggcgcccgccccagcagttcctcctccgcagcgcccgccccatcagttcctcctccgcggtgcccgtcgacccgccgagcaccagcagcagcgtcgccggtggtggagctccaccgcctttgccgcgctccatctcttcaggagtgcaaatccgtcagcattggactgttttactcatctataggatctgattttgggtgggcgcagttgcggagatgcagaggctgggggatttcaggctccctcccttcttcaactacccgccttacttcactttacagcctgtgcgtgagacgcgggaaaagcaagtgcagttatggaaggatctgatacttgattactgtagaagtcaaaagatacatacaatatctctagaagaagatttccccttgttctccaatgcaaagattgagagatctcttagctacgaagcaaaggaagtgttcctcgcagctctcgtcagtgaaggtcgtgcagaatggatggacaaaggtcacaagaagtgcctaattctttggctaaggatacaggattgggcaaatttcatattgaactttgtaaaggataacgggttggaagtaatgactatcgaagaaatacgctctggaattgatacacgtggaactgaactcgagggaattgatcgtggtgttctcatgcgggctctgcggcagttggagcaaaagggaaaggcagctatcttcaaaggcacctctgctgatgacgaaggcgtaaagttttcggtgtaattcttttgcgatccttaaactggcagactaataatctcgttcagccggtgcccttgaacatggcatgagacacccatagcctcgatcattcagtgccctttgaaaatggcatgacacatccttgtaaaaagcagtagggctgatcacattcttcccgagtagtatcctcttcagtgctgcggtaaaatttcccaactcatcttttgttgtagtgaaaaatcggccaagcctgattaaacattgtggagtggttggtaagaagaagttgaactggtcatgcctcttacgctgattgattttccgatatctaag

SEQ ID NO: 113271 - DNA, 1485 bp, Zea Mays
atttcccccctcttctccagcgtggcacagagctagggtttctcccacccgccgcctccggcgactgcacccgccgtcgtccacggccgatcgctccagctcccgctgcgcgcgctcccgccgcaggccgctccagctcttgcacgcattcccggccgccgtcgcgcctgcacgccgctcctctgcggccgctccagcttgcccgcgcgtgctcccctcgactgctctagcttctgcacgcgtgcccggccgccgccgcgcctgcacgccgtcggtcaccaatcgtcacctactacgacccgtccttcaagcggcagcttcatccgcgacgtccgtgtcgccgtcttgcgccacgacctcactcgagcgctctgcctactcccgaagccctcctccgcggcgcccgccccagcagttcctcctccgcagcgcccgccccatcagttcctcctccgcggtgcccgtcgacccgccgagcaccagcagcagcgtcgccggtggtggagctccaccgcctttgccgcgctccatctcttcaggaagtgccctgctccaccgcccacctgagtgcaaatccgtcagcattggactgttttactcatctataggatctgattttgggtgggcgcagttgcggagatgcagaggctgggggatttcaggctccctcccttcttcaactacccgccttacttcactttacagcctgtgcgtgagacgcgggaaaagcaagtgcagttatggaaggatctgatacttgattactgtagaagtcaaaagatacatacaatatctctagaagaagatttccccttgttctccaatgcaaagattgagagatctcttagctacgaagcaaaggaagtgttcctcgcagctctcgtcagtgaaggtcgtgcagaatggatggacaaaggtcacaagaagtgcctaattctttggctaaggatacaggattgggcaaatttcatattgaactttgtaaaggataacgggttggaagtaatgactatcgaagaaatacgctctggaattgatacacgtggaactgaactcgagggaattgatcgtggtgttctcatgcgggctctgcggcagttggagcaaaagggaaaggcagctatcttcaaaggcacctctgctgatgacgaaggcgtaaagttttcggtgtaattcttttgcgatccttaaactggcagactaataatctcgttcagccggtgcccttgaacatggcatgagacacccatagcctcgatcattcagtgccctttgaaaatggcatgacacatccttgtaaaaagcagtagggctgatcacattcttcccgagtagtatcctcttcagtgctgcggtaaaatttcccaactcatcttttgttgtagtgaaaaatcggccaagcctgattaaacattgtggagtggttggtaagaagaagttgaactggtcatgcctcttacgctgattgattttccgatatctaag

SEQ ID NO: 113272 - DNA, 1587 bp, Zea Mays
atttcccccctcttctccagcgtggcacagagctagggtttctcccacccgccgcctccggcgactgcacccgccgtcgtccacggccgatcgctccagctcccgctgcgcgcgctcccgccgcaggccgctccagctcttgcacgcattcccggccgccgtcgcgcctgcacgccgctcctctgcggccgctccagcttgcccgcgcgtgctcccctcgactgctctagcttctgcacgcgtgcccggccgccgccgcgcctgcacgccgtcggtcaccaatcgtcacctactacgacccgtccttcaagcggcagcttcatccgcgacgtccgtgtcgccgtcttgcgccacgacctcactcgagcgctctgcctactcccgaagccctcctccgcggcgcccgccccagcagttcctcctccgcagcgcccgccccatcagttcctcctccgcggtgcccgtcgacccgccgagcaccagcagcagcgtcgccggtggtggagctccaccgcctttgccgcgctccatctcttcaggaagtgccctgctccaccgcccacctaacagaaaacgtggggggtgggaatggtttctcgatggtaaccacagtttggccaatggtttggtacatttcaggttccagctgaagtaacattaaaatccggagtgcaaatccgtcagcattggactgttttactcatctataggatctgattttgggtgggcgcagttgcggagatgcagaggctgggggatttcaggctccctcccttcttcaactacccgccttacttcactttacagcctgtgcgtgagacgcgggaaaagcaagtgcagttatggaaggatctgatacttgattactgtagaagtcaaaagatacatacaatatctctagaagaagatttccccttgttctccaatgcaaagattgagagatctcttagctacgaagcaaaggaagtgttcctcgcagctctcgtcagtgaaggtcgtgcagaatggatggacaaaggtcacaagaagtgcctaattctttggctaaggatacaggattgggcaaatttcatattgaactttgtaaaggataacgggttggaagtaatgactatcgaagaaatacgctctggaattgatacacgtggaactgaactcgagggaattgatcgtggtgttctcatgcgggctctgcggcagttggagcaaaagggaaaggcagctatcttcaaaggcacctctgctgatgacgaaggcgtaaagttttcggtgtaattcttttgcgatccttaaactggcagactaataatctcgttcagccggtgcccttgaacatggcatgagacacccatagcctcgatcattcagtgccctttgaaaatggcatgacacatccttgtaaaaagcagtagggctgatcacattcttcccgagtagtatcctcttcagtgctgcggtaaaatttcccaactcatcttttgttgtagtgaaaaatcggccaagcctgattaaacattgtggagtggttggtaagaagaagttgaactggtcatgcctcttacgctgattgattttccgatatctaag

SEQ ID NO: 113273 - DNA, 1963 bp, Zea Mays
aattctctgcgacgagtagctagtggatagcaattgatgccgggcgctttcatagtcagccatggtaatggtatcgcatcgtagccactaaagtaagggagggccccaggaaagaagcgctggttcgatgaagctgcataaataaagccagcacgcaaaccagcagcgttcagaggaaacccatttacgtatatgcccttgtcccggttcctttccccatccccaactccattatttgcttgatccttgagaagagagaggaagacgagagctagaagcgaaggagaaaagcagttcttcagctaggcaggagggcacaggaaggaggagatggcgtcaaagaggattcagaaggagctcaaggatctgcagaaggaccctcccacctcgtgcagtgcaggtcctgttggtgaagacatgttccactggcaggcaacaataatgggtccatctgatagcccatattctggtggagttttcctagttacaatccattttcctcctgattatcctttcaaaccaccaaaggtacagcaaacgagcatttagggaatgaccattcctttttttttgtgcattttgtcctttgtttgccattgaatttgtaaaataaacatatgcttaagctcatttacttcctaggaggattactctgacatatgcactagatatctgtgatgtttagtaccttgacaatgcatatgagctaatgtgtagtagccaatagcttatcggttagatgccatgcccactaagcgcacttgctgaaaacacttgagttatttttggatgaaacctttaaggccttgttcggttgtgcctggatcgaatgagattggggggattaaatcttcttctattcaattttgactaggaagagatttaatctcctccaatccccttcgatccagacgtaaccgaacaagccctaagggagtggattggagggatcaaatctctttctagtcaaaattgaataggagatttaatccctctgaatccccttcgatccccatacgaccgaacaagctctaagaagattcaagatcgtaacagtttgcgaaaggacctctagccgagttggttaggtggtctgagtagcactcatcaggtcctatggagcgaattttcgagctgtggttaaagaaattttctcgtctgttccatgccaaagcataggtttaaggcctggccctagtcgcggtcgtctcacatgggctacggtgccgttgtgtatgggtgagataggggtttggggggttttctcactgtccggtgcctgtcttacctgttaccctcgtaggtcgagtttttttagattgtcacagtttcatgtgcaatcttgaaacccttgatatctgaaatttacctgccttaccaaatccatatatccttaaaaatgtttgtcacattccgaaccatgtaacctagtatatgtatgcgatacgcaggtggcatttcgcactaaggtgttccatccaaacatcaacagcaacgggagcatttgcctcgacatcttgaaggaccagtggagtccggcactaaccatctccaaggtgctgctgtccatctgttccctgctgactgatccgaaccccgacgaccctttggtccccgagatagctcacatgtacaagacggaccggcacaagtacgagaacaccgcgaggacctggacccagaggtatgccatgtagtattttctctacctggcctttggggtcgctgctgcgttgtgttgccgggacctggacgtgcctccatgtattcgttctatccttcctgtataatgatgaaccgaattgggtttgcagtacagtgccgcgtgtggtgctgaatgctgctgtattgtgtcacttggaagctgtaattctcagtgtcaaaaaaaactggtacttggaaccattttgcgtcggatggcgctgcaggccagtccatgcttgcgtccttcttcccttcacca

SEQ ID NO: 113274 - DNA, 1036 bp, Zea Mays
aattctctgcgacgagtagctagtggatagcaattgatgccgggcgctttcatagtcagccatggtaatggtatcgcatcgtagccactaaagtaagggagggccccaggaaagaagcgctggttcgatgaagctgcataaataaagccagcacgcaaaccagcagcgttcagaggaaacccatttacgtatatgcccttgtcccggttcctttccccatccccaactccattatttgcttgatccttgagaagagagaggaagacgagagctagaagcgaaggagaaaagcagttcttcagctaggagggcacaggaaggaggagatggcgtcaaagaggattcagaaggagctcaaggatctgcagaaggaccctcccacctcgtgcagtgcaggtcctgttggtgaagacatgttccactggcaggcaacaataatgggtccatctgatagcccatattctggtggagttttcctagttacaatccattttcctcctgattatcctttcaaaccaccaaaggtggcatttcgcactaaggtgttccatccaaacatcaacagcaacgggagcatttgcctcgacatcttgaaggaccagtggagtccggcactaaccatctccaaggtgctgctgtccatctgttccctgctgactgatccgaaccccgacgaccctttggtccccgagatagctcacatgtacaagacggaccggcacaagtacgagaacaccgcgaggacctggacccagaggtatgccatgtagtattttctctacctggcctttggggtcgctgctgcgttgtgttgccgggacctggacgtgcctccatgtattcgttctatccttcctgtataatgatgaaccgaattgggtttgcagtacagtgccgcgtgtggtgctgaatgctgctgtattgtgtcacttggaagctgtaattctcagtgtcaaaaaaaactggtacttggaaccattttgcgtcggatggcgctgcaggccagtccatgcttgcgtccttcttcccttcacca

SEQ ID NO: 113275 - DNA, 1040 bp, Zea Mays
aattctctgcgacgagtagctagtggatagcaattgatgccgggcgctttcatagtcagccatggtaatggtatcgcatcgtagccactaaagtaagggagggccccaggaaagaagcgctggttcgatgaagctgcataaataaagccagcacgcaaaccagcagcgttcagaggaaacccatttacgtatatgcccttgtcccggttcctttccccatccccaactccattatttgcttgatccttgagaagagagaggaagacgagagctagaagcgaaggagaaaagcagttcttcagctaggcaggagggcacaggaaggaggagatggcgtcaaagaggattcagaaggagctcaaggatctgcagaaggaccctcccacctcgtgcagtgcaggtcctgttggtgaagacatgttccactggcaggcaacaataatgggtccatctgatagcccatattctggtggagttttcctagttacaatccattttcctcctgattatcctttcaaaccaccaaaggtggcatttcgcactaaggtgttccatccaaacatcaacagcaacgggagcatttgcctcgacatcttgaaggaccagtggagtccggcactaaccatctccaaggtgctgctgtccatctgttccctgctgactgatccgaaccccgacgaccctttggtccccgagatagctcacatgtacaagacggaccggcacaagtacgagaacaccgcgaggacctggacccagaggtatgccatgtagtattttctctacctggcctttggggtcgctgctgcgttgtgttgccgggacctggacgtgcctccatgtattcgttctatccttcctgtataatgatgaaccgaattgggtttgcagtacagtgccgcgtgtggtgctgaatgctgctgtattgtgtcacttggaagctgtaattctcagtgtcaaaaaaaactggtacttggaaccattttgcgtcggatggcgctgcaggccagtccatgcttgcgtccttcttcccttcacca

SEQ ID NO: 113276 - DNA, 818 bp, Zea Mays
taggaggggcgtctctgatatgccctgagcttagcttttcatggcaaaacctgattgcttgtttcttgtttctttttactggaaacaggagggcacaggaaggaggagatggcgtcaaagaggattcagaaggagctcaaggatctgcagaaggaccctcccacctcgtgcagtgcaggtcctgttggtgaagacatgttccactggcaggcaacaataatgggtccatctgatagcccatattctggtggagttttcctagttacaatccattttcctcctgattatcctttcaaaccaccaaaggtggcatttcgcactaaggtgttccatccaaacatcaacagcaacgggagcatttgcctcgacatcttgaaggaccagtggagtccggcactaaccatctccaaggtgctgctgtccatctgttccctgctgactgatccgaaccccgacgaccctttggtccccgagatagctcacatgtacaagacggaccggcacaagtacgagaacaccgcgaggacctggacccagaggtatgccatgtagtattttctctacctggcctttggggtcgctgctgcgttgtgttgccgggacctggacgtgcctccatgtattcgttctatccttcctgtataatgatgaaccgaattgggtttgcagtacagtgccgcgtgtggtgctgaatgctgctgtattgtgtcacttggaagctgtaattctcagtgtcaaaaaaaactggtacttggaaccattttgcgtcggatggcgctgcaggccagtccatgcttgcgtccttcttcccttcacca

SEQ ID NO: 113277 - DNA, 2431 bp, Zea Mays
agactaaaattagttgataaactgtttggcacaccgatcgaacaaagcttaattacggttctggccagcgccctgtcaccacagcggaatcgggcgtgggttgcaaccgaggctgtcgggtcgggggatcctataagacaggcgggtggacagcggtaaccacccccgcctagtgcactccactcctcaaaaacctccccaaacccccagaaactcccatcccgtcacctccatcctccacaccacctccactccaccgccgccgtttcccaacgaggtctcctcctcggcttcctccactccacgccacgtcgccacaccaccgttgccgcccccggccttgttcttcgcgctttttacttcctcggtgttccttcctaggaccagtaggaggagtagcactccgagagcgaagcttccccctcgccgaggagccaggagtcactcacggagctcgaaaaccgttagagatactgtagtatccccggcggggccgcggcagctgctgcgtcggtactacgagcgccgcaggggagaggacggggcgcggctttactgctgctgcctctgctttcagctactgtactaccgtggctgctgctgcctgctgctcctgccgcatttccgttgctctttttaaagagcccgtctttactgcgccactcccttccggccttcccctctgcgccccggtctgccttcctgctcccatcgcaccgcatccatccccctcccttggctctttattcccctaccgatcagcagagaaggacggaatccaccccggccggccgttccgatcacccctgcagcttcttttccttttgggggcaggggtgcagctcggcagggcctggtttgccgggggttcttgtgtcaaccaagtacttgctcggctctccttcctcgtgcgcttcaggcctacacggctagcagctagcttgggtgaagctcccggcagcgatctttgtcgtgctgcgtgccatgtcgcgcccgcgcacggtgcggatcttctgggacgatcctgacctgacggactcctccagcgaggaggagggctgcgggacccggagggtgggcaggatggtgcgggagctgccacccatggcgggtgcggcggcggctgctcccgtgccggaccagtgcaacgccggggacggcgaccgcgggaggagactcggcgttgctgctcccggtgcgtgcagcggggcgcggagacggctggccaagactggcccgagcaccaagttccgcggcgtccggaggcggccgtggggcaagttcgccgcggagatccgtgacccgtggcgcggcgtgcgcgtgtggctcggcaccttcgacaccgcggaggaggccgcccgcgtctacgacaccgccgccatccagctccgcggggccaacgccaccaccaacttctccgccgccgctaactccggctccagggccggccagcgggacccggcgacccccggctacgagtccggcacggagtcctcgccggcggcgtcgtcgccgacgtccgtgctccgcaaggtcccctccctgtcctccctcgccgaggacgactcctgcgcggccccgtgcgagccagccgcggggtgccgcagcctggccgtcctcgaggaggaggagctcggccagttcgtgccgttcgaggacgcgccggtctacgccaccagcggcttctgggacttcgagcccgacgcggggttcctctacgccgaaccgtcgtcgccggaggcgtcgtggaacgccgccgccgccgccgagccggcctcgtccgacgacgcgcccagctgggccgcgtcgccggtgcaggagaacgactacttccagggcctccgcgatctcttcccgctcaacccgcttcccgcgattttctgagcgggcgggcggggggacggacggagagcgccggaaccggaacgggcttcggtgattcgtccgccggatttgtttgttttttttggacgacgtcgagagtttggtgtgtcgtgtgcctgcgtgcactgtgtacttgtatcgatgagtttttgaggtgctggagtctacgagttattagtacgtgaatgttttttttaagtgccgtccaaatcgtggtgcctatataatgctggtgtacttgtacggctgtaccgtcccacatggtataccagtctgctctacactacatgggacgacggccttgatttggcaacgagcatgcgtgcattcccatcccaattcccttggctaatttgctattggggctgggccggctctgcggcgcggtccagagcccagactcgaggcgcggctgtgctagtgcagttgtggttgaaatggggaggccatgatgcggctgtgcataaagtctacctgttttggtggccggctgggtccgacgggaccgaccacggcgtacacgcgcgcgggagaccttgcgtcgtcg

SEQ ID NO: 113278 - DNA, 1308 bp, Zea Mays
cccacaccacacaccacacaccagcctagtcgagaagaaagaaacctccggtctctgggtcaggttctcgccgagcacgcgatttcacccgtcctttcggttcaggtaacctcctcccgcgtcttggtctggattctgattcccacctgctgctgttattggcttctgttcccccgagtttgtttgatctgataggttgctgtgtgctcgctgcgaccggtttgcgatctctgaccatgctttgctttcgttttcttttcttttcatctcgtcagatcttgtttcggattcgacaggcgagggtgggagttatagaggagagccggacatttcggcgcggtatgtctcttggctctctcagtttttatctggtgtttcttgtttccgcgattacgtgggctgcgctagtcaagaacttctgtaggaatcttggatggatcggttgtggcctgcaggttctgaggtggcagctgacatggatcgctgcagaagattaagattacaccagaaccatatatttctccgttccaagtcttagccttcgttgcatcttccgtgttcttcttcttcttcctgtctagatgtgtgattagccgtcagcccgttagtcgttaacttttttgttcatgcattattattatttttgaatattccttggctacctgggacccgcatgtttcttatcactggctgatgatttcatataagacaaaatacttcgcgctggtcctggtcgtcgttccccaatcagctcgcatatgagtacgtaactggtttatgcaacgaacaatactgggctcacgctcaaaacggccccatatggcatttcaaatagggttttttaatttgatgcccttagttttggtggtgtgctcatctatacccttagtcgtgttttttgctcggatgtgccaatatgcatctgaacttgtcatttttttacaacaacttgcgcagttatgctgcccaagagcaagagggtgggcgacgacgagaatggtagatggaaatggatgaagtgtttataatgtactcatccagattgcaatttagctcagtcagactctggttttgagatggccttgcagttgtaggcatagaagatgaacacgtccatgcttctcagaggctgcaatatctgtatgcgtacattataaacgtctctatatatccatctgcttatttggtagtgctgtccatgctaacacaagacagcagatatatgccactatatgctagtgcaatgaactcccaaagtgtctttcaaaagtaaccagtttatcatctgggaaagagtaccttagcctt

SEQ ID NO: 113279 - DNA, 5495 bp, Zea Mays
ctttttacccattcaggagcaaagctaatcaggagttgcaacataatatgctgtcaattatgatcaatttggtctgacgaagattttctgcaaacaaatagtaaagctaaagcttgtggatacaagaacttcagcatgacgaagaaacacaaaattagaaagtccaagcatcttttagagagcaaaaaggatgttgatgaaaatgtggagaacattttaagaatgatagaggaggagaacgaacagactgagaatgaacaagatgattctggaaatcccgtcaggaaatcaaagctatcttcccttgtgaagggcttccatgaggactatcaataccttcacaagcactacaaacagctaattagcaaactagaaactgctggccacagttcctcaggttcagattcatctgattcagatgtggaaggagacagattagagaataatgtaactacaccaaaagcagtgttgaatgaagaaaacggcctgaaccataagcttgatgaggttcatagcatggaagcagaaatcgagatgctaaaacaaagtacagaagaacacaccaaggaaatatctgatctgaaacagctactagaaaaagcaatcaaggataaagaagctacaaggggagagttcactttagaggttgcaaatttatcatctgagaatgaaaatctgaaatcattagttgaaactgcaaagagggaggaaggagacttgcttaacatcataaaatctaaggagaatgaggtcaaaacattgtctagtgagaagcaaactattgaagaggagagagataacctgaagatgtcagttgtagacatgaagaaggagatggaagatctgagcaatcagctcaaagatacagtggataaatgcagcgtcatggcatcagaactagagaagtccctgaaggctgagaaagaagtgcagaccttgtttgaagaaaaccagaacctgaagaaccataacttgatgctgtcggtggagcatgataacctgaaagcacttcatcataacttagatattgagtgctgtcaactgaaggcaaccattgcagaaaccaaagctgaaaatgaatcattgaccacagaaaatcattcagctgaaagaaaactccagcaattgagggtagaaatagatggcttgatggctgagaccacagtgataatgaacaatctggacaaggaacgtagtactgcagcagaagaaaaagaaaggctaacatcagaaaattctgtatacatgagtgagttagaggaggcacaatctaatgttaaggatctagaaaaggaactggagtcaacaaaaagtgttctcaataatcgtattgcggagctatgtaaggagaagaattctaccacatcagagatagaacggctagaggcttctttgatgaatcatcagaacgatctgtcacaacaacttgataggatttcagatatgcagaagactactgaaaacctggagctggcaaattctaacctgcataatgagattgtaaaagtacaaggacaaaagaatgaagctgttgcttctatagttaatctcgagagcatgttagaacagcaagtacaagagattgcaaatcttcaggaggccaacaaagaactcaaagcagcaaagactgatctacataatgaggttatgttacttcaacaggagaaaattgtagcactgactcagttacaagaatatgaggctcaaatcaagaatcttcgaattgacttggaacagcagtgcaaccaaatttcagttatgcagcaagcaaatgaagaaacacaggataaaaattctagcttgcacaagcaactggaagaaactaggattcatctgcaagaggagatcattgcattacaaggagagaaggaagaggccatcagtagcttacagcagtcaaatgattcactcaagaccctagaagtccagttagagcagcaaagagaacaaatttctgttctgcagcttgctcatgaagacttgcaaaatagcaattccaacctagagatgcaattggaagaggcgaaggttagtcaccatgctgaaattctagcattacaagatgaaaagaacaagattatttcagagttgcagcagtcagatggttgtatcaagaaccttagatttgagttggagcaaggaaaagagcaaacctcaatcttgcttcatgctaatgaagatatgaagaataacatttctgtcttggacaagcaattggaagaggtcaggagcagtttgcatgctgaaattgcagaagtacgtgcagagaaggagacagctctatcagagttacatatgtctcagacttccatcaggaacttagagagtgtggtagaaaagcaaactgagaacattttaactctagaaaaagctaatgataagttaaacaataaaatatgtatcttgacagagcaagtagaacaagccaaggctgagctgcataaggaggtagcggcaatacaagaagagaaggatacagcactaacacaattaagacagtcagagttttcaatacaagatcttgagaatgaggtgacacgactgaaagacgaactttcaattcagctggaaaaaaattccaccttggacaagcaatttgaagaattcaagagcaagctgcatgctgaaattttagacctacgcgcagagaaggacacatctctattggagttacagacatctcaggattctgtaaggaatcttgagattctggttgaaaagcaaactgagaacatttcaactctgcaccaagctaatgatgagttacagaagaacatctacactttgactgagcaatcacaacaagccaaggaggagatgcaggatgagttgaaggcaatacaagaagagaaggatacagtgctaacacaactgaagcagtcagagacttcagtacaaaatctagaggatgaggtgacacgactgaaagaggaactttccgtccagctagaaaacaattccaccttggacaagcagtttgcagaagctaggagcaatctgcatgctgaaatttcagacctacgtgcagagaagggcacatctctactggagttacagatgtctcaggcttctgtcaggaatcttgagattttggtcggaaagcaaactgagaacatttcaactctacagcaagctaatgaagagttacaaaagaacatctacactttgactgagcaatcacaacaggtcaaggtggagatgcaaagtgatttgaaggcaatacaagaagagaagaatgcggtgctatcacaactgaagcagtcagaaacttcagtacaaaatcttgagaatgaggtgatacgactgaaagaggagctttctgtccagctagaaaacaattccaccttggacaagcagtttgaagaagccaggagcaatctgcatgctgaaatttcagagctacgtgcagataagaacacatctctattgaaattacagacgtctcaggattctgtcaggaatcttgagattgtggttgaaaagcaaactgagaacatttcaactctacagcaagctaatgatgagttacagaagaacatctacactttgacggagcaatcacaacgagacaaggcggagatgcaggatgagttgaaggcaatacaagaagataaggatgcagtgctaacacaactgaagcagtcagagacttcagtacaaaatctagaggatgagttgacacgactgaaagaggagctttccgtccagctagaaaacaattccaccttggacaagcagtttgcagaagccaggagcaatctgcatgctgaaatttcagacctacatacagagaaggacacatctctacgggaattacagacgtctcaggcttgtgtcaggaatcttgagattgtggttgaaaagcaaactgagaacatttcaactctacagcaagctaatgatgaattacagaagaatgtctatactttgactgagcaatcacagcaagccaaggtggagatgcaggatgagttgaagtcaatacaagaagagaaggatgcagcgctaacacaactgaagctgtcagagacttcagtacaaaatcttgagaatgaggtgacacgactgaaatgggagttctccgtccagctagaaaacaattccaccttggacaagcagttggaggaggcaatgttgaaagtgtctagcctacatgagaatcttgagaaggcccaagctgaagcagcttgtcaacttgatggcatgagtacaaaaaccaaagatctagaggagacaatcaatcaattgtcttctcaaaagactaagttggagaaggatgtgaaaattatgattgaagcatgcacagaaaacatgtcatgtttggcaggatttgaagatagagttacacaaaaaatttcagatcaggaggcaggactgaaggttctccaccagagccttggaggggctgttggtagctgtcagaggcttcagtatgcatatgatgaggtgtccacaagggcatcacatcttgagatacttaagaggagtcagatggagcagattgatcagctagagcagaaaaacacagaaactgtggagaaacatcggcttctggaagaggaaaagttatctgcaaataaggagaatattaagctacaaaagcatgtccaagaccttgaagttcagctccagctagcaaagcagaagcttaaagttactgaggcagaaagcaaatgcaaagaagagagatatgaagcgtcagtggaagcactgcgggcagagatctgtcatcttgaacaattagtacagcagttttcagggagagtcagcttgctggaaggaactctcatgcaggttaaaggacatgctgagtcagtggtctgtaaatgggctgacaaattggatgagctagaaacaatctgcagtcagaattttgtgctcttcattgaccgctcatctgcatgtagtgacgagcttaaaatcctgaggaagaaggtacatgatcatcttaatgaacagaaggaacttgccaatgcgaacaacgagctggctattaggttcaaagagaaagaaatggtggtgtcagaaatggtgaagagtgctgctgaggcacagacaaagatgctccagctccagaagacggtggacgagaaagaagacgagctagcagctagagtgcaggagaagagagaagccatcaagcaactgagcgacaccattgtttaccacaagaactatagcgatgacctggtgcgctacatccgcagtcagagtcgccctcgcctcccgttctgcctttaaatctgaaagtcaatgaaagatgtaaaggcttaatctagctgtgattttttttttttgcagtaaggagaccattgcaatttttcttatgtatcatatatagggctcgaatactttctggaggtagccatatattcagtggcttgtgtattctattcgctactaaggggactgctgtagtaattgatttattcgttttgccttatcttttttatcggatcggtgaatatactgcctgagactgcgaaggaaggctc

SEQ ID NO: 113280 - DNA, 1941 bp, Zea Mays
gtcacctaccaaccagtgcagccgccaagacaactcgtatgaacagctagtaccaccactgggcactgaggtgaggagtgagcgagcccactcacctgccagcaacagggagatacgtacatatacaacgtacgtaccactgccgagtgagcttgccagctgcgatagatggagggcgtgccggacgagaagtgcgccctggtggcggagctggtgcaggtgctggagatggcgaggcatctcgagacgcgcatggcggtcctgcagcagcagggcggcggggagcaccagcagtgccgggcgctgctgagcaccatgcgcgcctccatcgacagggccgtgcacctggccgtgtcctgccgtgccgaggcggcgcgtccggagtcgccgccgtcgggcggggatggcagcccgcgcagcggcagcggcgggtccgaccaggccggcgaggtccgcggccgtggcaatgcgaccggccagtgcaagaagaggaaggcgctgcccaagtcgagcatccaggtgagggtgagcaccgtgcaggacgtgagccccctggacgacggcctcagctggaggaagtacggccagaaggacatcctcggcgccaagtacccaagagcctacttccggtgcacgcacaggcacacgcagagctgccaggcgagcaagcaggtgcagcgcacggacggcgacccgctgctcttcgacgttgtgtaccacggcacccacacgtgcgcccaggccgccgccgccgccgcgcaccaccacggcaacaaccatccggccacggaccaggccacctccccggggtgcgtcgtagctgggcccgccgcgctgccgttctcgctccggccagcagcctccaacaagccgacgggcgccgcagccgacgacggcgcgaccagcagccgtttcatcgcgaccggctgtaccgtcgtcaccgcgtctcctttcgtgtacccggcgacgccagactgccagctggttagcggcggcggcggcggcggctacgcggtgggtggtggtggcggcgtggccggtgtcccgaacgtgcctgacgtggagctcgcctccacgacaaactcccctatggctatgggggagatggatttcatgttcccgctggacgccgccgatttcttggagctggagaacccggccagctatttctaaacgacacaaaccacgtgcctgcatctatactagtctagctagccaagaaataccgataggtaaacacgacaaggcgaaacgagcacctctctcactgccatccctcactggtacggtgtataatctccccttgcaagctggaagtatgcaagggtagatacggctatgacatgtcacgccacgcgtcatcctagttctgaaacctttctccaacatatgtatagttgcccgctctcttgcatatatatacttcgactttacatcttcttgttagctacaatatgcaccggcctaatggagaattcttccatgccacatgcaccggcctattggagatccaagcacgtgacttaggtagtgtttggttgaggagccaagtagaacggagccgttctatctctgattctaggaacgaagccgctctgttctgtgtttggtaatctggaacagagcgactctgttttttgtttggttgcagagtgaacggaacggagcgtgactgtgagagcgggatgggaacagagcggctccgtccggttgattttttagagcggaatggttccggatctgaggagaatatttcctaattggagccattccgttctagttactttgtaaccaaacagcaacaaaactgggacagaacggatccgttctacttggctcttcaaccaaacactaccttaatgttgaaatatgatccgaattctaacacaagtaatgcatggatatcaggaagatctatgattcgggttatgccaattagca

SEQ ID NO: 113281 - DNA, 1161 bp, Zea Mays
gtgcagccgccaagacaactcgtatgaacagctagtaccaccactgggcactgaggtgaggagtgagcgagcccactcacctgccagcaacagggagatacgtacatatacaacgtacgtaccactgccgagtgagcttgccagctgcgatagatggagggcgtgccggacgagaagtgcgccctggtggcggagctggtgcaggtgctggagatggcgaggcatctcgagacgcgcatggcggtcctgcagcagcagggcggcggggagcaccagcagtgccgggcgctgctgagcaccatgcgcgcctccatcgacagggccgtgcacctggccgtgtcctgccgtgccgaggcggcgcgtccggagtcgccgccgtcgggcggggatggcagcccgcgcagcggcagcggcgggtccgaccaggccggcgaggtccgcggccgtggcaatgcgaccggccagtgcaagaagaggaaggcgctgcccaagtcgagcatccaggtgagggtgagcaccgtgcaggacgtgagccccctggacgacggcctcagctggaggaagtacggccagaaggacatcctcggcgccaagtacccaagagcctacttccggtgcacgcacaggcacacgcagagctgccaggcgagcaagcaggtgcagcgcacggacggcgacccgctgctcttcgacgttgtgtaccacggcacccacacgtgcgcccaggccgccgccgccgccgcgcaccaccacggcaacaaccatccggccacggaccaggccacctccccggggtgcgtcgtagctgggcccgccgcgctgccgttctcgctccggccagcagcctccaacaagccgacgggcgccgcagccgacgacggcgcgaccagcagccgtttcatcgcgaccggctgtaccgtcgtcaccgcgtctcctttcgtgtacccggcgacgccagactgccagctggttagcggcggcggcggcggcggctacgcggtgggtggtggtggcggcgtggccggtgtcccgaacgtgcctgacgtggagctcgcctccacgacaaactcccctatggctatgggggagatggatttcatgttcccgctggacgccgccgatttcttggagctggagaacccggccagctatttctaaacg

SEQ ID NO: 113282 - DNA, 339 bp, Zea Mays
atggtcgatcttgattcgccaccaaagggtggcgtccctttgggggcagatgggtctaccactattgcgtcaatccctcctgcctcaacagatgccgttgtcagcaatgagtctgaaaagggggctatcgcgtctgcctctgtcaccgatggattgaacaaggaactcagaggccctgaagaagaggagccaggggaagtctaccttcctccgttgttagagagaggtatggggttgtcttaccgagaaggaggcctagcatcgggaggcattgaagatgttgaagatggctcatcgtgttgccggcgacgctcgggacgcagcaataaccgctcttag

SEQ ID NO: 113283 - DNA, 849 bp, Zea Mays
acactcgttacaaattgattgtacggctagaaatacataataatgtacagggaaagaaagaatacagcgttagggcttgttcggttagctctcaatccatgtggattgagtgagattggatgggtttaaatcacaagtaagtcaaacttcttcatatttttttccaatctcatccaatccataggtaacgggattaaccgaacaaggccttatataacggcggacggagtctcctcaggtgtcaatcattggatttgctctagtgaagagcagagccgacccgttaacaccacgaagaatcatcaacctcgcatcaatgtatgtcccacaaacaatctttgacaaatcgaacatttccggcggggtttgtgtacggatctctttcagcgccttttgtgcagaattaactgtcatagtcgaggtgcagcttatcgatacgtggatttcatccatagcaatgtttactgcagggagactagatggcagctcctttatttgcgagaattttctccatttattaccatgaagatatctcatagaagatgtgaccatatcctctttactgtcatgttcgttaatataaatcctaccagcagctatccttgctgatgcggtgacagacaaaactccctcactgccagatttgtcgtgaggccaattgggttctggcataattctgaaaccaacatctgaggtcagagagaagacttgatcgactgactctgaactaactgtaaggtacacagcactgatgagaactctaggggaaggctgacgaagtgttaggccaatgtgtcgtccagtgcagtacaagaggcgccaacgaccaggtaggaggtgaagccaatt

SEQ ID NO: 113284 - DNA, 318 bp, Zea Mays
atgttgcctctaaggttgggatccaatctgagagttgcaaccagtgacgcagggaatgactcccatgatacccatgaaccaatactaacgggacatcttcctcctccacggcattgcacggagcaatgtaaccatggacctgaagtgcgtaggagtggtacatcatttggcgacgagccagcttcttcagcacctcgagagcgcgacgccccctgcgcttcgcctgcaaactcttcagctgccgcaggaccaccgttgacccatacagctcgctgctcggatcgcacaccgtggcctcgaagatcatctcatccgact

SEQ ID NO: 113285 - DNA, 4373 bp, Zea Mays
gaaaaacaaccaacattttcctttcccattttctccacccacacgatctcgtcgtctcccatcccggcggccgccgcctccccctccccctccccctcccctccgctccctcaccctaccaaaaccctagccgctgaaccccaagcgccctcgcgctcgcctctccccgccgccacggcagcctagatccccgcgcgccccgcgtcgccagcttcggagcttccgcatctgggttggtggtgttctgttagggttggcccaccatgcctcggagttcgcgtcacaggtcgcaccggtcccacaggcggggagggtccgctgaccggtcggagtcagagggcgaggagtcggctccggcctcgggcgcgcgggaggaggccgcggcggcggctagggtttccaaagatgccgagcccgagaggcgtcgttcgtcctcggggaaggagcccgtgagatcggggaacgggtacccggagcacgggaaaaagaggaaggagagggttgaggatgccgtggtggatgtggtcagcgaccggtggaatagtggcgtctgcgacgatcacctggtcgacaagaggtccaagagtgagacctttgggcatgctgaaatggagaaactgcccgacaagtccaggggatcgggggatgagtccaagaggtcaagcagacgggcgatgattgtggatgacagggccgaggaggttgcgtccaagagtgactctgggaagcggaggtcagagaaagagaaggatgggaggaaggagagtgctgggcattataaggatgacagagatagggagagggagaaggaaagggaaagggacagggaaagggaaaaagaatgggagcggcagagggagcgagatatgggaaggagtagggatagagagcgtgagaaggaaagagaacgggagaaggagagggagagggagagagaacgggaacaggaacaggaacacgagcgtgagaaagataaggatcgagagcgggatagggaaagggagagggagcgtgataggcagaaggaccgtgagagggacaagaaagattatgattccaagcatgagaggtatgaggatggcggtagcaggaagagtggctcaaagacgagtagggcggaagaggatgcctacttgtataggagagatacagatgtcaatgaaatttcagcaaaagggaagtacaataatcctgatatgcaagctgacaaacacagccgaagaaaagatgattctgaagatacagataagtggcccactgacaatagagacagcgatgacagaaagaccctgtccagatatgaacatggtaaatctaggagttctaaggagcaaaggtttgatgatgacaagtataaggaaaagtacaaggacgaatatggaagggataaaaggcaacatgatgacaagttttctgatgagcgagtggctcgtagtcatgaaagtgatagagctaattataagagtgctaaagatgggcacaaaagctcagagagccattacagaaaggatgcagttcaagatgatcattatgaggattatggcaacaggtataaagaaagtagagggaaaaaacgacctcctgaggaaaatgacgaccaatacgatttaaagcctccaaacacacgtgatcaacgtgtgcatttggaaaaatcttcaggcagtgggcgtctggattctttgattgagagagcaagacctgatcgtagttgtagtccaagtaaaatccactcaagaagttcacctagcacaagttcttatcatgataaagatcaaaaccggcatggatctaaagtggtagatcatggaaagagagaaatgccatatgatgagagaaatagtcgaccaagaacatcttctgctagagaaaggacacctgcttctagacttcgtgacagggatgcagaaaattggtcttctgaaaggcttaaacagaaggatgaccagccttgtgatgtagcattggaaattcctacatcatcacactatgatcgcacacctaggaaagataagcatacttcaccaaaacaactgtctgaaaaatctccctcttcaggtgatcagaggttttcaggcaggcctagtggtgggcgcagtctagataataaaggagaaagaaacagccttacgaaatacagagatagagatggcgacctagcccaagaacgatcacatcatcaagatcgaacaccagctaaagttccattcagagagctaacaccatcaaattcatccataagtagaagttgtcatttttcaggcagttcaccaaatcatcctctgccaccttctgcaaggaatagcgactcttccttccttagtctgcatgatgatgaccgtaggcctcaaaatggagataggagattccatggtcatcaaaagaggaatgacatgaattcggttcgtggacatggacatgcctggaacaatccgccaaactgggcttctccagtttctaatggatttgcccccatccaacatggtggtcctccttgttttcatccgcctgtccatcagtttcgaggcccacctatgtttaaccttagacctcaaatgaagttaaaccagcctggagtttcatatcccatgcatgatgctgtcgataggttttcaacccacatgcacccatttgggtggcctaatcatctggatgaatcatgcccacctcatatgcaagtttggaatggaggcagtagtgtgtttccgggtgaaccctatatttacggtagacaagagtgggatcagaatagacctcatggtggcagcagagggtgggagctgactggtgatatatccaagggaccaaatgatgtgccggatgctgaacttctgatagctaagaaggatccttactctgcaataactgctgtttctgattctggtggacaacataatcttcaaccccaggctgagcaaaaggagattggacacttgactgctgaaaaatttgaaacaaaggatgattctaaaagttcaaaaagtttggaatctcttcaaggagtacaacatgtgacttctatgctgacaaagaatggtgcggtcttttgtaaagactatctagccagaatcaatgtttcacatgaccttgttgagtctgagttgtacaaaaggtgtatatccttgctgggagacttgggcgtaacaaaagcctctcatttggttaggaatggaattcaggataacgaaaatattgaaaaaatgtctacaaaatatggacacctcaaccctttcagttcacgttacctcaagagtgacagtactatctttcagagggctttggcccttcgtaacaaccagactcgaaagggtttaattattgtctccgcatctgtaaaaatggaagcgaacatggatgtactagaagatgaccatggcaaggaaatgcttgaacaagtggtgagcaatcctgctctgcaacgtcacactgaggtcatggaggaaggatcactgtcaaaacaggaacttggtgatggcatagaggggactattccagcaactataggatctgggggtctggatgcacctccagaaattccccaacctgaggtggtggtggcaacaacagcaatcacacagtttaacaaggacatggaggatgtgttacctccagcaattgaggatggtgcactacaagcaaccctcgaacatgctgttggcatactggaagttacacctggtgatggcttggggaatgttgcaccttcttcaggtgatgacatggagattatgccctctgctatgacagaacctcgactaggcaaagaaactgctcctgttgctagccctcctgacagtcaagagaagccatccatcatgcatgattctgagacaggtatggaggttgataaagttatcgatgatattcatggggatggtagggtgagctctattcttggcaccaaacttgatgttgctgcaagtgatggggattctgaagctttgttggtggaaagtagggtaaatttaagtcggatacctaattccccagaaagtacacattgaacaccttttattccattttaatttctttttgtctgagggtcttctgccctcagcctagcccgagttgccatattttgtttacatctgggcgttctcttatagtttaatgttcgcagtgagataggtgtccttatgggggacttggacgtacccgtggaatgcaggacctggtggctggtgcaatggcacgcctagtagtccgtgcgcatccagctgcgtttcttgttttctgcttggacgcagtagtgcccccttattggcatgaatgtctcgctgcagcttttgctaaggtcgccccatagctcggccaccctttttcatgaaacatttttctgggatgggattgttagggaaaaaatgagtgtcccaaat

SEQ ID NO: 113286 - DNA, 2653 bp, Zea Mays
acttccggtcaaatttccagcactagtcccatggtgcgatcctagtctggcgcccacggggtagttagtaggtaagaaacgtacccactactggcagaagggtccgtagcaagtagcaaccctccggttgtttaaattcgctcgcatactctcttcctgtgtctgacatctctcttcctccttccacaagcgccgccgcagccccttctcgatctttgaggcaaagctacgactccaccaccgctggcatggcgttcgagaagatcaaggtctccaacccaatcgtcgagatggacggtgatgagatgaccagagtattctggcagtctatcaaggacaagcttatctttccatttctggacctggacatcaagtactatgacttggggatactgcaccgtgacgcaactgatgacaaggtcacagtggaggctgcagaggctactctcaagtacaatgtggccattaagtgtgcgaccattactccagatgaaactagggttaaggagttcaatttgaagcacatgtggaagagcccaaatggcacaattaggaacattataaatggtactgtgttcagagaaccaattatatgcaaaaacgttccaaggcttgttccaggatggacgaagcccatctgcattggaaggcatgccttcggtgatcagtaccgagctactgatgcagttctgaaggggcctgggaagctgaagctagtttttgagggaaaagaagaacagattgatctggaggtgttcaacttcactggtgctggaggagttgccttgtctatgtacaacactgatgagtcaattcgagcttttgccgcagcttctatgacaactgcatatgagaagaaatggccgctctaccttagcaccaaaaacacaatcctgaagaaatatgatggcaggtttaaggacattttccaggaggtctatgaagctgactggaaatccaaatttgaggctgctggaatatggtatgagcatcgtcttattgatgacatggttgcatatgcacttaagagtgaaggaggctacgtgtgggcttgcaagaattacgatggagatgtgcagagtgatttcttagcacaaggttttggctctttgggtttgatgacatcagtgttggtgtgccctgatgggaaaaccattgaagctgaagcagcccatggcacggttacccgccatttccgtgttcaccagaaaggaggtgaaaccagtacgaacagcattgcttcaatctttgcatggacaagggggcttgcacatagggcaaagctcgacgacaatgcgaggctcctcgacttcgctctcaaactcgaggccgcttgcgttggagctgtggagtctgggaagatgactaaagatctcgcacttcttgttcatggatcttccaaagtcacgagaagccattacctgaacacagaagagttcatcgatgcagtcgctactgagcttcgatcaagattgggagccaattgagctgacaggaaactctgcgttgcaacttgaatgcttcatcaccgatcggctctagtcatgcttccgtgattaagtgaatgtgcgccgccgcaatttcgagccaagctaattaaagatgatgggatcgcatcgcatgagcgttcaaaataaaggaatatgtagaacaatggtcgcagatgattaaattactcatattatgttcagtcattccctcagtattttctagcttgttttctcctctgaattgcgtgtccattctgtggttcacacaaatcaccgtcgggttgcctgcgctccgttttcgtagacttcggaggcagtagggtagctgaacaactcagacgaccaggtggttcatgacttcatgtcatgtttatcctgaccgaagaacccaaacccaagccagcaacggcgtctcttctgttctgttctctggacagcggacacgagtccgccaccaattccgcgcgaaagatagtcccgcccatgtgtccccgggacgccgctcccgtcgcaccacgtccccaggccacgcggcgcctcacgcgcgggggggtacccacgaggccacgacgcagctcagctgtatatatacacacacgacttgcttcccatctctgcactgcagcgcaagcgaaatcgccgaaggaaaggagaccccgagacgagcaaggcggcgagggagggcaaagaccacgtaccagcgcgcacgcacaatgtcgggagcacagggcgcgcacccggtcggccagacgacgccgacgacgtacgagtcggtgggcggcggggagaaccgcacgcgcacggacctgcggtcgcgggaggaccagggcgccatccagatcgagaaggtgcaggacaaggtcgacgatgccgcggggcgtggggtagaccacagcaccttcggcgccaacaaggagggccgcgacgacaaggccgatgccggggcaaccggcaccggcacaggcgcgtgattttgtgcccttccgcagtgtacctgatcgtgtgtgtacgatagctttgtgtccgctgcttggctgctctgtatccgcgcgcgtggagtgtgtgaaacctttctgtaaaaaatgcacatgttagattgaaataaaacaaggaccgactggtctgaatcccacttggtactcccccaattgggaaaataataa

SEQ ID NO: 113287 - DNA, 222 bp, Zea Mays
agatcagcaggaatctatggaaagcagtggccaggaaggaaattagaaaaatggacagtaagggaagggaaggaaaggagagattgattaagtgatggattagtgattaattagtgttaccatgtttaggcttgcctaaaataaaggcttcaggacagcaggccgatggctatatatgcggcacagggagacaggaataaagggcagcaaacaagttatttc

SEQ ID NO: 113288 - DNA, 1642 bp, Zea Mays
cttgtttccagttaccaccactccacttctaggttccagccgtgccggcgccgccgcttgcgctactctgcgcgccctcgccgctgcttgcttgctcgcaacttagaaggtgacgccgcctgcccagtgcgagcacgcctccacttgcactgcgggctgcggccctgccgaatctggaaggtgtcgagaagaaatagatccttgcactccatgccgctatgatcagcgctggccgcagcaggcggcgggggcgggcaccggcgtccctgcccacgaccacgaccgctgcttcccgccggaccgagcactccatctcctgctgttattgtgactgcaagatatattccttaaacgacgccctcttcaatttggggtggaagtatgctagatatatgagagcatggttttctgtaggtgtttatctatctctcattgctttagtcagtatatccttgatgctattgtgggagtcaattggtgtgttttattttaggagtggattccttagtgcctggttacagaacctactgacttcaggtctcaacatatctattgtagacaccacaatcattataatgtcaacaatcctgtctattgtttttcatgagtttggacatgccattgcagctgcaagaactgatgattggatcaagattctgaaccaaggtactacagcgaaatctagggatcctgaattccttgaaggctctcatagatatgttgccactagttctaccaagggttattgcgtgcccgattcatggatagatgcaagcaaaaatctctggcagataagagacaagctgccttgcccagatgaactgatagccttcgaaaaagttatctgtaacgtctcaaccattttgacagagaagactagcataggtagtgaccagaaggaagttgagggaaaatattgtttgattgcgaaagatgtagtaaagcttagaagatgtggaaacggatggcacatgactgaagatgatgaaagtagctgtgcatgttttgaggatgagcactgtttggtacctgttctgaacccaggcttttcatggattgaggtctcctatgccaggccatactctttgagatgtttacaaaaaggaggaaatttgttatcatcacatactgcaaatagtaactttggacagagtccttgtgaaggatcttttgtttatgtgggtgatctgtcatcagcagcacgttcggttaggttatcccgctaccgacctcgatgggcacttctacttttcattgcagacatcccatatatcttggaaaatggtttaagtagcttgcttcatgcatctgcagcattggctgtaatcaattgcctaccggtgtattttctggatggtgaagcgattctggagactaccttaagctatgtagcttggtttaccccaagactgcaacgcagaattctaaaagtatgcagcgtggtgtggacgggtttattagtcattactttctcaagtatttgttattccacagtgctacattatggcgtatagcaaataacccatgtaattttgtcttgaacaaagagaagatcattttaatggaacatgccaactgtactctgtccattgtaaattataagttgttttgacttttatatatacataacttttgttaggct

SEQ ID NO: 113289 - DNA, 84 bp, Zea Mays
gttccgattacgtctcgctccgatctaaaaatcttggctcaaaatatctgtgattctctgaaaaaaagagaagaaataaaaaaa

SEQ ID NO: 113290 - DNA, 1017 bp, Zea Mays
atggccggagctccactgcaccgcgcccagctccctctgctcgggttcaagctcctgcgcacttctcctgctccagctcgccatggcgcgccagccctcaacgccgagcacctcccagccgaggtccttttcctgcgtgcgcagtctctttcctcccccaagcgccctcgcttcctcccatggctgctgcgcgcgctcggctgcagaccgccggtcgagctccctccaacagcgccgtcgttctgcgcactggccttgccaatttctgtccatgcctccacactctgcttcgaccagacatcacgcctgtcagtctgtgatcgccatggctacagcgttactctggtcgtcatggagactcctctagcgccgtgcagcagtgcgcccttaccaaactcgtggtcacggtctcgccttgctgccgcagccgcgcctactgccgcgcacgacctgctcccttgtgcgcgctctgcttccttgccgagctcgtccctgcgcgccgaggtcgcgcgcagctctcccagctcgttggtgttcccagctcgccctgtctgcgcgccgtgctcccttgtcgtggctttctgcttcctcgtcgtgcgtgtagtattccgttgttcctgcgcgtgcttcggcgaaggtccctgttcaattctcctctatcgtgttgtcgtgcgcgcgaaactgctcgcagtcgacatcgtgtccgtaacacgcgcgctggacacggtgaaacgttgcgtgtgcttgtgtccgagcccgctcggccgcaacctcactttgctctccgcatcgctgctcgccgagtctttccccagtccgcgatctttccctgcccgtcattgttgtcattcggtcacccacctcgatgccggtccctatgtgttgtctccaacttgtgttcgcgccgacaaaagcatcctaagaagatgtggagaagcaagcccgtggttgatgccccaagtgctcggcgaaaggccagaacaagaatcatcgttgtttatgcggagttctacttaa

SEQ ID NO: 113291 - DNA, 748 bp, Zea Mays
ggcgagatgctccgcctgcgggcgttccggccgacgagcgacaaagtcgtgaagatccagctccaccctactcacccctggctcgtcaccgccgacgccaacgaccgcgtctccgtctgggactgggagcaccgccaggtgatctatgagctgaaggcaggtggcgttgatgagcgtcgcttggttggagcgaagcttgagaaacttgctgagggagatgattcaaaaggaaagcccaccgaggctattcgagggggaagtgtaaagcaggtttccttttatgatgatgatgttcgcttttggcaacattggcgtaattgctctgctgctgctgaggccccaactgcagtcagtcagcagtcttccacgttcattgcacctgcaccttcgacacgaggaaggcactttgttgtcatttgttgtgagaacaaagtcatatttttggacttggtgactatgcggggccgtgatgttcctaaacaggagcttgacaataggtcacttctttgtatggaattcctctctaggacatcttctagcgatgctcctcttgttgcctttgggtcatctgatggtgtcatcagggtcctttcgatgttgacatggaagcttgtgcgtaggtatacgggtggacataaaggagcaatagcttgcttaatgacgtacatgtctgcagctggtgaggtacatttagtttctggtggcagcgatggcctgctgatattatggagtgctgatcatatccatg

SEQ ID NO: 113292 - DNA, 97 bp, Zea Mays
gctgcttatgcttaatgcctttaatctgctttgcatttactgtagtgctgttggaaaatttctgagttctggttccacgatttgaagtctgtttcct

SEQ ID NO: 113293 - DNA, 881 bp, Zea Mays
gatcgattgatggtcgtaatgaaccagttattggattgcatggtggtgctttacttggtgtcacataccgtacatctcgtagaatcagtcctttgacagcaacagctatatcaactgttcaatcgatgcccttatcaggttttggtggaagtggatcatcttttgcatctgatgatccattttcctctaaggaagggcctccacaaaatttccaactgtacagctgggagacctatcagcctgttagtggcctacttgcacaacctgagtggactgtgtgggaccaaactgttgagtattgtgcatttgcttatcagcagtatatagtgatttcttccttgcggccccaatttaggtaccttggagatgtttcaattccctttgcaactggtgccgtttggcatcgaaggcagttatttgtgtctacaccaacaacaattgagtgtgtctttgttgatgctggagtggcagcgattgacattgaaacaaaaaggataaaacaagaaatgaaagcaagagaagctcagagtcgggcagctgaagagcatggagatttggctcttatcactgttgaagctccccaggttactgtgagtgaaaaagtatcattgaggccaccaatgttgcaggttgttcgtttagcctcctttcagtacgctccatcgataccaccatttatagtaccaaagcaatccaagttcgatggagatgattcagtgtttcagaaagaactggatgacagaaggtatgctgaagttgctgtcgctggaggaggtgtgtctgttgcagtaactcgcttccctcctgaacagaagagacctatcggacctcttgttgtggttggtgtaagagatggagttctctggcttgttgacaggtaa

SEQ ID NO: 113294 - DNA, 947 bp, Zea Mays
ccatagaaataaaaacactgaactttctgtccattagtataagttcggcagcagaaagtcttctgtctagtgtaatggctatgatatttcaggttattggattgcatggtggtgctttacttggtgtcacataccgtacatctcgtagaatcagtcctttgacagcaacagctatatcaactgttcaatcgatgcccttatcaggttttggtggaagtggatcatcttttgcatctgatgatccattttcctctaaggaagggcctccacaaaatttccaactgtacagctgggagacctatcagcctgttagtggcctacttgcacaacctgagtggactgtgtgggaccaaactgttgagtattgtgcatttgcttatcagcagtatatagtgatttcttccttgcggccccaatttaggtaccttggagatgtttcaattccctttgcaactggtgccgtttggcatcgaaggcagttatttgtgtctacaccaacaacaattgagtgtgtctttgttgatgctggagtggcagcgattgacattgaaacaaaaaggataaaacaagaaatgaaagcaagagaagctcagagtcgggcagctgaagagcatggagatttggctcttatcactgttgaagctccccaggttactgtgagtgaaaaagtatcattgaggccaccaatgttgcaggttgttcgtttagcctcctttcagtacgctccatcgataccaccatttatagtaccaaagcaatccaagttcgatggagatgattcagtgtttcagaaagaactggatgacagaaggtatgctgaagttgctgtcgctggaggaggtgtgtctgttgcagtaactcgcttccctcctgaacagaagagacctatcggacctcttgttgtggttggtgtaagagatggagttctctggcttgttgacaggtaa

SEQ ID NO: 113295 - DNA, 1215 bp, Zea Mays
ataaccactaacgccagtgtacatgcccagggtctggtaagcaatttgattacagctggccatggacgcgaagcagcatttgctgccgcagttctgggagataatgccctaatggagaaagcatggcaggacacaggaatgttagctgaggctgttttacatgctcaggcccatggtcgtccatcattaaggaacttggttataacatggaacaagatgctacaaaaggaactggatcacacaccgactgtaaaaaccgatgccgccgccgcattcttggcttctctcgaggatccaaagctcacaagcttgggggaaactgagaaaaagcctcccatcgaaatacttcctcctgggatgcctcccctatctgcacctccgatcgtgattaaaaaggctggagcaaaacctggtctccctaatgcagcaaaggcgtcaaatgggcctataggtgctcctatggctcaaggtgctcccatggctcatggtactcctgggccacaaggagtccccatgaatcaagttactccatcacagggcagtcatgacgaggcaaggccatcagatgctacagtggctgatgcagctgccgcggttgcagaaggtacagcagctcccccggctgcagaaggtacatcagctcctccggctgcagaaggtacagcaactcccagcagtgaggaagctaaagcagcacctggtaatgaggaaggcacatcaaatccaatcaacgaggaagccacagcagctgcagtttcagttgctgcaggcagccctgactctgctgctgctcctgcagctgatactagctcggacgcacctgctgttaatcccacggaagataccgtctctgccccctcaacggaggcaccaccagagttgacggataagccatcttcagcagaggcatcgttgccacctccacccagtgtttctggtgtataaatatttctgattctcttttagcagtgtgccgaattttctgtattctggttcgttcgttccaccacgcgcgctggtataggtatttgttgcctgtggtatacagatttcgcagacgccaggcagtatgtgagtagctttgtacatctgctgtctgcgtctcacgagaacgtgctaccgttgtgtcactgacactgtgtggccatatcttatgttgttggtgaccacagttcaattcttgcttgatgagttgatcgagctgcaccaccaata

SEQ ID NO: 113296 - DNA, 273 bp, Zea Mays
atgtcgacgagaggcggcgaggccgcgaggcaggcgacggtgaagatcatcgagacggtgcacgtggaggcggaccggtacagcttcaagtccatcgtccagaggctcacggggagagacgcggtggtcggcggcggcggcgactactcggaaggggcgcccgaccgtggatcatatgaagaggcggcggcgcagcgggctgctgggtttacgagcaagcaagcgagcaggcccttcgctgatcgccacgcgtgtaaagacgagagctgttga

SEQ ID NO: 113297 - DNA, 1173 bp, Zea Mays
atggttctgtgcttcaagctcctcttcggccccacggccgccatcttcctgtcggcggtcgtgatcctctcctgcttcaccaacgtgccgcagctgcagctcagcctcaaatacaccggcgagctcgacagctcctacgtcgcgccggcgccggtgcccaagtgcgacatcttccggggcgagtgggtgccggacccggccccgccgcagtacaccaacgagacctgcgacttcatccaggagcaccagaactgcatgctgtatggccgcccggacctggagttcctcaagtggcgctggaagccggacggctgcgacctcccgcgcttcgacccgcacaggttcctccaggtcgtcgcgaacaagtccgtcgccttcgtcggcgactcgctggccaggaaccatatgcagtccctcttctgcctcttggccaaggtggagaagcccaaggacgtgtcggtcacggacagggcggacccgaacatgatcctgtactacgagggctacaacttcaccatgtacctcttctggtcgccgttcctggtgaggtcggaggaggacgtcgccggcgtgttcaagctgtacctggacgagcccgacagcaggtggctgtccgtcgcgtcccagctcgactacgtgctgctctcgggggccaactggttcacgcgccagtcctacttctacgagggcgggcaactcgtcggcggcgtgtacgtcccgctcaacttcaccagcagcctcaccaaccagcactcgcaccggatggcgttccggacggcgctgcgggcgctcgccggcgccaggttccggggcaaggtcatcctgcggacgctgtcgccgatgtcgcacttcgagggcggggcgtacgacgccggcggggactgccggcgcacgcggccgtacagggccgacgagacggcgccgatgggagggctggagctggagttctacacgtcgcagctggaggagttcagggaggccaagggcctggacgttgtgctcatggaccccaccgccgcgatgctgatgcggcccgacggccaccccagccggtacgggcactggccggacgagaagcggacgctctacaacgactgcatccactggtgcttgccaggacccatcgacgcatggaacgacatgctgcttcacatgctgtcacattctagttaa

SEQ ID NO: 113298 - DNA, 1938 bp, Zea Mays
agctcggcagcagggcaagcagcgggcgatgaccccccccccccccccccccctctcccaaaacagaggtcaagcgggagggcattttcttaatgacgggggcttacgcgattaatattgacagggacagacatgttctcttgcgagacccacttggcagtattattgaaaccggccgcgcacctactccctgccttcacgcggccaccggcttattcaagagcaccaaaaggggtttcggcatggatggatagcacacagcgagcgagcgagagcggtgagcccggccaccagcgccggaggccgtcgtcgtcttactagccgacgctcgacttgggcatgaattgctagccgcgcgggtgagagattgctaggtagccagctaggtacggtgtggggagttgaatcggaggtctgccgctcgaggcggcggcggcagaaggccggtaggatgaagaagctccactggctggtgcggttcctgttcgggccggtgccggtctacttctcggcgctggccatcctcatcgtgctcaccaacgcgcagtacttcgggctggtgggcgtcggcgtggcgccgcgcaccgcgaagctggcctcctcggcgcccgtggtcagcgtcatgaagtactgcgacatcttccgcggcgagtgggtgccggacgcggaggcgccctactacaaccacaagacgtgccacatgatccaggagcaccagaactgcctcaagtacggccgccccgacctgggcttcctcaagtggcggtggcggccctccggatgcgagctgccgcgcttcgacccgctgcagttcctgcagttcgcccgcgggaagtcgctggccttcgtcggggactcgctggcgcggaaccacatgcagtcgctgctctgcctcctgtcccaggtggcgtatcccaaggacctgtcggcgaacccgtcggaccagaacaaggtgtaccactaccgggcgtacaacttcaccatcagcatgttctggtcgccgttcctggtgcgcgcccgggagcccgaccacgacggccccgcgcacacgggccactggagcctctacctggacgagcccgacgacaagtgggtgtcccagatgccccgcttcgactacgtgctggtgtcggcggccaactggttctcccgcccctccctcttctacgagcggcggcgcctcgtcgggtgcagcttctgcagccgccagtacggcgtgcccgacctgacgctctactactcgcagcgccgcgcgtggcgcgtggcgctgcgcgccatcaacgacctggagcgcctgcgagggcgcgtcatcgtgcgcatgctctccccgatgtcgcacttcgagaacgggacctgggaccacggcggcgactgcaggcgcacgcagccgctgcgggcgaaccagaccgccatggagggccgcgacctgcacttctacaccgcgcagatggaggagttccgcgccgcggagaaggccgccgccgagaaggggcggcgcctgatgctcatggacgccacggcggcgatgctgatgcggcccgacggccaccccagccgctacgggcactggcccaacgagaaggtgcagctctacaacgactgcatccactggtgcctcccgggacccatcgacatctggaacgacatgctcttccagatgctcctcgcctagcagcaagcagcaaagattaaaaaaaaaactcagcaattcggtcgccggtaaccgtgcacagattggccttcttttttttgccttgtttcgtttttttaaaaaaagaagaaaatggtgcaattttgacaagcaaggattcgaaattcgccggtaaccctccgagatcatccgttccctcctctgcttgttctgtggtgtcgaaattgctccctgtctgtcggtcggcgccgtggaaaggggcaaagcaaacaaccaaaagggggccg

SEQ ID NO: 113299 - DNA, 536 bp, Zea Mays
tatggaaaccaaatgtatattcgcaatgccgcaatcacggagtgaggccggaggagatatgcagatgcatgtacatgtacctgaagcactcatgtacatactacattggtcaatgaaccaccaggagtccagcgtatgctcgtcgtatgcaagaggtcagactaggcggatacaaaatgacagcagtccgtgggagttctttcaagggcggtgccgatgtacgagcctggtagtggcggtaacagggtgacgccgcgggccgtggcgtggactactacctctgtattgccggcgaccgctgcctctgaccttgccgctgccgatacagagtcgtcacatcgccgcatctgtcagcctctgccacctcagcctcagcagggaaaaccttcccggcggattcccatggcgcagccgctcaggccccagcggccagcgaccggccgagaatctaaccggagataatccggccggccagggccagggccagcccagggaaaaagctgagagagagagccagagaggccaggataaaaggc

SEQ ID NO: 113300 - DNA, 1546 bp, Zea Mays
actattataaaaagtcgggcgcgccggcctcatctgacccgtccgtgtccgtgtccgtccccgcaaggcccagctcctcgctgctcactccacagcggcgccctatggtgtccttgcagcgcctcgaaagatgccactcctggcccctcctcgccgcggccgtcgcgtggtcgctactgcgcgccgccgccgccgcgggcacgggcactggcacgctcggcctccggcacaagcccgcgagggcagcacaacagcacgcggcacgggggagggcggcgcgccccagcgtggtggcgctcccggcactggcatggcgtcgtgcaacctgttccagggcagctgggtgtacgacgacacgctgccgatgtacgacgcggcggggtgccccttcgtggagccggagttcgactgccagaagtatggccggcccgacaagctgtacctcaagtaccggtggcgcccggcgtcctgcgagctcccgaggttcaacgggcaggacttgctgaggcggtggaaggggaagaagatactgttcgtgggggactccatcagcctgaaccagtgggagtcgcttgcgtgcatgctgcgcgcggccgcgccggcgtcctccagggtcgcctacgccaggggcaaccccgtctccagcgtcacgttccaggactacggggtgtcggtggcctactaccggagcacctacctggtggacatcgtcgaggagtccgtcggccgggtgctcaagctcgactccatcaccggcgacgcgtggctcggcgccgacgtcctcgtcttcaacacgtggcactggtggacgcacaccggcagggaccaaccgtgggactacgtccaagacggagggcaggtgatgaaggacatggaccggctcacggccttctccaaggggatgtccacatgggccaggtgggtcgactccagcgtcgacacctccaggaccaaggtctacttccagggcatctcgccgacccactacaacggagccgactggggcgagggctcgcggagctgcgcgcagcagacgcagccggtccccgggccggcgtaccccgccggccccgtcccggcgcaggccgccgtgcgggccgcgctggccgccatgtccaagccggtgtacctgctcgacgtcacgctgctgtcgcagctcaggcgggacgcccacccctcggcctacagcggcggccacccgggcaacgattgcagccactggtgcctcgccggcgtgccggacacgtggaaccagatcctctacgcgtcgctcctcctggcataggaccggggagagaaaaaaaaccgcacactgtataccaattggcgcaggctatagacatttcgtatttaaaaattggtgatttgattgtttctttttccttcttcttcttggaaaatcaatgttatgtcatatatcagcatataagaagcagcagcaaacgagtttacaatgttttataataatatgattgaagcctggggtgattcagttattattcaacactgcaagaacagaataggagaagaacctgttctcgttctc

SEQ ID NO: 113301 - DNA, 359 bp, Zea Mays
tcgcaggacagttctgacgttgagataaacaatctactatctgagtggaaggttttgaagttaagtttgcctgaaataccaatatcttctatggaggttttttagtatgtttggcaaatggatttgtatccaaatatttcaatcgcttattggatattgtttactgtgcttgtgaatgtggcatcggcttagagaagcttttcaaagttgaaaaatgttgattaactattaaggtcaacaatgtctcaagatcggctcaacggattggttactttatgcattgagaaaaaattattgacgaggttgatagcaacactattataaatgacttcgcatcaagaaacattaaaagaaatttt

SEQ ID NO: 113302 - DNA, 1531 bp, Zea Mays
gagatctcttcctgtttgcacaatggtgctcgttcgagatctccccgcgcaatggtgctcgttcgagatctccctgtacgcgatgctggactcgctgccggactggctacgaagggcaccgcgtctgccacggctgcccccgcgtcggtccccgccgcccctgcgccgagcacggcccaaactctatctcaagctcgccgcagaacgacaggacccaaaccccaattccacaatgaggccgtcgctgatgagatccacctcccagctcctccgccgccggagctactcctccgcatccgggcagcccgagcggaaggtggccatcctcggggcggcggggggcatcgggcagccgctgtcgctgctcatgaagctcaacccactcgtctcctccctctcgctctacgatatcgccggcaccccaggtgtcgcggccgacgtctcccacatcaactcccccgccctggtgaagggtttcatgggtgatgagcagcttggggaagcgctagagggctcggacgtggtgatcataccggccggcgtcccgaggaagcccggcatgaccagggacgacctattcaatatcaacgctggcatcgttaagaacctcagcaccgccatcgccaagtactgccccaatgcccttgtcaacatgatcagcaaccctgtgaattcaactgtaccgattgctgctgaggttttcaagaaggctgggacatatgatgagaagaagttgtttggcgtgaccacccttgatgttgttcgtgctaagactttctatgctgggaaggctaatttaccagttaccgatgtgaatgtccctgttgttggtggtcatgcgggtatcactatcctgccgttgttctcacaggccacccctgcaaccaacgcattgtctgatgaagacatcaaggctctcaccaagaggacacaggatggtggaactgaagttgtcgaggcaaaggctgggaagggctctgcaaccttgtccatggcgtatgctggtgctgtttttgcagatgcatgcttgaagggtctcaatggagttccggatattgttgagtgctcttttgttcaatcaactgtaacagagcttccattctttgcatctaaggtaaggcttgggaagaatggagttgaggaagtgcttggattaggtgagctgtcggactttgagaaagaagggttggagaagctcaagagcgagctcaagtcttcgattgagaagggtatcaagtttgcaaatgataactagataaggccattttgcagattatagcagcaattgaaacctttagtagcaattgaaacctttagttgcgggatcttctgatttcattctacccttttctgtccctttttgtgagggagtggaaggtattacaataaaaaacctgatgggcaaagcttacaagagggatttattccagcaggcaggcacataacttatgtcaagttttgtactgaaccagtcgtatatgagctttctgctgccttttataatcgacggtgctgtcttgtgtgtgtattg

SEQ ID NO: 113303 - DNA, 1607 bp, Zea Mays
attcccaagtcagacgctgatactggctgccgcatgtctagattggtttggtgatgctgatgccggtgccgcatgtctatattgggtaggtgacgctgaggcctcgttccccaatcagacttgttcggcctcttcgacggcgtgcccgtctccccgagctcattcgccatgccttcctcagcctccgcgagaggaggacgagggctcctcttgccggcggctgctgaggcggttgtggtgctaatattgggtgcagtggcgccagcggcgggttgttatccgcgcgtgttcagcttcggggactcgctggccgacacggggaactacccgttcgtctacggcaacgactctgggtctggcggggccgcgctccggccaccctacggcgagaccttcttccaccgcgccaccgggcgcgcctccaatgggcgcctcgtggtcgacttcatcgcggacacgctgggcctcccgttcgtgcgaccgtatctgagcggacggagcgcggaggacttcgcgagcggggccaacttcgccgtcggcggcgccacggcgctcagcccggactttttccgtgcaaggggtttcgacaccatgggaaacaaagtggacctcgacatggagatgaagtggttccgcggcctgctcgacctactctgtcccggcaatctcgccggttgctcagatatgatgaaccaatctctcttcttggttggagaaatcgggggcaatgactacaacggacctcttctttctggagttcccatggagaaaatccgtgccatcactccgagtgttgttgcaaaaatttcttctacaatcagcgaattgattcggctaggagccaagactcttgtggttccaggaaacctcccaattggatgcatcccagactatctgatgatattcaagagcaataaggaagaggattatgaaccacagacaggttgtcttaggtggatgaacgagttctcacagtatcacaacaaggttcttgtggagcagctcaagaagcttcgcaagcttcatcctggagcaaccatcatctatgctgattactatggagctgctatggaaattttcctttcccctgaacaatatgggatcgaatatcccctagtggcttgctgtggtggagaaggaccctacggtgtgtccccatctacaggctgtggattcggagaatataagctgtgcgataatccagagaagtatggatcatgggatggcttccatccatcagaatctgcatacagggccattgctatgggcctgctactaggttcctacacaaggccgtcgatcacttccaccaccacttcatgtccacagcttatggagctcggctcttctgctgaatacaaacccctctacgacctgtagtaattttgtaattatattttattgtgtgtactccctcgcccagttctatcagtaccattttgtaagtatttgtactttgtaacttgtaactaataacttatcaaactagctactacatatttgttagagtgcacggttactcggttagattcagattcgtttgaaactgaaaatgcggaagtataaacaaatagaagaaaatacataagtgagaccaataccgaggc

SEQ ID NO: 113304 - DNA, 1472 bp, Zea Mays
agattggtttggtgatgctgatgccggtgccgcatgtctatattgggtaggtgacgctgaggcctcgttccccaatcagacttgttcggcctcttcgacggcgtgcccgtctccccgagctcattcgccatgccttcctcagcctccgcgagaggaggacgagggctcctcttgccggcggctgctgaggcggttgtggtgctaatattgggtgcagtggcgccagcggcgggttgttatccgcgcgtgttcagcttcggggactcgctggccgacacggggaactacccgttcgtctacggcaacgactctgggtctggcggggccgcgctccggccaccctacggcgagaccttcttccaccgcgccaccgggcgcgcctccaatgggcgcctcgtggtcgacttcatcgcggacacgctgggcctcccgttcgtgcgaccgtatctgagcggacggagcgcggaggacttcgcgagcggggccaacttcgccgtcggcggcgccacggcgctcagcccggactttttccgtgcaaggggtttcgacaccatgggaaacaaagtggacctcgacatggagatgaagtggttccgcggcctgctcgacctactctgtcccggcaatctcgccggtatgttgctcagatatgatgaaccaatctctcttcttggttggagaaatcgggggcaatgactacaacggacctcttctttctggagttcccatggagaaaatccgtgccatcactccgagtgttgttgcaaaaatttcttctacaatcagcgaattgattcggctaggagccaagactcttgtggttccaggaaacctcccaattggatgcatcccagactatctgatgatattcaagagcaataaggaagaggattatgaaccacagacaggttgtcttaggtggatgaacgagttctcacagtatcacaacaaggttcttgtggagcagctcaagaagcttcgcaagcttcatcctggagcaaccatcatctatgctgattactatggagctgctatggaaattttcctttcccctgaacaatatgggatcgaatatcccctagtggcttgctgtggtggagaaggaccctacggtgtgtccccatctacaggctgtggattcggagaatataagctgtgcgataatccagagaagtatggatcatgggatggcttccatccatcagaatctgcatacagggccattgctatgggcctgctactaggttcctacacaaggccgtcgatcacttccaccaccacttcatgtccacagcttatggagctcggctcttctgctgaatacaaacccctctacgacctgtagtaattttgtaattatattttattgtgtgtactccctcgcccagttctatcagtaccattttgtaagtatttgtactttgtaacttgtaactaataacttatcaaactagctactacatatttgttag

SEQ ID NO: 113305 - DNA, 1805 bp, Zea Mays
ggagtactatattcgaagaaattgatgttgcccttggacagatccagcaaccactttcgttggagttgagttagattggacagaccgtttcgattgggccccgccttatcaatcgccaaaagtcagacgccgattggctgccgcatttattatattggtttggtacttggtagtttggtgacgctgaggcctcgtccccgatcagacttgttcggcctcttcgacggcgtgcccgtctccccgggctcattcgccatgcattcctcagcctccgcgagaggaggacgagggctcctcttgccggcggctgcggcggcggttgtggtgctactgttgggtgcagtggcgccagcggcgggttgctatccgcgcgtgttcaacttcggggactctctggcggacacgggcaactacccgttcgtctatggcaacgactcagccaagctccggccaccctacggcgagaccttcttccaccgcgccaccgggcgcgcctccaacgggcgcctcgtggtcgacttcatcgcggacacgctcggcctcccgttcgtgcgaccgtatctgagcggacggagcgcggaggacttcgcgggcggggccaacttcgccgtgggcggcgccacggcgctcagcccggacttcttccgtgcaagggggttccacaacatgggaaaccgagtggacctcgacatggagatgaagtggttccgcggcctgctcgacctactctgccccggcaacctcgccggttgctcggatatgatgaaccaatctctcttcttagttggagaaatcgggggcaatgactacaacggacctcttctttctggagttcccttcgaggaaattcgcgccatcactccgagtgttgttgcgaaaatttcttctacaatcagcgaattgattcagctaggagccaagactcttgtggttccaggaaaccttcctattggatgtgtcccaaaatatctgatgatattcaagagcaataagaaagaggattatgatccacagacaggttgtcttagatggatgaacgagttctcacagtaccacaacaagcttcttgtggagcagctcaagaagcttcgcaggctccatcctggagctaaatttacgccatcaagttttcagaaactatttatttgggaagccaagtttcacaagttaaggaggcctttagttactggatcgaatatcccctagtggcttgctgtggtgcagaaggaccctacggtgtgtccccaactacaagctgtggattgggagaatataagctgtgcgataatccagaaaggtatggatcatgggatggcctccatccaacagaatctgcatacaaggtcatcgctatgggcctgctactaggttcctatacaagaccgccaatcgcttccaccaccacttcatgtccacagcttatggagctcggctcttctgctgaatacaaacgcctctacgacctgtaataatttatgtaattatattttattgtatgtactccctcgcccacttcaataagtcccattttgcgagtacatgtactttgtaacttttaactaataacttatcaaactagctactatatatttgttagagtgcaaggtttgattcaggttcggttgaatctacttactgaaaatgcgaaagtataaacaacgtagaataaaatacataccacgcctgcgatcccacgccgcgaaaccaacccgcgccgcgaatctctcggcccgtgcctccttcaccgcaaatcccagcgcctccctcaccgcaacccccacccacccgcaagacccgagcaagcc

SEQ ID NO: 113306 - DNA, 1791 bp, Zea Mays
ggagtactatattcgaagaaattgatgttgcccttggacagatccagcaaccactttcgttggagttgagttagattggacagaccgtttcgattgggccccgccttatcaatcgccaaaagtcagacgccgattggctgccgcatttattatattggtttggtacttggtagtttggtgacgctgaggcctcgtccccgatcagacttgttcggcctcttcgacggcgtgcccgtctccccgggctcattcgccatgcattcctcagcctccgcgagaggaggacgagggctcctcttgccggcggctgcggcggcggttgtggtgctactgttgggtgcagtggcgccagcggcgggttgctatccgcgcgtgttcaacttcggggactctctggcggacacgggcaactacccgttcgtctatggcaacgactcagccaagctccggccaccctacggcgagaccttcttccaccgcgccaccgggcgcgcctccaacgggcgcctcgtggtcgacttcatcgcggacacgctcggcctcccgttcgtgcgaccgtatctgagcggacggagcgcggaggacttcgcgggcggggccaacttcgccgtgggcggcgccacggcgctcagcccggacttcttccgtgcaagggggttccacaacatgggaaaccgagtggacctcgacatggagatgaagtggttccgcggcctgctcgacctactctgccccggcaacctcgccggttgctcggatatgatgaaccaatctctcttcttagttggagaaatcgggggcaatgactacaacggacctcttctttctggagttcccttcgaggaaattcgcgccatcactccgagtgttgttgcgaaaatttcttctacaatcagcgaattgattcagctaggagccaagactcttgtggttccaggaaaccttcctattggatgtgtcccaaaatatctgatgatattcaagagcaataagaaagaggattatgatccacagacaggttgtcttagatggatgaacgagttctcacagtaccacaacaagcttcttgtggagcagctcaagaagcttcgcaggctccatcctggagtaaccatcatctatgctgattactatggagctgctatggaaatattcctttcccctgaacgatatgggatcgaatatcccctagtggcttgctgtggtgcagaaggaccctacggtgtgtccccaactacaagctgtggattgggagaatataagctgtgcgataatccagaaaggtatggatcatgggatggcctccatccaacagaatctgcatacaaggtcatcgctatgggcctgctactaggttcctatacaagaccgccaatcgcttccaccaccacttcatgtccacagcttatggagctcggctcttctgctgaatacaaacgcctctacgacctgtaataatttatgtaattatattttattgtatgtactccctcgcccacttcaataagtcccattttgcgagtacatgtactttgtaacttttaactaataacttatcaaactagctactatatatttgttagagtgcaaggtttgattcaggttcggttgaatctacttactgaaaatgcgaaagtataaacaacgtagaataaaatacataccacgcctgcgatcccacgccgcgaaaccaacccgcgccgcgaatctctcggcccgtgcctccttcaccgcaaatcccagcgcctccctcaccgcaacccccacccacccgcaagacccgagcaagcc

SEQ ID NO: 113307 - DNA, 1779 bp, Zea Mays
ggagtactatattcgaagaaattgatgttgcccttggacagatccagcaaccactttcgttggagttgagttagattggacagaccgtttcgattgggccccgccttatcaatcgccaaaagtcagacgccgattggctgccgcatttattatattggtttggtacttggtagtttggtgacgctgaggcctcgtccccgatcagacttgttcggcctcttcgacggcgtgcccgtctccccgggctcattcgccatgcattcctcagcctccgcgagaggaggacgagggctcctcttgccggcggctgcggcggcggttgtggtgctactgttgggtgcagtggcgccagcggcgggttgctatccgcgcgtgttcaacttcggggactctctggcggacacgggcaactacccgttcgtctatggcaacgactcagccaagctccggccaccctacggcgagaccttcttccaccgcgccaccgggcgcgcctccaacgggcgcctcgtggtcgacttcatcgcggacacgctcggcctcccgttcgtgcgaccgtatctgagcggacggagcgcggaggacttcgcgggcggggccaacttcgccgtgggcggcgccacggcgctcagcccggacttcttccgtgcaagggggttccacaacatgggaaaccgagtggacctcgacatggagatgaagtggttccgcggcctgctcgacctactctgccccggcaacctcgccggttgctcggatatgatgaaccaatctctcttcttagttggagaaatcgggggcaatgactacaacggacctcttctttctggagttcccttcgaggaaattcgcgccatcactccgagtgttgttgcgaaaatttcttctacaatcagcctaggagccaagactcttgtggttccaggaaaccttcctattggatgtgtcccaaaatatctgatgatattcaagagcaataagaaagaggattatgatccacagacaggttgtcttagatggatgaacgagttctcacagtaccacaacaagcttcttgtggagcagctcaagaagcttcgcaggctccatcctggagtaaccatcatctatgctgattactatggagctgctatggaaatattcctttcccctgaacgatatgggatcgaatatcccctagtggcttgctgtggtgcagaaggaccctacggtgtgtccccaactacaagctgtggattgggagaatataagctgtgcgataatccagaaaggtatggatcatgggatggcctccatccaacagaatctgcatacaaggtcatcgctatgggcctgctactaggttcctatacaagaccgccaatcgcttccaccaccacttcatgtccacagcttatggagctcggctcttctgctgaatacaaacgcctctacgacctgtaataatttatgtaattatattttattgtatgtactccctcgcccacttcaataagtcccattttgcgagtacatgtactttgtaacttttaactaataacttatcaaactagctactatatatttgttagagtgcaaggtttgattcaggttcggttgaatctacttactgaaaatgcgaaagtataaacaacgtagaataaaatacataccacgcctgcgatcccacgccgcgaaaccaacccgcgccgcgaatctctcggcccgtgcctccttcaccgcaaatcccagcgcctccctcaccgcaacccccacccacccgcaagacccgagcaagcc

SEQ ID NO: 113308 - DNA, 878 bp, Zea Mays
tcatttagcattagtctttccttcttttttattggatattcctattgctgcagtagtatatatatattctatgcatactataagggctagtttgaaaaccctttttccaagggatttttattttcctaaagaaaattagttcattttcccttaagaaaataaggatcccttaagaaaattgtgttcccaaactagtcctaaaaaggaaaaagaaaactcctcttggcgaatatagttaacgttgccataacttctgttcagggatcgaatatcccctagtggcttgctgtggtgcagaaggaccctacggtgtgtccccaactacaagctgtggattgggagaatataagctgtgcgataatccagaaaggtatggatcatgggatggcctccatccaacagaatctgcatacaaggtcatcgctatgggcctgctactaggttcctatacaagaccgccaatcgcttccaccaccacttcatgtccacagcttatggagctcggctcttctgctgaatacaaacgcctctacgacctgtaataatttatgtaattatattttattgtatgtactccctcgcccacttcaataagtcccattttgcgagtacatgtactttgtaacttttaactaataacttatcaaactagctactatatatttgttagagtgcaaggtttgattcaggttcggttgaatctacttactgaaaatgcgaaagtataaacaacgtagaataaaatacataccacgcctgcgatcccacgccgcgaaaccaacccgcgccgcgaatctctcggcccgtgcctccttcaccgcaaatcccagcgcctccctcaccgcaacccccacccacccgcaagacccgagcaagcc

SEQ ID NO: 113309 - DNA, 1283 bp, Zea Mays
agaaccagagcgacagaagtaccagtcctgttcagagatgatgggtttcagctgccaacaccgttccgcctccctgcgcatcttcctcgtctccgtcgtcctcctgctcaccgctcctgcggggcgttgccattgctacaagcgcatcttcagcttcggcgactctatcatcgacacgggcaacttcgcgcgcagcggcccgataatggagtacccatttggcatgacctacttccaccaccctaccggccgcatcagcgacggccgtgtcctcgtcgatttctacgctcaagcgctccagctgccgctgataccaccaaatctgccggagaaggacacggggctattcccgacaggcgcaaacttcgctgtgtatggctccacggcgatgcccccggagtactaccgcaggtggaaccacgacgtgcgggcctgttacctgggcgtgcagatgggatggttcaaacaaatgctgcaacgaattgctccctgggatggcgccaagaggcagatcctgagcgagtctctcatcgtgctgggcgagatcggcggcaacgactacaacttttggttcgctgcccgtaggccccgcgagcaagccggccagttcatcccagacatcgtcgcgaccattggctctgctgcccaggagctcatcggcatgggcgcgaaggcgatcctgatcccgaacaacttccctatcggctgcgtaccgacatacctgagcgggtacaggagcggcaaccgcgcggactacgacgagcacgggtgcctccggtggttcaacgacttctcccagaggcacaaccgggcgctgcgcggcgaggtcgaccggctcagggcgcagcaccccggcgtgaagctcatctacgccgactactacggtgccgccatggagttcgtcaaggacccgcacaggttcggcatcggtgaccccctcacggcgtgctgcggtggcgatgaccagccgtaccacatcaacaggccgtgcaacagagcggccaggctctggggcaaaccgagcggcttcgccagctgggacggcatgcacatgactgagaaggcgtaccaagtcatctcccatggggtgctcaacgggccgttcgccgacccgccatttgctaaatggagctgctagctgttagttttggtggtaacggtgaaaggggattggtttgttctcttagctgagagctcacagcatcttcaatagactttttttaaattcatcgctctctaaatcatcatgtaaagaatcatttaaataaaaattactttctata

SEQ ID NO: 113310 - DNA, 1559 bp, Zea Mays
ggtttcttgtagcatgttgaaaaccaaattagcaagagagagagggcacacactgcaaagatgagtctcataagagggatgggcaacgttgccaagagatggaaagaactcaatggcttgaattactggaagggcctagttgatccgctcgacctcgacctccgtaggaacatcatcaactacggtgagctctcccaggcaacctacaccgggctgaacagggagagaagatcaaggtacgctgggtcttgcctcttcaaccgcagagacttcctcagcagggtggatgtatcaaacccgaacctgtatgagatcacgaagttcatatacgcgatgtgcactgtcagcttacctgacgggttcatggtcaagtctctctcaaaggctgcatggagcaggcagtcgaattggatggggtttgttgcagtagctacggacgagggcaaggaactgcttgggaggcgggacgtggtggtggcgtggcgtggcaccatacggatggtagagtgggtcgatgatcttgatatttccttggtgcctgcttcggaaatagttcttccaggcagcgcagccaacccctgtgtgcatggagggtggctttcagtctacacgagtgctgatccagggtcacagtacaacaaagagagcgcaagacatcaggtgttaaacgaggtgaaaaggatacaggatctgtacaagccagaggagacgagcatcaccataacaggccacagcctaggagcagcacttgccaccatcaacgcaaccgacatcgtctccaacggctacaacaggagctgctgccctgtgtccgcgttcgtattcgggagccccagagtcggaaaccttgatttccagaaggcgttcgacagcgcggcggacctgaggctgctccgcgtccggaactctcccgacgtggtccccaaatggccaaagctagggtacagtgatgtcggcacagagctgatgatcgacacaggagaatcgccgtacctgaaggcccctggaaaccccctgacatggcatgacatggagtgctacatgcacggggtcgctggggctcaggggagcagcggagggttcgagctgttggtcgatcgggacgttgctttggtgaacaagcatgaagatgccctgagaaatgagttcgctgtcccaccgtcgtggtgggtggtgcagaacaaaggtatggtgaaaggcaaggatggccggtggcatctggccgaccatgaggaggatgatgactgatgtaacctgtcaactcatcttctaccagtttgttaccagagaacacatgtatcgttgtgtttaaaactgtacctgactgattttctgtatccaaatcataacttccgttggcttttatcggttgtaataaagcctgaatacacatgcttgcatagttggattaattattacgaaacagtttttttccatttatatggtgcggagaaagtaaggcttactacctgtttggcatggctccgactctaaactctagcctaaaattggatgaggtcagccaaacatcccaactccattttttcgaagcagtccaa

SEQ ID NO: 113311 - DNA, 1486 bp, Zea Mays
caaaggggaggaagaggatcacaaccttcagaattcagatggatagccaaatgctcatactagtagagtaacaaatgttcgtcaccggcgacatggccgcgcagtggaaggagctgcagggcagcaaccactgggagggcctgctggacccgctcgacgtgggcctccggcgttgcctcgtcacctacggcgagatgatcatggccacgtacgaggcgttcatcggcgagagccggtccccgaacgccgggatgtgccggtaccgccgcgccgacctgttccagcgcgtggacgtgtcccacccggggtggtacgaggccacgcggtacctctacgccacggccagcgccgaggtgcgtgggaaggtgctcctccggccgctctgccgggagcgctgcgccagggagtgcaactggatggggtacgtcgccgtcgccacggacgagggcgccgccgcgctcgggcgcagggacatcgtcgtggcgtggcgcggcacgcagcgcgcgctcgagtgggtggccgacctcaagctcgcgctcgcctcggcggcgggtatcctgggtccggagggcggcggcggcggcagcggcggctctgacccgtcagtgcaccgcgggtacctgtcgctttacacgtcggactatgaaggctccaacctgagtaagcagagcgccaggatgcaggtgttgacagagatcgttaggctaatggacaaatataaaggcgaggaaaccagcatcaccgtcgtcggccacagcctcggcgcgacaatggccaccctgaacgctgtcgacatcgccgccaacgcctacaacaagatcccggggtacgacagccgccgtgctccggttacggccattgtgttcggcagcccacgcacgggggaccaagactttcgggacgtcttccaccgcaccccggacctccggatgctccgcgtccggaacaggccagaccgcatccctcactacccgcccgtgggctacgctgacgtgggcgtcgaactgctcatcgacacgcggcggtcgccgttcctcaagcaccacggcagtgagtcgcagtcgcacgacctcgaggtccacctgcacggcatcgccggctggcagggcgaccgcggcgggttcgagttggtggtggaccgggacgttgcactagtgaacaagttcgacgactgcctcgccgatgagtaccccgtgcctgtgcgctggaaggtacaccacaacaagagcatggtgaagggaggcgacggcaggtgggtcttggaggaccatgaccctgattacgaagacgaggatggcaacatcaacttgtagtgcaagccagccaattgttgttttgtgttgctgttatggatcttatccagatgttttgaaagatcttggcctcttggaagcattgaatagtttggtgaattatatacctaatactaattaaaaatattgagcttcaataaaactattagggcgtgtacaaccctgatactgct

SEQ ID NO: 113312 - DNA, 2373 bp, Zea Mays
atggcagggtgggggccctccaggctgccgacgtgcgggccgtggggccgcggcgtggcgctggagagggagctgtcgcgggacggcagccactacagcatctccagcggcatcctgccgtcgctcggcgcgcgcagcaaccgccgcgccaagctcaggcccttcatcgtctcgccctacgaccgccgatacagatgctgggagacttttctcataattcttgtgatatactctgcatgggtttccccatttgagtttggcttcattcggaaaccggcgggcgccctagctgcagtggacaatgtcgtgaatgcgttcttcgcagtggacatcatcctgaccttctttgtagcttacttggatagaatgacatacttgcttgaagatgatccaaaaaggatagcttggcggtatactaccagttggtttattcttgacgtggcctctaccatcccaagtgaatttgctcggaagatactgccaccaaacctcagatcatatggatttttcaacatgcttcgtctatggcgtctccgtagagtcagctctctctttgctagattggagaaagatagacatttcaattacttctgggttcgatgtgcaaagctcatatgtgtcacactttttgccgtccactgttcggcatgcttctactatcttctcgctgacagggatacaattcaagcagcaaccagctttgcactaaggaatcagttaccaagtcggctccaagatcagatgatctcacatcttagcttgaagttcagaacagattcagaaggtcttcaacaacaagagacccttgatgcgcttcccaaggctataagatcaggcatttctcagtatctgtttttcaatcttgtccaaaaagtttacttgtttgaaggggtgtccaatgacctaatttttcaactggtttctgagatgaaagctgaatattttccacctagggaagatgtgatactgcagaatgaagcacccacagacttctatattttagttactggtagcgcgatggctggagtggctaaggcaggagatgttgtcggagaaattggggttctttgctataggccccaactattcacagttcgaacaaaatcattatgccagcttctgcgtatgaatcgcactgcctttctcagccttgttcaatccaatgttgcagatggaacaataataatgaacaaccttatgcagagttttgacatagaaaagttactaaaacagcagaaagacaacagtgtaatggtgggtgttcttaaggagattgagaacatgctagcgcggggtcgtctggacttgccaattaccctctgttttgcggtaaataaaggagacgatttaatgttacatcaacttctgaagcgtggtttggatccaaatgaatcagataacaatgggcatacagcactgcatatagctgcttccaaaggagacgaacaatgtgtcaagcttcttctagactacggagctgatccaaatgctagagactctgaaggaaaagtgcctctatgggaggctttatgtgaaaagcacaatgcagtgatagagctgttagtagagagtggtgcagagctatcatctggagacacggccttgtatgcttgcatcgctgttgaggaaaatgatgctgagctgcttgagaacgttatccgttatggtggcaacataaacaacccaacgaaagacggaaccacaccgctgcatcgtgcggtctgtgatggaaatgttcagatggttgagttgttgctggaacacggagctgacgtcgacaagcaggacagtaatggctggtcgccaagagatctagctgatcagcaaggccatgatgacattcaggctctcttcaaatcacgaaaagcacacaggaagcatgcctcaaatggcagagtggcacctatgctgatagggagattcaacagtgagccctcgatgccagatatgagccatgaaaacgccagagtacgcagcgaagttgttccgcagaagctcctccgaaagagggtgagtttccagaattctcttttcggcgtcatctcttcgtcccacgcccaccaggacaccggccgtctgctctcgaaaggcctcgctggaacagagggtccaaattgccgtcacgactccctcatcagggtgacaatcagctgccccgagaagggggggaacgccgcagggaagctcgtgcgcctaccgcggtcgatggccgagcttctcgaactaggtgcaaagaagttcggcatcaagcctggcaaggtcctgacagttgggggtgctgagattgatgaggtggagcttatcagagacggtgatcatattcttctcgtcagtgatgaatgggtgccagatgttgagcaaattaggccttaa

SEQ ID NO: 113313 - DNA, 736 bp, Zea Mays
cgtggaaatcggaacaaacaccacaggtagctagcactagcactagcactagcataccgcatccactgctcccatcagccacagtagcagcttcttcttcctagcaagagcttagcttgcttcccactgttacaacttcggcagcttgcatttcgttcgatcgcacacgcttaaactgcgatggcaccagtgtcgtcggaggcggctagctacctggtgctcatcaaaggcggcagcattgccgcctcttcgcgtgccgtttacccttgggatggctgcagcgcgcggggaaggatgacagagaccgacagcgacgacgacgacgacgactacgactgcgctcctgctgcctgatcgagaagccgccgcgttctggtgaaattgatctgcgtgtgttctctgagatgatgagatatgctgccccgtacgtaggcggtaggcgaaccggcgaagagcatgtagtatgtagtagtactacgtattgttaatcgcagaatagagtacgtacatacgtgccgctgcttaaagctaataatttggtcgtttaatttccactcctaggtaatgggtatacatgtatttcgggtagctgatttatgagccagtgtggttttcgtcccgggactaagctagagatcatgcaggctagctagattgattatgtaagcaataaacactgggatagatcttcctgtacttcgtatctgataacgcaataaactgaatctagtttttt

SEQ ID NO: 113314 - DNA, 1959 bp, Zea Mays
ctctgctttccccccatttcgcgtctcggggtttggaccagccacccggcggaggcggccgggcagactgggccgagcgaccggagcgccgccgccatcggcaaagccacgggacggcccatggagtcgcgagcgctcctgcacgcccggcccgccgccctccctcaccgcgccggcctgcgcctccatctcccgctcctgcgcccgcgtgcagtctcccgctcccccgccgccaagcccgcgctccagtccccgctcctcgcgtcgaggggccccttccttcaacggcacgatgcggttctgggcaacgggttcgtgaaacggagagcggccagcgctggcggtgatgtgtccttccgcgcccaggcggcggcctcggcggcggtgccggcgccgcagccggaggagtccacaaaaaagctccttggcatcgacgtgaagacgctcaagaagatcgtgccgttggggctcatgttcttctgcatcctcttcaactacaccatcctgcgggacaccaaggacgtgctggtggtcactgccaaggggagcagcgccgagatcatccctttcctcaagacctgggttaacctgcccatggccatcggtttcatgctcctgtacaccaagctttccaacgttctctcacgggatgcgctcttctacaccgtcatcttcccgttcatcgccttcttcggcgccttcgcctttgtgctctacccgctcagggacgtcatccatcccaccgcgctcgcggacaagcttctcgccgcgctcggtccgagcttccttggtccggtggcgatactgaggatttggagcttctgcttgttctatgttatggctgagctctggggcagcgtcgtcatctctgtgctcttctgggggttcgctaatcagattaccacagttgatgaagcaaaggaattctacccgttatttggccttggggctaatattgctcttatcttttctgggcgtactgtgaagtatttctcaaatttgcgcaggacattgggtcctggaattgatggctgggaagtatctttgaaaggaatgatgagcatagtggtactccttggacttgtcataacttccatctattggggagtgaacaagtttgttttgaatgatccttcacttccaaaggctgatcgtaagaagaaaaaggaaaagcctaaacttggcatgaaagagagtctgaaggttctgctctcctcgaggtatgtgagggatctagctaccctagtggttgcttatggcattagtatcaatcttgtcgaagtcacgtggaaatcaaaactcaaggcacagttccctagtccaaatgaatattcatctttcatgggtgatttctcgactgcaactggaattgcaactttcacaatgatgctgttaggccgtattatactacggaaatttggctggggtgtggctgcaaagatcacccccaccgttctgttgctgactggtgttggattcttctctctgattttgtttggacagccactgactcctatgcttgccactatgggtatgacccccctactggcagccgtttatgtgggtgccatgcagaacatatttagcaagagtgcaaagtacagtttatttgacccatgcaaggaaatggcatatatccctttggatgaagatatgaaggtaaaaggaaaggcagccattgatgttgtctgcaacccactgggcaagtcgggcggcgcacttatccaacagttcatgatcctgacgttcggatccctggcaaattcgactccataccttgggggcatactcctggtcatcgttctcgcgtggctaggcgcggcgagctcattggacaagcagttctcgagcctggctaagcaagacatggagagggagaaggctgcccaagaccaagggaaactagaacgctcgctactcacgtgcggcttcaagcctgcccgtaatcttcctttgtaa

SEQ ID NO: 113315 - DNA, 118 bp, Zea Mays
cttttcgtttcgtgtggggaggtccggaggtgggtgatttttcttctatctccctctctctctctcttctaactcgtcacggtcagcagctgtccgttttgtcaaggccgacggcgac

SEQ ID NO: 113316 - DNA, 673 bp, Zea Mays
ccgcgtgccgtgagccacgccacgccacgccttggcacaacaagttccccgggtctcgggcatgccgcatgcggccggcgtcgtcggcggcggcgtgggcgcgggcgcgtggccccgccgcgtcgtttgttcgcgcaatcattgatgatgattctctgctgccggcccactgcgccgtgggcccctcccccgagagccgtcctaatcacgctcgcaagtggactactgggcggccgtggtcctccgggatccgtcacgctcgcttcggctcggctctcctcgggtgcctccctacggttacgttacgtagcctagtccattgcattggttgccaccgtaatccaggccctactgtactactacttctatctcgtagttgtaggtggtaatgcgctcaagattgcccgttgccacgcacgtccgtaatcaaggtttgcctcgaggttttttgtgtactggagcagtacgatccatacgaatttgggggcaaatttgaagctcgagcgagcctacagtttgtttttttttttgccgaaggaggtactcaaaatacatgttccaccgtagtaaccatataggtacatggagatgcactggaggcttgactttgaaatatattgttggaactctcatcacatatgacttatatatatatgatccatcaatgtgactc

SEQ ID NO: 113317 - DNA, 132 bp, Zea Mays
ttttttgttttttttattctcttatttctagatgtcattttccattttaaatttccaacccagtttaaaattcgaaatatgcacagttaaagaaatttcagtatgatgcaactatatttattttatattaag

SEQ ID NO: 113318 - DNA, 1438 bp, Zea Mays
caactccctccacaatcctcgatcgtcgtctccaacgtaccctctgcttccgtctcttcgtccacgagaggccgagtagccgagtactcctcgtctctgccttggaagcctccctcgaccatgcaggaagctctcgtatctccggccaatgccggccgccttcgctcggccttggagctcaagccgttcgccttcggggaccagcgcctcgcctcgccgcgctacctcaacctcgcctccgtcgccggcggcggcggcggcgacgacgcgctgttccgctgctcctcgccgttcagccccagcttcggcttctcctcgccgtcgccgctcgccacctcctccaccatctcgctctcaccgtcctcctcctcctccctcgtcggcgactgcgactgcgacgacgacgccgacgccgacgccgccacgggccacaggctccagctcgcccgcctcgcgctgcagtaccaggaggtggccgaccgctacgagctctgcctcgcccgcctcgccgacgccgcggacgaggcggcggcgctccgccgcgagaacgccgagctccgcgtcgccaacggcgacctcacgcgccgcctcgcgctcctcagcggcattggcaagcaggccgccgccgccgcgatcgccgacgaggtccgccggctgcgcttcggggagcagaaggccgccaaggagcgcgctcccgagaagcctgccgtgctgcccaagagcatttccgtccgctccaacgactacctcaagatgaaccagccgcaacaggtacaggcccccgccacgccggccgaagacaaccgcaagcctcgcgcgtcgaacccgaccaccaaccgaagctcgcagcgcgtgtacaagggcaatggcggcgacaagagaagcgaggaacccaaggagcatcgcacggcgggcggcgtggagctggaggtgtacaaccagggcatgttaaagacggagctgtgcaacaagtgggaggagacgggggcgtgcccctacggcgaccagtgccagttcgctcacggcgtcgccgagctccgccctgtcatccgccatccgcgctacaagacccaggtctgccgcatggtcctcgccggcgaggtctgcccctacggccaccgctgccacttccgccatacgctcacccccgccgaacgcctccacctgccccgcccttaacaaagcccggcacgcggcagggcacggcgaagggcagtcttccgcagcgctggaaccgttggtttctgtttcatctgaagtcaagtcaagtatgtgtttcacacgaaaatgtatagaaatacgaacaacgtaagcaaggtacatgtatatgagtaacatacataagagcataaagtaaacctgatggtacaattagttttcaggcaatgtgaatattcacacacaatatagcttcaccgtcgatcagctgtgggttctc

SEQ ID NO: 113319 - DNA, 1520 bp, Zea Mays
caactccctccacaatcctcgatcgtcgtctccaacgtaccctctgcttccgtctcttcgtccacgagaggccgagtagccgagtactcctcgtctctgccttggaagcctccctcgaccatgcaggaagctctcgtatctccggccaatgccggccgccttcgctcggccttggagctcaagccgttcgccttcggggaccagcgcctcgcctcgccgcgctacctcaacctcgcctccgtcgccggcggcggcggcggcgacgacgcgctgttccgctgctcctcgccgttcagccccagcttcggcttctcctcgccgtcgccgctcgccacctcctccaccatctcgctctcaccgtcctcctcctcctccctcgtcggcgactgcgactgcgacgacgacgccgacgccgacgccgccacgggccacaggctccagctcgcccgcctcgcgctgcagtaccaggaggtggccgaccgctacgagctctgcctcgcccgcctcgccgacgccgcggacgaggcggcggcgctccgccgcgagaacgccgagctccgcgtcgccaacggcgacctcacgcgccgcctcgcgctcctcagcggcattggcaagcaggccgccgccgccgcgatcgccgacgaggtccgccggctgcgcttcggggagcagaaggccgccaaggagcgcgctcccgagaagcctgccgtgctgcccaagagcatttccgtccgctccaacgactacctcaagatgaaccagccgcaacaggtacaggcccccgccacgccggccgaagacaaccgcaagcctcgcgcgtcgaacccgaccaccaaccgaagctcgcgcgtgtacaagggcaatggcggcgacaagagaagcgaggaacccaaggagcatcgcacggcgggcggcgtggagctggaggtgtacaaccagggcatgttaaagacggagctgtgcaacaagtgggaggagacgggggcgtgcccctacggcgaccagtgccagttcgctcacggcgtcgccgagctccgccctgtcatccgccatccgcgctacaagacccaggtctgccgcatggtcctcgccggcgaggtctgcccctacggccaccgctgccacttccgccatacgctcacccccgccgaacgcctccacctgccccgcccttaacaaagcccggcacgcggcagggcacggcgaagggcagtcttccgcagcgctggaaccgttggtttctgtttcatctgaagtcaagtcaagtatgtgtttcacacgaaaatgtatagaaatacgaacaacgtaagcaaggtacatgtatatgagtaacatacataagagcataaagtaaacctgatggtacaattagttttcaggcaatgtgaatattcacacacaatatagcttcaccgtcgatcagctgtgggttctcaggtgcttaaattgtgtcttctgttctgtctatgtaacccttttttttaaacgacatgtaatctatttttggggtgtatttgttt

SEQ ID NO: 113320 - DNA, 513 bp, Zea Mays
atggatcccattattccagatgatgaggcaagacacgttgaaccaatagaagaagttgttgcacctgatgatgatgagaggcaatatcctgagtttgttgacaagtgggatatgctagaattttaggactatgatggatatattgtcacaggggcacaatttgaagagactgatgaagaggaggaagagaacatagctatgggagtggatgagcaaggagagggtgatgatgtaccaagaattgattatgacagagataatccatccttaaaagaaggcagcgcatttgcatcgatgaccgaatttaggaatgcacttgctacctattgcatcaaaggcgagtatgattatgtaattgacaagagtgagccaactagaataaatgttcattgcgcatttgagaggtgtcagtggaggatacatgattcctgtatgcggaatagtacaattattcaggtcaaagtgaatccatctcctcacacttgtccaggtgaaagaaaagggtcacataag

SEQ ID NO: 113321 - DNA, 739 bp, Zea Mays
agggcgagacaccgacacatgtgacaagcctcatctcagccgtgcaggaccaagtagttttgcttcactccggcattccatccatatccatccatcagaattctcagtctccacagcagcaaggcgcacgaccagcaccagcagccggcaacaaaagacacagcagcgatggcgttcgtgccggtgtgcgtgcagtgcgggacgcggagcaacccgtgccggtgcaaggtggtcgggccgacgctggggttcgtcgcgttcgtggtggccggggtcatcgagtggccgctgggggccgccgtgtacctgttccgccaccgcaagggacgacgcatcatggcgcacccggccaccgtcgtgtacccgcgcgttaccagggccatcccgatctaatcggccgaccgatcagccaggtcgcggtttcatgtccgggtttgtgtcgccaacgtactgagatgtcgtcagtccaaatttgtgaatccttttacacccgcctgcctttctttctcaataagagtcgcaaatgtgtgtggtttcagtttgcgtacatttgtactccgattgtaagcatcgccgtcaatgtacgtaatactatgtatgtcatctcagtctatccgagtaacttcctattactaacttcattctcgatcgaatataactttctattactattactaacttcattctcgttcaaatatttgtcgctctctagtttatttttgtttatttttgagttaaa

SEQ ID NO: 113322 - DNA, 1003 bp, Zea Mays
cagcacacacaagctacgctacgccccgggcgcggcgtccttgacccgagagtgcgggcgcggcgggtacccgccgtactctcgcgcgtaggcgtcgtagtaccccctcactcggctggccacgtccgcgaccgtgcccccgcgggcgtactgatcggcggactgcacccggtgcgcgccgacggagtagcgccccgtgaagtaccggtgcgcccacgtgcccgcggcgaccgcggccaggccggcgcagcaggcgacgagcgaggcggcccccgtcagcagcgccagtaccgctacgggcgcccagagcgggacggtgaggagcacgagcgggctgagcaggaccagcgcggcgagcgcggccgtgagcgtcacgctggccaggacgaggagcgcggtcagcgtgacggcaagcgcgaggaagcgcaggagctgggtggagccgtgggcgtggagcgtctggacggcgcgcccgagcagcgagtgctggcgatccgtcgacgacgccgcgtggccgcgccgggtgaccgggttgggcagcagggctgctgcgcgtggccccggcggtggccggtctgccatggcgaggcgaggtggcgactggcgggtggaaggggagagttcgttggccgctgggcgatggccggcgggggatccagggggttaaagtgcgagggctccgggtcggagcgacgtgtggcggcgcgcgcagtgctgcacgggcgcgtggcatgcgcggcgacatgtggcgacgaatggcacagtacagctgtggcagcgtggcgcggtccgcgctgaagtagagggattaagcaacgcacagagcttttgtgaaatgaaagaggtaaacgaaagcagacagcactgctggaccccttccagctgggccggcgctgaatattattacacacgatttcagaggcctatgtcctgggaaatctacagttgtaactaaagttcaaatcgaacattggtcattttattgagctccaaaaaaaggaaa

SEQ ID NO: 113323 - DNA, 524 bp, Zea Mays
tgcaatcaagaatcaaaccgttcccaatgtgctgtaacctcagtcaaaggaagaagaaaaccaccatcatatatgtctccaacagtgtggctctaataatttccctgcagacaaagtacattacacctgctggcaggactactagtaccacgccacagtgtttccagcattattattattattattattattatttttacctatgggtactgccacactgtatccatctttctctgcccggcgcttatataacgcctccccatgcttctactcctttccaatctgtgtttgtctttgcttgccccccttctcccccctcatctccccccttttcttgttcctgtgcctgtgcattggctggcgatggggtccacttctccttcaggcctggagctcaccatggctgtcccgggcctcagctcctcctctggctcaggtaagctcaggagaccccgacctgaagcgctgcttcggctcgctgaccgaggagaaccggcgtccgcgctcaccatgtgcccgcgctg

SEQ ID NO: 113324 - DNA, 1374 bp, Zea Mays
tgcaatcaagaatcaaaccgttcccaatgtgctgtaacctcagtcaaaggaagaagaaaaccaccatcatatatgtctccaacagtgtggctctaataatttccctgcagacaaagtacattacacctgctggcaggactactagtaccacgccacagtgtttccagcattattattattattattattattatttttacctatgggtactgccacactgtatccatctttctctgcccggcgcttatataacgcctccccatgcttctactcctttccaatctgtgtttgtctttgcttgccccccttctcccccctcatctccccccttttcttgttcctgtgcctgtgcattggctggcgatggggtccacttctccttcaggcctggagctcaccatggctgtcccgggcctcagctcctcctctggctcagaggggtttggatgcaacaacaacaacgggagcgggaacgggaacaacatgagggacctggacatgaaccagccggcgagcggcggcgaggaggaggagttcccaatggggagcgtggaggaggaggaggacgagcgcggcggcgccggcgggccgcaccgcgccaagaagctccggctgtccaaggagcagtcccgcctcctggaggagagcttccgcctcaaccacaccctcacaccgaagcaaaaggaggccttggctgtcaagctcaagctgcggcccaggcaggtggaggtctggttccagaaccgcagggctaggacgaagcttaagcagacggagctggagtgcgagtacctgaagcgctgcttcggctcgctgaccgaggagaaccggcggctgcagcgggaggtggaggagctgcgcgcgatgcgggtggccccgcccaccgtgctctccccgcacacccggcagccgctcccggcgtccgcgctcaccatgtgcccgcgctgcgagcgcatcaccgccgcaacggccgcgcgcaccccacgcccgccgcccgccgcgagccccttccacccgcgccgcccgtccgcggcgttttagcctagtcccaccgcatgcgactccggccggtaggggaaggagccgagagagtttggttgttagggccaggggggcaaagtggttgtgctgtgtaaatttgatgatggatggagaaaaccagcgcgggcccgtgtagctttttaggtgtaggtgtagggtttggaccttggagtcccttcgcgtcaacgtccccgtgttccgttccatgccgtgcatggctgatggatcaaaagtttgtactagcttcctatcgttgtcactccattcatgaattgccttcggacccccgcttcgatctagatatctgatgatgggcccgtttctgtttctata

SEQ ID NO: 113325 - DNA, 942 bp, Zea Mays
atgaggcgctggatcaaggagatggaggtggaggccgccgcggccacctcgtccaggtcgagtacgccctcgagggtcgtacgcaagggcaacgccactgtcagcgtctgcggcgtcaagaagaagtccaccccaagctctaggactccaggtgttcccggagccacaagcatgttgtcccccgatacagagaagaataggaagggcatgtggatccagatcgatgcgacagtgggcatagggcacgtcgtcggcatagatccccttcaacaaccagtcacctcggcagcaaacttcggcggccacatcgtttgcacgcacaactcgatcgccccccttcacttctccgagttcttaataatggtgcacggagtgcagtaccaccagacggtcatggtgcctcgggagtccatcctcaagaccgaggcggagtggctcaactctatcaaggccgaccttgtggtttcagatgttgtacccgtcgtgtgtagggcagctacagatgctggcattcgatccgtgtgtgtcacgaatttcagctgggacttcacttatgcagagtacgttgtagctgctggacatcatcatcgctcaattgtgtggcagagttctccaatggatctcgagaagtccgttccaagagtggacctgttcggaggtgttgatgttaccttgagggaaggcaagttggaggctttgtattcaacgttaatgagtagcacttgccaagctggcacaaatgggttttctcgcaagaatgtgttagggatagggaatgccaccttagagaatgaccaccatgtggatagagctgatgcaaatgaatggagggaaaaggaagaggacttggtcaacgggcacagtgcaccacatggcgtgcaacaggtcgatgagcatgagcaacaagacaaagcattcgctgggagatgttcctacccgtga

SEQ ID NO: 113326 - DNA, 1400 bp, Zea Mays
agagtgctatgctttctgtcaagactaattagcacgcccaaagtacaatggttctatcgttaattggttgtaccacacctgccagcagcagcagcagcagccctgcccactgcggtgatacagctcagctcaccgtggtgatgcagcccagcccactgcggtgatgcagcccagcccacatacaacggcccggggcacctgacctctgacagctaggtttttgcgaagggtttagccccgccggcactcggcaataatcccacctgtctgcctccctccgcactgcttctcctctcctcgcggcgcgcatccatggcggcctcgtccgcctccctcctcgcccgtcgcctcatcatgtcccgccgcttcctgtcatccccactcggctccctctctaccacaaccgcgacgcgcagtttctcgatctcttctcccgggtttaaaagcttcgttgtggagtccgaccttgagaacgagcacgaccagccccccgcggaccagaaccgccagcagacgtcgaacagcccgcgcccgcccgacaccacccgccctctcgagaacggcctcgaccccggcatctacaaggcgatactggtggggaaggtcgggcaggagccgatgcagaagcggctgcggagcgggaagaccgtcgtgcttttctcgctcggcaccggtggcatccgcaacaaccgccgcccgctggatcgcgaggagccgcaccagtacgccgacaggtgctccgtgcagtggcaccgcgtctgcgtctatccagatcgcctcggcaccgtcgcgctcaacaacgtcaagactggcactattctctatttggaaggaaatcttgagaccaaagtgttctgtgatccaattactgggctagttagacgcataagagaaatagctgtgcgttcaagtggtcgtctcttgtttctgggcaatgacgccaatgctccaaagttaggcgaagtcaagggcgtcggctacttctgatattggtttatgtttaactgagcataccagttgcagggacagagtcatcataacggtgttactttactggaatctgagtggaccaacaaatcctggcggcgattcgagtcttttgccgtgttgaattttaccagattcctgttttgtcaagctctcagcaccactgtagataccttgtaatcgttgtaacagcaacatgtaggatgtgtgatcagtaatctgtactatccttaaagtactagtttcaacggtcgttctgcgtcatatttttacaaataatcactcacatctatttcaaattaaccttgtatcccttcatacacataacctccacgtctggcccgctaaccagtcggtggataaattaaatatggtgcaggaggtggggtttgaacctaaacctgatgaaagaa

SEQ ID NO: 113327 - DNA, 1356 bp, Zea Mays
acgcttcgcgcttctcttctcctcagtttggtgggttctgctcaccagtctcgctcgcagtatacaaagtctccatagtccatcctactgcattcggagaccacggacttgggaagttggaaaaccacactctcacccacagctaggaaccatgaggaccatcatggcgaggagcccgcacgagtcctccttctccttctcccggaggaacttcaagtggcctgttcttgtcaagagcagcagccatggcgccgcggccggcgcggaggacggctccggcaagggctcggaggccgacgacgaggacgaggcggccatggcgttctcctccagctgcccgtcgttccactcggaggacttcgtatccccgtcgtacaaggcgccacctccaccgaagcagcgcagcaagaagtgtcgcgcggcggtctcccggctgcgcacggcgcttgcctcggccatcgccgggcggcaccggcaggtcgggctcggagcgcggctcacgggcacgctctacggccaccgccgcggccacgtacacctcgcgttccaggtggacccgcgcgcgtgccccgcggtgctgctcgagctcgccgcgcccacggcatcgctggtgcgcgagatggcctcgggcctcgtccgcatcgcgctcgagtgtgaccgcgccaagggcgcctgcgccttgtcgagcgccgcggccgcaaccaatggcggcggctgcaggaagctggttgaggagaaggtgtggcgcgcgtactgcaacggcaagggctgcgggtacgcggtgcggcgcgagtgcggcgccgcggactggcgcgtgctgcgcgcgctggagcccgtgtctatgggcgcgggcgtcataccggcggcgtgcggcggtggcgagggggacgtcatgtacatgcgcgctcgctttgagcgcgtcgtgggctcccgcgactcggaggcattctacatgatgaacccggacagcagcgccggcggcaatggcggcccggagcttagcatctacctccttagagtttgatcgcgcatctaccttcgctgcgcctgcgatagccaccgcgatcttgcatgctttaagctgctgtcttctcatacgtgtgtgttttcctcgtgtggttgtgaaaaatgcgtgtcagtttagacttcagactgctgcagaatgaaactttattggagaactttctttttgggggcgtttataggaagcctggttggatttcccatattttgtgatgttagtcaatcatctcccctctgcaataaaggtcacagtctcacagagtagaggcgacggtgttgtgggattaatgcagagtaatgaaacgagtatgtcttcactatcggttttgctaa

SEQ ID NO: 113328 - DNA, 1391 bp, Zea Mays
ttgtttaacacgtatatctctgctcgagagcttcggaagcggatgcgcgacgcgttttcctcgtcctggctatccacggttgccacggcggcgtacgactaccaacagatccgcggtgggcggagtaccttgcgagctccgccgtcctgccgcacctcttctcccacccctatgtccgcgcgcacctccagcaaaagttctaccgccgcttcgtcgattctgatttttctgttggaggaatgtcctcaaccacatctattcagccctcagcatcttcaggtggtgcatctacttcagctgatgagaatgcaaggcctcctgattcaggcactaattcttctggaccagcacgaagcatattgtctctacagttggaccagcggtcattacatttttctgttagtgcttgggttcttattgttgccttgattggcatctttccattggcaccacattcccttcagtataagggatatcggttgtcacttcttggcacaacatgtactacaggctatgctttgtttgctttgtacaggctaccccgagcagggaacatgcaggctgttcaggtgtggtgtcaccatgtaactgcatcaaaggattttataccattcatgtactgccttatgttttctacatccaaactgcacttgaagcttgttttggtacctgtaatttgttgggcacttgaacatgtcgctcgatttctacgtcgccattttactagctcatctttgtacaggacatacttggagcaaccttgtacatgggttgagacaaacacaaatgcagtccagtttctacgttcaaatgcagagattttgacgggctttcttttgatcctatccctgttctcgcgacagcgaaatcttatgcaaacattcatgtattggcagttgctgaagctcatgtaccattctcccttcactgccgcttatcatagagctatctggctaaaaattgggcggacaattaacccttatatccaccgttacaccccttttcttcatgacccgataaatgctggcatgagatggtggtttaggtaggttgaatgcagcactgtcagtcatgtaaagagatgcaagtatgtttatggtattattttactccaaagagaatctttgagaaaactgctgcttgggagtggtgtgattagtcccttgtgtggctttgagctgatgacaatttagtagttagcatgatcagtaactcttaactcttgtaggcttgtagctagagctagtcgagatcttagcctgtttggcatgaactgaagttaggtggggaggttattattgtgaccgaattgttttgatttttctgactattggctattgctgaccacatatcagtgttatcaaagggacgttactattctacgtgttata

SEQ ID NO: 113329 - DNA, 1377 bp, Zea Mays
ctccattgccaaggaaatttcagaggcggaattgagatagaggagggagtgggaagggagacagggaggggtcagtcgtcttcctttgtccccgtgctgctcctttgcttcggagtcttgccaagcctagattcgaggagagggctccctctctttccttgcttggcctgcatcggaaggtgcgattggcgctctctgtcctacagtgcaggccgaaaattattttacgcaggattctgatttttctgttggaggaatgtcctcaaccacatctattcagccctcagcatcttcaggtggtgcatctacttcagctgatgagaatgcaaggcctcctgattcagcacgaagcatattgtctctacagttggaccagcggtcattacatttttctgttagtgcttgggttcttattgttgccttgattggcatctttccattggcaccacattcccttcagtataagggatatcggttgtcacttcttggcacaacatgtactacaggctatgctttgtttgctttgtacaggctaccccgagcagggaacatgcaggctgttcaggtgtggtgtcaccatgtaactgcatcaaaggattttataccattcatgtactgccttatgttttctacatccaaactgcacttgaagcttgttttggtacctgtaatttgttgggcacttgaacatgtcgctcgatttctacgtcgccattttactagctcatctttgtacaggacatacttggagcaaccttgtacatgggttgagacaaacacaaatgcagtccagtttctacgttcaaatgcagagattttgacgggctttcttttgatcctatccctgttctcgcgacagcgaaatcttatgcaaacattcatgtattggcagttgctgaagctcatgtaccattctcccttcactgccgcttatcatagagctatctggctaaaaattgggcggacaattaacccttatatccaccgttacaccccttttcttcatgacccgataaatgctggcatgagatggtggtttaggtaggttgaatgcagcactgtcagtcatgtaaagagatgcaagtatgtttatggtattattttactccaaagagaatctttgagaaaactgctgcttgggagtggtgtgattagtcccttgtgtggctttgagctgatgacaatttagtagttagcatgatcagtaactcttaactcttgtaggcttgtagctagagctagtcgagatcttagcctgtttggcatgaactgaagttaggtggggaggttattattgtgaccgaattgttttgatttttctgactattggctattgctgaccacatatcagtgttatcaaagggacgttactattct

SEQ ID NO: 113330 - DNA, 1411 bp, Zea Mays
ctccattgccaaggaaatttcagaggcggaattgagatagaggagggagtgggaagggagacagggaggggtcagtcgtcttcctttgtccccgtgctgctcctttgcttcggagtcttgccaagcctagattcgaggagagggctccctctctttccttgcttggcctgcatcggaaggtgcgattggcgctctctgtcctacagtgcaggccgaaaattattttacgcaggattctgatttttctgttggaggaatgtcctcaaccacatctattcagccctcagcatcttcaggtggtgcatctacttcagctgatgagaatgcaaggcctcctgattcaggcactaattcttctggaccagcacgaagcatattgtctctacagttggaccagcggtcattacatttttctgttagtgcttgggttcttattgttgccttgattggcatctttccattggcaccacattcccttcagtataagggatatcggttgtcacttcttggcacaacatgtactacaggctatgctttgtttgctttgtacaggctaccccgagcagggaacatgcaggctgttcaggtgtggtgtcaccatgtaactgcatcaaaggattttataccattcatgtactgccttatgttttctacatccaaactgcacttgaagctcttttctggcagttgttttggtacctgtaatttgttgggcacttgaacatgtcgctcgatttctacgtcgccattttactagctcatctttgtacaggacatacttggagcaaccttgtacatgggttgagacaaacacaaatgcagtccagtttctacgttcaaatgcagagattttgacgggctttcttttgatcctatccctgttctcgcgacagcgaaatcttatgcaaacattcatgtattggcagttgctgaagctcatgtaccattctcccttcactgccgcttatcatagagctatctggctaaaaattgggcggacaattaacccttatatccaccgttacaccccttttcttcatgacccgataaatgctggcatgagatggtggtttaggtaggttgaatgcagcactgtcagtcatgtaaagagatgcaagtatgtttatggtattattttactccaaagagaatctttgagaaaactgctgcttgggagtggtgtgattagtcccttgtgtggctttgagctgatgacaatttagtagttagcatgatcagtaactcttaactcttgtaggcttgtagctagagctagtcgagatcttagcctgtttggcatgaactgaagttaggtggggaggttattattgtgaccgaattgttttgatttttctgactattggctattgctgaccacatatcagtgttatcaaagggacgttactattct

SEQ ID NO: 113331 - DNA, 1392 bp, Zea Mays
atttcagaggcggaattgagatagaggagggagtgggaagggagacagggaggggtcagtcgtcttcctttgtccccgtgctgctcctttgcttcggagtcttgccaagcctagattcgaggagagggctccctctctttccttgcttggcctgcatcggaaggtgcgattggcgctctctgtcctacagtgcaggccgaaaattattttacgcaggattctgatttttctgttggaggaatgtcctcaaccacatctattcagccctcagcatcttcaggtggtgcatctacttcagctgatgagaatgcaaggcctcctgattcaggcactaattcttctggaccagcacgaagcatattgtctctacagttggaccagcggtcattacatttttctgttagtgcttgggttcttattgttgccttgattggcatctttccattggcaccacattcccttcagtataagggatatcggttgtcacttcttggcacaacatgtactacaggctatgctttgtttgctttgtacaggctaccccgagcagggaacatgcaggctgttcaggtgtggtgtcaccatgtaactgcatcaaaggattttataccattcatgtactgccttatgttttctacatccaaactgcacttgaagcttgttttggtacctgtaatttgttgggcacttgaacatgtcgctcgatttctacgtcgccattttactagctcatctttgtacaggacatacttggagcaaccttgtacatgggttgagacaaacacaaatgcagtccagtttctacgttcaaatgcagagattttgacgggctttcttttgatcctatccctgttctcgcgacagcgaaatcttatgcaaacattcatgtattggcagttgctgaagctcatgtaccattctcccttcactgccgcttatcatagagctatctggctaaaaattgggcggacaattaacccttatatccaccgttacaccccttttcttcatgacccgataaatgctggcatgagatggtggtttaggtaggttgaatgcagcactgtcagtcatgtaaagagatgcaagtatgtttatggtattattttactccaaagagaatctttgagaaaactgctgcttgggagtggtgtgattagtcccttgtgtggctttgagctgatgacaatttagtagttagcatgatcagtaactcttaactcttgtaggcttgtagctagagctagtcgagatcttagcctgtttggcatgaactgaagttaggtggggaggttattattgtgaccgaattgttttgatttttctgactattggctattgctgaccacatatcagtgttatcaaagggacgttactattctacgtgttata

SEQ ID NO: 113332 - DNA, 308 bp, Zea Mays
atgggtcaaccatttcacaatatcgacaatgtaataaaagcctcagcaataatggttcatgagcaaggccattttagccctcgcaaggttactgtctccacaagtggttttgtccctcagttaggaacccaattgcttgctgccgccagtcttaatgcaaggacagatgaggttagaaactggataatgactataaacagaaaggagaaccttaacttgcttcttggcactttaagaggtgaacttaacctcagaaaaaaaaacaaatagtgctatctgaatatgccatgctttctggagtgaacggc

SEQ ID NO: 113333 - DNA, 1655 bp, Zea Mays
acacacggcaactcctcccctccccgatccctttctccctccgcgcgcggtatcggcccgtccgtcacacacaccatggcctccacaccgcggacgcccgcgccagacaggtcgccgccgccgccgctcgtcacacacaccatgccgtccacgccgcgaacgccggtgtcggacaggtcgccgccgcccgtcacgcacaccatgccgtcgacaccgcgaacgccggcgccggacaggtcgccgccgcccgtgcccactcctcccccgcccctggagacgcctccgccgccgtctccctcgtcacagccgggcgacgagtaccacacgccgccgccgtctctggccgacgggtcgccgcgggaggaggccagcttccccagcgacggggcccccaagagcccgcagctctcgcccatgcgcctcgccgcgccacgcctcctgccgccgcccagcccacccacccccaccgcgcagaacgggcaaggagaagaagggggcgcgaaggccgcggcgcgcgagccgctccgcctggcgacgggcctcgcccggtcgccgtcttcgcagaggtcgctcgccaccgccaccaactccctttctccgtcgccctcgccgacgcctccgtcgccgctgactcccgcgcccgtggtcgacaccagcagcaacaacaataataacaggagcggccagagcacgcccaagcgcgcagagacgaaggtgccgctgccgctgccgtcgccggccgccacggctgcggtcgcggttcgcttcgacccagtcgaggaggccgtcacgtcgccgctgcacctcggcaaggcgcgcctcgaccagcagcaggagcagcacgcggcggcggcggagaacgcgggatcatccgtgccccccgatgtggcggccgtggccgcggtcggcgagcggagggagctgtcggtgacgctgcgcctggccacggcggtgctcagcctcgcggccttctcggtcattgccagcgcccggacgtccggatgggccggcgactactacgcccaccacctgcagtacaggtacgccgtcgcagtgaacgtgatcgtctgcgcctactcgatcgcgcaatcgttcggcgaaatccgccgcctgatctcacccaggtttatattccggagcatgtcaagctactactgcagcctgttcctggaccaggctctggcgtacctcctcatgtcggcgtcgtcggcggccgcgtcgcgcaacgacctgtgggtgtccaggttcggcacggacgccttcaacaggaagatcaccagcgccctgtggctgtccttcattgcgttcctgatgctcgctctgaacgcgctcatctccacggctaatctcttcagcatggtctgacacggctgccctgacattgttgggatccagtactactagttgtaaattttggagtaactacagccacggattagtcggagcacacgctgttctttttaactggcgcatcaggaccacacttttatgatttttgttatcaggggctaatataatgtttttcttttgtttatatataggatttctaagcatcccaaatgttttttttcttgatcagccgttaggtacgataagattatcaacaacttcctctgtattctattctactcatgtaaagcaccggtttcgttcgt

SEQ ID NO: 113334 - DNA, 1913 bp, Zea Mays
gtattatcacaaaacaaaccggtgtagattcaggctggatttgagcctgtttagcagcgctatccgcttggcccaattcgtctactgctcctccagctcctccgctgcgccgccggtcgccgcccgacaccgccgaagaagagcagacgccgagtccaggacgtcgccgcggggctcggggaacgcggtgttgccatcgcgaggaaggtcggaagttcgctgttcgcccgccggatcggcaccgtcgccaccgcccatggcaaccgtcgcccccgtcgtctccgacctcgtcgacttcctcaacgcgtcgcccaccgcctttcacgccacgaggcgaagcggcggctgaaggcggcggggttcgtgcagctgtcggagcgggaggagtgggcgggtctcgagcccgggcgcaagtacttcttcacacgcaaccactccactattgtcgcttttgccatcggcgcaaaatacgttgctggcaatgggttccacatcatcggtgcacacactgacagcccttgcctgaagctcaagcctgtctccaaggtaaccaaaggaggttaccttgaggttggggttcaaacgtatggtggtgggttgtggtacacatggtttgaccgtgatcttactgtagctggtagagtgattatacgggagaagaaggatggcgtggtctcttatgcacacaagcttgtacgggtacaggaaccaattatgcggatacctactttggctattcacctggacaggactatctcctcagaaggtctcaaggttaacaatcagagtcatcttgttccagtgctggctacatgtatcaagaatgaaatgcagaaatttgtagcagataatggcccaaagcaggcatccgagaatgcgaacacaaagcatcatccattactattgcagttgattgctaaagaggctaactgtgagcctggtgagatatgtgactttgaactgcaattatgtgatactcaaccaagtgttgtagcaggtgccacgaaagagttcatcttttcaggaaggcttgacaatctttgcatgtcattttgttcattgaaggctctaatagattccagttctgttgaacactctcttgatcatgaatctggtgtgagaatggtagctctatttgaccatgaagaagttgggtctgattctgctcagggagctggttcccctgccatgttggatgctttatcaagaattactgggtcttttaactcttcaggttccaagttgctagaaaaagctattcagaggagcttcctggtctctgctgacatggcacatgctttacatcccaactatatggacaagcatgaggagaaccaccagcctaaattgcatggaggacttgtgatcaagcacaatgccaatcaacgatatgctacaaatgctgtgacagcatttatttttcgagaaattgctgagagacaccagctacctatacaggattttgttgttcgcaatgacatggcttgtggttcaacaattggcccaatacttgctagtggtgttggtattcgcactgttgatattggagcaccccaattatcaatgcacagcatcagagaaatgtgtgccgctgacgatattagctactcatatgagcatttcaaggcatattttgaagaatttactgaattggatggcaaggtcaaggtggattactaaggcatatagcacaataggttagctttgttacaagctgtacttttatacaaattcgataagcaagtggagaacaaatttgggagaatgtgctagttgtgtttgcattgccatacgatgttctaaattgtatctttttatcgaacccaagtacccacatgtttgaaattcttttggtgaatgacttcctatcaagaaaatgaactagcctataaattggctccaacatgcagcct

SEQ ID NO: 113335 - DNA, 1935 bp, Zea Mays
gtattatcacaaaacaaaccggtgtagattcaggctggatttgagcctgtttagcagcgctatccgcttggcccaattcgtctactgctcctccagctcctccgctgcgccgccggtcgccgcccgacaccgccgaagaagagcagacgccgagtccaggacgtcgccgcggggctcggggaacgcggtgttgccatcgcgaggaaggtcggaagttcgctgttcgcccgccggatcggcaccgtcgccaccgcccatggcaaccgtcgcccccgtcgtctccgacctcgtcgacttcctcaacgcgtcgcccaccgcctttcacgccgttgacgaggcgaagcggcggctgaaggcggcggggttcgtgcagctgtcggagcgggaggagtgggcgggtctcgagcccgggcgcaagtacttcttcacacgcaaccactccactattgtcgcttttgccatcggcgcaaaatacgttgctggcaatgggttccacatcatcggtgcacacactgacagcccttgcctgaagctcaagcctgtctccaaggtaaccaaaggaggttaccttgaggttggggttcaaacgtatggtggtgggttgtggtacacatggtttgaccgtgatcttactgtagctggtagagtgattatacgggagaagaaggatggcgtggtctcttatgcacacaagcttgtacgggtacaggaaccaattatgcggatacctactttggctattcacctggacaggactatctcctcagaaggtctcaaggttaacaatcagagtcatcttgttccagtgctggctacatgtatcaagaatgaaatgcagaaatttgtagcagataatggcccaaagcaggcatccgagaatgcgaacacaaagcatcatccattactattgcagttgattgctaaagaggctaactgtgagcctggtgagatatgtgactttgaactgcaattatgtgatactcaaccaagtgttgtagcaggtgccacgaaagagttcatcttttcaggaaggcttgacaatctttgcatgtcattttgttcattgaaggctctaatagattccagttctgttgaacactctcttgatcatgaatctggtgtgagaatggtagctctatttgaccatgaagaagttgggtctgattctgctcagggagctggttcccctgccatgttggatgctttatcaagaattactgggtcttttaactcttcaggttccaagttgctagaaaaagctattcagaggagcttcctggtctctgctgacatggcacatgctttacatcccaactatatggacaagcatgaggagaaccaccagcctaaattgcatggaggacttgtgatcaagcacaatgccaatcaacgatatgctacaaatgctgtgacagcatttatttttcgagaaattgctgagagacaccagctacctatacaggattttgttgttcgcaatgacatggcttgtggttcaacaattggcccaatacttgctagtggtgttggtattcgcactgttgatattggagcaccccaattatcaatgcacagcatcagagaaatgtgtgccgctgacgatattagctactcatatgagcatttcaaggcatattttgaagaatttactgaattggatggcaaggtcaaggtggattactaaggcatatagcacaataggttagctttgttacaagctgtacttttatacaaattcgataagcaagtggagaacaaatttgggagaatgtgctagttgtgtttgcattgccatacgatgttctaaattgtatctttttatcgaacccaagtacccacatgtttgaaattcttttggtgaatgacttcctatcaagaaaatgaactagcctataaattggctccaacatgcagcctcacaaagggctgtgttta

SEQ ID NO: 113336 - DNA, 1879 bp, Zea Mays
gaccgttggataggaacggcagtgcgatctctgccgtccatgtcaactaaccagatgtcccggcctcccgggaaacaggctccccactccgtgctacagaagaagaaaaaaaaaaacaagccccggcggagctaaagtacggaggctggcagcagccacagccagtcgacagacaacacagtggctcaccacgcgggcgcccccgcaacgcacaagcctgcttacctacccaacccctcgcgcgacgaaacacagagcgatctgttgcctgaggcgagttccctccctcctctccgaaaagttctcaccttgtagttagcatgtggctatttatccacgtctccgcctgcgctcacccaccccacccccactcgttgtgagtacacagtacactcgcgaaccgctccaccaacaccaggccaccgggagcgcggcaggccccggacgggattggcagacgcgcgcagaggcacgtaccactaccgcagcagcgcgggcgcaggcagggacccgggccggcggcatgggcgtccttcggagcacgcagagccttcaggcggaggtggacgagctgcgcgccgcgctcctggcaggcggcgggcacgaggccgcgggcgggtggcgccggtcggcgggccacgcggacgccaagcgcagccccggcggcgacgccggaggggccgcggcgcgcgccgtgtgcgtcacgggagggatctccttcgtcgggttcgccgtcgtcgaccgcctcctccggcacgggtacaccgtccgcctcgcgctggagacgcaagaggacatggacaagctgcgggagatggagatgttcggcgacgacggcagggacggagtgtggacggtgatggcgaacgtgatggacccggagagcctgcaccgcgccttcgacggatgcgctggcgtgttccacacctccgccttcgtggaccccggcggcatgtccggctacacgaaacacatggcaacgttagaagcccaggcagcggagcgggtgatcgaagcctgcgtcaggacagggtccgtcaggaaatgtgtcttcacctcttccttgctggcatgtgtgtggaggcagaacaaccctcatggccggcggtgccctaccatcatcgacgagagctgctggagcgacgagagcttttgccgcgacaacaagctgtggtttgcgctcggcaagacggcagcggaaaaggctgcctggagggcggcgcggggacgagacctgaagctggtcaccatctgccccgcgctcgtcaccggcccggggttccgccgccgcaactccaccgcgtccatcgcgtatctcaaaggggctcgtgcaatgctcgccgacggcctgctcgccacggcgaacgtggagacggtggccgaggcgcacgtactcgcgtacgaggcgatgggcgacaacaccgccggaggcaggtacatctgctacgaccacgtcgtcaagcggccggaggagttcgccgagctggagcgacagctggggctgccgggaggggccgcggccgcgcagggctctgacgaccggccggccaggttcgagctctgcaagcggaagctgtccaggctcatgtcctccaggaggcggtgcacgtacgacacctactactccgtcgcgtttgactagcaagctcaggcggaattgccatgaagggttgaccaccagtctgcaatccctgtcccattgacaagtggacaccggaagcgaagcggagaaatagcaaaactccgcttgattgtccttgtggacgagaaagagcaggaggggagccaagtatgtgtgcaatgatgtaccgggtgcaattttgtacagagttttgatgcagcaataaaggtgagtcgcccataggcagcgcgcgtcaca

SEQ ID NO: 113337 - DNA, 1759 bp, Zea Mays
gaccgttggataggaacggcagtgcgatctctgccgtccatgtcaactaaccagatgtcccggcctcccgggaaacaggctccccactccgtgctacagaagaagaaaaaaaaaaacaagccccggcggagctaaagtacggaggctggcagcagccacagccagtcgacagacaacacagtggctcaccacgcgggcgcccccgcaacgcacaagcctgcttacctacccaacccctcgcgcgacgaaacacagagcgatctgttgcctgaggcgagttccctccctcctctccgaaaagttctcaccttgtagttagcatgtggctatttatccacgtctccgcctgcgctcacccaccccacccccactcgttgtgagtacacagtacactcgcgaaccgctccaccaacaccaggccaccgggagcgcggcaggccccggacgggattggcagacgcgcgcagaggcacgtaccactaccgcagcagcgcgggcgcaggcagggacccgggccggcggcatgggcgtccttcggagcacgcagagccttcaggcggaggtggacgagctgcgcgccgcgctcctggcaggcggcgggcacgaggccgcgggcgggtggcgccggtcggcgggccacgcggacgccaagcgcagccccggcggcgacgccggaggggccgcggcgcgcgccgtgtgcgtcacgggagggatctccttcgtcgggttcgccgtcgtcgaccgcctcctccggcacgggtacaccgtccgcctcgcgctggagacgcaagaggacatggacaagctgcgggagatggagatgttcggcgacgacggcagggacggagtgtggacggtgatggcgaacgtgatggacccggagagcctgcaccgcgccttcgacggatgcgctggcgtgttccacacctccgccttcgtggaccccggcggcatgtccggctacacgaacaaccctcatggccggcggtgccctaccatcatcgacgagagctgctggagcgacgagagcttttgccgcgacaacaagctgtggtttgcgctcggcaagacggcagcggaaaaggctgcctggagggcggcgcggggacgagacctgaagctggtcaccatctgccccgcgctcgtcaccggcccggggttccgccgccgcaactccaccgcgtccatcgcgtatctcaaaggggctcgtgcaatgctcgccgacggcctgctcgccacggcgaacgtggagacggtggccgaggcgcacgtactcgcgtacgaggcgatgggcgacaacaccgccggaggcaggtacatctgctacgaccacgtcgtcaagcggccggaggagttcgccgagctggagcgacagctggggctgccgggaggggccgcggccgcgcagggctctgacgaccggccggccaggttcgagctctgcaagcggaagctgtccaggctcatgtcctccaggaggcggtgcacgtacgacacctactactccgtcgcgtttgactagcaagctcaggcggaattgccatgaagggttgaccaccagtctgcaatccctgtcccattgacaagtggacaccggaagcgaagcggagaaatagcaaaactccgcttgattgtccttgtggacgagaaagagcaggaggggagccaagtatgtgtgcaatgatgtaccgggtgcaattttgtacagagttttgatgcagcaataaaggtgagtcgcccataggcagcgcgcgtcaca

SEQ ID NO: 113338 - DNA, 2034 bp, Zea Mays
gaccgttggataggaacggcagtgcgatctctgccgtccatgtcaactaaccagatgtcccggcctcccgggaaacaggctccccactccgtgctacagaagaagaaaaaaaaaaacaagccccggcggagctaaagtacggaggctggcagcagccacagccagtcgacagacaacacagtggctcaccacgcgggcgcccccgcaacgcacaagcctgcttacctacccaacccctcgcgcgacgaaacacagagcgatctgttgcctgaggcgagttccctccctcctctccgaaaagttctcaccttgtagttagcatgtggctatttatccacgtctccgcctgcgctcacccaccccacccccactcgttgtgagtacacagtacactcgcgaaccgctccaccaacaccaggccaccgggagcgcggcaggccccggacgggattggcagacgcgcgcagaggcacgtaccactaccgcagcagcgcgggcgcaggcagggacccgggccggcggcatgggcgtccttcggagcacgcagagccttcaggcggaggtggacgagctgcgcgccgcgctcctggcaggcggcgggcacgaggccgcgggcgggtggcgccggtcggcgggccacgcggacgccaagcgcagccccggcggcgacgccggaggggccgcggcgcgcgccgtgtgcgtcacgggagggatctccttcgtcgggttcgccgtcgtcgaccgcctcctccggcacgggtacaccgtccgcctcgcgctggagacgcaagaggacatggacaagctgcgggagatggagatgttcggcgacgacggcagggacggagtgtggacggtgatggcgaacgtgatggacccggagagcctgcaccgcgccttcgacggatgcgctggcgtgttccacacctccgccttcgtggaccccggcggcatgtccggctacacgaaacacatggcaacgttagaagcccaggcagcggagcgggtgatcgaagcctgcgtcaggacagggtccgtcaggaaatgtgtcttcacctcttccttgctggcatgtgtgtggaggcagaacaaccctcatggccggcggtgccctaccatcatcgacgagagctgctggagcgacgagagcttttgccgcgacaacaaggtgagtgattgggagaaagcatagatggcgtctgtatctctcttttccgttgatcgcacaaactctaatcggggagaggccacataaccatctgggagaaaaatccatatcgagtttctcagctgtgaataatgtgatgcatcgttttttttcagctgtggtttgcgctcggcaagacggcagcggaaaaggctgcctggagggcggcgcggggacgagacctgaagctggtcaccatctgccccgcgctcgtcaccggcccggggttccgccgccgcaactccaccgcgtccatcgcgtatctcaaaggggctcgtgcaatgctcgccgacggcctgctcgccacggcgaacgtggagacggtggccgaggcgcacgtactcgcgtacgaggcgatgggcgacaacaccgccggaggcaggtacatctgctacgaccacgtcgtcaagcggccggaggagttcgccgagctggagcgacagctggggctgccgggaggggccgcggccgcgcagggctctgacgaccggccggccaggttcgagctctgcaagcggaagctgtccaggctcatgtcctccaggaggcggtgcacgtacgacacctactactccgtcgcgtttgactagcaagctcaggcggaattgccatgaagggttgaccaccagtctgcaatccctgtcccattgacaagtggacaccggaagcgaagcggagaaatagcaaaactccgcttgattgtccttgtggacgagaaagagcaggaggggagccaagtatgtgtgcaatgatgtaccgggtgcaattttgtacagagttttgatgcagcaataaaggtgagtcgcccataggcagcgcgcgtcaca

SEQ ID NO: 113339 - DNA, 1846 bp, Zea Mays
aatctaggctcatagtatatcatcttttggctaatgtgtttacaaaatatgttttttcatgctcgtcttcatgtcgatcgagctgcatatttgaaaaaaaaaaacatcgacactaaggatgttgaacaaaaatcgagattaaatttatgtatacgagttccagattaatattgtgcacacgaagacgaacatgctgcaatcagactttgacggatctcctacgagccatcagctcgtccactaagcgtccgacatcatcgtaagatgacccaccgttggccaccgcgcgcctggccttctccccgagctccttggccatctcccgtattgcctccgcgtcctcaccgtcgcccatcactctcccgatggccttcgcgatcacctcaccaccaatcacggcgcgccgggtctccagcatggacgcgtagtccgtggatcccacggcgacaccgaccttgagcagctccactaccagcttctcgttgtagaactggtcggcgtaccgcggccacgtcaccataggcacgccggcgctcacggcctccagcgtggagttccacccgcagtgcgtgacgaacccgcccaccgccgggtgggtcaagatgagcatctgcggcgcccagccccggatgataaagccgcggtcgccgcgcgccaccagctccgcgaacccatcgggcatccattccgactcctcggtgtccgcgccgccgacgacccagacgaagttcttgccggacaggtcgaggccgcgcgcgagctcgcgcatctcgggcggcgagaaatgggtcagcgtgccgaaggacacgtacaccaccgagccctctggtttcgcgtccagccactgctggcaggcgcccgcgtcccgcgagagcccgttgttggcgcccctcgtcgccacgtccttgctggcgagcgccaccggcccgacgagccatgcgcggcgccccagcgtcgtggtgtagtgctccatgaagtccggctccagctcgtggaagctgttgaacacctcgccgtagctcctctggtccgcagcgttcatgcgctggaagaaggcccagcgctccggccgcttcttgggctccatcatctggctgcgcctcagctcgacgcggcgcggcagccccggaagcagcacgagcgcgtccggtcgtcgggggcggcctccacggggttgttgcgcagcgtagactcgctgcaggcccgcgagaacaagctgctgccgaggaacgctatccgcgggacgccgtgctccgcggcggcgtcggcggaccagtcgaagaagctgtcggtcacggcggcgtccgggcggttctccgccaagaaccggtcgaacggctcgcggagtaactgggccccgtggaagaacttttcgcggtcgtccatggtattaagcgccggggcgcactcgacgccggggggcaggccgacgtcggggaaaggcacgaccgcgatgtcgatggccagggcgccctcggttccgcgggaggcgtcgttggcgcggtctaccgccgagcggatgagttgggcgttcaccggtgtggtgaggatggtgcacctgacgcctcgggcagcgaagagcgcggccatgtcggcgatcgggatgaggtgccccggcgcgaggaacgggaagaagaggatgtgcagcggctgcggctcatctttgatggccatggctggctgcgcgacggcggctgcgcagctgcactcttgcatattttataaggaagggtatagctagaaagcggagtagcaagagatttgaaacttttggcggaagatggtcgtgtatttgtaggatgcatgatgactggagagacttatatttgcagttttctattgtact

SEQ ID NO: 113340 - DNA, 1270 bp, Zea Mays
cggcgctcacggcctccagcgtggagttccacccgcagtgcgtgacgaacccgcccaccgccgggtgggtcaagatgagcatctgcggcgcccagccccggatgataaagccgcggtcgccgcgcgccaccagctccgcgaacccatcgggcatccattccgactcctcggtgtccgcgccgccgacgacccagacgaagttcttgccggacaggtcgaggccgcgcgcgagctcgcgcatctcgggcggcgagaaatgggtcagcgtgccgaaggacacgtacaccaccgagccctctggtttcgcgtccagccactgctggcaggcgcccgcgtcccgcgagagcccgttgttggcgcccctcgtcgccacgtccttgctggcgagcgccaccggcccgacgagccatgcgcggcgccccagcgtcgtggtgtagtgctccatgaagtccggctccagctcgtggaagctgttgaacacctcgccgtagctcctctggtccgcagcgttcatgcgctggaagaaggcccagcgctccggccgcttcttgggctccatcatctggctgcgcctcagctcgacgcggcgcggcagccccggaagcagcacgagcgcgtccggtcgtcgggggcggcctccacggggttgttgcgcagcgtagactcgctgcaggcccgcgagaacaagctgctgccgaggaacgctatccgcgggacgccgtgctccgcggcggcgtcggcggaccagtcgaagaagctgtcggtcacggcggcgtccgggcggttctccgccaagaaccggtcgtccatggtattaagcgccggggcgcactcgacgccggggggcaggccgacgtcggggaaaggcacgaccgcgatgtcgatggccagggcgccctcggttccgcgggaggcgtcgttggcgcggtctaccgccgagcggatgagttgggcgttcaccggtgtggtgaggatggtgcacctgacgcctcgggcagcgaagagcgcggccatgtcggcgatcgggatgaggtgccccggcgcgaggaacgggaagaagaggatgtgcagcggctgcggctcatctttgatggccatggctggctgcgcgacggcggctgcgcagctgcactcttgcatattttataaggaagggtatagctagaaagcggagtagcaagagatttgaaacttttggcggaagatggtcgtgtatttgtaggatgcatgatgactggagagacttatatttgcagttttctattgtact

SEQ ID NO: 113341 - DNA, 315 bp, Zea Mays
atggagagatggggcgccggccagcagaacagcggtagagagagaagcagagaggaagatggaggagtcgagcggctgtggcgaggcagagcgcggccggacgggcgtagggagcaggcgcggccgagctggaggagatgggagggtcgcgccatggggagctcgtccgggcgccgagagggaaagggcgtcggtatgcaagagaagccggccagaggcgagcgcatcgtgaagaagaacgaagttctgatggcggtgtatgcaggattacggataaggaagtcagcaggcggtggatatttcttcaggaattaa

SEQ ID NO: 113342 - DNA, 2118 bp, Zea Mays
cagcggcaaccgaccgacggaacgaagcagccggtcgcggtgccgatggacaagcgcggcagcttcggggggacctcgtccgacgacgtggaggcgccgctgctcccgccgcccgcgcgcgacgacggggcacaggagttgcggttgccgccgtcctgggtgcgcgcgctgctcgcgcacaggtatccggccgtggcggctggccccgcggcagcagcggccgtgtgcgcgctcgtggacctcgccgtcggcgggggcgcccacgcccaccaccaccgagaggcgcgcaacatgctcgcagtgctcgcctgggtcttcctctggtgggtcacgggcgccgtgccgctggccgtcgcctccatggcgccgctcttcctcttcccgctgttcggcgtctcctccgcggacgccgtcgccaaggcctacatggacgacgtcatctcgctcgtcctcggcagcttcatactcgctctcgccatcgaacactaccaaatccaccgccgcctcgctctcaacatcacgtcgctcttctgcggggacccggtgcggccgccgctgttgctgctgggcatcaccggcaccactttcttcgtcagcatgtggatccacaacacggcgtgcacggtcatgatgatgcccgtggcgacggggatcctgcagaggctgccgcgcgggggcgccggggccgggaccggggcgcacgacgaggtccgccgcttctccaaggccgtggtgctcggcgtcgtgtacgcgtcggccatcggcgggatggccacgctggcgggcaccggcgtcaacatcatcctcgtcggtatgtggtccacctacttcccggagcaggagcccatcacctttagctcctggatgtccttcggcctccccatggcgctcatcctcttcttggcactctggatcacactctgcctcatgttctgctccaacaacacgggaaaggcactctccggttacctggacagaagccatctcagaagagagctcagcttgttaggtccaatggtatttgcagagaagatggtcttggcagtgtttgggggtctaattgtgctatggatgactaggaaccttacagctgacataccagggtggggggctctcttccacaacaatgtcggagacggaacagtcaccatcatgatggccacgctactcttcataattccaagccggaagaacaagggcgagaaactgatggactgggacaagtgtaggaagctccagtgggacattatcctcctcctgggggcaggattcgccatcgctgaaggcttcaggtcaagcggcctgaccgacatcctctctgacgggctccggttcctgaagggcgcagagacggtggtcattgtacctgtggcctgcatcgtcagcggtgtcgtcacagagttcacgtcggacgacgcgaccacgacgctgctgctccctctgtttgctgaattggccaaggcgatcgatgtgcacccagcgctgctcatggtttctggagcagttggggctcagctttcgtacttgttacctactggatcaccgtcaaacgtaattgggttcagcactggccacattaccatcaaggatctcgtcaccacagggcttcccctgaaacttgtcggaatcgcggctctgacagtcttgatgccaactctaggatcacaggtttttggcacaaacagcaagttctaggagcggaatgcatattggacggttcattcctccaagcccacgttctaggagcggaatgcatattttggaccgttcattcctcgaagcccagttgtatatatgtacagtactttcccttatcttgtatctacggcctagtcaaggttagtgggagggtaagggtatactctttgatctgtacaaggtcaaacattgaggattgtatgcaatgctccaatctgtgtgaaaatagctacaggagtgctccttgagagcgaaatgaagtcaaagggagagcaatttaaaattcaagaggaacttctcagtcacagcccatcctaacatggaagctcagtcatattccaaaacttcagcatacaaaggatgatggatttgaaatggagaaaatttcagtgcaaatgttggatatgtcagtaccctact

SEQ ID NO: 113343 - DNA, 1525 bp, Zea Mays
cgaccgacggaacgaagcagccggtcgcggtgccgatggacaagcgcggcagcttcggggggacctcgtccgacgacgcgggggcgccggggccgggaccggggcgcacgacgaggtccgccgcttctccaaggccgtggtgctcggcgtcgtgtacgcgtcggccatcggcgggatggccacgctggcgggcaccggcgtcaacatcatcctcgtcggtatgtggtccacctacttcccggagcaggagcccatcacctttagctcctggatgtccttcggcctccccatggcgctcatcctcttcttggcactctggatcacactctgcctcatgttctgctccaacaacacgggaaaggcactctccggttacctggacagaagccatctcagaagagagctcagcttgttaggtccaatggtatttgcagagaagatggtcttggcagtgtttgggggtctaattgtgctatggatgactaggaaccttacagctgacataccagggtggggggctctcttccacaacaatgtcggagacggaacagtcaccatcatgatggccacgctactcttcataattccaagccggaagaacaagggcgagaaactgatggactgggacaagtgtaggaagctccagtgggacattatcctcctcctgggggcaggattcgccatcgctgaaggcttcaggtcaagcggcctgaccgacatcctctctgacgggctccggttcctgaagggcgcagagacggtggtcattgtacctgtggcctgcatcgtcagcggtgtcgtcacagagttcacgtcggacgacgcgaccacgacgctgctgctccctctgtttgctgaattggccaaggcgatcgatgtgcacccagcgctgctcatggtttctggagcagttggggctcagctttcgtacttgttacctactggatcaccgtcaaacgtaattgggttcagcactggccacattaccatcaaggatctcgtcaccacagggcttcccctgaaacttgtcggaatcgcggctctgacagtcttgatgccaactctaggatcacaggtttttggcacaaacagcaagttctaggagcggaatgcatattggacggttcattcctccaagcccacgttctaggagcggaatgcatattttggaccgttcattcctcgaagcccagttgtatatatgtacagtactttcccttatcttgtatctacggcctagtcaaggttagtgggagggtaagggtatactctttgatctgtacaaggtcaaacattgaggattgtatgcaatgctccaatctgtgtgaaaatagctacaggagtgctccttgagagcgaaatgaagtcaaagggagagcaatttaaaattcaagaggaacttctcagtcacagcccatcctaacatggaagctcagtcatattccaaaacttcagcatacaaaggatgatggatttgaaatggagaaaatttcagtgcaaatgttggatatgtcagtaccctact

SEQ ID NO: 113344 - DNA, 777 bp, Zea Mays
tttgatgaaaagattaaaatgttgtgatatgatgacctcaaaataactgtatatgtgcacatcaacaagcaatggtgcaaatggggtcgcatgtatcacaacgaccactcatggataagcaccaatgaacagacaaaggcactttcagtttctcaacatatgtcgtcatatgactgtaagttattgccagcaggttttccaatctgcaagcaagctatgggagggacggttggagtgtagagctccccaaaagcttgccagcagaatgggttattcaggtggtagtggggtacttgcactggcctgagttgcacaccagtaagagagattcctgaacaaggtaagctgtcactgcatgcaaaatggacaggcttgattgtaaatgttcctctgatattctcgtattgaacccctgatactgccactgctgatgtttgattcctgcaagtgcttctgtcacaataaaactgatctatgataatgggtgtttgaacctctgagacttgtatatttgagaaccttatgtcttgaaccaatcctacgccaccctgcgagaaatgagagtttactttgtttagctcagtaggaattgttgttttggctgccatcatcactttccttcttgggactttccaaggttattggttgtatagatatcaaattgataacatatacatatccattccttttttttagttttttttttcttttgtgacattattctgtactaatgtctgatgttgaattagaattttgtttgtacatatgttctcaagc

SEQ ID NO: 113345 - DNA, 1416 bp, Zea Mays
tacaccaccacacagcgcaacattttgccaagatccaagagatttctctgtgttttcacgcacaaggatcgtgccccggccagccccagctggtagcgttgcttctcgatcttgcgattgttagctagcttgcaaggtcaaggacgggccggcgatggtgaacctggtggaggcgcagaaaccgctgctgcacttcctggtcaggagggccgggctgcggcagcacgccgtcgacgtcgatggcgccggcacggtgatgaccttctgggtgcccaaggacaaggttcccaaggagaagggcaccgtgcaggacatcacgggctccggtccagctacggccgaggccgccgccagcaaggtaccggccgctccggcggcggcgaaggagggcagcagcagcagcaggcccgccgtggtgctcgtgcatggcttcgccgccgagggcatcgtaacctggcagttccaggtcggcgtgctggcgaagcagtacgacgtgtacgtgccggacctgctcttcttcgggggctcgacgacgccgtcgacggaccggtccccggggttccaggcggagtgcctggcggccgcgctgcggaagctgggcgtgggggcgtgcacggtggtggggttcagctacggcgggatggtgtcgttcaagatggcggaggcgcacccggacctggtccggtcgctggtggtgtcggggtccgtggtggccatgaccgactccctcagcgaggcgacgctggaggggatcggcgtgaagtcgtcggccgagctgctgctgccggagtccgtcaaggggctcaaggcgctgctctccgtcgctacctaccggaagctctggttccccgaccgcctccacagggactacctcgaggtgatgttcaccaaccgcaaggagagaggcgagctgctggaaggtttggtggtcagcaacaaagacgccaccgtgcccgtcctgccccagaaaatactcctgttgtggggagagaacgacaacatcttcaacatcgagctcgccaagacaatgaaagagcagctcggcgagaagacgacgctgcagagcataagcaaggccggccacctggtgcacctggagaggccctgcgtctacaaccggctcctcaaggagttcctggcgtgcgtcacggctaccgaaaccaccaacaaggagtgacaagggcagctggaaggagttggccgcctacatttgccacgagttctgtctgtttcgaaataacgagagagaacggacgacacttccaccacccaatatgtctattgtattgttgttgtttgagaaagattttctgccacgtgcctaaagtgcaagaatcaacgtttaacccatataaatatgtactaatagttttaaaagcaggtattcaatgagctatatattattatttacaaaca

SEQ ID NO: 113346 - DNA, 1192 bp, Zea Mays
acagcgcaacattttgccaagatccaagagatttctctgtgttttcacgcacaaggatcgtgccccggccagccccagctggtagcgttgcttctcgatcttgcgattgttagctagcttgcaaggtcaaggacgggccggcgatggtgaacctggtggaggcgcagaaaccgctgctgcacttcctggtcaggagggccgggctgcggcagcacgccgtcgacgtcgatggcgccggcacggtcggcgtgctggcgaagcagtacgacgtgtacgtgccggacctgctcttcttcgggggctcgacgacgccgtcgacggaccggtccccggggttccaggcggagtgcctggcggccgcgctgcggaagctgggcgtgggggcgtgcacggtggtggggttcagctacggcgggatggtgtcgttcaagatggcggaggcgcacccggacctggtccggtcgctggtggtgtcggggtccgtggtggccatgaccgactccctcagcgaggcgacgctggaggggatcggcgtgaagtcgtcggccgagctgctgctgccggagtccgtcaaggggctcaaggcgctgctctccgtcgctacctaccggaagctctggttccccgaccgcctccacagggactacctcgaggtgatgttcaccaaccgcaaggagagaggcgagctgctggaaggtttggtggtcagcaacaaagacgccaccgtgcccgtcctgccccagaaaatactcctgttgtggggagagaacgacaacatcttcaacatcgagctcgccaagacaatgaaagagcagctcggcgagaagacgacgctgcagagcataagcaaggccggccacctggtgcacctggagaggccctgcgtctacaaccggctcctcaaggagttcctggcgtgcgtcacggctaccgaaaccaccaacaaggagtgacaagggcagctggaaggagttggccgcctacatttgccacgagttctgtctgtttcgaaataacgagagagaacggacgacacttccaccacccaatatgtctattgtattgttgttgtttgagaaagattttctgccacgtgcctaaagtgcaagaatcaacgtttaacccatataaatatgtactaatagttttaaaagcaggtattcaatgagctatatattattatttacaaaca

SEQ ID NO: 113347 - DNA, 699 bp, Zea Mays
gcagcgagtaacgtacagaagctgatctgtggtggtctgtgtgcatgcgcgcatcggcatcggcatcgcaggtgatgttcaccaaccgcaaggagagaggcgagctgctggaaggtttggtggtcagcaacaaagacgccaccgtgcccgtcctgccccagaaaatactcctgttgtggggagagaacgacaacatcttcaacatcgagctcgccaagacaatgaaagagcagctcggcgagaagacgacgctgcagagcataagcaaggccggccacctggtgcacctggagaggccctgcgtctacaaccggctcctcaaggagttcctggcgtgcgtcacggctaccgaaaccaccaacaaggagtgacaagggcagctggaaggagttggccgcctacatttgccacgagttctgtctgtttcgaaataacgagagagaacggacgacacttccaccacccaatatgtctattgtattgttgttgtttgagaaagattttctgccacgtgcctaaagtgcaagaatcaacgtttaacccatataaatatgtactaatagttttaaaagcaggtattcaatgagctatatattattatttacaaacatgatcacgtggtgtttatatggttgattttatctatgtactttaagtggttgagaaaaaggttaagacgtgccacatatatagggctgg

SEQ ID NO: 113348 - DNA, 1208 bp, Zea Mays
aacagcgatcacgtccttgagtcagtagagcggagaggggagttagaaagatcagcaatggcgaagttttctaacagtgccatagttctcctaatgttgctcatcgcagcatggaggacgacgccggcgatgtcccatttcaggatgggcaagccaccagccgagccggagctggactacggaggccggtatgtacaccaaaaaaatcccatcaatccctatattattgtcatggtgaagaatgagaagaaaacaggcccgtatgatccagagtttaagaaggcggctggtgaggctgcactcttgatcagggccaagcaagagatgacgaagcgcatggtgaaacacatcgagaccatcgcctccagcgcgaaaatcgcgatccacctgaagctggtgctgttgatcaagtcggcggagttcatgagggccatggccggagaggtcgcggaccagatgttcgtcgtcagccagcagcacgccagcgtcgcggccgccgacatcgtggcggcgctcaggttccagcaggagatccttaagaaggccgccgaacgctgcaaggccatctccagcgacgttgccatggcacagaagatgaagcatgagatgctcaagggcgtggcgcacgacctctgcaatgtcgcaggaaacatagccatcagcatgtcatcgatggctgagatggcaatgagcgtgtctggtcgggtagtagttggtgtcgatgtcaaagtccatactgacatggagagccgagctctggctaaagttgaagctgaagctgtcgctgaagctcaagctctagacaaagccgaaggcgaagccgttgctggggctgaaggagaagctaaaaaaggcaagagcggcggtgtcagcgctggtggcgacgccggaggatatgcaggtggcaaaaccgatgctgatgcaactgcttctggtggcaaaatcgatgccggtgctggagctggtggcgatgcgagcgtttctggaggcgcaaagataggaggtggtgtatctggaggcgcaaagataggaggtggtgcgtctggaggtgcaaaggttggctctgatgtaggaggatctgttggtgggggtgctgacgtcaatgctggagctggagctggagctggtgctgatgccggtgtctatactgttgctaagggtaataaggcaggtggaagtgatgctaaggctgatatttcggggggtgc

SEQ ID NO: 113349 - DNA, 2447 bp, Zea Mays
atggcgaagttttctaacagtgccatagttctcctaatgttgctcatcgcagcatggaggacgacgccggcgatgtcccatttcaggatgggcaagccaccagccgagccggagctggactacggaggccgggtgaagaatgagaagaaaacaggcccgtatgatccagagtttaagaaggcggctggtgaggctgcactcttgatcagggccaagcaagagatgacgaagcgcatggtgaaacacatcgagaccatcgcctccagcgcgaaaatcgcgatccacctgaagctggtgctgttgatcaagtcggcggagttcatgagggccatggccggagaggtcgcggaccagatgttcgtcgtcagccagcagcacgccagcgtcgcggccgccgacatcgtggcggcgctcaggttccagcaggagatccttaagaaggccgccgaacgctgcaaggccatctccagcgacgttgccatggcacagaagatgaagcatgagatgctcaagggcgtggcgcacgacctctgcaatgtcgcaggaaacatagccatcagcatgtcatcgatggctgagatggcaatgagcgtgtctggtcgggtagtagttggtgtcgatgtcaaagtccatactgacatggagagccgagctctggctaaagttgaagctgaagctgtcgctgaagctcaagctctagacaaagccgaaggcgaagccgttgctggggctgaaggagaagctaaaaaaggcaagagcggcggtgtcagcgctggtggcgacgccggaggatatgcaggtggcaaaaccgatgctgatgcaactgcttctggtggcaaaatcgatgccggtgctggagctggtggtgcgtctggaggtgcaaaggttggctctgatgtaggaggatctgttggtgggggtgctgacgtcaatgctggagctggagctggagctggtgctgatgccggtgtctatactgttgctaagggtaataaggcaggtggaagtgatgctaaggctgatatttcggggggtgctaaagctggtggtgatgctggagcagatgctagcgctggtaccggtgctggtgtaggcatctccaagagtttcacgattggcggtggcgttgcaggaaaggctggcgggagtggcaacgctgaagctggtgtcgatgctggtgttggaggaaaggcaggagagagtgggaaggcatataccggagctgatgctgttgtctccaaagacgccaaagttggtggtggcgctggaggaagtgtgggagggagtggcaatgctggcactagcgctaccgtaggtgctggtgtctcaggagacgctaaagttggtggtggcgtcggaggaaacgtgggaggaagtggcaaggcatataccggagctgatgcaggtacaagtgtttcgagcggaggatctgctggcgccgatgcgggtaccggtgctaccgtgggtgctggtgtctccaaagacgccaaagttggtggtggcgtcggaggaagtgtgggagggagtggcaatgcctataccggaactggtgccggcgtttctagtggaggatcctccggtggcgccgatgctggcgctggcgctaccgtaggtgctggtgtctcgggaggcgctaaagttggtggtggcgttggaggaaacgcgggaggaagtggcaaggcgtatacaggaaccggtgccgatgcgggtgtttccggtggaggatccggtggcgtcgatgctggtgtctccggaggcgccaaagttgacggcaacattggaggaaaagcgggagggagtggaaatgcatatactggagctgatgcaggtacaagtgtttcaggtggaggatccggtggcgccagtgcaggtaccagtgctaccgtgggtgctggtgtctccggaggtgccaaagttggtggtggcgtaggaggaaatgcaggaggaagtggcaacgtctatactggaaccggtgccgatgcaggcgtttctggtggaggatccggtggcgccgacggtggtattggagctaacataggtgctggtgtcttcggaggcgtcaaatttggtggcggcgccggaggaagtgtaggaggaagtggcagtgctgctgcaggtgcttctggagggagtaaatcatcggggggtggctcagattttggatatggttcagcgagcaaggagttatagaggatgatgaccactcaccaccgtaagatcgatatgatccgtcccaaggaatttattcctgccctttttgttatcgcgtgttgttttattaccacgcaccagtcaatagtgtggaggcaatatacattgattccccttgactggacaatacaaagataaccttatgtatttcatttttgcttacttaacattgccatgtaaaccagaatagctgaggcttattctcatgataaacatgacatttattttacggcttc

SEQ ID NO: 113350 - DNA, 290 bp, Zea Mays
ataaacgaataacaaacttgttattccttatttacttcataatttttatcaattgatgaatgtattagtagtcggtgagagtgttgcttgcttgctattatagtttttactagtgttatatgtgtggtggatggataactagtgcaaggtcacttaattatacaacttattatttatattacattctctttactaataattttatatcaaatcatgaactcgttgttcattacatagattttggatcatgatatcattaatcattacgatacttattgattatgagaaga

SEQ ID NO: 113351 - DNA, 5107 bp, Zea Mays
ctccgctcctcgtcctcacccctgcttcgcttgcctagccttccgtcgtcccctgctgtcagtccccgaagacggcggcgccgccggccatggaggaccccctcgccacggcgccgccaccgcgccggccccaccgggagcggcggcaccggcggaaggcgtcggacgccgccgcggccgcgctggcggcgcaggcggcgtcctcctacggcgacgtcttcggcgggcccccgcggttcgcgccgcctcctgcggcgttcgccgcgggggcggggactgcgccggcggactacgccgaggtgttcggcggagtcgcggcctcctgctccatcccctacctcgacctgccgcccgccgttgccagcggagtcggcgccggcgggtacggcgagatcttcggccgcttcgacttcggggagtttgcggtgccgtacgaggacatgctttctggtgcagagtctctggtggaggagatcgcgtcaccaagtgggagctcaagatcatcaactagaaaagaatcggtccgattggatactgagccatctgtaccctatcaacaagttccagatgctggttctggcaggcactctgatgacgagcaatttcatgcagtctcctttcctccagatggcgagcaaacgttcactatgtcatataacaagatcacccggggaaggccagatgatcttgttgaaatgaccgcttgcatagtagaaccttcaattagctatgtggttgactcttgcaatttgtcaaatgatttagaaatggattatgtcccagtaatggacagtggcacaaatgctaatgttgtgaaagaaaagatgaacctaccaaacattgcagattccggcctggagtgtgctgatagtgcttatgtggttgatcatcagcaacatatcccaacatgccctcccatctctgaaaatatttgccaggatgaaaactacaacaagaggtctagcacacattcagtgtcaagcgaggaagcaccttcccctgactatccattcttaagggtatccaacatcaaccttccagcagcacccatcaaagtacaaccaccaccgatgcccccatctaaattgcttaataaaaagggaagcaacgaaaatggagattctgatgtcaatcctaactcagttgctgctgctgctgctatgaaggaagcaatgcaatttgctgaagccagattaaaagctgcaaaagaattgatggagataaaaggtgtcagctctaaattccgtaagcggccagttcatcacaaaagcacaaaatcaactgaaattaaggaatacaatgcacctgaaaaagcacatctatttgaagaaaagctggatatgagaagattggtaaaagaggaaaatcaaagcaatgatatagctttgctggataaaaacacgggcagtgttgcacttgagcacagtgatcatgacaaaaaagggattatatcaccagggaagcctaaggagatgatgcaaaacgacagtgaactagaacaattaggagagtggacatcagatgctgatttttatgaattggttagcaatgatcagaaatgcagaactaatggagctgaatgcagagacaatggtctgatgacaaattccttagccaagcttgaccggtctgagaatgaaaaattaggaggctttgcaggtgagtcaaaaaggtctaggaaattgtgggattgtaacaacagaacatgtctgcggactgaacatgtaaatcagggaaaagatggtataggttcattggaggttgaacaaaagaatactaggtctccagaagttacagaacatgtaaatcagcaaaaagatgctatagattctgtggaaactgaacaaaagactcctaggtcacctgaagtttctccttgtaatgaaagggtgacgtatgaagagccaaccaaaggaaataatgatctgatgacaaattcttccaccaagctcgaccagtctgtgaaagtaaaggaagggggttttgcaggtgagccaaaaaggtttagaaaattgtggggcagtaacagtacaacagttctgagaacagtgcatgtaaatcaggaaaaagatgctatagctttcgtggaggctgaagaaaaggcacctaggttttcggaagttcctccttgtgatgaaagggtggcatcccaagaggcaactgattcccgtttagaacaatgtctaggggtggggaattctctaggtcacgaaaatggtgcacaatttgagacttcatgcgtgaataatttaccttcagaggtccatgcagacccagaaatctccagttcattttcggaatgttgttcatcaggaagtcatgccaatggtaatgaaaatcattctgaaagcacagctcaggaaactgcatttgtagggaactctagccaaaatgtcaacaataaagaggaacttgagcttccgtgcattgatgggttgccttgtacttcagcaaggaatcagattttgcaggaacattttaatgttattaatgctgatgaaaacaaggaaattgaagtgaaaatatcaaaattagaagggtcttccaaatcttatttgaattttgaggaagaaaagttacccagttttgttgatgaatcatgcctacagaacaaaaatgaaagagaaaatgaagtaaattcagaatcacccatccatgaaaagatgacaaagttcgggtttgaggacaaaggtgatgcatatgaagattttcaagagggagatatggatcaggttgctggatctgctgaagaggaaggttatgttacttcaggaagtggtattgctaatgaaagcgaatatgaagaagcagaagatgatatatttgtaggagacatggaatcaaatgtaagaacatgtggtagttttgacaaagatccatatcagcgccaagaatcacaaggatcatggggaccccaagatttggataatagaatggacaaaatcagtgatacaatatctcatggaaaggaaagggagactaaagaatccttgctggagaatgttgaaaagacagcggcagaagaagtactaaaccatgactgcagggaagggcagaaatccatggaaaccgttgactacatatggcccaaatatgtatgtgcagaatttaatgtaagtagtgacaaagatggtaatgtgtttgattctgctgatgaacttatcagcgacaatggcagtgattatgccatgaacatgagcacaatgtcaaataatctgcaagcttcattttcagaagcatgcagtagcattcaacatctttctcaaaaacctcagtctatttctgctgagaaggctgatgaaagcactcctgttcttggaaatcttgaagtggactgcggagaagcaggtagaaaaattccaagtgaaaattgtgaagtctcagaagaagggcaaaatattggaatcgaaatggaagaaagaaaaagagaagacaatatatcaaatataaggttcatggatcagcaaccattttacttggacagtgacattagacctaaggctgcagaaggtactgcatcagaaactattctaaaatccagagaagaggatcttaatgttcagagaactaaagtgaggaatgacataaaagaggctgaaggagaactcgagaaggaggtaaaagttgttgaagagaaagaaaaagaatgcaaaatgggaaaagagaaggaacaagataaagagagacaaagaagagagttggaagaacagaaggaacgggaaatggagcgagcaaaagataggcttgctgttcagagagctacaagagaagcacatgaaagggcattcgccgaggttcgagctaaggctgaaagaatagcattagaaaggatcacctcagcacgtcaaagagcatccgcagaagcccacgagaaagaagagaaggcaaccgctcaagcagctctggagcaggcttcaagggaagctagaatgaaagcagaacgtgcagccgttgagagagcaactgctgaagctcgggagagggcaattgaaaaggcaaaagctgctgcagatgcaaaggagcgaattgggaagttcaggtcctctttcaaggatagttttaaggcacctaatcaggacaatcaacatgaggcatcatctcagaagacggcttataataagcatggaaaaagcatggattcttgtgttgaagtagtcgaggttgagtcagctctacgacataaagcaaaattggaaaggcaccaacgcacagctgagcgagcggcgaaagcccttgctgaaaagaatatgcgggatatgctggtgcagagggagcatgctgagaaacatgtaagatagttggtcatcaggaaagaaaaacatattcctctgtttctaaataacatttgttatccatgaactttttacttttggatacagagactggctgaatttcttgatcctgaagtcaagagatggtcaaatggaaaagaaggaaatctgcgagcattgctgtccacattgcaatatatacttggttcagacagtggctggcaggcagttcccctcacagaccttatcacagctgctggtgtcaagaaggcatacaggaaggcaaccctttgtgtccatccagataaagtgcagcaaagaggtgctacaatcagacagaaatacatttgtgagaaggtgtttgatcttcttaaggaggcttggaataagtacaattctgaagagcgctagtgggataggtggttctttatcaattgtttacgggggacaggatattggctaggtatctctgtagcatttgccatactgattattttttacattggtgaaaatatgcagctgtagagggcatcttctggtcattttttatccatatcaatgcaatagtagagcatatgttgtctcttatctagcatccccaagtttacctttgctagactttagttgtgcaccttttgcgttactttgaccattcctagcaaagtttgcctacgtttggcgatcaacttgaagtagttgaatttatattttctttctgtggctgagtgactcgcagttgcgggggccttctattcgaactagtagctgcaatatgctcacggagaatttgtaccatttgtattaaagaatatcatgtgttatgttactagttggag

SEQ ID NO: 113352 - DNA, 5017 bp, Zea Mays
ctccgctcctcgtcctcacccctgcttcgcttgcctagccttccgtcgtcccctgctgtcagtccccgaagacggcggcgccgccggccatggaggaccccctcgccacggcgccgccaccgcgccggccccaccgggagcggcggcaccggcggaaggcgtcggacgccgccgcggccgcgctggcggcgcaggcggcgtcctcctacggcgacgtcttcggcgggcccccgcggttcgcgccgcctcctgcggcgttcgccgcgggggcggggactgcgccggcggactacgccgaggtgttcggcggagtcgcggcctcctgctccatcccctacctcgacctgccgcccgccgttgccagcggagtcggcgccggcgggtacggcgagatcttcggccgcttcgacttcggggagtttgcggtgccgtacgaggacatgctttctggtgcagagtctctggtggaggagatcgcgtcaccaagtgggagctcaagatcatcaactagaaaagaatcggtccgattggatactgagccatctgtaccctatcaacaagttccagatgctggttctggcaggcactctgatgacgagcaatttcatgcagtctcctttcctccagatggcgagcaaacgttcactatgtcatataacaagatcacccggggaaggccagatgatcttgttgaaatgaccgcttgcatagtagaaccttcaattagctatgtggttgactcttgcaatttgtcaaatgatttagaaatggattatgtcccagtaatggacagtggcacaaatgctaatgttgtgaaagaaaagatgaacctaccaaacattgcagattccggcctggagtgtgctgatagtgcttatgtggttgatcatcagcaacatatcccaacatgccctcccatctctgaaaatatttgccaggatgaaaactacaacaagaggtctagcacacattcagtgtcaagcgaggaagcaccttcccctgactatccattcttaagggtatccaacatcaaccttccagcagcacccatcaaagtacaaccaccaccgatgcccccatctaaattgcttaataaaaagggaagcaacgaaaatggagattctgatgtcaatcctaactcagttgctgctgctgctgctatgaaggaagcaatgcaatttgctgaagccagattaaaagctgcaaaagaattgatggagataaaaggtgtcagctctaaattccgtaagcggccagttcatcacaaaagcacaaaatcaactgaaattaaggaatacaatgcacctgaaaaagcacatctatttgaagaaaagctggatatgagaagattggtaaaagaggaaaatcaaagcaatgatatagctttgctggataaaaacacgggcagtgttgcacttgagcacagtgatcatgacaaaaaagggattatatcaccagggaagcctaaggagatgatgcaaaacgacagtgaactagaacaattaggagagtggacatcagatgctgatttttatgaattggttagcaatgatcagaaatgcagaactaatggagctgaatgcagagacaatggtctgatgacaaattccttagccaagcttgaccggtctgagaatgaaaaattaggaggctttgcaggtgagtcaaaaaggtctaggaaattgtgggattgtaacaacagaacatgtctgcggactgaacatgtaaatcagggaaaagatggtataggttcattggaggttgaacaaaagaatactaggtctccagaagttacagaacatgtaaatcagcaaaaagatgctatagattctgtggaaactgaacaaaagactcctaggtcacctgaagtttctccttgtaatgaaagggtgacgtatgaagagccaaccaaaggaaataatgatctgatgacaaattcttccaccaagctcgaccagtctgtgaaagtaaaggaagggggttttgcaggtgagccaaaaaggtttagaaaattgtggggcagtaacagtacaacagttctgagaacagtgcatgtaaatcaggaaaaagatgctatagctttcgtggaggctgaagaaaaggcacctaggttttcggaagttcctccttgtgatgaaagggtggcatcccaagaggcaactgattcccgtttagaacaatgtctaggggtggggaattctctaggtcacgaaaatggtgcacaatttgagacttcatgcgtgaataatttaccttcagaggtccatgcagacccagaaatctccagttcattttcggaatgttgttcatcaggaagtcatgccaatggtaatgaaaatcattctgaaagcacagctcaggaaactgcatttgtagggaactctagccaaaatgtcaacaataaagaggaacttgagcttccgtgcattgatgggttgccttgtacttcagcaaggaatcagattttgcaggaacattttaatgttattaatgctgatgaaaacaaggaaattgaagtgaaaatatcaaaattagaagggtcttccaaatcttatttgaattttgaggaagaaaagttacccagttttgttgatgaatcatgcctacagaacaaaaatgaaagagaaaatgaagtaaattcagaatcacccatccatgaaaagatgacaaagttcgggtttgaggacaaaggtgatgcatatgaagattttcaagagggagatatggatcaggttgctggatctgctgaagaggaaggttatgttacttcaggaagtggtattgctaatgaaagcgaatatgaagaagcagaagatgatatatttgtaggagacatggaatcaaatgtaagaacatgtggtagttttgacaaagatccatatcagcgccaagaatcacaaggatcatggggaccccaagatttggataatagaatggacaaaatcagtgatacaatatctcatggaaaggaaagggagactaaagaatccttgctggagaatgttgaaaagacagcggcagaagaagtactaaaccatgactgcagggaagggcagaaatccatggaaaccgttgactacatatggcccaaatatgtatgtgcagaatttaatgtaagtagtgacaaagatggtaatgtgtttgattctgctgatgaacttatcagcgacaatggcagtgattatgccatgaacatgagcacaatgtcaaataatctgcaagcttcattttcagaagcatgcagtagcattcaacatctttctcaaaaacctcagtctatttctgctgagaaggctgatgaaagcactcctgttcttggaaatcttgaagtggactgcggagaagcaggtagaaaaattccaagtgaaaattgtgaagtctcagaagaagggcaaaatattggaatcgaaatggaagaaagaaaaagagaagacaatatatcaaatataaggttcatggatcagcaaccattttacttggacagtgacattagacctaaggctgcagaaggtactgcatcagaaactattctaaaatccagagaagaggatcttaatgttcagagaactaaagtgaggaatgacataaaagaggctgaaggagaactcgagaaggaggtaaaagttgttgaagagaaagaaaaagaatgcaaaatgggaaaagagaaggaacaagataaagagagacaaagaagagagttggaagaacagaaggaacgggaaatggagcgagcaaaagataggcttgctgttcagagagctacaagagaagcacatgaaagggcattcgccgaggttcgagctaaggctgaaagaatagcattagaaaggatcacctcagcacgtcaaagagcatccgcagaagcccacgagaaagaagagaaggcaaccgctcaagcagctctggagcaggcttcaagggaagctagaatgaaagcagaacgtgcagccgttgagagagcaactgctgaagctcgggagagggcaattgaaaaggcaaaagctgctgcagatgcaaaggagcgaattgggaagttcaggtcctctttcaaggatagttttaaggcacctaatcaggacaatcaacatgaggcatcatctcagaagacggcttataataagcatggaaaaagcatggattcttgtgttgaagtagtcgaggttgagtcagctctacgacataaagcaaaattggaaaggcaccaacgcacagctgagcgagcggcgaaagcccttgctgaaaagaatatgcgggatatgctggtgcagagggagcatgctgagaaacatagactggctgaatttcttgatcctgaagtcaagagatggtcaaatggaaaagaaggaaatctgcgagcattgctgtccacattgcaatatatacttggttcagacagtggctggcaggcagttcccctcacagaccttatcacagctgctggtgtcaagaaggcatacaggaaggcaaccctttgtgtccatccagataaagtgcagcaaagaggtgctacaatcagacagaaatacatttgtgagaaggtgtttgatcttcttaaggaggcttggaataagtacaattctgaagagcgctagtgggataggtggttctttatcaattgtttacgggggacaggatattggctaggtatctctgtagcatttgccatactgattattttttacattggtgaaaatatgcagctgtagagggcatcttctggtcattttttatccatatcaatgcaatagtagagcatatgttgtctcttatctagcatccccaagtttacctttgctagactttagttgtgcaccttttgcgttactttgaccattcctagcaaagtttgcctacgtttggcgatcaacttgaagtagttgaatttatattttctttctgtggctgagtgactcgcagttgcgggggccttctattcgaactagtagctgcaatatgctcacggagaatttgtaccatttgtattaaagaatatcatgtgttatgttactagttggag

SEQ ID NO: 113353 - DNA, 423 bp, Zea Mays
atgggatattgggatctaacaagaacagagaatggacaaccgcagcgtcagacagagcagatgggagatggcagcagaatagcagatcacgtacctcagtacctcacgacggcagatgggttggctgacggcgcgaccacagagctggcggcggtggacgcggccacggaagcgcggctgtcggctggagtggcggtgcgcagggaagcgcggctgcgcgcgtctccaagcggtgacgggctggcggcgcgcaggtgcgggctgacggctggcggcgcgcagggaagcgcggggctggcggcgcgcaggaaggtgcgcggggatggcggcgcgccgtggggagaagcggggctggcgtcgcgcagagaagttgcgcgtgtgcgccgtggggagaagcggtgcgcacggaaattagggatataa

SEQ ID NO: 113354 - DNA, 859 bp, Zea Mays
acctaaagagagaatcgacgagcgccagaggataacattagcaaggcgatagataagaggaaggaaagaacataggcagccgaagcgactgtcgcgaggcaaggccatcgtccgccatgacgctctccctctccacctctttcctccccatccccgccgccgcgaggaccaccgcccgcaccctacgctccgtcgtcccctcccaggggatgcgctgctcgatgcgcaagaaggggttgcacccggagatctacgaggacgcgaaggtgtactgcaacggcgagctggtgctggtgacggggggcaccaagccggagtacacggtggacgtgtggtccggaaaccacccctactatgtcggcgacacctcggcgctcgtggtcatggacagccagatcgagaagttccgcaagaagtggggccacatcaaggagtactggcccgaggaccagtggagggagatgcacccagacggcgacccggagttcgagcccgagggggacaactgattgatggctccccgtcttcctcacccggtgcgtggtcaccggtccagtttacatttgccctcttgaatggaatcgagactctgtctgttcgcattgctctccaggtgttcggttaatgttcggaatggaaaatgtacaattactactacttcacgagatagggtcttgttgatcatgggcccccaaatacaatgtgctttctgcaatgcactctagggtaggatggtattgatcaaacaagcaaatgatcctggttcgaggaaatggatatttctcactaggagtatacgctgatgcttgactacagcttgagtcgtctgctgataacctgataccgcatactgtttgat

SEQ ID NO: 113355 - DNA, 1193 bp, Zea Mays
acctaaagagagaatcgacgagcgccagaggataacattagcaaggcgatagataagaggaaggaaagaacataggcagccgaagcgactgtcgcgaggcaaggccatcgtccgccatgacgctctccctctccacctctttcctccccatccccgccgccgcgaggaccaccgcccgcaccctacgctccgtcgtcccctcccaggtacgcacgttcgtacacaccggccctccctctcgccattcctgcacggatcttcgtcgtcgccgccgctaattcctgagtccggaacctggacggcgcggtgcaggggatgcgctgctcgatgcgcaagaaggggttgcacccggagatctacgaggacgcgaaggtgtactgcaacggcgagctggtgctggtgacggggggcaccaagccggagtacacggtggacgtgtggtccggaaaccacccctactatgtcggcgacacctcggcgctcgtggtcatggacagccagatcgagaagttccgcaagaagtggggccacatcaaggagtactggcccgaggaccagtggagggagatgcacccagacggcgacccggagttcgagcccgagggggacaactgattgatggctccccgtcttcctcacccggtgcgtggtcaccggtccagtttacatttgccctcttgaatggaatcgagactctgtctgttcgcattgctctccaggtgttcggttaatgttcggaatggaaaatgtacaattactactacttcacgagatagggtcttgttgatcatgggcccccaaatacaatgtgctttctgcaatgcactctagggtaggatggtattgatcaaacaagcaaatgatcctggttcgaggaaatggatatttctcactaggagtatacgctgatgcttgactacagcttgagtcgtctgctgataacctgataccgcatactgtttgatcaaactagcctcctgttgctaggtgatccaatttccgagtcatagttttatacaaccaatttttccatgcgactgaactaattgagtgtccatgtgttgcatgatatataaaacatgtcgtgacatacggccatatgggtggaatagaatatttgtaaaatctcatgccattacaaacaattagcaccaacatataattcaagctaatttctataaaataaaacaaaa

SEQ ID NO: 113356 - DNA, 1304 bp, Zea Mays
cccgagtaggctataccacctcccatgcgctctcacacaccccgctggccggctcacgcagaatagcactgcaggcctcagcctccctgtgcgctgtgcctccccaaaccccggcaccaaaaagggcctccgcgactgcgaccgatggctgccgccgaggccattgccaggggcgcgctgtcccgctcccgcgtggtggcgaggggactcgtgcacgcggcgcaggtggttggcctggccgtgttcctccgcgccttcgccgagttcccctggactgccgccgcggccccgcccatcctccgcgccgccgcttccttcctcgccccaccgcgcctctacttcctcgccgccaacgtcatcgtggtcgccctcgccacgctcttccgccgcgacgcggcctcatcctcgccgccgggctccagcggcggcgacgcgcagcacccgttcctcgcgttccttggcccggcgctgccgccgatcaccgaggcggaggagccctccgggcaggaggcgccgccggaggtggtgttcgaggacaaggaggcggtgcacgtgaggacgttgcgcgcccagcccccgcggcggagcatgtcggagaagacgggcggcggcggcggcggcggcgcagcgggcagtgcggcgtcgccggagctgcggcgagccaagtcggagaacggcaggcggcggcaacggcggtcgtcgtcgtcggcggcggcggcggcggtggcggagctgggggtggacgacggagaggcgttccggctggcggtcgaggcgttcatcgcgaagcagcagacctggttccaccgcgaggagtccctggtcgcccgtgccgacgccggtggggaagacggcccggcgatcgccggcgccgcggtggcggtgcagtgagcgagtgatcgagcaaaacgcaaccagtgaaccaaccctgcttgctgctgtgctgcaataacagtgtgattactgattggtgcgcgcgaaaggatcgggagaagagaacagggggccaacagccaactcggcgaaccaaaccaaggctgcttcttgctgcttttgttaatggaaaaaaaaggttttgcgttttggccgccgctcgtctttcctcctccaccgtacgtccgtatctgaagtttccgagggcattcttcatttcaacttgtgtcggctcttctcgtctgaacgccgagagcggcgacggcaggatgtatatgaagtctccgactccgtgtgcattttccttcggtgtagtgtatcagagcacctccaacagcttgtctcccaatactattaactatggatcatct

SEQ ID NO: 113357 - DNA, 789 bp, Zea Mays
atggagacagccacctccatggagcaccagaccggtggggaagacgagtcggtcgcgcccctaggtggtggacgcactggccaccggctttgtccgcctcgtcgagccgcccgatgcgacaccacgcgtgaaccacgaaacgaaggagagcgacgaatccttaccgattggatggtccctccctgtcctctgttctggacctacctcaacctgttcctccgccggcgcgcccgccgcctactcaacgtcgtggacccctacgtgaccatcgacatctcggagcccggcggcgaggtgcgctactcacgctacggccccgtctccgacaacgacagcacctacgaggaggtgaaggcgtacctgagcggcgccgtgcgctcgcaggacgcgcgcgagctccgcgtcgagggtgcccgggagggcaacggcctcgtcgtcagcatgcgcgacggccaggacgtggccgacgagttccgcggcgtcccgctctggtggtcctcggtggtcgcagcggagcgagaggaggtggcgtgggaatggagcaggctgttgaggagcgcagtgggacgccaccgaggggggagtcagcggagaatgcgacggaggtggtacgaggcgtccgcaacgccgtcgcggcggcccacggcggcaatcggcgaaggtgaattttggaggcgagaacgagatgccgggagcctgcgggttacggcatgggcagatccagaatcggagacggagagggagggggcaaggggcggacgcaactcgattgttctgctgctggattga

SEQ ID NO: 113358 - DNA, 630 bp, Zea Mays
ccttgagaatccttttcagtttggtccactgtctcatcatccatcgaatcacggcccaggcacacaatctaaaaggcaaaagaattatagaggcagagctggacatagtcttcaggtatctcattgtctgttctcagatagtactacaatgatctagcctctataaaatttattttagtgattcattgcatcatattactcctatctttttgcaatatagtttggattcacattagccttgtaacaaaaaataaattctcaaaacgttattatgatactcctaattagattggtacgctagacaatgtgccatacaactaattcgtttgaattttgcatgcagttgaatttaaggttcctcttcccttgtttggaagaggttatgatcattgtacgctcccggctcaatgttgaacactcttgaagtacactgtgaagttgcagaggatggtcatcagaatctcaaagatgaagaattgccataaaggtgctgatgagttctttgatgatatatgtaatttcaattatatgaactataagaaagtgcaaattgaataagtggagatgatatagtattacatatttatatcatcaaaataatattaatattacgatgatattttatcacaa

SEQ ID NO: 113359 - DNA, 114 bp, Zea Mays
atggatttgtacacgtggaatttttttaaaaaagaaccttgtgatgtgaccatggaaataacaggattttgcatgctatatagggggtgtttggttctgtggactaaagtttag

SEQ ID NO: 113360 - DNA, 1017 bp, Zea Mays
acctaataagcaaagaatccctttcacaggctctctcctctcttccgccacccgcggataaacaaagcgcggtcgcgtcgcgcaccacctctgtcctcgcagagacacgcacgcaacagcatcactgaccctcaccaccgcacctggcatcgaccgatttcatctatagtagctgaccctcgtcgatcgtcaccatggaggacctgcagcaccacgtcgagggcgtgagggcgcgggggcgccatcaccaccagcaccagctcgtgcgcgagcgcggccgccgtcgcatcgtcaaggccgctgccgcggaggagcgcgccctcgttgtgccgccggaggaggagacctcgacggaggacaagctgctggaggggccacgggatcatgaaggagacgatgaagaggtggtggtggagcagaaggtggcgctgctgcggcagctggtgccgggcggcgagggcatggccgtggagggtctgttggaggagacggccgactacatcgctgcgctcaaggcgcaggtcggcgccatgcgcgcgctcacctgcctgctgtccggttccggttccggttccgacctcgacgcgctgcggccagagtcgctggctgctggcgtcctcacgccggacaaccccatgtgagatccagatccacagcaaccagcgccattcctggactctggaggacgtctgttgctgttgctttccactgggtggattggttttaatttacccaagtctatattagagtttttgtcagattcgtttccacatctgtgcaccgaagcaacgttttggatgacaatacgagactgttgaaggtcttacggagtgctttattcgaagcacgcttggttgtcgaaagagcttagttttgtccaaaggcaccaggagaaagcaaagtgcgcaacaaacggagcgggagagcgggcatgctggcgggtgccaacaaccttatctttctacgatctataatgcaaaatactaaataggaatagtttttttttttgcatatata

SEQ ID NO: 113361 - DNA, 126 bp, Zea Mays
aaaattatttaaaaagtccattgcccctatcaggttttctttatggagaacagagaacaaacacaaacaaatcagatggcacataatgttgctcgcacaccatgtgcagacatctcaaacaccatt

SEQ ID NO: 113362 - DNA, 1092 bp, Zea Mays
tcagtataaacattactttactactatacaaagcgcgacgtaaaagtacgacaccgttcgtccacgtcacctttaaaatttttagccgttcgatcagattttagcggccaagaatccctccgtgtatcaaatcctggaatagcctcgatggttccagacagcgaacgaacgggatgaggaaaaggacccaccagcctgctgtccattgctcctagaagcatcgcgtcgtggatcggctttctccgtgctccgcctcgtcggcctcatgccctgtagccccgactccccatctgccgcctccacctcatgggccgccgggtccaccctcgccgtccagcttggcaacatctttgaccgtggtggcgacgaactccgcctcctgcaccccctccgcctcctcgccccttccgctgaggcccgcgtcagcgcgttcctgccatagtcggcaaccaataggagcgtaaaactggagctagggattgaagctgttgcaggtacatgtcatatataaatggacatgggcaggcactcccgctgagggtgcttcttggcttcgtctgtagaggcttgctgatatttggcataggatattgttaatttgtgggtatgatgcatggattatttgagatctttgagcagataaagcaatcattatcatctcaaagggagggtattgatttcatggccgtgattccccctctcccagtcaaagccatccaagccgcaattacttcagggacagggtgttcactggggctagaaggattctgtttttattgcacgacacatgacaacatatccaagtagtccttgattgatttagcagcagggagtaagcgtcttgctaaaagtggctccacaggtgaacttaggttcaagaaggacacatgagtatccgagaaaaaactcccaagaaatcttcccaaaactgaatgttgccttctaccatcaacaacctttgaagttctagggtgtttatttttgaatgttctctacaattatgtgtgtatatatatatatatgcttcttcatccttttcaagacaatttttataaatataacaacttgatttcaaacgttgaaacacgataa

SEQ ID NO: 113363 - DNA, 2011 bp, Zea Mays
actcgccgcaatcgcactcgcacatcgccacagctgtatccgccatctgcttctctcttccactgccccaagccgccaccaatggcgacctgcgttctgctgatgctgcgggaagtctctccgtgggcgctggccagcgtggtggcgtccgtgtcgctgttgtggctggtggtctggacgctggagtgggcctggtggacgccttggcggctcgagcgggccctgcgggtccagggcctcaagggcaccaggtaccgcctcttcaccggcgacctgagggaaaccgcccgggctaaccgggaggctcgcaagaagccgctgccgctcggcagccacgacatcgccccacgcgtgcagcccatgcatcacagcaccatcaaggaatacgggaaactatcgttcacctggttcggcccaacaccaagggtgatgattcctgacccagagttagtcaaagaggtgctgtctaataagtttggccactttggcaaaccaaggagtaaccgcattgggaggttgctagccaacgggcttgtaaatcatgatggtgaaaaatgggcaaagcacaggagaattcttaatcctgcatttcaccatgaaaaaataaaggggatgatgccagtattttctacctgctgtattgaaatgattactagatgggataattcaatgccttctgagggatcttctgagatagatgtctggcctgagttccagaatcttactggagatgttatctcaagaactgcgtttgggagcaactatcaagaagggaggagaattttcgagctgcaaggagaactagctgaacgcctcatccaatctgttcagacaatatttatcccaggctattggttcttgcccaccaaaaacaacagaaggatgagagcgatcgatgtagagatccgcaaaattctccgtgaaataattgggaagagagagaaggatactaaaaacagagaaacaaataacgacgacttgctgggcttattactggagtcaaacacaaggcaatcaaatggaaatgcaagcctgggattgacaacagaagatgtgattgaggaatgcaagttattttactttgcaggtatggagacaacatcagtccttcttacttggacacttattgtgctaagcatgcacccagaatggcaagagagagcaagagaagaggttttgagccactttggaagaaccacaccggattatgatagcttgagccgcctcaagactataaccatgattctacatgaggtccttaggttgtacccaccggcaacctttctaacaagaagaacttataaggaaatggagctcggtggaatcaaatatcctgcaggagttgacctccttctacccgtcatcttcattcaccatgatcctgacatttggggaaaagacgcaagcgagttcaacccagaaaggtttgccaacggcatctccagcgcaaccaggcatcaggctgctttctttccgttcggaggggggcctagaatctgcatcggccagagctttgcgttgctggaagccaagatgacgctatgcaccatcctccaacgcttctcgttcgagctctcgccatcctacacccacgcgccgtacaccgtgataacactgcaccctcaacatggtgctcagataaggctcaaaaagctttctccgtgatgctccttctatgctgctaccggacactactttcgttactgaccgcatatgtagaaacgtatttcttatttagtatgtattttttaggatataaataaaaagatggtgcatattaatgggaaataagttcccttgtatgcattgcgatgtaattttgggaagatttggcaaggaacttaattatacaatatatgtattgtctttaagttatatctaacgcccccgttttattttttgtagggtgcactagtacttgaaagtagtcgttgcgagtagagagtatatatgccttttcacctttttccagtatatattacaaatcgctaaaaggtcaatattatattag

SEQ ID NO: 113364 - DNA, 1346 bp, Zea Mays
tttttttttactattttacattgcatttgtgttgtatgttggatacaagttccctaaatggtggcgctgttctattcgcaggggatgatgccagtattttctacctgctgtattgaaatgattactagatgggataattcaatgccttctgagggatcttctgagatagatgtctggcctgagttccagaatcttactggagatgttatctcaagaactgcgtttgggagcaactatcaagaagggaggagaattttcgagctgcaaggagaactagctgaacgcctcatccaatctgttcagacaatatttatcccaggctattggttcttgcccaccaaaaacaacagaaggatgagagcgatcgatgtagagatccgcaaaattctccgtgaaataattgggaagagagagaaggatactaaaaacagagaaacaaataacgacgacttgctgggcttattactggagtcaaacacaaggcaatcaaatggaaatgcaagcctgggattgacaacagaagatgtgattgaggaatgcaagttattttactttgcaggtatggagacaacatcagtccttcttacttggacacttattgtgctaagcatgcacccagaatggcaagagagagcaagagaagaggttttgagccactttggaagaaccacaccggattatgatagcttgagccgcctcaagactataaccatgattctacatgaggtccttaggttgtacccaccggcaacctttctaacaagaagaacttataaggaaatggagctcggtggaatcaaatatcctgcaggagttgacctccttctacccgtcatcttcattcaccatgatcctgacatttggggaaaagacgcaagcgagttcaacccagaaaggtttgccaacggcatctccagcgcaaccaggcatcaggctgctttctttccgttcggaggggggcctagaatctgcatcggccagagctttgcgttgctggaagccaagatgacgctatgcaccatcctccaacgcttctcgttcgagctctcgccatcctacacccacgcgccgtacaccgtgataacactgcaccctcaacatggtgctcagataaggctcaaaaagctttctccgtgatgctccttctatgctgctaccggacactactttcgttactgaccgcatatgtagaaacgtatttcttatttagtatgtattttttaggatataaataaaaagatggtgcatattaatgggaaataagttcccttgtatgcattgcgatgtaattttgggaagatttggcaaggaacttaattatacaatatatgtattgtctttaagtt

SEQ ID NO: 113365 - DNA, 822 bp, Zea Mays
aaactggaacattctttgaggaatcatatgtgatatatgtgcagataaccatgattctacatgaggtccttaggttgtacccaccggcaacctttctaacaagaagaacttataaggaaatggagctcggtggaatcaaatatcctgcaggagttgacctccttctacccgtcatcttcattcaccatgatcctgacatttggggaaaagacgcaagcgagttcaacccagaaaggtttgccaacggcatctccagcgcaaccaggcatcaggctgctttctttccgttcggaggggggcctagaatctgcatcggccagagctttgcgttgctggaagccaagatgacgctatgcaccatcctccaacgcttctcgttcgagctctcgccatcctacacccacgcgccgtacaccgtgataacactgcaccctcaacatggtgctcagataaggctcaaaaagctttctccgtgatgctccttctatgctgctaccggacactactttcgttactgaccgcatatgtagaaacgtatttcttatttagtatgtattttttaggatataaataaaaagatggtgcatattaatgggaaataagttcccttgtatgcattgcgatgtaattttgggaagatttggcaaggaacttaattatacaatatatgtattgtctttaagttatatctaacgcccccgttttattttttgtagggtgcactagtacttgaaagtagtcgttgcgagtagagagtatatatgccttttcacctttttccagtatatattacaaatcgctaaaaggtcaatattatattag

SEQ ID NO: 113366 - DNA, 927 bp, Zea Mays
atggcggccagtcaaaatggaaggtgttatgagggtgatcacttcggacaacgattgcttggtaaatgttgtgggcaaatggagaggtcacatatggtgctttataacacctatgttttgatacagccattatcgagcgttaaccttgctggaataaacattgtgtcttgttatccattgcaatatacaacacttaagcccttggctgatagagtgattgtaaagattaacttttccgaggagaagacaactggtggaattttgcttccaatgactgctcagtctagacatcagggtggcaagaaatacgtcaaggaaaaatgtcgaacaacaactcagaagataaattcaagaactggttgcttcaacaagagtctgtccatgaggatggcatgcaacattacttgccctttgattgagataggtggctacggtgatgctttgttgaacctgatatacgcatctccatcaagccagttcgaagagctcagtttagaatataccaaagtagccttggtaacaacaataagagggttgggctttttgatatgggtgatggaagtagtgagcctgctgctgaggacaacaatcaaatgcatcagtttatatgcactcctgatcctggagaaggtgctcgccaagttcctcgtcatgtaccctaactacgcgtccgcctcagacgtgggcagcctccacgactatgagtacccgcacatggacaaggtatgcctccactgcgactttggcctcttctcctacctccaaagttacaactctgctgactcgtcagctgcattcacgctctcagaaatcatcgccaacctcagcaaccatgcactctacgacaccgctgataagggcacaatggagcacatcaagaactgccttcaacctgaatttggtacctggccatgcactagggtctag

SEQ ID NO: 113367 - DNA, 420 bp, Zea Mays
aggggctacaaaaggttctttcagtgtactactcttgaacaattagatttttcttaaagatgattgcttgaagataaactgtactatgggtgttgtagtatcaaatatggatttttctaggccacattcaatagaggttccagagcctgacataggctatcattttggaacgcttttggacactcggtgtagatgttatttttagtgtagcaggagagaagtttcatgcccataaattagtattggttgtcaatctctcttttttagatttgattttttcgaccatgaattgggtggagagaagaatgaaactgatacgatggcttaaatcaaagagatcgttattgatgacatggatcatgtagtgttcagtatatctttataatttggtgttaatgtcatccatccatttccttgttg

SEQ ID NO: 113368 - DNA, 118 bp, Zea Mays
gctccttattatcataaaaacatttatttatttcttgacacgttctttgctaatgaaagtttcttgtgtttttctttttagtcgtctgatcaactttcgctctcgcgttcatcttcac

SEQ ID NO: 113369 - DNA, 1056 bp, Zea Mays
atggattccgcccggagctggctccagaagctgcagccgcgggacaaggacatagagtggggcgccaagacgccgacgccggctccgacgtcgcccaagcgcggcgaggccttcacatccttcagcgcatgcttgctcaaaactaatgcccaggttgtcgacgatatcgatgtgatcgtcatctccatgaagcctcagattgtgaagcaagttctacttgagctgaggccacaactttcagaagaaaagcttctcgtgtccattgctgtcagcaccaagatgcaagatttgcagcagttcaggcttcttgatgtccctcagcgaccaaatggtcaatctgctcaacaaacaaaagggatgagtggtcttcccctttatgatagccacaacgttgaggatgaaaatggctcacagaagttcgtctgcagattatgtgggctcaaatttgatcttctgccatatcttggccgccaccataaagtcgctcatatggtctcaggtgttgttggccacattctactgggccatgggaagtaccagcttaaccgcggccgacactactattccgctttcaagaaaagtttacgaccaacaagtacattaaagaagagcagtagctctggaatcaataaaaatttcaagtttcagatctctggcttaacatctcaaatagttgaatatgaaacatccagccttggtaagttacaggatttccaatgctcagatgttgcacaaactttattttccaagattcaaaagacaagaccccatccaagcaactttgatgttttatcggttgcccgctctgtatgctgtaagacaagtcttcttgctgcgttggaagttaaatacggatctttacctaagaacatatttgtgaaagctgcaaagctttgcagtgacaatggcatccaaattgattggcatcaagagggattcatatgccctaaagggtgcaagtctagatataattcaaatgctctgcttcctatgcaactcacgacagttgattttcttgaagctcctgttgattcccttaatgatgatgaaatgtga

SEQ ID NO: 113370 - DNA, 471 bp, Zea Mays
atggtgaaggagaagaagcggaagcagcatcctgcgactcagccgcccctgggcgacgagggcgaggggagatgcgggcggaatgccaggaaggagaaggcggagccgccggagaggcaggtgccccggacgatcgagaacacaagggagcccgatgagactgggccaaaggaatcgatagcaggagggacctcaagttcaagcggactgacgttgtccagcatagggcctgtagcgcgttgtgtgggagaagcacgggaggttcacacggaagcaggtcgcgcggccctagcagcagcactgggtgaatcgggcggggtcaacgctgcaatcgctcagatcggcgctgatggtgaaaccgcgtggccccttggaccccgaccccggcgacacggaccaggaggagggaggttttaccgtttccaacgggagtcggcggcgggaaccggcggtggcggtaggcgggcttag

SEQ ID NO: 113371 - DNA, 1281 bp, Zea Mays
atgcgcacgcccttcgtggacaagagcccccagtaccgccgggacagcgccgccggacggctcaagcagcgcctggcaaggatcctcacgcgctccacctgcaccaccaataacgccgctgccgccagctcgggcggcacggccacggccacggccttcgtcagcctcgccaagaccaacaacgcccacaccgccgcctcctcatctcacccggagccggaagcgccgccctccccgtacttctgcacgccctgcacctacgactacgagcgccccaaggccgaccgcgggacacgcccgcgccgcagccgcacccgcagcgcgtcgctcgtacacatctccgtggactgcacgggcggggccgcctccggccgccgctccgcccactccgacgcgccgcttctgcagcacctcttgtcggaacaggtgccggcgagggacgtcgtcggcggcacgaagcagagcaagggcggcggcggcaggagcaagctgacgacggcgcggtcgtctccgtcggcgtcgaggcggcactgctcgtcctcctcctcctcctggggccgcgcccgcgcgcgccggcccagcagcacgcccacgccctacagctggtcgtcgtcgtcgcggtcgtccgccaccgcgacggacgacgagctcgcgccgttcagcggcagcgacgacgaggccggcggccaggcggccgacatgcggacgctcttctcgtccctcagcttctcgtccgaccccacatcatccgagttctaccgcaccaacggcggccgcagcggcaacggcaacgccagcaggaggagccacaggaacacggcgagtcgtcgtcgcggccgccgcgcgcgcgcgccacggcgtgcgctgtcgagatccagcggcggcgacccggcagcaccgcccgacgccttccggccgctggtgtccgtggagacgacgaggcgcactacggagcgcagcgagaggagcaaggaagacaagggtctcaataacgccaagaagctgacgatgacgatgctgggcgcggccgctgccgcggaggaggaggaggaggaggccatcgccgccggcgcgggcatggctgtggtgaagcgctccagcaacccttacctggacttccgcagctccatggtggagatggtggtggagcggcgcatcgccagcgtggggaagatggaggagctcctgggctcgtacctctcgctcaactcgccgcgccaccacccggccatcctcgctgccttcgaggacgtctgggaggccgtcttcggcgaggagtga

SEQ ID NO: 113372 - DNA, 88 bp, Zea Mays
ggtagccgatcgcgacaaacgcagtcacgtgtcaaccatccatccattatcgatcgattcgttgcagtggcgcgcgcctgcggagctg

SEQ ID NO: 113373 - DNA, 1282 bp, Zea Mays
agcccgcgccgtgccgcgtctccaaatactcggcgttctcatacgcgtatatatgcggggccctgctggactcgcactgccaaaagtcaaccccacccccttctccctgcccgccagtcccccccaggagcaaggagcgagcagcacgcacgcgtcccggccggccctccgcctcgccaaaggccgctcgagagaccgcccgtcgtggttcatgcgcggcgtgctatgctagccgctgctcatggcggagcacttcaacgactgggacctgcaggccgtcgtcaggagctgcggcagcgtggcgcacccggagcccgccgccgcggcgccgagggcggatcagccagacgcagcgccggagccggtgcccgcgccgcggcgagacgaggcgcccgccgcccgtgccacgccgacgacggtgcctgtccggcgacagggacgggcgtcgccgcccgcggctaaggccgcggcgctcctgtacgacctggagtacctggacttggaccacaggccgttcctgctgccggccgcgccgtcgccgtcgccgtcgccggggccgcgggcgggggccggcgggcgcgagcgcgaggtgatgatctctttccccgcggcggcggcggcgtccacgtccgggacgcagcagagggcgtcgccgccaggccggaagcccggcgcgcgcacttcgcggcctaaaagaagcaagaagagccagctgaagaaggtggtgcgggagatgccggcggccgacggcggctcgtcgtcgtcggacccgtgggcgtggcgcaagtatggccaaaagcccatcaagggctcgccttatccgcgggggtactacaagtgcagcagcatgaaggggtgcatggcgcggaagctggtggagcgcagcccagcgaagcccggggtgctcatcgtcacctacatggcggagcactgccaccccgtgcccacgcagctcaacgcgctcgcgggcaccactcgccacaagccgtcgtccggcgcggccgccgagcacagcgcggcctcctctcccaagagccacgagcatggtggacaggcggccggccgtggcaccggcgaccgcgagcatggcagcagcgagacgtcaacggtggccggggagattggcggcgaggagatagcggccgtcgacgacgacagcgagttctggcctgaggggctggacctggacgagctcttggcgcccgtcgacgacgacttcgatttcgagcaggtcatcgaggcggaagatggcgtactgggacgccggctctccctctaggtg

SEQ ID NO: 113374 - DNA, 2749 bp, Zea Mays
agcagcaactgaatcatccgaggaaggagggtggagggaggagggattttgccgatcacggcctgcagtcaatttgtcagtttattgagacatccaacttgcatgagttgatcaacaagcccatccctggttccttatggaggcatcatcttccttgcgcttccaagtttctcgttttagttcgttcaagatatggctatgcctttttctggtactcgttcttcagaactgcagcccagcactttcagattcaccatatttggtcggtatggggagctatgacataacagggccagcagcagacgttaacatgatgggatatgcaaatgctgagcagattgcatcaggaattcactttaggctaaaggctcgtgcctttatcgttgctgagcctaacggcaagcgtgtcgtgtttgtaaatcttgatgcttgcatggcatcacagcttgttactataaaggtgcttgaaagacttaaagcaaggtatggagatctttataatgagaataatgtggctatcagtggaatccatacgcatgctggtcctggtggttatctgcagtatgtagtttatattgttacatcacttgggtttgttcgccaatcatttgatgtgattgtcaatggaattgagcaatgcattgttgaagctcacaacaatctccaccctgggaaaatctatgtgaacaaaggtgacctccttgatgccagtgtgaatcgcagcccaagtgcatatctaaataaccccgctgaagagagaggcaagtataagtacaatgttgataaagaaatgaccctcatcaagtttgtagatgatgagtctggtccgattgggagtttcaattggtttgcaactcatggaacatctatgagtcgtacaaattctttgataagtggtgataacaaaggagcagccgcacgtttcatggaagattgggcagaacaaaatggcattccaaaacaggcagctcatgtaaatcacgatggtttggaatcttcacacatgacctctcgacttccgagaagagtctccccaataattcctgaaccaaatgagataactgatgacttagtacaattggcgtcatcctacgaagcctcaggtggacggcgattatcaagttcaagtatcaccaagcgtatcagaagtacccaacaaaacagacctaaatttgtttctgcattctgccagtcaaattgtggtgatgttagtccaaatgtcctgggaactttctgtatagacactggccttccttgtgacttcaatcacagcacatgcaatgggaagaatgaattatgctatggacgagggccaggatatcctgatgaatttgaaagtacccatatcattggcaataggcaatttcaaaaggctgtagatctttttagttcagcttctgaagaaatacaaggcaaaattgactacaggcatacttacctagatttctcaaaacttgaagtgaatgtccgtacaagtacaggaagtcagcaagttgtgaaaacatgcccagcagccatggggtttgcctttgctgctggaaccacagatggtcctggagcttttgactttaaacaaggagatgtcaagggaaaccctttctggagattagtaagaaacttacttaagacaccagggaaggagcaagtcgaatgtcaagcaccaaaacctatcttgctagacactggtgaaatgaaggaaccatatgattgggcgcctgcaattcttccaattcagatcataagaatcggccagctggctatcttgtgtgtccctggagaattcacaacaatggctggcaggaggctacgtgatgccgtcaaagctgtacttacaagtgacaacagtggtgaatttaataacattcatgttgttcttgcggggctaacaaatacatattcgcagtatattacaacttttgaagaatatgagatccaaagatacgagggagcatcgacgttgtatggcccccacacgttgagcgcctacattcaggagttccagaaacttgctacagccatggtggcaaacaaagaggtcccgacaaattttcagcccccagacatgttggacaagcaaataggactcctcccaggcgttgtgttcgactccacacctcctggggtggagttcggagatgtcagctcagacgtccccgcaagctcaactttcaggaagggcagtgtcgtgaacgctacattctactcggcgtgcccgaggaatgaccttctcacggacggcacgttcgcgctcgttgagaagctggacggcagcaacagctgggttcctgcctacgacgacgacgactggtcactacgcttcaagtggtcgagaccgtcgaagctgagcccgagaagctttgcgacgctggaatggaccgttcctggagacgccccgtcgggcgtttataggttgaggcattttggtgcctccaaaccactgattgggtccatcaaacattttacagggacctctcgggcgttcgcagtgcgttaggttgcacaccgttgcgttgcgttcgacggcacacctgtcagagaatcgacaccgggtcatatatttactttgcatacctgccacagtatatggacatgttttccctatagtttttacatgctcctgatattaataacgctgtccatcgcccgttctgtttggtcatgacaaatacccaaatcgccatatagctacagactcgatgtgtgtgaaatttctatatattaaagcaggaaagaaatctgttctcagatt

SEQ ID NO: 113375 - DNA, 2813 bp, Zea Mays
cggcgtgtgcttccaaggatatcacttgtgccccttgcctcccaggctctcaattcccaccctctaaatctgtccactcccaccgccactccccctctgccgctgccggaaattcatgttaactattttttttggtgcgtctacatcagaatctcataagcctgcagtcaatttgtcagtttattgagacatccaacttgcatgagttgatcaacaagcccatccctggttccttatggaggcatcatcttccttgcgcttccaagtttctcgttttagttcgttcaagatatggctatgcctttttctggtactcgttcttcagaactgcagcccagcactttcagattcaccatatttggtcggtatggggagctatgacataacagggccagcagcagacgttaacatgatgggatatgcaaatgctgagcagattgcatcaggaattcactttaggctaaaggctcgtgcctttatcgttgctgagcctaacggcaagcgtgtcgtgtttgtaaatcttgatgcttgcatggcatcacagcttgttactataaaggtgcttgaaagacttaaagcaaggtatggagatctttataatgagaataatgtggctatcagtggaatccatacgcatgctggtcctggtggttatctgcagtatgtagtttatattgttacatcacttgggtttgttcgccaatcatttgatgtgattgtcaatggaattgagcaatgcattgttgaagctcacaacaatctccaccctgggaaaatctatgtgaacaaaggtgacctccttgatgccagtgtgaatcgcagcccaagtgcatatctaaataaccccgctgaagagagaggcaagtataagtacaatgttgataaagaaatgaccctcatcaagtttgtagatgatgagtctggtccgattgggagtttcaattggtttgcaactcatggaacatctatgagtcgtacaaattctttgataagtggtgataacaaaggagcagccgcacgtttcatggaagattgggcagaacaaaatggcattccaaaacaggcagctcatgtaaatcacgatggtttggaatcttcacacatgacctctcgacttccgagaagagtctccccaataattcctgaaccaaatgagataactgatgacttagtacaattggcgtcatcctacgaagcctcaggtggacggcgattatcaagttcaagtatcaccaagcgtatcagaagtacccaacaaaacagacctaaatttgtttctgcattctgccagtcaaattgtggtgatgttagtccaaatgtcctgggaactttctgtatagacactggccttccttgtgacttcaatcacagcacatgcaatgggaagaatgaattatgctatggacgagggccaggatatcctgatgaatttgaaagtacccatatcattggcaataggcaatttcaaaaggctgtagatctttttagttcagcttctgaagaaatacaaggcaaaattgactacaggcatacttacctagatttctcaaaacttgaagtgaatgtccgtacaagtacaggaagtcagcaagttgtgaaaacatgcccagcagccatggggtttgcctttgctgctggaaccacagatggtcctggagcttttgactttaaacaaggagatgtcaagggaaaccctttctggagattagtaagaaacttacttaagacaccagggaaggagcaagtcgaatgtcaagcaccaaaacctatcttgctagacactggtgaaatgaaggaaccatatgattgggcgcctgcaattcttccaattcagatcataagaatcggccagctggctatcttgtgtgtccctggagaattcacaacaatggctggcaggaggctacgtgatgccgtcaaagctgtacttacaagtgacaacagtggtgaatttaataacattcatgttgttcttgcggggctaacaaatacatattcgcagtatattacaacttttgaagaatatgagatccaaagatacgagggagcatcgacgttgtatggcccccacacgttgagcgcctacattcaggagttccagaaacttgctacagccatggtggcaaacaaagaggtcccgacaaattttcagcccccagacatgttggacaagcaaataggactcctcccaggcgttgtgttcgactccacacctcctggggtggagttcggagatgtcagctcagacgtccccgcaagctcaactttcaggaagggcagtgtcgtgaacgctacattctactcggcgtgcccgaggaatgaccttctcacggacggcacgttcgcgctcgttgagaagctggacggcagcaacagctgggttcctgcctacgacgacgacgactggtcactacgcttcaagtggtcgagaccgtcgaagctgagcccgagaagctttgcgacgctggaatggaccgttcctggagacgccccgtcgggcgtttataggttgaggcattttggtgcctccaaaccactgattgggtccatcaaacattttacagggacctctcgggcgttcgcagtgcgttaggttgcacaccgttgcgttgcgttcgacggcacacctgtcagagaatcgacaccgggtcatatatttactttgcatacctgccacagtatatggacatgttttccctatagtttttacatgctcctgatattaataacgctgtccatcgcccgttctgtttggtcatgacaaatacccaaatcgccatatagctacagactcgatgtgtgtgaaatttcta

SEQ ID NO: 113376 - DNA, 848 bp, Zea Mays
gtcatttcaaataaatgacaagcaagtaaattgatttttgccagggagcatcgacgttgtatggcccccacacgttgagcgcctacattcaggagttccagaaacttgctacagccatggtggcaaacaaagaggtcccgacaaattttcagcccccagacatgttggacaagcaaataggactcctcccaggcgttgtgttcgactccacacctcctggggtggagttcggagatgtcagctcagacgtccccgcaagctcaactttcaggaagggcagtgtcgtgaacgctacattctactcggcgtgcccgaggaatgaccttctcacggacggcacgttcgcgctcgttgagaagctggacggcagcaacagctgggttcctgcctacgacgacgacgactggtcactacgcttcaagtggtcgagaccgtcgaagctgagcccgagaagctttgcgacgctggaatggaccgttcctggagacgccccgtcgggcgtttataggttgaggcattttggtgcctccaaaccactgattgggtccatcaaacattttacagggacctctcgggcgttcgcagtgcgttaggttgcacaccgttgcgttgcgttcgacggcacacctgtcagagaatcgacaccgggtcatatatttactttgcatacctgccacagtatatggacatgttttccctatagtttttacatgctcctgatattaataacgctgtccatcgcccgttctgtttggtcatgacaaatacccaaatcgccatatagctacagactcgatgtgtgtgaaatttctatatattaaagcaggaaagaaatctgttctcagatt

SEQ ID NO: 113377 - DNA, 156 bp, Zea Mays
tttgggccaagcagaggcagagcacgtcactggctgttttttttacggccactggtcactgcactgtgacacaggagaggagaccaatttgatctttttgtgtccatgtatcagcgccggggagggggggtgccgtactttgacaagaaatgtgtg

SEQ ID NO: 113378 - DNA, 2834 bp, Zea Mays
cgatttcttccattaagcggcctgcttcgagttcgagcgtagcttgcgtagggaacccccggttgcttgctcgtcagtcgtcactgtactagagtccagaaaccgctggaactttacgtagtaaaacaaaacataacaacacaggtaaggtgagcacagctaggagtttcgtactagatcgatcggtagatatggcgagcatcggcgtacgggattgccgagccgtgcttcggccgaattggtggatctggtattgcgatacttgatcttcttcttcctccccctcgctattattcttgtccttctgcatctcataggtagaccttttctttctgtgagatactatctcatgaatggagtttgtctctatacccctgcgtgcaggtgccctgaagtttcggtacgatggagttcaccggcaccaagaaggacgtcgagatggccgggcagctgaacaccgagctgtcgtcgagagaacacgcgctcccggcgctcctgatcaaggttccgtcgcaggccatcgccggcttcgactgcgtgcccgccgccgccgacgccgccgtcgtctccctgaacgagccgggtgacagggcggaggacgtcgccatcagcatcctccccgcgccggcgagagcctacggcggcgacgcgcacggcgtcccgtactccgtctcgctcagcatgccggcgtcgccgtcggggttccacctgtcgtcgcacttcatgtgcgcgggcgacgcgcccgtggcgacggccgacgtccgcccggtgctgctggaggatcagcggcaggcggcggcggcggcgcactcgccgcggctgatcaagcagacgcggttccactcgcagcccatcctcaacctgcacccgccgtccaagaacgtcgtcgacgaggctgcggcacggcggtgggacagcgcgcgcgacacgcggttcgacccgttcaagaccttctcgggccgcctcgagcgccagctgtccaacctgcgcggccgcccgcaggagcccgtcgacggcatatccccggactccaagatctccgaggaggagaccgaccaggtccccgccgccgaccgctacttcgatgccttggaaggccccgagctcgacacgctcagagtaagcactaaagcttcaagcttgacgacgtgtcggagtggactggagaaccaaaaaaaaaaaacgtgtctaagcagtaagcaccacgatctttcgtcttttgcattgcaggccacggaggtgccggtgctgccgaaagacgagaagtggccattccttctgcggttcccgatcagcgcgttcggtatgtgcctgggcgtgagcagccaggccatcctgtggaagaccctggcgtcggcggcgccgacggcgttcctgcacgtgagccccgcggtgagccacgcgctgtggtacgcggcgctggcgctgacggtgctggtgtccggcatctacctgctgaaggtggtgttctacttcgaggcggtgcggcgcgagttctaccacccgatccgcgccaacttcttcttcgcgccgtggatcgcgtgcctgttcctggcgctgggcgcgccgcggctggtggcggagatgcaccacggcgtgtggtacgcgctgatggcgcccatcttctgcctggagctcaagatctacgggcagtggatgtccggcgggcagcggcggctgtccaaggtggccaacccgtccaaccacctgtccatcgtcggcaacttcgtgggcgcgctgctgggcgccaagatgggcctccgcgagggccccgtcttcttcttcgccgtcgggctggcgcactacatggtgctgttcgtgacgctataccagcggctgcccaccaacatgacgctccccaaggagctccaccccgtgttcttcctcttcgtcgccgcccccagcgtagcgtccatggcctgggccaagatcaacggccagttcgacgccggcgcccggatcgcctacttcatcgcgctcttcctctacatgtcactggcggtgcgcatcaacttcttccgtggtttccgcttctcgctggcgtggtgggcgtacacgttcccgatgaccggcgcgtccgtggcggcgatcacgtacgcgacggaggtggacaacgtgctgacccgggcgctctgcatcgggctgtcgggcatctccaccgtcaccgtcgccgggctcctggtgaccacggtgttccacgccttcgtcctcagggatctcttccccaacgacgtgtccatcgccatcacgaggaagaagcccaagttcagcaagatcctggcgcacttccgctcgtccagctccgacatgaaggagctcgtgctgtccctccccaggacggcgcagtctgactccggcgaaaccgagaccgagccgtccgtgaccgccaaatcccgagccgagccgtgagtgactagctcccggtcgcggtctcgttctctcatgtatagctgctacatcccttagctagctgcacacagagcgaggctactgtatagctactacgacgaagaagtcgccgataagcaagtgtgcagtgcaggcacgcgtccatcgatcggcctaaagcggctgcagcagtcggtcggtcggtcggtcggcgtggattaaatgatcggacatatacgaagggtgcacacggccggtatccttggagcattcctagtgatgatggggatatgatgacgtgaggaaaaaatatatactactcctaccactagtagattgattaattagtttgtataaatctacgtaccgacatattataagtagcttgtgtggactatttaagtaaaagaataaaaaccatgaacatgctctatggccttcaaaga

SEQ ID NO: 113379 - DNA, 1650 bp, Zea Mays
ggctgcaactttttacgcacgtttggcgatggctccggtgcttcctgcgtctgcgtggtggtcgtggatcgcggtcctggcggtggtgctggccgtcggcgtccggccgcctccgcgctgccgcggcgagttcacggtggtggtgccggacacgtcggcagcggcgctggtggacgcgccgcagacggggttctcggaccgggcgcgcaccgacccggccgagcagcgcgccgtgcaggaggtgatggcggccacgggcaacggctgggcgtgggccatcccggacgtgtgccggggccgctggcacggcatcgagtgcgtgcccgaccgccgcgacacctaccacgtcgtgtcgctggccttcggcgcgctctccgacgacacggccttccccgcgtgcgaggcggcgagcgccacgctctcgcccgccgtgctcgcgctcccgcacctccgctccctcttcttctaccgctgcttcacgggcaacccgcagcccgtcgcggcattgctcggccgcctcggccccgcgttccgctccctcgtgctccgacagaacggccacgtcggcccgatccccgcggagctcgggaacctcaaggagctgcgcgtgctcgacctccacggcaaccagctcacctccgccgtgccggccaccctccagtccctgagccacctccagctgctcgacctcagctacaaccgtctcgccggcccggtgccgcgcttcgagttcccgcgcctcagcatcctggacctcagccacaacgcgctccagggtggcgtgccgtggagcctcggccaatgccgctctctgctgaagattgacctcagccagaaccgcctcaccggcacgatccctgacgcgctcggcgacttgtcccaactcatgctgctggacctcagccacaacgcgctgtccggcccgatcccggccgcgctcagccggctggcgtcgctgcggtccctcatcctcagcgacaaccggatgcagttctcgactctgcccgacgacttcttcgctgggctcaaggcgctgaccacgctggtgctctccggaatgggcttggccggggcgatccctgagtccatcggggagctgagcgagcttcgggtgctgaggctggacaataaccagttcaccggcgtaataccggcgagcttccggaggctggagagggtgagcgagctccgcgtggacggcaaccggctggtggggccgataccgttcggcaaggagatgatgtggaggctgggcaagaagctgcgcgtcggctccaacgaggggctgtgctatgacaccaagcaacaaggcctcgagggcgtcgttgcgctcgccggcgtcgcggactgtgacagcgtgaggagtcgcacgacgcagcacttggtttggagcaatagtactgtagttagccgcggcggcggcgtgtacaccgtgacctcatcggctgcttccgccagccgtaactccggtggcggtactcgtgtggagacttggcttgtgttcgtgtgtctgcaccttgcatggttcgtagcctgtaattgtaagtaggccaagtggtgattccgggacctgaacagtgtggttgtaaagagagctcagtgcattgttttatgaagaggacagtaagaagcgaataagaattttgtctt

SEQ ID NO: 113380 - DNA, 282 bp, Zea Mays
atgtcggggtggtgcgcggtggagcagcggggcgcgcgcggggtggcggaggggcacgcgtggccggtttctggtggcggcggggggccgcggggtggcgaggatgggccgcgctggtggcggcgcgcgagctggtgccagttcccggactgccgcaggggagcgcagggcagcaccctgtactgcaaatcgcacggcgacgggaagcgctgcgtcttcgaggggtgcggcaagggtgccgaaggcagcacgccgctgtgcaaggcgcacgatgccttctga

SEQ ID NO: 113381 - DNA, 1899 bp, Zea Mays
gcggcaaaagctactgccgaacgaacgaacgtctcggccgtaagaatcaagatccatccaccacgaagcagaagcaccaaggcaagcagtagcagacagcctgaccgaccctggatcggcgatgaggctaggctaggctaggctacgactacgagcgagacgcctccactggcactggattccccaatccatcgtccggctgccggcacccgccaatcaaatcttgccgccactcctcgccccggttgactgactgactggatggacctcccactctaccataaagtttaccggcaagcggcaaccaccacctcgtcgccgtccggtccacctcacggcaccccactacctgcccatagtcccactcctgcactgcaccgagagagacgtcatcgtgccgttcgccgctacccgctagtagtagtacacaccacccggcactggcctacacctgggactgggaggctgggaatcccggcaggcaaagcgaaagcatccgcgcgagaggcgtcgcgtgttccttgcttcgtcctcacgtgccgtggcccttccgcttcccccgtatccgcccgtcctgttcccgccccgagcgaaccggcggcggcggaggcgatgcagcacgagccgtggcggcctggcgctgagcccgccgccggggctggggcgggccctgctcccaccaccgtcgacgaggcatccatggagcggagcatgagcttcgtcaaggcgcttcaggagctcaagaacctgcgcccgcagctctactcggcctccgagtactgcgagaagtcctacctccgcagcgaacagaagcaagtggtgctggacaacatgaaagattacgctgtcagggccctggtcaacgctgtcgaccatcttggcacagtggcctacaagctgacagacctatacgaagagcaggcttcagaaataacaaccctcgagttgaaagtagcatgcttgaaccagcaagtccgtacctgccagacatacacggacaaagaaggcctcagacaacagcagatgatgggggctgccagaagacaccataaccattacatcgtaccatatgcgggaaacaaaagaatgcaggccttctctgttacgcaagccgatgctgatttcgacccaacgccaaggcctttctcttcagcaaggacccttgagtggcatttggtttccgagaagaattccaaaaccagtagaccagatcagtctgaaattgccttaggagaaacaaaaactactaaggcttcgtcaagtggtttccgccttctcggcaaggaatcatctgcatctcccttgtccaggaatgtgcagtccaacataaccagtttggatattgtcagtgccggcatgaaggtaaacctacaacatgatacaaaatcgaccagtttccattatgtaaaaattagtccctagtaaccaaacactcccttatttgaacaccatagagaataatcatgtgctcccaagcgaaaccaatgaattccctggattttcaggatcagcccacgaccaggcacttgtcatcgttcagttctttggacaaccccaggggccgacaaatccagaaggctccgcttcgcacaaaaagtatgctagccgctttctttgtcaaacacagatcagcaaagatgaaaaacgtctctgtgcgttgatcaactgcaagccaagcctgtagtttgctccagccaaaccgacgtggaagtgttaagggcatgagatgtatacatgtttgtatatggtatttgggtcttgtatgctagtgctctagagataaacctttacggatgcgctttcaatctagagtctttggcatcttgctcatgaccttaatgtaatgatttatatggatatatattactagttttataatctagtgtcatctcactagcc

SEQ ID NO: 113382 - DNA, 1750 bp, Zea Mays
gcggcaaaagctactgccgaacgaacgaacgtctcggccgtaagaatcaagatccatccaccacgaagcagaagcaccaaggcaagcagtagcagacagcctgaccgaccctggatcggcgatgaggctaggctaggctaggctacgactacgagcgagacgcctccactggcactggattccccaatccatcgtccggctgccggcacccgccaatcaaatcttgccgccactcctcgccccggttgactgactgactggatggacctcccactctaccataaagtttaccggcaagcggcaaccaccacctcgtcgccgtccggtccacctcacggcaccccactacctgcccatagtcccactcctgcactgcaccgagagagacgtcatcgtgccgttcgccgctacccgctagtagtagtacacaccacccggcactggcctacacctgggactgggaggctgggaatcccggcaggcaaagcgaaagcatccgcgcgagaggcgtcgcgtgttccttgcttcgtcctcacgtgccgtggcccttccgcttcccccgtatccgcccgtcctgttcccgccccgagcgaaccggcggcggcggaggcgatgcagcacgagccgtggcggcctggcgctgagcccgccgccggggctggggcgggccctgctcccaccaccgtcgacgaggcatccatggagcggagcatgagcttcgtcaaggcgcttcaggagctcaagaacctgcgcccgcagctctactcggcctccgagtactgcgagaagtcctacctccgcagcgaacagaagcaagtggtgctggacaacatgaaagattacgctgtcagggccctggtcaacgctgtcgaccatcttggcacagtggcctacaagctgacagacctatacgaagagcaggcttcagaaataacaaccctcgagttgaaagtagcatgcttgaaccagcaagtccgtacctgccagacatacacggacaaagaaggcctcagacaacagcagatgatgggggctgccagaagacaccataaccattacatcgtaccatatgcgggaaacaaaagaatgcaggccttctctgttacgcaagccgatgctgatttcgacccaacgccaaggcctttctcttcagcaaggacccttgagtggcatttggtttccgagaagaattccaaaaccagtagaccagatcagtctgaaattgccttaggagaaacaaaaactactaaggcttcgtcaagtggtttccgccttctcggcaaggaatcatctgcatctcccttgtccaggaatgtgcagtccaacataaccagtttggatattgtcagtgccggcatgaagcccacgaccaggcacttgtcatcgttcagttctttggacaaccccaggggccgacaaatccagaaggctccgcttcgcacaaaaagtatgctagccgctttctttgtcaaacacagatcagcaaagatgaaaaacgtctctgtgcgttgatcaactgcaagccaagcctgtagtttgctccagccaaaccgacgtggaagtgttaagggcatgagatgtatacatgtttgtatatggtatttgggtcttgtatgctagtgctctagagataaacctttacggatgcgctttcaatctagagtctttggcatcttgctcatgaccttaatgtaatgatttatatggatatatattactagttttataatctagtgtcatctcactagcc

SEQ ID NO: 113383 - DNA, 1760 bp, Zea Mays
gcggcaaaagctactgccgaacgaacgaacgtctcggccgtaagaatcaagatccatccaccacgaagcagaagcaccaaggcaagcagtagcagacagcctgaccgaccctggatcggcgatgaggctaggctaggctaggctacgactacgagcgagacgcctccactggcactggattccccaatccatcgtccggctgccggcacccgccaatcaaatcttgccgccactcctcgccccggttgactgactgactggatggacctcccactctaccataaagtttaccggcaagcggcaaccaccacctcgtcgccgtccggtccacctcacggcaccccactacctgcccatagtcccactcctgcactgcaccgagagagacgtcatcgtgccgttcgccgctacccgctagtagtagtacacaccacccggcactggcctacacctgggactgggaggctgggaatcccggcaggcaaagcgaaagcatccgcgcgagaggcgtcgcgtgttccttgcttcgtcctcacgtgccgtggcccttccgcttcccccgtatccgcccgtcctgttcccgccccgagcgaaccggcggcggcggaggcgatgcagcacgagccgtggcggcctggcgctgagcccgccgccggggctggggcgggccctgctcccaccaccgtcgacgaggcatccatggagcggagcatgagcttcgtcaaggcgcttcaggagctcaagaacctgcgcccgcagctctactcggcctccgagtactgcgagaagtcctacctccgcagcgaacagaagcaagtggtgctggacaacatgaaagattacgctgtcagggccctggtcaacgctgtcgaccatcttggcacagtggcctacaagctgacagacctatacgaagagcaggcttcagaaataacaaccctcgagttgaaagtagcatgcttgaaccagcaagtccgtacctgccagacatacacggacaaagaaggcctcagacaacagcagatgatgggggctgccagaagacaccataaccattacatcgtaccatatgcgggaaacaaaagaatgcaggccttctctgttacgcaagccgatgctgatttcgacccaacgccaaggcctttctcttcagcaaggacccttgagtggcatttggtttccgagaagaattccaaaaccagtagaccagatcagtctgaaattgccttaggagaaacaaaaactactaaggcttcgtcaagtggtttccgccttctcggcaaggaatcatctgcatctcccttgtccaggaatgtgcagtccaacataaccagtttggatattgtcagtgccggcatgaaggatcagcccacgaccaggcacttgtcatcgttcagttctttggacaaccccaggggccgacaaatccagaaggctccgcttcgcacaaaaagtatgctagccgctttctttgtcaaacacagatcagcaaagatgaaaaacgtctctgtgcgttgatcaactgcaagccaagcctgtagtttgctccagccaaaccgacgtggaagtgttaagggcatgagatgtatacatgtttgtatatggtatttgggtcttgtatgctagtgctctagagataaacctttacggatgcgctttcaatctagagtctttggcatcttgctcatgaccttaatgtaatgatttatatggatatatattactagttttataatctagtgtcatctcactagccaaat

SEQ ID NO: 113384 - DNA, 184 bp, Zea Mays
gcgctgctgggggtagcaccttgcgcccgcgcatgccaggtccgcgcgcccgcaaccgctgctgggcccctacggccggatgccgcacccgaccgcgctccgccgtggctggggctgtcgtgcctaagcttgcgctgtcgtgggggcgcaccaagaggtaagcgccctgccggaggctgcctct

SEQ ID NO: 113385 - DNA, 1214 bp, Zea Mays
cccacctccctctcctccttccgacctcgccgcctccctccctaaactctaaaccctccaccagccgaagctactgccgcggccgcaacagaggtcgcgacgacgaacgctgaagaagcgccggcgagggagagtcctttactttttcctatgctgtagcaaaacaagcctatatcatcttccaaatatactcgttccgtgccggcggcctcccctcctacgcccctgccgattcttcaatcttcaccaacgtctgcgcgtagcaggctagcagtcggcacgacttcctcagatctgccggacgacttgctgttcgtcaccgactcaccagcaaccaacgtcagccatcagccggcagcaggggaagctgggcggagggtcattgcggcacggcgtccaggcgtacagcaggcaccagcaacagcccatggcaaacgccgcagatgaccctatggcagatgaagccagagtagaagatgccttcacacaggagatcaccgattattcgtacgtccctagataccatgtgttgagttggatggaaactgtggaggggatggtggccggtgtggcggcgcttccgccggtgtatttgatactgaacagagatcttcttgagacgggatggggatggaagaggctggtgccctacagacctggttatgttgagtggcatgtgttcaagaaataccttggggactatttcgaccataatcgtgaagcttttctttgtgccgagcagaagcctgatccatttggatggattattgctaaaaagagtgccctgattgctgcagccaaattgtgcctcaagatggagaaggcacttctcaggtactgtgctagctttctcactcctgacgacaaaaggttgatcctccggatcaaggaccaggcaaagcaaatgatccaatcagagggtgatcaatctttggttgtaactatatgcttggaggtatgcttgctacaaactacaccaaactgttgccaaactagcgccagggattcgagccctccccgcgtttccttgagcatgagcctgtccgcgtgtaacacctggcggaccggacccgaaaattttcttcgaatgagctctgagccgtgtagccctccagtccgctgttcggtgcccgctgcccacctccctctcctccttccgacctcgccgcctccctccctaaactctaaaccttccaccagccgaagctactgcc

SEQ ID NO: 113386 - DNA, 1636 bp, Zea Mays
cccacctccctctcctccttccgacctcgccgcctccctccctaaactctaaaccctccaccagccgaagctactgccgcggccgcaacagaggtcgcgacgacgaacgctgaagaagcgccggcgagggagagtcctttactttttcctatgctgtagcaaaacaagcctatatcatcttccaaatatactcgttccgtgccggcggcctcccctcctacgcccctgccgattcttcaatcttcaccaacgtctgcgcgtagcaggctagcagtcggcacgacttcctcagatctgccggacgacttgctgttcgtcaccgactcaccagcaaccaacgtcagccatcagccggcagcaggggaagctgggcggagggtcattgcggcacggcgtccaggcgtacagcaggcaccagcaacagcccatggcaaacgccgcagatgaccctatggcagatgaagccagagtagaagatgccttcacacaggagatcaccgattattcgtacgtccctagataccatgtgttgagttggatggaaactgtggaggggatggtggccggtgtggcggcgcttccgccggtgtatttgatactgaacagaggtgcgattttcttttatatttcttccagttcatgttctccttgtgtggctggtgctggattcaaccgatctagggaagagatgttagttgatttgctgtaaaaatcaatatgttaacagagatatatgatacatgctcctgcttgctcatgatgccggtttggtgccaaggctgtatgccccccttcctatctgtgttttttgttctataatttggaggtttcttagttttttactacagtatttgcctattacgtatcacgttgcatctaattagctcttcttcgttgcccatgccaagatcttcttgagacgggatggggatggaagaggctggtgccctacagacctggttatgttgagtggcatgtgttcaagaaataccttggggactatttcgaccataatcgtgaagcttttctttgtgccgagcagaagcctgatccatttggatggattattgctaaaaagagtgccctgattgctgcagccaaattggtatagttccccctacctctgcattactgaactgtggcctgccatacttgtttatattttatatattggttcagttgcaaattaacttgcaccattgcaaaaacaatcaaaatgctttccagtgcctcaagatggagaaggcacttctcaggtactgtgctagctttctcactcctgacgacaaaaggttgatcctccggatcaaggaccaggcaaagcaaatgatccaatcagagggtgatcaatctttggttgtaactatatgcttggaggtatgcttgctacaaactacaccaaactgttgccaaactagcgccagggattcgagccctccccgcgtttccttgagcatgagcctgtccgcgtgtaacacctggcggaccggacccgaaaattttcttcgaatgagctctgagccgtgtagccctccagtccgctgttcggtgcccgctgcccacctccctctcctccttccgacctcgccgcctccctccctaaactctaaaccttccaccagccgaagctactgcc

SEQ ID NO: 113387 - DNA, 2099 bp, Zea Mays
atggattcctcagccgcagatgaccctatggcagatgaagccagagtagaagatgccttcacacaggagatcaccgattattcgtacgtccctagataccatgtgttgagttggatggaaactgtggaggggatggtggccggtgtggcggcgcttccgccggtgtatttgatactgaacagagctcttcttcgttgcccatgccaagatcttcttgagacgggatggggatggaagaggctggtgccctacagacctggttatgttgagtggcatgtgttcaagaaataccttggggactatttcgaccataatcgtgaagcttttctttgtgccgagcagaagcctgatccatttggatggattattgctaaaaagagtgccctgattgctgcagccaaattgttgcaaattaacttgcaccattgcaaaaacaatcaaaatgctttccagtgcctcaagatggagaaggcacttctcaggtactgtgctagctttctcactcctgacgacaaaaggttgatcctccggatcaaggaccaggcaaagcaaatgatccaatcagagggtgatcaatctttggttgtaactatatgcttggaggttgtcggtgccgagcgcgcggtcgtcgtgcagctcgtgggaccagtccgccgagcggctgctagaggcggacgcagccctcgtgcggaagaagtgcgccgagaagagcgcgccgaggccgaggacgccgccgggcagcaggtcctccagcgcggcgaggtcttggtcttggtcttggagcagggtcttggtcttggagcactgcacgaggagcacatcggcatggtgcttcaagcaatggttcaaatgggtgtccttgttcctactggagatatgactgttgtcagaagaaccgctcaatttttccttaatagctttcaagagtgcctaacagcacaaaggaaggagagagaaatggcaaccgcagaactgggtttcaaaaagcaattaactaaggaggagaagtttgaaaagaggaagcagagacttgctgcaatcggagaggatcttttggcgattgctgctgatcaaccatttcgcttccctgccacatttacatttgtggtcagagcattctcagttctagatggtactgggaaaggccttgatcctaggtttcatattacagagattgctaagccaaatgccaaggaattgctaagatttaatgacgctggtgttgaaatagttgtgaaggcaagtttcaacatttggtgtgtggagagacatgtgtattcctcctatgacgaattccttaggctccatgaagtgtatcaatttgtcttagtatttttattcgtggggatgcctgactcaaatgaactcatgttcaacactgagcaacctacttataattttggagcctataaaatttctaagctaaaaaaggtaataaaaaggaatgatattatagtcacatcatctgaacaacagtgaagggaagggagggatagatggtctgaatgcctataaatgtcgttcccttggtctgcttcttaaatttgaaaccaagatactatagtcaaatacttctaaacttgaagcctgtaaattggaatcaccaagttaaataagaacaggggtaactattcatagctcagatggttgtcatccaatacgtgcgctaaggcacagacaggtgaggttgcatattcaatccccaagacagtaaaccattgaggcatattaaaacacattttccatgaggtttcctaagtgatcctttaggtaaacagaaccatacctagctccatatgaaactatttcccgatttgaagtacacctaagttaaggttcatacattggagctctggcagtaaaacaatagtccttaccttgagacagcttagattagaatgaggtggatggtaatatggcatgagcaacataccacagttcatgcatggaggaaatcatttttactttctttcctagccatggtagttgtgttgctccttaccaaggcactacatggagcatcatatggttcatgatgtaaacatggttttagatctgtctatactcacactcaagaaccagccaaaatgtgatattcc

SEQ ID NO: 113388 - DNA, 2378 bp, Zea Mays
tctagtatcaatcaaaatattcgggaaggattgcttgaagtattctatggagtttatgaaaaggatcctgacaaagtgcttcaagcaatggttcaaatgggtgtccttgttcctactggagatatgactgttgtcagaagaaccgctcaatttttccttaatagctttcaagagtgcctaacagcacaaaggaaggagagagaaatggcaaccgcagaactgggtttcaaaaagcaattaactaaggaggagaagtttgaaaagaggaagcagagacttgctgcaatcggagaggatcttttggcgattgctgctgatcaaccatttcgcttccctgccacatttacatttgtggtcagagcattctcagatggtactgggaaaggccttgatcctaggtttcatattacagagattgctaagccaaatgccaaggaattgctaagatttaatgacgctggtgttgaaatagttgtgaaggcaagtttcaacatttggtcaaagctgttaacctatctctatgatagcacatctcctaagggttagggcttgtttggctaggagcggattgaaggggattggaggagcctattaagcattgaacaatttacccatgcttgtttcctattctttggtcgtgataacgtttgcaaccatgaatagtacatattgcttttccaggtgtgtggagagacatgtgtattcctcctatgacgaattccttaggctccatgaaggtaagcctgtcttaatgggcttgattgttgaacctgacttagtacttttatccatgtcacggcattgaactagacagtcactcatgtccttaggatattaacggtatacatcaacaattcattctattttaattgcttgcaaaacttttttggcccttcaaatgagttccacgcatcaagaagtcaagattccaggaggcctaaaataggagaggagggcgcagcttgattcaatccatgtcaagtcagaggctgctgcgaggtttgcacatgcaagtagaatttagatgatctctgttaggcatctaactgaataaatgatctccattatggactggttatattattttctgtgcgatcggatgggttaaagaaaagacgtgaaatggtattttccagtatggactgtataaatgtaattatattcctatgctggtcctgcttcgctttcatgtggatttatcttgcaaatggtatgtggatccgttccagaggcaatgagccttgcagccagtttgcagtataaaaaacccaattatgtccactgttggttcgacgcagcgtgtgccgaggatttctactgccaagcataagaaagagattgttcttgtcaccccaaaaatgttcccattctactttcgggcaggtgaattgcagataaatggtctgttcgcaactggtgctctcgggcgactccatcactgagcaacccttcgccccggtggctgcggtgtcgcactggctgacacctgctcgcagttgcattacaagttttactgactatgtattttcaggtttattcaatttcagttgtaatgcttctgacagcagttgtatcagtcctcttgttcagcttccatgtatccctcgcatccttccttggatccacataagtgttaatgataattttgttgcatctcctctgctgatcagagctttcaaactcatgacagaataatgtactaaacttcagtttggtgtctatctcagtgtacctacactcagttggaaaacttcaaccacactgcaacaaggtttataaaaggtactgttactattgttaaaattagtcattttagctatccgcttctatttcaccgtgcttgcaggtttgctatgaggaaaaacaaatttatgggctcaaacaaagtgtgatagtgaaagtcattttgcttccagcttaagaaccaagccaagaaaacagatatcaactgtgacgccacactcaaaagcttgtttggtgagagggataaggttgggatgctggagatctctaagcttttgagccgtggcttcccgaaaatctccaagcttttgtggtccatggagccagggatggctctttggtaaaagacttcgttgtggatggcctcttttatggtccatgttaagtcccaagtcccactaggtggttaagcagaaaaatcttgtgatggcattaagactttcagactttgtttttgggtctgatgcatgtaaaaaggattcccagtgtttctgttgctcttgcgatcctgtgaggacacatatgagagaaatatttagtttgttgatggcaaatcttgtcttatgttcatgcctgtacctatctgatcaagcgttatgatatgatcccatgcgtggtactgtgttctttagaga

SEQ ID NO: 113389 - DNA, 1310 bp, Zea Mays
atgtttgctaaattctcaccaaggcgaagccacggtaaccgccaccgtcatggtgcccccgacggccactgcgatgcccgtcttcctctccgcggcgccccctcctttttccacccgccgtcggcgcagccgccttcctgccatttccgcatccctttcgccgtccccttcctcttcggaggagccgctgctggtgcgcgcggcgcggggcgaggacggcctcccacgcccacccgcgtggatgatgcgacaggcagggcggtacatggcggagtaccaggcgctggccaagcgccacccctcgttccgggagcgctccgagaacacggacctcatcgtcgagatcacgctgcagccgtggcgtgccttcgcgcctgacggcgtcatcctgttctcagacatactcacgcccctaccggccatcggggtaccgttcgatatctcggactccaaggggcccgtgatccaatcgccagtgcggtccgaagggcaggtgagggagctcgtccccatcgaccttgatatgctccagttcgtcggagagtcactaaagattctgcgaaatgagattgatggaaaagctgctttgctaggatttgtgggggccccatggacaattgcaacttacattgttgaaggggggatgaccaacacatacacaaatataaagaacatgtgccatacagctcccgatgtcttgaggtgtcttctatctcatcttgcagaagcgatatctgactatatcatttaccaagttaactccggggcccagtgtatacagatatttgattcatggggtggacaacttccacctcatgtgtgggagcagtggtcaaaaccatatatcaaaaagattgtgaataggattaagaaagagtgccctcatgtaccccttgtgttgtatataaatggaaatggaggtttacttgagcgcatgaaggacacaagagttgatgttattgggcttgactggacagtggacatggctgatggaaggaagcgccttggtaatggaattagtgtacaagggaatgtggatccagcatttctgttctcaccattaccagtactgactgatgaaattcgtaggttagttaagactaaaaaattcatttaatttatgttattttgagtttttggttaatgctcatgtgcaattcattaatgagataacataaaacgctgcctgagtagtatacatcttcatgttgggtatgattggttgcctgcactatgataaacctgcattacactctatgcagtgtaacccctgtatgacttcattgcaatgaggtgtgtttagttgcttg

SEQ ID NO: 113390 - DNA, 1254 bp, Zea Mays
aattctcaccaaggcgaagccacggtaaccgccaccgtcatggtgcccccgacggccactgcgatgcccgtcttcctctccgcggcgccccctcctttttccacccgccgtcggcgcagccgccttcctgccatttccgcatccctttcgccgtccccttcctcttcggaggagccgctgctggtgcgcgcggcgcggggcgaggacggcctcccacgcccacccgcgtggatgatgcgacaggcagggcggtacatggcggagtaccaggcgctggccaagcgccacccctcgttccgggagcgctccgagaacacggacctcatcgtcgagatcacgctgcagccgtggcgtgccttcgcgcctgacggcgtcatcctgttctcagacatactcacgcccctaccggccatcggggtaccgttcgatatctcggactccaaggggcccgtgatccaatcgccagtgcggtccgaagggcaggtgagggagctcgtccccatcgaccttgatatgctccagttcgtcggagagtcactaaagattctgcgaaatgagattgatggaaaagctgctttgctaggatttgtgggggccccatggacaattgcaacttacattgttgaaggggggatgaccaacacatacacaaatataaagaacatgtgccatacagctcccgatgtcttgaggtgtcttctatctcatcttgcagaagcgatatctgactatatcatttaccaagttaactccggggcccagtgtatacagatatttgattcatggggtggacaacttccacctcatgtgtgggagcagtggtcaaaaccatatatcaaaaaggtgacttccttttcttgctttcatgtattaccaacttcatgattggcggtgctgctatgtatctgcactgtcttatagaacaacattgatggctcccactaaatgctctaaaggtcagtatctcctaagaaatacccttgttcttataccgaaatgattctcatatgattaattgcattacccccctacaatttctggtaccgcattgcaagaattgttatggttatgaccacaagttccttataaccacgaaagtgaaatttagagagaaaaaaccaatctctcaaaataatcagtagctggtgcttacatcagcagcatgttctcagtgcacatggatttggaattttttatactgtatgttactataatttggtttgcatatcttcaagactgcaactagcacagtgt

SEQ ID NO: 113391 - DNA, 1702 bp, Zea Mays
aattctcaccaaggcgaagccacggtaaccgccaccgtcatggtgcccccgacggccactgcgatgcccgtcttcctctccgcggcgccccctcctttttccacccgccgtcggcgcagccgccttcctgccatttccgcatccctttcgccgtccccttcctcttcggaggagccgctgctggtgcgcgcggcgcggggcgaggacggcctcccacgcccacccgcgtggatgatgcgacaggcagggcggtacatggcggagtaccaggcgctggccaagcgccacccctcgttccgggagcgctccgagaacacggacctcatcgtcgagatcacgctgcagccgtggcgtgccttcgcgcctgacggcgtcatcctgttctcagacatactcacgcccctaccggccatcggggtaccgttcgatatctcggactccaaggggcccgtgatccaatcgccagtgcggtccgaagggcaggtgagggagctcgtccccatcgaccttgatatgctccagttcgtcggagagtcactaaagattctgcgaaatgagattgatggaaaagctgctttgctaggatttgtgggggccccatggacaattgcaacttacattgttgaaggggggatgaccaacacatacacaaatataaagaacatgtgccatacagctcccgatgtcttgaggtgtcttctatctcatcttgcagaagcgatatctgactatatcatttaccaagttaactccggggcccagtgtatacagatatttgattcatggggtggacaacttccacctcatgtgtgggagcagtggtcaaaaccatatatcaaaaagattgtgaataggattaagaaagagtgccctcatgtaccccttgtgttgtatataaatggaaatggaggtttacttgagcgcatgaaggacacaagagttgatgttattgggcttgactggacagtggacatggctgatggaaggaagcgccttggtaatggaattagtgtacaagggaatgtggatccagcatttctgttctcaccattaccagtactgactgatgaaattcgtagggttgtgaaagcagctggtacaaaaggtcatatacttaacttgggccacggtgtacttcagaaaacacccgaagaagctgtagcacatttctttgatgtcacaaggagcttgagatatgacacccatttccaaggttctgttgctgaaggattgcagcctgttgcttgattcgtagtgttgtctgcattctacctttttaagacatactcattattgaagcctggatatgtcctgtggagatatcggcagcaaattaaatgtaattttattcattgtttatctgttagttttattcattgtttatctgttccattattcatgtgactgaagaagggatgcatgatgcatgcaacctggtttcgtaggagagccgggctacaggcacagtccgcttcagcggcgcctgtggctgttcaaatcagagctgctataattcctgtgaaaccgtccagtctcggtgccttctccgaggggagttcttctaggtgtttagttggttttactaactaaagttttgtatcgaatggttgaataataattataaggattactagttggatgcccgtacgttgctacggttccaactaatcatgcttaaacatttttgctcatgtttcttctt

SEQ ID NO: 113392 - DNA, 3744 bp, Zea Mays
ccgcaaacaagctcaacgaaacgcaacgcctcgctgcggaaatactcggagtaggtgcgccccgctctcgctcacgagtcctagcacagtcgcttcactgccaatccattgctctcgtatacacgaccaattgatgatggccgcggaaccctaggagcggcagcgcggctcagccttcgacatgggctccctcgaaaacggagccggagccggagccgcggcggcggcggggagctacaagcgcggcccgggcccggcgctgcgggctggcggcgcacgtaaggcgcgggcgagatccaggctcgcgcgcttcctgctgctggagaaggtggactatctccagtggatagccgccgccgctgccttcttcttcgtcgccatcgtctttgtcgcgttcctcccggggtcgggcgtcatcgagcggcccaggctgacgctcccctcgagccgcgcgggagagggacgcgtcggaggcggggttgaggaccgcagcggcctcgtccggtgggaggcgggcgcggcgttcgagttcgagccggccaggctgagggagaaatgggcgagggagcggagggaggaggccaagagcttggcggagctcgggacgcccgtaaggaggctcggggtacggaagccgcggcttgccatggtgttcggagacctgtatcccagcgcaatgcagcttcagatggttagcgtcgcctcggtgctggaggccatggggtacgaaatgaaggttttctcacttgaggatggcccatgtggtaacatctggggagccattggagtaccagtgagcatactacctgaggacgcaaacctacctatttcagtagattggttagactatgatggcatacttgtcaattctattgaggcaagaccagtattctcaagatgtttgatttggaccatgtgtctgtggcttcctacagtcttctgcatgagcctttcaaatctatacctatcatttggactgtgcatgaatattctcttgcacatcgtgctaaagaatataatgtgagtggaatgattcagctcataaatgcttggaaagatgtattcagcaggacaaatgttatagttttcccaaactatatattaccggtgatgtatgctgcatttgattctggtaactatttcgtgattccaggccccccatcagaagcatttcaggttgacagctttattgctaaaagttaccacgaagacgtgaagatcagcttgggcttgaatcctaaagattttttaattgctattgttggtaattcattttcatacggtgataatttgatggaagaggcacttgtcttgcaagcattgagtcctctgttacagagatatcgctctgagaatagcgcacaatctgaactgaaagtaaagatcttcactgggaacataactgagaagcataggatggcccttgagttttctgatttctgatagtctgttgctctaagtgttggcttcccaagaggtgcagtggagcatgttgctgctgaagataaggacaacctccttggtacagctgaccttgttatatattattcttgtctcgaggagcaattattccccagtgtgctagtccaagccatgagtcttgagaagctggttatagccccagaccttgcaattattagaaaacatatcaatgatggagtaaacggacttctgtttccaagaaagaatattggcatgttagctcaagttcttcttcgagcagtgtcaaatagtaaagtgtctctttcagggcaaaaaattgcttcagctgggaaggctcatgccaagaatcttatggcttctgagaccattgaaggctatgctatgctattgaaaaatgttgtcaagctccccactgatgcactaagccctttaactgctgatgagatacctttagctctgaaacaagagtggaaatggcacctatttgacgacgtgaagcatttacaccgtgtgaatacgagtttgtctggctacaagatactccagaaactagagcaggagtggcatagcaaccaaatggaaaactcttctttgagtacaaaaaatatcaatgacgcattctctgcaattgcctgggaggaacagagagtaaatgaggttatggacatcaaaagaaaaatggaggaagacgagttgaaggacaggaatgaccaacctcatggaacatgggaggaggtgtacagaaatgtgaaaagggtagagaggttaaaaaatgaattgcatgaaagagatgacaaggagcttgagcggacaggtcagccactttgtatatacgaacctttctttggggaggggacctggccctttctgcaccagagctctctttatcgtggagttggtctgtcttcaaaaggtcgaagaccaggagcggacgatattgatgcttcttctcgtcttccacttctcaataatgtttactacagagatattcttggtgaatttggagctttctttgctcttgccaacagaattgacagaatacataaaaattcttggatagggtttcagtcctggagagctacagcaagaaaggcaaacttgtcaaccaatgccgaatctgcaatcttagaagccattcaatctcaaaagcatagagattccttttatttttgggttcggatggatcaagatccaagaaaccacgctaataaagatttttggtccttctgtgacgtgatcaatgctgggaactgcaggttagctgttctggaggcctttcaaaggatgtatggtgtacatcttgatcgtgacctggatactctgttacatatgcctaatgatggagacacgtggtctgtgatgcaaagttgggttttgcctacacggtcattcctagaatttgttatgttctcaagaatgtttgttgatgcactggatgcacaaatgtatgacaagcaccatcaaactgggcattgcatcttgagtctccacaaggaccagcactgctactcccgtcttctggagttgattgtgaatgtttgggcattccacagtgcacgacggatggtctatgttaatcctgcaactggtcaaatgcaggagcagcaccatctcagcggcaggagaggtcaaatgtctgtgcagtttttctcctacgccactctgaagagcatggacgaggagcttgcagaagagtttgacttggatcacccagacaggaggtggctctggccacaaactggagaggtcttctggcagggtctctatgagagggagcgtagcatgcggcagcatgagaaggagcggcggaagcagcagagcagagagaagatccagagaatcaagagtagagctcggcaaaagacgttggggaagtatataaagccaccacctgatgatacagttgtctcgaacgatacaacgactgtagatttatagcattttgaccatactttagggtgataattcttaccgtggaaaattttggttcattctttcattgttacggctaatgtcctcggtcctcactgagtacccccggcaggtgtgaatatttttggtcagttttatcgtgccctctggtgttcagggtgctttacaggcgattttgtaacatatctaggccattaagtttaaatttgggttcccgtagcgtagatgcttttgttcttttcgcttacgagcttctcaataacaggcaacagctgctccgcgtttgcagtctccttggtacaaattgagttgacttgattgtgtcagtctgtcagatatttggttgaacctgcgctattatctacgttt

SEQ ID NO: 113393 - DNA, 3161 bp, Zea Mays
gtcgtctccgttacaacgcagacactgccgccgctccgcgacagtaactctgctctctctctctctcgcatggcgtactcctcgagccgcgggacgaaaccctaatggagaaccggcgccgccgccacgcccctgcgccgtagactcccctcgccgcagatagcgccagcgcttgccgatccggtgggaaaaaaaagtgggagcacggagcggcctcgcctcggcgggggaggcgcccgccatggggagcgacctcaaggagatgaagtacaggcggaggatcggggtggaggagcggccgcaatgcagcgacccgaggggcggcgcggactgggccgcgctgcagcaggaccccgtcgagctgctgcgcaagctggacgagctgagggaccagatcacgcgctcctgcaacgtcgtcgtcggccagccgcgggagcaccgcagggtcagccgccgtgcggtctccatgctccccgagcatctcgagccaccgcctctgccagggtaccaccgctcccgctacggtgggcggtatgggcacggcttgccgccaccaagcccatacgcaccgccacgccctgaacatggggaaaggtatgcgaggcagtctagtgggcactaccgccagtaccctcccaggcactgcgagaacggtgggatggggcctgggacctaccatcaccatgggtgtgcctgtccgcactgtctgcatgggcagaggactttcccgcaggaggagaacatcccaatggcgagatacttcgccgggcagcacgaatcataccggttggagaggtcgccttctgtttcatccgattatgatcgtgggtctgtggcgtcatcactttactctcatcggtctgtatcgaagatgagggcagagtacttcaggaagaaggcagaacatatctgccgtccagtggatggtgccgcacctttctctgtatgcagttcatgttataaactactgctgatgcctatggaaaaatgcgtagggaggaagcagaatcggtttcaatgtgggtcttgttgtcagataattagtttgaagcatcaggaagaaaatggtatcccctttgcacttgcaccatcatcatccttacatgcgcctgaaatggagcaaagcacaagtgaccagatgaggcaagattctgtccatcagcgccatgaggatttcaattttatgttcaacaattcaaatgatcattgcgatatgcaaaacaacatggatttcaccgatgataattcacttccttcgaccgcgagtaatgacaggattgagattgacaaagagtgtgggtcaactagaagcattcagtcaaaagctgagggtctctctttctctccaagtaggtctgtagacattggtagcccaaaggatatattgtgcgagagggataaagacagcaatgtggagccttcctcagatggtccacttagtccacgatctccaactttagaggacaaacttgttgacccgttgtgtgcccaggaaaaaggtaacgatgaggacgatcaaggcacggcttacagatcgaacctaacatgcaaaggagaatatgatgctaacgacgagtatgatggggacgttagtacaagaagcaaaccggagagcaatgtaaatgacaaagataccactgaaggcgaaacctcatgcagaaattacaaggaagacaactgttgcaacattgaagatagtagcaaaacatacgagcagaatagtggagaagatgacaccagtagtctagtagatggaaatgagaagtatgagtctatgaatactaaagacgatgatagcagccctggaggtgaggacacatgcaataggtatgagccaaaggttgaagacgatgaaaattgtgttcttggagctgagagcattagcaacaattgtgatgaaaataataaagatgccataaaaactggaagcataagtgagagacatgaagagctgataattgaagaagaaaatgagaaattgcagcaggcatttattgaagatgccaattcccaagcagggagtggttcatcaattaatgagcggacgaattctgggttttctcgcggttcatcagaggctgggttagatgaagatcagtcctcaaccggtaagagtggggactcatcattttttgctggtttcttgaagaagggtttcaaggacctttctttattaaataagtccatggatagcgttaaggtttcaattaatggtcatccaatctctgaaagagcccttaagaaggcagagaagaaagctggtcctgttgacccaggttcatattggtacgactaccgtgctggtttttggggtgtcatgggacgagaatgtatcggcattgtccctccatttattagagaatttaattatccgatggccagaaattgtgccggtggggattctggtgtttttgtcaatggcagagaactgcatcaaagagatttagatctacttgtaggaagaggactaccacggacatctggaaaatcatactctcttgagatgtcaggaaatgtaattgatgaagacactggaaaaaaactacgcagtcttggaaaacttgctcctacgattgagaagttgaagcgtggttttggcatgcacgtccctgaagagtttagatagctggttctagtacaggatcttggttttgctaataatacactcttcaaagctgacaatggggtggcaaacgtgtggcttctgcgggacggtggtatcaaatctcagatttcttggactggagctctggaagcagcagtacttaagatccttggtgtgcggcgaaggttgtctggcactcaagaaaccaagataatctggtctaatgacttgactaccaatagtacccctcctgctaatttcaattgcttcaatggaagcgacgtgtgctgctagtgactctagattatcaggcagttcttaacttcactgctctgcctgtacgtgctattccttgaatgtgttatcattatcggtacattgccccatcacaggcatagaagtgttgtcagatgtaccatgagcaattgtcggcttgtaatatattggtagagatatgcttcccctaatatttatatgtatatatatgtgatcttgattcttgaatctcttgccaatacgattgattcctgaaccctgttaataagagtcttatttt

SEQ ID NO: 113394 - DNA, 1591 bp, Zea Mays
gcacgagcatcgagaggaaggtgcacgcgaggccatggcggccgccgcgttggacgccgaggccggcgccaccaacggcagcggcggcgtcagccacgccgccgccaagccggggcccacggccggggccgatgccggcgccgccttcgtgctggagtccaaggggacgtggtggcacgcggggttccacctgacgacggcgatcgtggggccgacggtgctgacgctcccgtacgcgctgcgcgggatggggtgggcgctcggcctcaccctgctctccgtcatggccgccgtcacgttctacgagtactcgctcatgtcgcgcgtcctcgaccactgcgaggcgcgcgggcggcgccacatccgcttccgcgagctcgccgccgacgtcctcggatccgggtggatgttttacttcgtggttaccgtgcagaccaccgtgaacaccggcgtcagcatcggctccatcctgctcgccgccgactgcctccagatcatgtacacgagccttgctccgcacggtcccctgaagctgtaccacttcgtcatcatggtggccgtggtgctggcctttctctcccagctaccgtctttccactcgctgcggcacatcaacttcgtctcgctgctcctgagcctgggctacacagtcctcgtggcagccgcctgcgttcgtgctggtttgtccaagaatagtcctgcgaaggactactcgctaagctcgtccaagtccgagcagtccttcgacgctttcctgtccatttccatccttgcctccgtcttcggcaacggcatactgcctgaaatccaggcgacgttggcgccaccggcagcggggaagatgatgaaggcgctggtgctgtgctactccgtcatcgtcttcaccttcttcctctcgtcgatcacgggctactgggccttcggcagcaacgtgcagtccaacgtcctcaagagcctgatgccggactcgggccccgccctcgccccgacgtggctgctgggcgtcgcggtcctcttcgtcctcctccagctgctcgccatcggcctcgtctactcccaggtggcgtacgagatcatggagaagggatccgccgacgccgcccggggccgcttctcgcgccggaacctcgtcccgcgcctgctgctgcgcacgctctacctggccttctgcgcgctcatggccgccatgctccccttcttcggcgacatcgtgggcgtggtcggcgccgtcggcttcgtcccgctcgacttcgtgctccccgtcctcatgtacaacatggcgctcgcgccgccgcgccgctccccggtcttcatcgccaacgcggccgtcatggtcgtgttcgccggcgtaggggccatcggcgccttcgccaccatccgcaagctcgtgctggacgccgacaagtttaagctcttcagcaacaatgttgtcgactaaaattccaacgcatcttgctcttatattactcctcagggtgttgtatatcatcgagttgttgtagcggtaatgtgagtaatcagggcatactagctgtatgtgtacatacattccactattcgagagtataggcaaatcatcatctaagttatt

SEQ ID NO: 113395 - DNA, 2127 bp, Zea Mays
ttgtttggtttgaagccggccaaagttgcctggcctggcacagatctcaggcgttggactttgagtgcttgggctaggattccttgccaaacagacctgagtgcatgacagcgacagccttctgggctcactcgcacggtcgcacccgaaacgccgcaaatccgggcccgcagcccgacccaactcaactcaggcagacactcgccgccgccacgacgtcactagtagagccgtagagggcaagaggcgacggaatgacggagcggcaggtggcggagctgggtcccgggacggcgtgctgcggctggaaccactgtggccgccgcctcgccgctggcgccgtcgatggctccgtctccgtctatgactcccagccgccaccctcgttcaagtggcaggcccatgagcaagccattgtgaatgtcgtctggcttcctccagagtatggggatgctatagcttgtgtttgtgctgatgggacactgtctttgtgggaggaggttgctgctgatgatcaacttccaacctggagaaattgtaaaatcttcgaggatggcaactctcatatactaaatgtacattttggattacatctgggaattctgaaaatggttactgcatactcagatggccaagtcaaggtctacgagctcttggattcattggaattagacaagtggcagcttcaggcagagttccaaaacattactgatccaatctctagatttggaaaacctgcatgcacttctgcatccatagcatggaatccaagaagaggtggaagccaacaagctagttttgcaattggctttaattcagattcgcctcatttcaactcttgtaagatttgggagtttgaagaagctcatcagcgctggcttccacttgttgagctaggttcacctgaggatacaggagataaagtgtgtgctgtagcatgggctcctaacattggcagaccatatgagattatcgcagttgcaacctgcaaaggaattgcaatctggcatataggtttgaacgctgatgctgatggcggaccttcgacgcagaacgttgctttacttaatggccacgatggcgaggtgtggcaactggaatgggacatgggcggtatgacactcgcatcaaccggaggagatggcatggttaagctatggcaggctaatttggatggagtttggcatgagcaggctgttcttgactgcagtggatcacatgtctagggtctacgtgtttcagaaaacattttttttttgttcccagcactagaagttgctgctcttgctgcagaattatcaagtacttctttcgcttatccgcccaactattgctgtctcctgtgtggctggttgggcgctatcaaaactgggccattaacggccgtgggaccgcattgaaaagtccagaaaacgaaggtacatttgcttgtaaccttgtaattggggaagctacacagacgttgagtctaagctagtggacggaggtcgagatcaaccacgtgatgtacacgtggtcatgttcctcaaaatcttccgcaggtcctttcagatatcactgatatgcttgtaccattaaaagcagattaacacaggacgaccttcggctgcccacagatcagctatccacaatcaatgtttattttcatggtatattagatttaatattagcgctaggtttttcagatttggaggtagggagatggcagacggaaattgtggcaggatcaagcttcgctagttagctgtgacagcgttttacactaaaactgagtggtgcccagcccataagtgaggccattgtaatactgattctggcgaaccctatttgtggaagtacccaacgataaacctgctgcaggtagggatgtttttttacaattcgttttataatctgatcttatacttaaatttcatagctctaaaatttagagctcgttatcaccctagctgcaggcaaataagagaatttaccgaagtgtttcaatcttcaagtggaaggtgagtgaaatctacgggacctgtctggcgcgaatatattttgatttccatgtaacaattatacgcctttaaagtgaaaaaaatgcaaaacatttaataatttatacttctttccttaacatatgag

SEQ ID NO: 113396 - DNA, 402 bp, Zea Mays
atgtcgcgccgtcgcgggagcgggagggctgatcgccacttcgacttcgtcagccaccaggaggccgcaggactgcaggagcggaggagcctaggggcgcacgtcgttgccgagggtgaggatattagggaagtccctgtcgatggtggtggcggcgatggtggtgacccatggcgcagcgtcaaagacggtgtcatcgtaggatccggagttgtcggtggagcatacgatagagacactgtggatagcagtgtggaggtgaccaagcgtgacgagcttgtggaaaagggacttggcgtcatcagcgaggggcacgtcctggccgaaggagacatagatgacgtaggcgccgccgtggttggcggactcgaagcccgcgaggacgacgacacactatgctga

SEQ ID NO: 113397 - DNA, 2121 bp, Zea Mays
aaattggactgattgaccgcaccgattccgcgatacgttcccgaatccaacccatcttcgtccgctccggccactcgtttcgccgccgtcggtcgccacccgcaaggtttggaggataagattcgggagggatggcttccggtgggcagccgcagttccggtacacgcagccgccgtcgaaggtgctccacctgcggaatctgccgtgggactgcactccagaggagctggtcgagctggggacccccttcggcaaggtcgtcaacaccaagtgcggcgtcggcgccaaccgcaatcaggcattcatcgaattcggcgaccaaaatcaagctattgccatgatatcatattacgcatcgtcaacagagccagcacaggtaagagggaaaaatgtgtaccttcagtactcaaatagacaggagattgtcaacaacaaggcaactggggaaggttcaggcaacgttttgcttgtgggaatggagggtgttgcaccagattctgtcagcattgatgttctacacgtggtattttctgctttcggatttgttcataagatcgctacctttgagaaagcatctggttatcaggctttgattcagttttctgatgctgaaactgcaacatctgcaaaagctgcactggatggtagatgcattcctagctatttgctaccagaactggatgtggcctgcactttgagaataacctattcagcacacagtgttctcaacgtcaagtatcagagccacaggagtagggacttcactaatccttaccttccttttctggactctgctaaagatggctctggaccggatggaaaaaaacaggaagcagagagcaatatactgcttgcttctattgagaacatgcaatatgttgttacaatagatgtgcttcatgaggtcttttcagcttttggatttgtacagaagattgctatttttgagaagaatggctttcaagcattgatccagtatccagacattcaaactgcgtatgcagcaaaagaagcactagaagggcacagcatctatgaaggtggctactgcaaactgcacctcacattttcacgccatactgagcttaatgttaaggttaacaatgagcgaggtagagattataccaaggggaatgccactccaagcagtgatcaaccttccattcttggtcctcagccaataccaagcgttggtgctgctattccaccagcacagggtagtgttccttctgcagccaccaattcagtaatgccaccaggggatccatcagttgctctaccttctaatccttccagtgagccactcctgcaagcacctgttgtttcctctggagggcctccgcattaccctaatcaggccatcctacaaggcccacttggtgttgttgcacggttcccaggctatggtgccctgcagtttgctcagggctcagctcaagctcaaatggtgcagccttcaggccaaggaagtcaacatatgtcaggtcatgtaaattatcagctacctccaggttcagcccaattcatgcagtatctcagcaacggaagccatccacttccaaacgcacctgggccacagacaatgccttaccctgccctcagtgggcagcagctacctccgggtcttcagatgatgcaagctcaaggttttggaggcctgccgttttcacagggtcctggacaaccaatgccacagttcccaatgtatggcacccagcagtttcctccgggtatggagcccaagatgatgcgcttctctgagcagggaggccagcagtttacatttgcgccgcggggtccaaatagtcgttagcaaatttgaacttagcaacgttagatcgttgatggtgatgaatggatgtcaagccttctatgttgctgttttctaaggtgaataccgatgctgttccattactaggatctatacttggtttatctctcgtactgtggccaaaacaaatgtctaatctgaggtttcgtagccttgtatttgtatcgatttcctcacgcccgcagcttctgcctgcactgtgttacattacggttatactgcagtagtggaagcaaatgtaaaagaaacctagagacctgatgtgccaggttgaaagcccgtagctgca

SEQ ID NO: 113398 - DNA, 2239 bp, Zea Mays
aaattggactgattgaccgcaccgattccgcgatacgttcccgaatccaacccatcttcgtccgctccggccactcgtttcgccgccgtcggtcgccacccgcaaggtttggaggataagattcgggagggatggcttccggtgggcagccgcagttccggtacacgcagccgccgtcgaaggtgctccacctgcggaatctgccgtgggactgcactccagaggagctggtcgagctggggacccccttcggcaaggtcgtcaacaccaagtgcggcgtcggcgccaaccgcaatcaggcattcatcgaattcggcgaccaaaatcaagctattgccatgatatcatattacgcatcgtcaacagagccagcacaggtaagagggaaaaatgtgtaccttcagtactcaaatagacaggagattgtcaacaacaaggcaactggggaaggttcaggcaacgttttgcttgtgggaatggagggtgttgcaccagattctgtcagcattgatgttctacacgtggaatactttgatgtgccaggactgtcttagtaacttctagcacattgttttgcatgatctgaatggattagcaagccgttgtcacggagtatcatggcaggaagcatctggaacacatgtattttctgctttcggatttgttcataagatcgctacctttgagaaagcatctggttatcaggctttgattcagttttctgatgctgaaactgcaacatctgcaaaagctgcactggatggtagatgcattcctagctatttgctaccagaactggatgtggcctgcactttgagaataacctattcagcacacagtgttctcaacgtcaagtatcagagccacaggagtagggacttcactaatccttaccttccttttctggactctgctaaagatggctctggaccggatggaaaaaaacaggaagcagagagcaatatactgcttgcttctattgagaacatgcaatatgttgttacaatagatgtgcttcatgaggtcttttcagcttttggatttgtacagaagattgctatttttgagaagaatggctttcaagcattgatccagtatccagacattcaaactgcgtatgcagcaaaagaagcactagaagggcacagcatctatgaaggtggctactgcaaactgcacctcacattttcacgccatactgagcttaatgttaaggttaacaatgagcgaggtagagattataccaaggggaatgccactccaagcagtgatcaaccttccattcttggtcctcagccaataccaagcgttggtgctgctattccaccagcacagggtagtgttccttctgcagccaccaattcagtaatgccaccaggggatccatcagttgctctaccttctaatccttccagtgagccactcctgcaagcacctgttgtttcctctggagggcctccgcattaccctaatcaggccatcctacaaggcccacttggtgttgttgcacggttcccaggctatggtgccctgcagtttgctcagggctcagctcaagctcaaatggtgcagccttcaggccaaggaagtcaacatatgtcaggtcatgtaaattatcagctacctccaggttcagcccaattcatgcagtatctcagcaacggaagccatccacttccaaacgcacctgggccacagacaatgccttaccctgccctcagtgggcagcagctacctccgggtcttcagatgatgcaagctcaaggttttggaggcctgccgttttcacagggtcctggacaaccaatgccacagttcccaatgtatggcacccagcagtttcctccgggtatggagcccaagatgatgcgcttctctgagcagggaggccagcagtttacatttgcgccgcggggtccaaatagtcgttagcaaatttgaacttagcaacgttagatcgttgatggtgatgaatggatgtcaagccttctatgttgctgttttctaaggtgaataccgatgctgttccattactaggatctatacttggtttatctctcgtactgtggccaaaacaaatgtctaatctgaggtttcgtagccttgtatttgtatcgatttcctcacgcccgcagcttctgcctgcactgtgttacattacggttatactgcagtagtggaagcaaatgtaaaagaaacctagagacctgatgtgccaggttgaaagcccgtagctgca

SEQ ID NO: 113399 - DNA, 2324 bp, Zea Mays
aacatctgtctgaacagtttaatgagtttcactcactttccactgtgaatattgtagatttgatcactttgttactggcgcatgaatgaatgcttgttagctgtgctcgtttctgatctctttctctagacaatccttacaaagcctagaaatgcattgattgatttgattctaatactttaataacagcttgatgtcacaattttacccaggagtgatgataaattcatctgcattatctgtactagcaggttgaaaggttttgaacatgtacagttgtgtgctagtctgctagtacccttgattcattgttattggttattgccgacaaaaactttattgtagttgtaagcttttctgtatgtttgtataaatattaattttgtttggcgtagagatcagacaacctttggctgccactttcaatttaagatcatttcactttccagatatattggtgcatgcatttggttttactataatgtttcacatgtggtattaacagttgacgtatgtgtgcacaggtattttctgctttcggatttgttcataagatcgctacctttgagaaagcatctggttatcaggctttgattcagttttctgatgctgaaactgcaacatctgcaaaagctgcactggatggtagatgcattcctagctatttgctaccagaactggatgtggcctgcactttgagaataacctattcagcacacagtgttctcaacgtcaagtatcagagccacaggagtaggtaaggtttactcagttgtcaagcgagattttttattctacatcctgtttgatggatggattctgcgagttttacccattgaattgtttcattttgcatggaaaagtatttttgtctgtcagatcattactttataaatctgggtggtttgtaatattcaaggaatcatatgactcttgattatcctttgctgttttctttagggacttcactaatccttaccttccttttctggactctgctaaagatggctctggaccggatggaaaaaaacaggaagcagagagcaatatactgcttgcttctattgagaacatgcaatatgttgttacaatagatgtgcttcatgaggtcttttcagcttttggatttgtacagaagattgctatttttgagaagaatggctttcaagcattgatccagtatccagacattcaaactgcgtatgcagcaaaagaagcactagaagggcacagcatctatgaaggtggctactgcaaactgcacctcacattttcacgccatactgagcttaatgttaaggttaacaatgagcgaggtagagattataccaaggggaatgccactccaagcagtgatcaaccttccattcttggtcctcagccaataccaagcgttggtgctgctattccaccagcacagggtagtgttccttctgcagccaccaattcagtaatgccaccaggggatccatcagttgctctaccttctaatccttccagtgagccactcctgcaagcacctgttgtttcctctggagggcctccgcattaccctaatcaggccatcctacaaggcccacttggtgttgttgcacggttcccaggctatggtgccctgcagtttgctcagggctcagctcaagctcaaatggtgcagccttcaggccaaggaagtcaacatatgtcaggtcatgtaaattatcagctacctccaggttcagcccaattcatgcagtatctcagcaacggaagccatccacttccaaacgcacctgggccacagacaatgccttaccctgccctcagtgggcagcagctacctccgggtcttcagatgatgcaagctcaaggttttggaggcctgccgttttcacagggtcctggacaaccaatgccacagttcccaatgtatggcacccagcagtttcctccgggtatggagcccaagatgatgcgcttctctgagcagggaggccagcagtttacatttgcgccgcggggtccaaatagtcgttagcaaatttgaacttagcaacgttagatcgttgatggtgatgaatggatgtcaagccttctatgttgctgttttctaaggtgaataccgatgctgttccattactaggatctatacttggtttatctctcgtactgtggccaaaacaaatgtctaatctgaggtttcgtagccttgtatttgtatcgatttcctcacgcccgcagcttctgcctgcactgtgttacattacggttatactgcagtagtggaagcaaatgtaaaagaaacctagagacctgatgtgccaggttgaaagcccgtagctgca

SEQ ID NO: 113400 - DNA, 2724 bp, Zea Mays
atggccactttccctgttaccaccgcccccactcctcaccagagcactccacccacagccggcctgcccggccacctccgtctgcccactgccgcctccgccgatgccgccctcatcaccctctccgccttcctctcctccggccgcctcacgacctcctccccttccctcctccaccgcaccctccgcgccgccgccgaccaccgcctcccgcggctcggcctgcagctccacgccttcctcgtcaagacccgcttacttgccgaccccttctcggcctccgccctcctccacctctactccaccatcgccccgctgcaccgcacccgcctcctcttcgacaggatccccaagtccacctaccccgtcccctggaacaccatgatcctacggtacgcgcaggacggattcttggatgaggcgttcgatctgatggtggccatggaggaatccggcatccccattggtgcctccacctggaacgccgtcatcgctgggtgcgtccgagctgagaacggagagctcgccatcgagctgctaggcaaaatggtttcggttgggggagttgtgcccagtgtggccacgttcaacaccgtgctccacgtgatttcggcgttgcgcggggtgaacgtgctccgagagttgcacgcatttgtgctgcgcaacgctgaggttgtgggacttgggcctgtggatttggatcgactccaggaatccctggcggcaggatacatgtgcagctcctgtgtccagtacgcaggccgtgtgtttcgtgatgtcaggataagcacttgcttcctgggcaacctgatgatatcgggatttcttgacacggggcagcggaatcaagccttgggtgttctgcgagaaatggcgtttggctgtggtcatgaagctcagcatctgccatcggcttcgcttacgctggtcctccctgaggtcaatctggcaacaaagagaggcctagagatccatgcttatgcctatcgccatggttttgagtgtgacacctcggtctgcaatgccttgatggcaatgtatgcaagagggggcaagatatgccggtcagacaaggttttccaaggactggatgctaaagatgtcgtgtcatggaatactatgatttcaggctatgccacggttcatgattttgatctctcatttgagctgttccgtgaaatgcaacgtaatggtaccagacctgatgactacacatttacatcagtgctcaacgcctgcagctttgcctgcaatcacaggacagtaatggcattgcacgggcaaatgataaggatggggctttgccattcctatgttgatgatatgaattctctcatggatgcttatggaaagtgtggtttcattgctgaagctcagaagatatttgatgaaaccgagcgaaaggatacagtttcgtggaatatcatcatttcgtgctacggctacagcggttttcctcaacgagcaatcaggcttttccatcagatgcaagatcaaagctacaaacctaccagagtcactttcattgctgtgctagcggcatgcagccatgcaggcttagtagacgaagcactgcgttatttcgaggcaatgcacggagactacagcattaccgctgatgaggctcactatgcctgcatcgttgactgttttggcagagcaggtcagctccaacgggcttatgagttcatcagaggaatgccggtggttccaaatgcttgtgtgtggggtgccctacttagcagttgcaggatacacggaaatataggcctagcagaaattgccgcgaagaagctcgttgagctggaccctcagcattctggatactggatgctgctaaaggatatgtactcaaaagccaagagatggaatgatgtatcgcaacttcgagctgctatgagagataatggcgttaagaagtgcccaggttatagttggattgaggggcgagatagcgaggtccacagattccttaccgctgacaagcttcactcacaaagccaccagatatacgaagtactaggtgggttaaccgagcagttgatggatgaaggatatgaaatagatgtcgatttgacatatactgagtgagggatgtactagatttctacaacttgtcttgaaaatctagccatttagctgacatccctagtcccaacaccatgtctattgcaagcagccacgcgaatcttattcaatgattacaaggttgcacgagctaaagagttcagtttctgcccaggttagaagcgctaagaagtaggcgcaagatgttacattttgggctcgtcatctgatgtgtaagttgatgccttgtcacgaaaagatcagacccggagcattgtgtaacaagaatatacagagttcacagcctagtttcaatatttttttggtgagaaattctgattcaaatattccaccatgactcataggaaaggttcctcaagatttactggataagagaagacaaaatgagattgtggaaacagaaaagcagctgctgacttcagtggcttgtaaaatgccttaacaggagtccttgttggaaaatacagaaggcaaagcagcaacggactgttacttttgaacaagtttgtttcttgctggtagtttgctataacaaaatagtaggggcatgaaataggctggacagagacgacgactactatacaataaacgagtatcttggtccgttagatcatgatttaattttgatccgttaaa

SEQ ID NO: 113401 - DNA, 435 bp, Zea Mays
atggacagcaggtcagcgaagctccggtggggaaggtgcttggcgtcggggtttcttcgaccgctcgccggagccgggccacgccacgccgagctgcgcgcaggagagccaagggcggagctgcgccgccggaaagggttggtcgtgcccgagggcagggaggcgctagagagaggggagcggggcgagggagatgcaggggttgttcaaatggtcgacatgggtgggcggttggtgcttttctacatctgggcaagatggacggggacagacagttttgagggagataacaaatgggccccatggcgcagtaccacgccccagcgagggagactgcccggtagggcctggggcaaggagcacctaggcacagctgtgccagcacgctcgacacgcgacgtggctgggccacagggcgtgggagatggtcactaa

SEQ ID NO: 113402 - DNA, 435 bp, Zea Mays
atggacagcaggtcagcgaagctccggtggggaaggtgcttggcgtccgggtttcttcgaccgctcgccggagccgggccacgccacgccgagctgcgcgcaggagagccaagggcggagctgcgccgccgaaaagggttggtcgtgcccgagggcagggaggcgctagagagaggggagcggggcgagggagatgcaggggttgttcaaatggtcgacatgggtgggcggttggtgcttttctacatctgggcaagatggacggggacagacagttttgagggagataacaaatgggccccatggcgcagtaccacgccccagcgagggagactgcccggtagggcctggggcaaggagcacctaggcacagctgtgccatcacgctcgacacgcgacgtggctgggccacagggcgtgggagatggtcactaa

SEQ ID NO: 113403 - DNA, 2756 bp, Zea Mays
ctccaagtcacgcccctcccacctcgccggcgcgcccgcctcagccgccatgagcgcgctccaggcctccctcctcctccgcccgctcccctcgccactgcccccgcgccgccggcagccgctcccctctgccttcgcctctttgccccgcggtgccaacgcgccccgccgtgccccgctccgcctccgcgcattggaccccatcgcgccgcagcccgacgcctccgagccgcccgcggctgcatcctcgtccgcggcggaggcggaggagtcggagagcacgacgatgacggagtcgacggcacagcccgccacgatgagcgggaaggaggagctggaggacctggtgggcaaggctagggcctgggccgtggcggtcgcggccgcggtggtggccgcggtcaggaggttcgtcgactgggtgctgtcgaggaactggatgagctggtggcccttctggagatccgaccaccgactgcaggggctgatcgaagaggcggacgccaaccccaacgacgctgccaagcagagcgcgctcctccacgagctcaacaagttcagccctgaagaggttattaaaaggtttgagcagcgaagccatgctgtggatagcaagggggctgcagagtacctgcgggcacttattctcactaacactatagcagattaccttccagatgaacaatctgggagatctgcaagtctgccagccctgttgcaagagttgaaacaacgtgtatctgggaatgaggataaacctttcatgaaccctgggatatcagaaaagcaacctttacatgttgtaatggttgaccccaaatctacaggtagatctacacgctttgctcaagaaattgtctcgacgatgttgtttacaattgctgtcggcgtaatgtgggtgatgggtgctgctgcacttcaaaagtatattgggagcttaggtggaattggggcatctggtgttggttctagctcatcatattctccaaaagagatgaataaggatatcatgccagagaagaatgtcaagacatttaaagatgtcaaaggttgtgatgatgcaaaaaaggaacttgaggaggtagttgagtatctcaagaacccttcaaagttcactcgccttggtggaaagctacctaagggcatacttttgactggtgctccaggaactgggaagacactactagcaaaggccattgctggagaagctggtgtaccattcttttaccgagcaggctctgaatttgaggaaatgtttgttggtgttggtgctcggagagtgaggtcattgtttcaagctgcaaagaagaaggcgccatgcattgtcttcattgatgaaatagatgctgtgggttcaactagaaaacagtgggaagggcacacaaagaagacgttgcatcaacttcttgttgagatggacgggtttgaacaaaatgagggaataattgtgatggctgcaacaaacttggcagacattcttgatcctgcactcacaagacctggtagatttgataggcatattgtcgtcccaagtccagatgtgcggggtcgccaagagattctggagctctatttgcaagataagccagtggcaaatgatgtagatatcaatgcaattgcccgtagtacacctggctttaatggggctgacctagccaaccttgtaaacattgcagcgataaaggctgcagttgaaggtgcggacaagttgaatgctgttcagttggagtttgccaaagatcgtattatcatgggaactgagaggagatcaatgttcatatcagatgaatcgagaaagcttactgcgtaccatgaaagtggacatgctattgttgcgctcaacacccagggtgctcaccccatacacaaagcaactatccttcctcgtgggtctgcccttggaatggtcacacaactcccctcacaggatgagacttctattagcaagaaacaactccttgcacgtcttgatgtttgcatgggtgggagggttgctgaagagctgatatttggggaagacaatgttacaactggggcgagaaatgaccttcacactgcaacagagcttgcccagtacatggtatcaaactgtgggatgagtgatgctatcggtcctgtgcatgtgaaagagcgaccaagtgtagagatgcaatcaaggatagatgctgaggtggtgaagctcctaagagaagcttatgggcgggtcaaacgattgcttaaaaagcatgagaagcaattacatgctttggcaaatgcgctgctggagcgtgaaacacttactgcagatgagatcaacaaagtagttcacccttaccaagaagaaccccagttttccttccaagacgaggagtttgccctcacttaaaagattcctttgttgcatccagattttacctactgtgaattgtaaatccgtgtacagtaagtggcatctagatgagccatcgaagtttgttcacatgcccccttctgcaaaatagggcgcaacacaccttcggtacatttttcaccttggcaccatttccatttgaggagcagccagtaaatcagaaaatgagaagattggtgttggaaaagccgatgcctgcttattgataattcttgggatggaagaccgccatggtggccggcaaggctctgggttgcaaaaccctccatacttttggttttagctaggatagatataggtgcaacattgcatgctctgaatgctaggtttctggctagggtaacatgtttaccatgttctttttact

SEQ ID NO: 113404 - DNA, 780 bp, Zea Mays
aatgtagcaggacaagtctactatcacaatgaatatatcaactggcatgtctcacatgtggtgctgccagtgccagcaaatacatacattttcttttcctccccggaactgattgatacgagcccgtgcccttttgaatgaaaacatgacatagttgaatactaatcgtagggcctgtttgaacctgtccgttgtggacactgaacaggtcaagatacggtctcagataaaatgcggccgtcatgcttgaagacatgactacagaatctggttcttcgtaagaaactacttacgtgcagcgatggtggtggaagagccagcgtttagcaagctggtacaagcactggtcaagttctgctggatctggatcaccacggttagttacgaagaccggagcccaggaacgttgctgaggcccatcttccgtagaatttgtttgggaatggctggcgggactgcgagcccaatgctctgactgaactcttcagccagcatcacgagtctggccttgtcacggttggtagccttgtgcgagttgtagtaccccagccatgcctggtaggctgattccttgctcttcatctccactcttctgactgcgtctttgacctataaagtcaagaaggaatattaaaacataaaggcaccaggtttgttaatctttggtagccaagataagaccttcttttaacaaaatttgctctgggattgaccaagctaagctaaatgggaagataggacacaagcactaattctatacaacttactgctgcctgaatg

SEQ ID NO: 113405 - DNA, 1504 bp, Zea Mays
cccttctctctcgctctctcgcaccagagccgcaccctcgcaccagagagcaggtagaccatgtccttgtacttccccgtcgcatgacgtggtcatcgagcagcgacgcggcggaggcggagggcgggaggagaaatttgccattacgcatggcgccgtcgttgtaggtgcggagcagccccgacagggaggagaaatttgccattacggcgtgggcggactcgcccaaccacggcatcgccttcgactcctcctgggggctcctcgacgacctggagatactcgtcaagcgcctccgctcaaagcaggtgcggaagggctccatcgacgggagcggcggcgccggcaacagcaacttcgactccttctccgaggccgggtggtccagggagatctccggcgcggcggattcggcatccaccagcgccctgtgggacgagacgagccgcgactacctcaccttcgtcaaggagtaccgagaagccgccatattgtgcccatctcatgccagggcactcaagctcctggggagcgctctctttggcgttggggagtaccgagctgctgagaaggcactggagtaggccatcttcctgaaggaagactatgctgatgcgcactgtgaccttgggtcggccctgcatgcagtaggggaggatgaccgtgctatccaggagtttcagacagcaattgatctcaaacctggccatgttgatgccttgtataatcttggtggattgaacatggatgttggccgcttcgtacgggctgcagagatgtatactcgtgtgctgagcatccaaccaaaccattggcgtgcacagctaaacaaggcggtggctttgcttgggcagggtgaatctgaggaggctaagaaggcactcaaggaggcgtttaagatgacacagagggtgaaagtgtatgatgctatctcacatttgaagacattgcaaaagaaaaagccaaagccttccaaaggaaaaaatgatggtcaaggggagcagacttatgttattgtggaggcatccaagttcaagagggttggcaggaagactaccttgcggcaggatttggccaatgctctagatataagggccttcgagaggatgacgaagctaggccactgcgatgtggagcttcttagaaaagagatgaatgagactgatgtccccgtatcttactcaggcactggcatccctgagaagtcaatacgcaaagcagctcttgaggttattctccgcaggctcctctcttttctcaagccagacacctttcagggtgccatcaaggcaatcaacgaaagaattctctctgtccttatgctcctggttctggtcgtgttgatctgggtatgttcttcgccatcattgctccaatctgttcaggccctgtggataggcgcaagcgtatcgtctttgatgcacttctttggcgtcatacacggaattcttacagtgcgtttggatgttggaatttagactcggaattcagaattggaattgac

SEQ ID NO: 113406 - DNA, 610 bp, Zea Mays
gacgtagcttatcgtagctattctcgtgtccctctcccagactcccaccaccacacaaactgccctcgcggcctcgcccgtcgcccctctcgatcacttctctcccgacactctctcactcccgtgtcgtgtctagcgccgacggcgttgctaccggagccggccagcggccacgatgcctacaatgcacgcgcttcgcctatgcccgctgctctccaccatccgatccacaccaccgcgggccactgccgcagcccgccagggcgcgctcttcgtcgcccgctgctcctccgccgggacgccgtcagccgcccaggcgctcaagttcaatcccgaccaagccagttgaggggcagaagactgggactagtggcctgaggaaaaaggtgaaagtattccagcaggagaactaccttgctaattggattcaggctctattcaattccttgccccctgaagattatgtgggtgcaacccttgtacttgggggtgatggccggtactttaacaaggaggctgctcaggtacagattaaactgtagaatgagcacatatttatttgacccatgtttgtttgtacatatttgtgagtacctgtactgctggaact

SEQ ID NO: 113407 - DNA, 2264 bp, Zea Mays
gacgtagcttatcgtagctattctcgtgtccctctcccagactcccaccaccacacaaactgccctcgcggcctcgcccgtcgcccctctcgatcacttctctcccgacactctctcactcccgtgtcgtgtctagcgccgacggcgttgctaccggagccggccagcggccacgatgcctacaatgcacgcgcttcgcctatgcccgctgctctccaccatccgatccacaccaccgcgggccactgccgcagcccgccagggcgcgctcttcgtcgcccgctgctcctccgccgggacgccgtcagccgcccaggcgctcaagatcagttcaatcccgaccaagccagttgaggggcagaagactgggactagtggcctgaggaaaaaggtgaaagtattccagcaggagaactaccttgctaattggattcaggctctattcaattccttgccccctgaagattatgtgggtgcaacccttgtacttgggggtgatggccggtactttaacaaggaggctgctcagatcatcattaagattgcagctggaaatggagttcagaagatcatagttggcaggaatggtctactgtcaacacctgctgtatctgctgtaattcgtaaaagaaaagccaatggcggctttatcatgagtgcaagccataatccaggtggaccagacaatgactggggtattaagtttaactacagcagtggacagccagcaccggagacgattactgatcaaatttatggaaacacactatcaatttctgaaataaaaacagcagacattcctgatactgatttgtcctctgttggagttgtaagctatggtgatttcgccatagaagtgatagatcctgtttcagattaccttgaactaatggagaatgtgtttgacttccaacttatcaaggatttgctttctcggcctgatttcaggttcatatttgatgcaatgcatgcaattactggtgcgtatgccggacccatttttgttgagaaacttggagctgatccggactgcatattaaatggggtgcctcttgaagattttggaaatggccatccagatccaaatctaacttacgctaaggagcttgtttttactatgtttggaacccatgcccctgactttggtgcagcaagtgatggtgatggtgatcggaacatgattcttgggaaaaggttctttattaccccatcagactctgttgcaataattgcagccaatgcacagacagcaattccttatttccagtttggtacaaaaggactcgcgagatcaatgccaaccagtggtgctcttgatcgtgttgccgagaaattgaatgttccattctttgaggttccaacaggctggaaattttttggcaacctaatggatgcaggaaaattgtctatttgtggagaggaaagttttgggactggatctgatcacatcagagagaaggatggcatctgggctgttctggcttggctttccatacttgcacaccggaacaaggataagaaggtcggagagagattagtgtcagttgaagatattgctatggagcactggaaaacctatggcaggaatttcttttctagatacgattatgaggcgtgtgaatcacacagtgcaaaccagatgatggatcaccttagagatgttatggcaaatagcaagcctggagagaaatacggaaattacaccctccaatttgctgatgatttcagctatactgatcctgtagacggtagtacggtatcaaaacaaggacttcgatttgttttcactgatggatctaggattatcttccggctttcgggaaccggatctgctggagctactatccgcctctacatagaacaatttgaatctgatatctcgaagcatagtctcgatgctcaaacagctttgaagcctttaatagacctggctttgtctgtttcgaagctcaaggacttcacaggaagagagaaacctactgtcataacataggccctgtttgtttcggcttttggcagcttctggccaccaaaagctactgcgtactgtcaaacgctcagcttttcagccagcttctataaaattcgttgggggcaaaaaccatctaaaatcaaagaattgaactgatggaaaatatgtatcattaggacaaattccgccagaataagttgttcctcggaagtgttttgagcacctccagcatcttccaaatatatctccaataagatattagtgggataacatatggcagatgttatcaaat

SEQ ID NO: 113408 - DNA, 2116 bp, Zea Mays
cctcgcccgtcgcccctctcgatcacttctctcccgacactctctcactcccgtgtcgtgtctagcgccgacggcgttgctaccggagccggccagcggccacgatgcctacaatgcacgcgcttcgcctatgcccgctgctctccaccatccgatccacaccaccgcgggccactgccgcagcccgccagggcgcgctcttcgtcgcccgctgctcctccgccgggacgccgtcagccgcccaggcgctcaagatcagttcaatcccgaccaagccagttgaggggcagaagactgggactagtggcctgaggaaaaaggtgaaagtattccagcaggagaactaccttgctaattggattcaggctctattcaattccttgccccctgaagattatgtgggtgcaacccttgtacttgggggtgatggccggtactttaacaaggaggctgctcagatcatcattaagattgcagctggaaatggagttcagaagatcatagttggcaggaatggtctactgtcaacacctgctgtatctgctgtaattcgtaaaagaaaagccaatggcggctttatcatgagtgcaagccataatccaggtggaccagacaatgactggggtattaagtttaactacagcagtggacagccagcaccggagacgattactgatcaaatttatggaaacacactatcaatttctgaaataaaaacagcagacattcctgatactgatttgtcctctgttggagttgtaagctatggtgatttcgccatagaagtgatagatcctgtttcagattaccttgaactaatggagaatgtgtttgacttccaacttatcaaggatttgctttctcggcctgatttcaggttcatatttgatgcaatgcatgcaattactggtgcgtatgccggacccatttttgttgagaaacttggagctgatccggactgcatattaaatggggtgcctcttgaagattttggaaatggccatccagatccaaatctaacttacgctaaggagcttgtttttactatgtttggaacccatgcccctgactttggtgcagcaagtgatggtgatggtgatcggaacatgattcttgggaaaaggttctttattaccccatcagactctgttgcaataattgcagccaatgcacagacagcaattccttatttccagtttggtacaaaaggactcgcgagatcaatgccaaccagtggtgctcttgatcgtgttgccgagaaattgaatgttccattctttgaggttccaacaggctggaaattttttggcaacctaatggatgcaggaaaattgtctatttgtggagaggaaagttttgggactggatctgatcacatcagagagaaggatggcatctgggctgttctggcttggctttccatacttgcacaccggaacaaggataagaaggtcggagagagattagtgtcagttgaagatattgctatggagcactggaaaacctatggcaggaatttcttttctagatacgattatgaggcgtgtgaatcacacagtgcaaaccagatgatggatcaccttagagatgttatggcaaatagcaagcctggagagaaatacggaaattacaccctccaatttgctgatgatttcagctatactgatcctgtagacggtagtacggtatcaaaacaaggacttcgatttgttttcactgatggatctaggattatcttccggctttcgggaaccggatctgctggagctactatccgcctctacatagaacaatttgaatctgatatctcgaagcatagtctcgatgctcaaacagctttgaagcctttaatagacctggctttgtctgtttcgaagctcaaggacttcacaggaagagagaaacctactgtcataacataggccctgtttgtttcggcttttggcagcttctggccaccaaaagctactgcgtactgtcaaacgctcagcttttcagccagcttctataaaattcgttgggggcaaaaaccatctaaaatcaaataaacacataatcggttgagtcgttgtaatagtaggaattcatcactttctagatcctgagccttatgaac

SEQ ID NO: 113409 - DNA, 2231 bp, Zea Mays
cctcgcccgtcgcccctctcgatcacttctctcccgacactctctcactcccgtgtcgtgtctagcgccgacggcgttgctaccggagccggccagcggccacgatgcctacaatgcacgcgcttcgcctatgcccgctgctctccaccatccgatccacaccaccgcgggccactgccgcagcccgccagggcgcgctcttcgtcgcccgctgctcctccgccgggacgccgtcagccgcccaggcgctcaagatcagttcaatcccgaccaagccagttgaggggcagaagactgggactagtggcctgaggaaaaaggtgaaagtattccagcaggagaactaccttgctaattggattcaggctctattcaattccttgccccctgaagattatgtgggtgcaacccttgtacttgggggtgatggccggtactttaacaaggaggctgctcagatcatcattaagattgcagctggaaatggagttcagaagatcatagttggcaggaatggtctactgtcaacacctgctgtatctgctgtaattcgtaaaagaaaagccaatggcggctttatcatgagtgcaagccataatccaggtggaccagacaatgactggggtattaagtttaactacagcagtggacagccagcaccggagacgattactgatcaaatttatggaaacacactatcaatttctgaaataaaaacagcagacattcctgatactgatttgtcctctgttggagttgtaagctatggtgatttcgccatagaagtgatagatcctgtttcagattaccttgaactaatggagaatgtgtttgacttccaacttatcaaggatttgctttctcggcctgatttcaggttcatatttgatgcaatgcatgcaattactggtgcgtatgccggacccatttttgttgagaaacttggagctgatccggactgcatattaaatggggtgcctcttgaagattttggaaatggccatccagatccaaatctaacttacgctaaggagcttgtttttactatgtttggaacccatgcccctgactttggtgcagcaagtgatggtgatggtgatcggaacatgattcttgggaaaaggttctttattaccccatcagactctgttgcaataattgcagccaatgcacagacagcaattccttatttccagtttggtacaaaaggactcgcgagatcaatgccaaccagtggtgctcttgatcgtgttgccgagaaattgaatgttccattctttgaggttccaacaggctggaaattttttggcaacctaatggatgcaggaaaattgtctatttgtggagaggaaagttttgggactggatctgatcacatcagagagaaggatggcatctgggctgttctggcttggctttccatacttgcacaccggaacaaggataagaaggtcggagagagattagtgtcagttgaagatattgctatggagcactggaaaacctatggcaggaatttcttttctagatacgattatgaggcgtgtgaatcacacagtgcaaaccagatgatggatcaccttagagatgttatggcaaatagcaagcctggagagaaatacggaaattacaccctccaatttgctgatgatttcagctatactgatcctgtagacggtagtacggtatcaaaacaaggacttcgatttgttttcactgatggatctaggattatcttccggctttcgggaaccggatctgctggagctactatccgcctctacatagaacaatttgaatctgatatctcgaagcatagtctcgatgctcaaacagctttgaagcctttaatagacctggctttgtctgtttcgaagctcaaggacttcacaggaagagagaaacctactgtcataacataatatttagatgttgttgtcctcggccataccaactgagcagcatgggccaagaattgaactgatggaaaatatgtatcattaggacaaattccgccagaataagttgttcctcggaagtgttttgagcacctccagcatcttccaaatatatctccaataagatattagtgggataacatatggcagatgttatcaaataatgtaaatatagatcgaacacgagacatgttttacgtggagaactcttgtatgaaaaaaaaatcatggatgctaactcgtgattttcattgtattcactatactagtaaa

SEQ ID NO: 113410 - DNA, 1431 bp, Zea Mays
gatcatggctgattggtcgtcctcgtccccggcttgttgttgagcagaccactcgtgactcgtggcctcgtggggttgcagaaaccagccctttctgtcctgtcagctactacccactggccactgcactagccgtctgcggagccgagtgttcctttctagccttcacttctcagcacggcagccttcgacccccgactgcagccgccagccgcgccatggagcaagccgccatgccgcaggttccccgcgtcaagctcggcatccaggggcttgaggtgtcgaagctggggttcgggtgcatggggctcacgggcacctacaacgcgccgctcggcgacgaggccgtggccgccgtcgtcgcgcacgccttccgccgcgggatcaccttcttcgacacctccgatgcctacgggccccgcaccaacgagaccctcctggggaaggcgctcaagcagctgccgagggagcaggtgcaggtggccaccaagttcgggataggtcagggcgccgctggcatgaccgtgtgcggcacgcccgagtacgtacgcgcctgctgcgaggccagcctgcgccgcctcgacgccggctacatcgacctctactaccagcaccgcgtcgacaccaccgtccccatcgaggatacgattggtgagctcaagaagttggtggaggaggggaaggtcaagtacatcggcttgtcagaggccagcccagacacaatccgccgtgcgcacgccgtgcatcccatcaccgccgtgcagatggagtggtcgctctggtcccgagacatcgagcccgagatcgtgccactctgcagagaattggggattggaattgtggcttacagtccaattggccgtggattttttggtggaagaggagtgatacagcaagtttcttctgaatctagtctgcaaaggcatccaagatttacaacagaaagcttggagaagaacaagcagatttacctgaaaatagaagatttggcgaagaagtaccagtgcagcccagctcagctagctctagcctgggttctgcgtcaaggggatgatgtggttcctataccagggacaacaaaaacgaagaacctagatgccaacgttgactccttgaaggtgaagctcacagctgaggacctgaaggaaattggcagccagatacgtgcagaagatgtggctggtggaagacaatacaattcctatgcacatacctcctggaagtacgcagatacaccaaaaaagtgaagttctggtcctggaaaccttgtagcaatcacaggcgtatgcaaatgttgaactatttccctgcatttgagccggaatcgtacgatgatgcatcttgtgaacatgcggcactaataaatcgagacgaagaataatgtgttttccatcagtgattatgagcagatgatgatttttatccgtgctt

SEQ ID NO: 113411 - DNA, 1272 bp, Zea Mays
ctctctctctctctctctctctctctctctctctctgtgcctccgtcgattacctcgaactgactcggctcggttcgatttcgaccgaccgccgggcgccggccgatgcacggatgcaggtgtcgaagctggggttcgggtgcatggggctcacgggcacctacaacgcgccgctcggcgacgaggccgtggccgccgtcgtcgcgcacgccttccgccgcgggatcaccttcttcgacacctccgatgcctacgggccccgcaccaacgagaccctcctggggaaggcgctcaagcagctgccgagggagcaggtgcaggtggccaccaagttcgggataggtcagggcgccgctggcatgaccgtgtgcggcacgcccgagtacgtacgcgcctgctgcgaggccagcctgcgccgcctcgacgccggctacatcgacctctactaccagcaccgcgtcgacaccaccgtccccatcgaggatacgattggtgagctcaagaagttggtggaggaggggaaggtcaagtacatcggcttgtcagaggccagcccagacacaatccgccgtgcgcacgccgtgcatcccatcaccgccgtgcagatggagtggtcgctctggtcccgagacatcgagcccgagatcgtgccactctgcagagaattggggattggaattgtggcttacagtccaattggccgtggattttttggtggaagaggagtgatacagcaagtttcttctgaatctagtctgcaaaggcatccaagatttacaacagaaagcttggagaagaacaagcagatttacctgaaaatagaagatttggcgaagaagtaccagtgcagcccagctcagctagctctagcctgggttctgcgtcaaggggatgatgtggttcctataccagggacaacaaaaacgaagaacctagatgccaacgttgactccttgaaggtgaagctcacagctgaggacctgaaggaaattggcagccagatacgtgcagaagatgtggctggtggaagacaatacaattcctatgcacatacctcctggaagtacgcagatacaccaaaaaagtgaagttctggtcctggaaaccttgtagcaatcacaggcgtatgcaaatgttgaactatttccctgcatttgagccggaatcgtacgatgatgcatcttgtgaacatgcggcactaataaatcgagacgaagaataatgtgttttccatcagtgattatgagcagatgatgatttttatccgtgctt

SEQ ID NO: 113412 - DNA, 413 bp, Zea Mays
atagtcaaatcgtcctgcatttggttgctgagatgtgttcgttaatttctcagggacaacaaaaacgaagaacctagatgccaacgttgactccttgaaggtgaagctcacagctgaggacctgaaggaaattggcagccagatacgtgcagaagatgtggctggtggaagacaatacaattcctatgcacatacctcctggaagtacgcagatacaccaaaaaagtgaagttctggtcctggaaaccttgtagcaatcacaggcgtatgcaaatgttgaactatttccctgcatttgagccggaatcgtacgatgatgcatcttgtgaacatgcggcactaataaatcgagacgaagaataatgtgttttccatcagtgattatgagcagatgatgatttttatccgtgctt

SEQ ID NO: 113413 - DNA, 498 bp, Zea Mays
atatacgtgataggctaggggtggcaccaattgaataaaagtttgtccaacatcggttgagatggtttggatatgtccaacgaaaacctccagaaacaccagtacatagtaggattctaaggcacgatagcaatggaaagataggtaggagaaggccaaagtttatatgggaggagacagtaaaatgagacttgaaaaaatgaaatataccaaagatttaaccttgaataggagtgcatggaaaacggctatctatgtatctaaaccttgacttgtggtttatgttgaatttcaactctagcctaccacaacttgcttgttgttaaattgaacaccatccagactcaactggagcacaaaacttcagcatgccttgatccgaaactagcttggtgccttagtttcatgcccgagtatggctcagtcaatttcaatgtgctccaggaagttactcagatattgcaaagggtgactatgcttgcatattgcatttttaca

SEQ ID NO: 113414 - DNA, 324 bp, Zea Mays
agagagagagagagagagagatacagtgagagatataaacatatatctacatccccctcactcttgtttttctgtttttttacacactcacgcgcgcgcgctcgcgcacgcgcgcgcgcgcgcgcgcgcgcgctcgcgcgcgctcgcgcgcgcgcgcgcgctctagctcgatatagatatatatatatatatatgtatatatatatatatatatatatatatatatatatatatatatatatatatatatatatatatatatatatatatatatatatatatatatatatatatatatatatatatatatatatatatatatat

SEQ ID NO: 113415 - DNA, 1467 bp, Zea Mays
aagctgtaaacttgagctggaagcactgcgcccctgtcttcacaccagtttgctgtttctttttcaccccgagcgcgagaactagggcgaccgcagcactacgcccctgctgcccatgtcttcgtcggggcctttgccggcgaccggaacccaccacggcagtcaaagggcagagtgtaaatcccagggttccacttctgcacgcaaggtacaaaaggctgatcgtgagaagatgcgaagagataaattaaacgagcagttccaggacttgggaaatgcacttgatccagaccgtcccaggaacgataaggcaactatacttggtgacacaatccagatgctgaaagatttgactactcaggtgaacaagctgaaagctgaatacacgtcactttctgaagaagcgtgtgagttaacacaagaaaagaatgagcttagagatgagaaagcttcactgaaatctgaggttgataatttgaataatcagtatcagcaacgaatgcgggtgctatacccatgggttggaatggagccttctgttgtcatggggccacctcctgcatatccctacccagtcccagttccaataccctctggtgctgtacccatgcatccgcagttgcaaacataccacttcttccacagtcaagcttctggaaccatccaaaacacatgcatcccttacatggcatatacacaaccctgccatcctcccactgatcagccgtctaaccaacttaatactccagttgcccattcaagtagtcataggtctaactctccagctcaagactgtagaagcaagtcatctacattgcagcaaccaagctgtggagtgagaagcagtgatgctggtgatattgctactgatctggaattgaagactcctggttcttcatgtcaatcacatgcagagattgcttacaacgattcctcttcggatttgaaaacaaagaagcattgcataaagcagattaatgattgcactctcactgaaagcagtagttcaagcagatgctcttccaatggtcccccagatgtttctaatagtgctattgatgaataagctgcttgacgaccgattaacatacaaaccgttgactggtatagattgagaaaagatctcgtttaaccacccataagtgagctcccaactctatatgcagtgtaatttgctattgttgctagcttatttacatagaagtggtcagattctaatgtgatgactcacaaattgggaggcgtggactttgtagataatctcatgattgttagtggtaaaagtttggtggaagggaaaaaaggagagaacaaaatcatagacagcagcatctatggtggttcggtagggactccaggactaggtatggtgagcattgtcagtgttcggcatggcaggtagatattcataataactggattctagtaccattgcatagttcgtcctagactggcattttacataaa

SEQ ID NO: 113416 - DNA, 1483 bp, Zea Mays
aacttgagctggaagcactgcgcccctgtcttcacaccagtttgctgtttctttttcaccccgagcgcgagaactagggcgaccgcagcactacgcccctgctgcccatgtcttcgtcggggcctttgccggcgaccggaacccaccacggcaggtacaaaaggctgatcgtgagaagatgcgaagagataaattaaacgagcagttccaggacttgggaaatgcacttgatccagaccgtcccaggaacgataaggcaactatacttggtgacacaatccagatgctgaaagatttgactactcaggtgaacaagctgaaagctgaatacacgtcactttctgaagaagcgtgtgagttaacacaagaaaagaatgagcttagagatgagaaagcttcactgaaatctgaggttgataatttgaataatcagtatcagcaacgaatgcgggtgctatacccatgggttggaatggagccttctgttgtcatggggccacctcctgcatatccctacccagtcccagttccaataccctctggtgctgtacccatgcatccgcagttgcaaacataccacttcttccacagtcaagcttctggaaccatccaaaacacatgcatcccttacatggcatatacacaaccctgccatcctcccactgatcagccgtctaaccaacttaatactccagttgcccattcaagtagtcataggtctaactctccagctcaagactgtagaagcaagtcatctacattgcagcaaccaagctgtggagtgagaagcagtgatgctggtgatattgctactgatctggaattgaagactcctggttcttcatgtcaatcacatgcagagattgcttacaacgattcctcttcggatttgaaaacaaagaagcattgcataaagcagattaatgattgcactctcactgaaagcagtagttcaagcagatgctcttccaatggtcccccagatgtttctaatagtgctattgatgaataagctgcttgacgaccgattaacatacaaaccgttgactggtatagattgagaaaagatctcgtttaaccacccataagtgagctcccaactctatatgcagtgtaatttgctattgttgctagcttatttacatagaagtggtcagattctaatgtgatgactcacaaattgggaggcgtggactttgtagataatctcatgattgttagtggtaaaagtttggtggaagggaaaaaaggagagaacaaaatcatagacagcagcatctatggtggttcggtagggactccaggactaggtatggtgagcattgtcagtgttcggcatggcaggtagatattcataataactggattctagtaccattgcatagttcgtcctagactggcattttacataaatttctgtgtcaaatatgtaaataactcgagggcggataactggatatatagtgtctatgttggcctattc

SEQ ID NO: 113417 - DNA, 997 bp, Zea Mays
aacgctattttatttcgtgttgacctaacaatcaggccccacaccttttaacaagttccagccgtggcgccgagccctactcctcccgccgccgccgcagattcttcctcgcgactcgccgctcgcccgactttccgagctccgacacaaaggagcaccatgggagagccgagcaaggagctcctggacctgccctccgaccccaggcctcccgcctccttcatcgagtcgcttctcgctggcagggagcagcagcagcaggataaggagggaaagcgtaagttgggggcgtccactgatcccctacccaaaagccaagttatcgggaaagtgaaggatttcttgggggagattgcaagggccaaccaaaagttgcagcttgatgcacagaacaagcctcctgtggagtacgatattgaagcccttactgggaacgaggagcaatacattgagatggatctgcttctaggtgtcgctgatcttcattcagagcaggctgtggaggcagctgaagcgacaataaacggccgccagacttcagaaatgtcatttgcttgcagctcatctgactcggaagatgatagtgatgacagcgatgaagatgctgatgacaaacctgtcatgtctgacaaagataataagtgtaaaagtcctgatgacgcggagatgggtccagcgaaaggaaagaagcccaataaaagacagaaaattgttgttctcaactagtacccttgtcttttgtacacctaagaacaagggctggagcctagttcagaaggcagagcgcaagtggtgaatgtgttggcctggtattatcagaagttatttactccttccattcttttttatttgtcacggtttagtttaaaaatgaactaacgggcaacaaatattcgagaactgagtaagtattattttcagtgttgtgcaatgttcaggccagctagggcaacttgcacaggggctaaaagaagtaatgcatgttccagtttataca

SEQ ID NO: 113418 - DNA, 3465 bp, Zea Mays
cgcctcccgctacacacccacacccaccacggcccaccttccgccttgcgactccaaaaccctccctccttccccttccttgccccgccctagggttcgcgccgccgcgctgaccctgtcgtagccatggggtcctcgctcccgcccaaggaagccaacctcttcaaagtcatcgtcaaatcctacgagactaagcaatataagaaagggcttaaggctgcagattccatattaaaaaagtttccagagcatggtgaaacactatcaatgaaaggtttgacgctaaactgcatggaccgaaaatctgaagcgtacgagcttgttcgacgaggcctgaagaatgatctgaagagtcatgtctgttggcatgtttatggtttgctttatcggtcagatagagaatacagagaagctataaaatgttacagaaatgcattgaggattgatccagataacatagaaattcttcgtgacttgtcccttctccaggcacagatgagggacttgtctggctttgttgagactaggcaacaacttttgtcgttaaagccaaatcaccgcatgaactggattggttttgcggttgctcatcatttgaattctaattcttccaaggcagtagaagtattggaggcatacgagggaacactggaagatgattatcctccagagaatgagcgatatgaacacaatgaaatgctgctgtataagatatcattgtttgaagaatgtgggatgctagacagagcccttgaggaaatgcagaagaaggagagcaaaattgttgacaagctatcattcaaagaacaaatggcatccgtcttgttcaaacttggccgctttgatgaatctgagagcatatacagatccctgctttttatgaatcctgataactacaaatacttcattgctgtgcaaaagtgccttggcttatactctgataatggtcaatattctgctgctgatgttgagcgcttaagtgcattgtacaactcacttaaagagaagtatgcttggtcatctgctgtgaagcgtatccctcttgattttctggaaggtgagaagttccaggaggcagcagacaactatgtcagacctctattaacaaagggtgtgccctcactattttccgatttaagcccactgtatgaacatcctggcaaggcaaacatactggagcagttatttcttaaactagaagattcaattagggattctggatgctttcctggatgtccacagaaggagcctccttccacactgttgtggaccctgtttttgatttctcagcactacgacagaagagggcaatatgacattgctttgaataaaatcgatgaggctatctcacatacaccgactgtcatcgatctatattcagtaaagggaaagatattgcaacatgctggaaatttcacagcagcagccgcattagcagatgaagctaggtccatggatcttgctgatcgttatttaaacagcgagtgtgttatgcagatgcttcaggctgaccaggttggccttgccgagaagactgctgtcttgtttacaaaagatggtgatcaacacaataatcttcatgacatgcagtgcatgtggtatgagcttgcttctggggagagctattaccgtcaaggtgatcttggccgggccctaaaaaatttcttggcagttgaaaagcattacgctgatatgactgaagatcaatttgacttccattcatattgcttgcggaaaatgacacttcgagcatatgtttctatgctgaagtttcaggatcgtttgcatgctcatgaatacttccacaaggctgctgctggagctatcaggtgctatatgaaactacatgattctccaacaaaatcttctaaggaagagaatgatgagatatcaaaactgccacctgctcagaggaagaagttgaggcaaaagcagaagaaagcagaagcgcgtgctaaaagggaggctgaagagaaacaagaggatgaaacagcttcatctaacagttcaaaatctggcaagaaacaacatgcaagaccagttgatctggatccacatggtgaaaaattaatccagattgaagacccgcttgcagaagccacaaaatacttgaagcttctgcagaataactcgtcagactcattagagacccatatactttcatttgagctaagcatgagaaagcaaaaggttttacttgctttccaggcagttaaacagctcattaaattggatgaagataatccagacagtcaccgttgtttgataaagttcttccacaagataaacagtcttcctggacctgtgactgattctgagaagctaatttggaatgttctggaagctgaacgacctgacatgaggcaattacatggaaagtccctcgttgaagtaaacagaagtttccttgaaaaacacaatgcttccttgatgcaccgagcagctggtgctgaaatgatgtatctcttagagccaaataagaagatggaggcaattaatttaattgaagattcaacaaatattacatcatcagggcatagtttgcttggtcctgtaaaaacatggcaaattcaagattgtattgatgttcataaattgctggagacagtctttggtgatcagaatgttgcaaataggtggaaggcacggtgcgcggaatattttccgtactcgacgtactttgaaggcatcaagagcgctatttcaacctatgccattgaccatagtctcgagagcccaccagaaaatggaattgcttcaaaccctcatctgaaatcaaaagatggagaacaagggagtttgaatgggactctgcatattgtagatgatttgagcagcctaagcattcggtaatgcacgaacaagttgctgaatggtcacaactggaacacaacattttagaactggagccagtacccaattaaccaaagcgtacacgaacaaggggaacaaagtgctctggtgcaagtagttgtcggcacatcacatatgaagagtatattattgattgggagctgaggtgtccagtcaggttattgtcttggttccagcctgtacctttttgttgccattttgtagacagggaaagaaaaaaaatcttccgtctcaattacggtgaagttgtgacagcgtttgttgcctagcgatatcagggtgtgaccattcgtttgaaacagtgctccctctctttttggactacaaaattttggcacaaagcaggtgtacaaggttaaaccttttaaaactttcatctatttgtttcgggatagtttggtgtgtgggggggtttgtcttgatcctttgtgctactgcaacatttggtcctcgacattgtaaattagttaatcttaaacatagaaactgtattccagttgtcatgacaaataatgatcaatgttaaccctgggtgtttgatctattccatttgggatgcgttgaaaagcatgcattgtcggatttgaagat

SEQ ID NO: 113419 - DNA, 186 bp, Zea Mays
atggcccgcatctccgccgtcgttgccgccgtgatcaccgccgccgttgtcgttgacgcgctgttcacagccgcctccgccaccgaggcaccggcccccgccccgatgtccggcgcgggcgccctctcagcgcagctctccgtcggctgcctcgcggcgctcctcgccgctttcctccgccactga

SEQ ID NO: 113420 - DNA, 582 bp, Zea Mays
catcagatatctctctatgcagacgatgtgattaagttcctcaggccagcacgtaatgacattctgctcatatctcaaatgatgaaattttttgggcatgcatcaggtctccacaccaatctgtctaaaagttcaatttgtcctatcaattgttcttctgatgatctgttgttgctttctgagttattggaatgtgaaatcaaggattttccttgtaaatatcttgggatatctctcactctcaggaagccaactagatctgacctgctacctttgattgataagatagcagccaatctcccaaaatggaaggcctctttgttaaatcgtgccggacgactggtggtggtgtgtcctgtccttacagccattcctatgcatcttatggtggctttggacattcctaagcggggaataagagttattgataagcttcagcgtggtttcttgtggaccggtcgtcagaatgctaatgggggtaattgtcttgtctcttgggagaaggtacatcggccgctgcggtatggagggcttgggatcctcaacctccaatttatgggctgggcattacgtactcgctgg

SEQ ID NO: 113421 - DNA, 775 bp, Zea Mays
tgcaagcatcctggaaacacgcacgcaccagccgcacaggaaacgaaggcgacggcccgcggcgtgcttcctcggaggttgcagctgctctttatcttttattctccatgatgcacacctctgcttccttccctcattttgcctcttgttactctccttctcgtgctctggtttcttgatttaaaacctagttttgggggattttgcaatgccaagacaaggcagtggggatttgagcagggatggatgtcgacgaagttcctgaaaggatctatccgaagaatgcttgtagagttgaggtcaatgtcaatgcatacttcagctttaaagatggaaaaaagaaaggtgtacgatcgaggtaggattgtgagctgggttgttgattcagaagagtatgccatcattgatctggaaaaggatatcactccatactttacatggaacgacaatcataaggcaaatttctgggttctaactggttctgatttgacatgctttttaacttcagatagtcagcttattgacttactaagggcatctcaactagtgaagttcctaatgatagtgagcaggtgtgaggggaatgagatgcctgttgcagtgaacatgatgtcgaggacatacctagtgcaacgaatgttgttgaggatatgcaaattggggaatttaaatgggcagaagtagcagaatatggagaaacaactgcaggtccactgatggttgaagaggacgaaaaggaacacttcatgactgttggatgtgattgaaagaaaaa

SEQ ID NO: 113422 - DNA, 926 bp, Zea Mays
atatttacccttcgcgtcgcagcgccggatcgcccaatcagagcgcgcgttgcacgtcatccgggtaccaggccagacgccggccagacgcaaagccggaagccagcgtatatacatgtgaataacgcgggtcaggcggaccgtacggcgtacacggatctcgctcggccatcgggactgtacaaggacgagagggagaagagaacagcggattcatcaccgccaggcgtcaggtcaggtgcgtgcgcatacatccatctgccacccttcacccgctcttcttctgccggcggttccctccacccgctcttctgccggtggttgcgagagtgtgttaagacaagatggtggcgaatggcgacgcacctgctagagggagtgcggcggcagctgcaagcctgcgcaggcgtaggaccacaagcggtgctgctgctggcggaggtggtgccagctcgatgctccagttttacaccgatgaggctgcgggccgcaaaatgtcaccaaacaccgttctgatcatgagcattgggttcatcgctgttgtcgctatgctccatgtttttgggaagctgtaccgcacctccaactaggttggtactaccataaccaagaaaacagaggccaccaagagaggagccttatagagccatttcaatggatagcaagtgactatcagagaggaaccttgtagagtgatttcaatggatagcaagtgactatcggattgtgaactgttatagaagtttatctacacaacttgcaatgctcagggctatgataaatccctgcgagtcttgtttatgcttcatattttttttttgcatgtgcttgcatatgcatctttctatttctgttgtcctgatcttgccgttcaatccttgttgcttacctttggcaatctgcctaatgggcaaacactatttctc

SEQ ID NO: 113423 - DNA, 836 bp, Zea Mays
atatttacccttcgcgtcgcagcgccggatcgcccaatcagagcgcgcgttgcacgtcatccgggtaccaggccagacgccggccagacgcaaagccggaagccagcgtatatacatgtgaataacgcgggtcaggcggaccgtacggcgtacacggatctcgctcggccatcgggactgtacaaggacgagagggagaagagaacagcggattcatcaccgccaggcgtcaggtcagagtgtgttaagacaagatggtggcgaatggcgacgcacctgctagagggagtgcggcggcagctgcaagcctgcgcaggcgtaggaccacaagcggtgctgctgctggcggaggtggtgccagctcgatgctccagttttacaccgatgaggctgcgggccgcaaaatgtcaccaaacaccgttctgatcatgagcattgggttcatcgctgttgtcgctatgctccatgtttttgggaagctgtaccgcacctccaactaggttggtactaccataaccaagaaaacagaggccaccaagagaggagccttatagagccatttcaatggatagcaagtgactatcagagaggaaccttgtagagtgatttcaatggatagcaagtgactatcggattgtgaactgttatagaagtttatctacacaacttgcaatgctcagggctatgataaatccctgcgagtcttgtttatgcttcatattttttttttgcatgtgcttgcatatgcatctttctatttctgttgtcctgatcttgccgttcaatccttgttgcttacctttggcaatctgcctaatgggcaaacactatttctc

SEQ ID NO: 113424 - DNA, 831 bp, Zea Mays
atatttacccttcgcgtcgcagcgccggatcgcccaatcagagcgcgcgttgcacgtcatccgggtaccaggccagacgccggccagacgcaaagccggaagccagcgtatatacatgtgaataacgcgggtcaggcggaccgtacggcgtacacggatctcgctcggccatcgggactgtacaaggacgagagggagaagagaacagcggattcatcaccgccaggcgtcagagtgtgttaagacaagatggtggcgaatggcgacgcacctgctagagggagtgcggcggcagctgcaagcctgcgcaggcgtaggaccacaagcggtgctgctgctggcggaggtggtgccagctcgatgctccagttttacaccgatgaggctgcgggccgcaaaatgtcaccaaacaccgttctgatcatgagcattgggttcatcgctgttgtcgctatgctccatgtttttgggaagctgtaccgcacctccaactaggttggtactaccataaccaagaaaacagaggccaccaagagaggagccttatagagccatttcaatggatagcaagtgactatcagagaggaaccttgtagagtgatttcaatggatagcaagtgactatcggattgtgaactgttatagaagtttatctacacaacttgcaatgctcagggctatgataaatccctgcgagtcttgtttatgcttcatattttttttttgcatgtgcttgcatatgcatctttctatttctgttgtcctgatcttgccgttcaatccttgttgcttacctttggcaatctgcctaatgggcaaacactatttctc

SEQ ID NO: 113425 - DNA, 1873 bp, Zea Mays
ccatcattcactctctcttcctcatttcctcaccaccgtctctcctcctcatagcgcttggcctcatcagcgcctctcccctcaagctcggcacggcgactgccagccaccatccccagctcattcttcccctcatccttctcacccatcacgcctaggtccggcgtgtttccatgtgttaccaacgacggtttgtgtgaaggggaaggaaaggtagggaaagagagaaggagcaggtaggatggagagacgacgacttagggtttcttttagggaattcttgttcaaagatagttacaccatgcctgcagcgctacttaagttctcagcttcaccacacacatcacaccttatatcctccattatgagcctgagacacggacattgggcttcctgacgcgacttgagaccctagggtcgttgcggctgcttgctaggcctgctatctgtccatgaacaccaccaacttctgatgtcgcgatgtctccctcctcacatccctgggcagtgtctgtaacaatcccccggcgatgagagcttgcttgcccccaagcaggagcaaatggaaacttctggcgcagtcttcccacgtagccaatgaaggaggcatgccggaccactggatgagcaattgagacaaccctgcagagttcagacgacattgtaaaattttgtcaggtacctgcaacccttccagggactgaggaagttgagcaacaacaacagttggagagatagccttctttagctgggaaacatggaaaatgggatgtattttagatgaagccggtaaatccaatttgtaagcaaccgatcccactctgttgagaacagtgaagggcccaaaataccggaaagcaagtttttggttcgatctgggagcaagggaagactgaatatatggttgtaaacgcaggtagacttgatccccaccgcaaacactctttcaaatctgcttttatcagcctgggccttcatacgcaattgagcacggtgcaggtgttactgaactaaagttgttatgacagccttgtcttgaagccattcatccagagactgattttgagaattaccaacaacattcaacccaaatggttttggtgagtaaccatataatacttcaaagggggagagacccagggcttcgtgcttgctggagttgtagcagaactcggctaggtaaagccaattgatccatttgctagtgcacacgttgacaaagcaacggagaaaggtttccatacactggttaacacgttccgtttgcccgtctgtttgtgggtggtaggaagaactcatgtgaagcttaacatcagctagcttaaacaaagcttgccacaattggatggtgaatatgctgtcacggtcagaaacaatcgctactggcatgccatggagcttgcatatatgctgcataaagtgttgggccacaaccagtgctgaaaaggggtgtttgagggcaataaagtgactgaattttgagaacttgtcgaccactaccattacacagttcttgttgccataagttgggagaccctccacaaaatccattgtaattgtctgccaagccccattgggtacaggtagaggctgcaagagtccaagatacttgatcctccccggcttggactgttgacacacagagcacgaagccacaaattgtttagcaaacttcctcataccgggccatgcaaacaactgtttcagcttgggatacgtggcagggaaacccgagtgcccacctacaacagaactgtgtatggcctccaagatggcttggtgcattgaccagttgttacccacccatatcatgtttttgaatttgataataccatcctaaagagaaaaatgaggaactgatgatccattcacc

SEQ ID NO: 113426 - DNA, 1226 bp, Zea Mays
ccacaagcagcgaagaatcgcccgacccaaaaccttattgccttgctggctgcaatggtcaccagccctctccggctactccccgtgctcttgtcgctctgtataatctccatcatccacctgtgtcctggcgtcgtctccacttcgcccctctccttcgacgtgcagttcataccgtggggctacgacccacaggaagtcggcttccatcagatcatcgccccaagaaacctcagtagcagaatccatgcgagccgtccgtacacggcccaccagaagagtcaagtgctccctcgcaagaagcggaagaagttcgtgcctgacaggtgcgactgctcaaagcagatcgacggggtgatgtacatgcgcccggcgccgctccgggacgaggccaccggcgacgtcgcaagcttcaagatgaccttgtgttacagaatcaaccctcgtcaagcagatgatggtaccgaattcaaccacggtggccgcaacattggtctgttcctgttcctcgtaccttacccctggaattccaatgatgagaggatagaggttgggctccacagcaagtgcatagaggcgaagatgaagcagtacagcagcatcggcggtgacgcagtagtgtgtgcccatgtccactacgacagcgccaaggagctgctgatcaccaacgtcctcgtggacgaccattcctgcacctgcggaaggaaactcaaccggagcagcatgcccagggaggcggccgtcggttttgcctcgatcaacgccggcgacccgattgagctgcgaaacattattacctgggcgttccattccaagctggagtccaaggatcccccgctgatgacgacgcagcctgctcaagtggaaaccccaaccggcggtgaggagagctcctggccgatagacagggggcagcagcgattccgtgtggatccttggactaggaacgctgaattgaatctacagtaccagcggaactggcaacggaattggcagctcacatgtagtctcagcatctctgtaggctatggaaacacaaatggtgacatggattagaattcaagctaccaattctacctgcaggctagggggtatatgaaacctaatgaaaaattgaagtaatatgaaaaagaaaacttagatgcaggtggtttttttacaattttctcggtaatatcgtgatatgaaatggctattattatattacttgtgctattgtatgttta

SEQ ID NO: 113427 - DNA, 556 bp, Zea Mays
cggttacgaggacgagagggagaacagcggattcatcaccgccaggtgtcagagtgtgttaagacaagatggtggcgaatggcgacacacctgctagagggagtatggcggcagctgcaagcctgcgcaggcgtaggaccacaagcgctgctgctgctggcggaggtggtgccagctcgatgctccagttctacaccgatgaggctgcgggccgcaaaatgtcaccaaacaccgttctgatcatgggcattgggttcatagctattgtcgctatgctccatgtttttgggaagctgtaccgcacctccaactaggctggtacttaccataaccaagaaaacagaggccaccaagagaggagccttatagagccatttcaatggatagcaagtgactatcagagaggaaccttgtagagcgatttcaatggatagcaagtgactatcagattgtgaagtgttatagaagtttatctatacaacttgcaatgctaagggctatgataaatctctgcgagtcttgtttatgcttcatattttttgcatgtgcttgcata

SEQ ID NO: 113428 - DNA, 123 bp, Zea Mays
agatggcttggcaagattatactagagacttgtatttctcagatccatatttggcttaggtctagcatgccaaatggacagccaaaatggcttctttgtttcataccaaattatcctatgctt

SEQ ID NO: 113429 - DNA, 809 bp, Zea Mays
cctcgtcgaacccgtcgccacacgtcttcacacctcaggcatggctcaacagtttcaggcattgccaaatagcagtgttctccactgttggcgcgttcggtaaagtactttgctcccctttagtatttcctttcccctccttcctagttctattcgcgttctggaggcctagatctgatatttacccaaagtcgtcgtcgtcgctcatcgctttccttttgccagccagccaccgctgctatcatggaagtgtttcatgtgctgacgatgcccagagtgccctagtcttgtcaaaatctatgatcgcggtgcgatgcgtgctagaaatgtttgtgtggcttctgtggacttgttcagccaaaacagcgcagttgctactgctgcgagagaggatgggatacaatgtgtgacgctcctcacctacctcgccgccgcacagatctacaggacgaataggtctcggcactatcgtgttatggtcctcgataatgctcaccattccacacccgcaggggtctcctgttctgctgctgatggcgtgcgtgacctagatctggcgaaggcgtccgtggatacaggttggttttggccactatcactctgcctgtccactttattcaactggttagatcgtgtttttgtctaggcatcgcattcgttggtatgctcgattagttttgaaagggaaatgtgcccttgggccatttcaataaatattttggtgattagatgcccaacacacattgttttaaagtgatgtgcgccaagtattaaagagatgcaaataaagaataaaggtaagatctaga

SEQ ID NO: 113430 - DNA, 513 bp, Zea Mays
atgcagcgccccgggcacagacgtcgggctctcgccgcgcgggcgcagcactatgagcgcgaatggggcacttcaagcgaaacggagtaccgggcagcaggatcgcagcgccctgaccctccactatttacaccacgagcagagcaacactgggagagccgagccaccaggaggatgaagagaggacgggagggggaggcagaggcaagtgccgcacctgagggggcgtcggtgtcgctggtggcagcggagtcgaggggctcggattggtgtgaggctgaggccatctcgatcccctcacgatcgctcgcaaagggggagggaggcaggaggcgagcgcaccggcgacggagaagaacaaggacaaaaagagacacgaggacgagggatgcgcggccgcgcctagacgttgctgcggcgacggttactgccgtgtcccgcggctgtcggctgggcttgggcctggtcatgcattgcgtgagctacaccggcaggcggcagcccagtctgtga

SEQ ID NO: 113431 - DNA, 304 bp, Zea Mays
tttttgtttctatttttgtctcctaaaaaatgactgtctggtcattcactcattcttcttgtagaattcaagtttctactagctcagtgcccgtgcgttgcaacgggatcatataatagctcgataacttatatatacaaatgtgtgttatattgttatgagatggaggacgacatccacgagccgtccggggtgacgttgaagagaaactcgggcctgtgacgcacgagcactcacctagtagtgtattatacaagatttaacaagacaatttaaaggcaaaaattcaagaatgatctttcat

SEQ ID NO: 113432 - DNA, 3962 bp, Zea Mays
tttttcatccctctgcccctcctactgcccatccaaacactccttgcgccgccatggccacctcgctctacaccccgtcccagctccgcccctcccactcccaggcccgccgcctcggctcgcacccgcgcgtctgctccgcgcgctgccccgcccgccgccgccgcgccgccgccatctccgtgcgcgcttccaccgatggcgacgccgccgtcacggtgcgccgcttcccggccgcgccgaccaaggccgggggcctctcgggcgtaaagaagatcatgatcctcggcgcggggcccatcgtcatcgggcaggcgtgcgagttcgactactccggcacgcaggcgtgcaaggcgctggtggaggagggctacgaggtggtgctcgtcaactccaacccggccaccatcatgaccgacccggggctcgcccaccgcacctacatagggcccatgacgccgacgctcgtcgagcgcatcatcgacgccgagcgccccgacgcgctgctccccaccatgggcggccagaccgcgctcaacctagcggtctcgcttgccgactcgggcgcgctcgaccgcctcggggtgcgccttatcggggcctccctccccgccatccgcgccgccgaggacaggcagctcttcaagcaggccatggaccgcatcggcctccagacgccgccctccggcatcggcaccacgctggaggagtgcctcaccatcgctgaggacatcggggagttcccgctcattgttcgtccggccttcactctcggtggcacgggcggaggcatcgcctacaacagggccgagtttgaggacatatgcagggccggccttaccgcgtcgcacactcagcaggtgctcgtcgagaagtcgctgctcggctggaaggagtacgagctggaagtcatgcgcgacatggctgacaatgtcgtcatcatctgctccatcgagaacattgatcccatgggcgtgcacacgggggactccatcaccgtcgcgcctgcgcagacactcacggacaaggagtaccagaggcttagggactactcggtggccatcatccgtgagattggtgtggagtgtggtggttccaatgtgcaattcgcggtcaatcctgcagatggggaggtgatggtcatcgagatgaatcccagggtgtccaggtcgtccgcacttgcctcaaaggcgacagggtttcccatagccaagatggctgcaaagctgtcagtaggctacactctggaccagattcccaatgatattaccaagaagactcctgctagcttcgagccttccattgattatgtggtcacaaagataccacgctttgcttttgagaaattccctggctctgagccaatattaaccacacagatgaagtctgttggtgaggcgatggcactggggcgtaccttccaggagtccttccagaaagctgtccgctcactggagactggttttgcgggatggggttgtggccctatcaaggaacttgactgggactgggaacagataaaatatagcttgcgggtacctaatccagatcgtatccatgctatctatgcagctttcaagaaaggcatgagggtcgaagatatccacgaaattagcttcattgacaaatggtttcttacagagctcagggaactagtggatgttgagcagttccttttatcaagaagcctagatcaattgtcaaaggatgacttttatcaagtgaagaggaggggattcagtgacaagcagattgcatttgcaacttcctcatcagaaagtgatgtgagatcaagacgtttggcattaggcgtcactccgtcatataaacgtgttgatacttgcgctgctgagtttgaagccaacacgccctacatgtattcttcctatgagtacgaatgtgaatcagctccaaccaataagaagaaggtgctgatattgggtggtgggccaaatcgcataggccagggcattgagtttgattactgctgttgccatgcatcatttgcacttcgagaggctggatacgagactattatgatgaactccaatcctgagacagtctctactgactatgataccagtgatcgtttgtactttgagccactgacagttgaggatgtattaaatgtccttgatttagagcgcccagatggtataattgtgcaatttggagggcagactccattaaagcttgcgctgcctatccaacagtacatagaggagaacaaaatggtttctgcttcaggcactggtaatgtgaagatatggggaacatcaccagattccattgatgctgctgaggacagaaaaagatttaatgcaattcttgaggagcttggaattgaacagccaaagggagggattgcaagaagtgagtctgatgcattggcaattgcctcagaaataggctaccctgttgtggtccgtccgtcatatgttcttggtggacgggcaatggagattgtgtacaacgatgaaaagctgatcaagtaccttgcgactgcagtgcaagtagatccagaaaggcctgttttagtggacaaatatctgattgatgcagttgaaattgatgttgatgcattggctgacacagctgggaatgttgtgattggtggaattatggagcatatcgagcaagctggcatacattcaggcgattcagcatgttctcttcccactagaacagtctcagccaagtgcctagaagtcatccgttcatggaccaccaagctagcaaagtgtctgaatgtgtgcggactaatgaactgtcagtatgctatatccacttctggtgatgtgttcttacttgaggcaaaccctcgtgcatcacgcacagtcccttttgtatccaaggcgatcggccatccgctagccaagtatgcatcactggtgatgtctggtgtgaccctgccagagcttgggttcactgaagaagtgattcctaagcacgtgtctgttaaggaggctgttcttccgttcgagaaatttcaagggtgtgacattctcctcggaccagagatgcgcagcaccggggaggtgatgggcatcgactacgagttctccggtgcctttgcaaaggcgcagattgctgcgggacagaagctccccctaagcggcaccgtgttccttagcctgaatgatctgacgaaacggcaccttgctgagatcgggcgtgggttccgggagcttggcttcagcatcgtcgccacgtctggaacagccaaagtgctccagctcgagggcgtcccggtggagccggtactaaaaatccatgaggggcggccaaatgccagagatatgctgaagaatggccagatacagatcatggtgataacaagctcgggcgacgctctcgactccaaagacggcctccagcttcgtcggcttgccctcgcttacaaggtgccgatcaccacgaccgtggacggtgcacgggcctccatcgatgccatcaagagcttgaagaacaagtcgatcgagatcctcgccttgcaagattacttccagactgctgatgcttcggaggatttacaggcggtggcacgaaccgccccttagtggtgtctcttcttttcccatatataatgtgagcctagctcaaagccaaaaccacatcccaaatgaaaattttgtttatggttgcacctgcagcatgcatgcgcaaagacaggcatccagattgtatcggtcacaggcatggctggacagaatcggtgttgggcgaacgtagttgtagtttgtcatgttagaagggtgatagcatccatggaaataaggcttcttcccaactgcggttttgatgacgagtaccataccatatcatatcccttgtggaggtttatttacattgtatcattgtctcacaaaaacgaaaatgtgcgacgtacatgtattgttatgcttatgcatgttataatcagattctttgatgagtagacaggcattttactgtacaagaaa

SEQ ID NO: 113433 - DNA, 1906 bp, Zea Mays
gttggtggcagagcggacgacaacgcacgcgcgcctcttcctcctcctccccgccgccgccgccgccgccgcgcgcgcctttgcgtgccccataccgtctcctccaacacgctcccctcgttggcatcaatttcccatcccacctgtccaccgtcgcccgccgctatctcgcacccgaacccagcgcctccctcgtcgccgccggcgcgccgccatggtgtcgcagcacggcatcctcctcgcagttaacatcatctccgaccatttcggtcctatcgtatccaaagtgtgtggctgccttctgcgccacggcgcgctgtcgttgcaggatatcgtccgccgcctcgaactctcgcccgggcaggtgaagaactccctcctcattctcattcagcacaactgcgttcaggcctacacaagccccagaggggctggcgataggacagtgacgctctacctggccatcttcgacaatgttctgcaccggctgcgcttctcaaagttcctttccgtcgtccgtgtggatattcctgaggtatcagaagttcttctcgaaggattacttcagaatggtaggctaacatttgagcaacttgtggagcgaacaatatttaaagtatcagaagacagccccttaccaacaagggaagaagtacgaatgaacttcaacaaacttgtctatgcgcattatgtggaacgttgcccaaaaccagaacctttttttgatcctcttgcggttgaacaacctacatccacaaggaaacgggctcctaaaactgttgaggcggttctttcacttgagcagaaagttgtctgtactgcagctctatctgacgctgaaagattttctgagataccatacttcatggacgggtcatcgagtgcaaaagatggccatcatgctgttgctggtaataagcgaaaacatgaaaccttagaagttgatgaagatgattcgataattgcagaaagtgaagtactttggcggataaattttgagagattcatattttgtttaaagaagaagttttgtgcagaacgaaagaaagcaaagatgaggctcggaacacttgctatatgggaagcattttttgaggccaatgtaacaaacaacgacaacaagactgtgacatcaccaatagatggaattttggaaagagtaggacaaaaggaaggaggcatgtcaatgactttggatcacataacaagtgtgttgaatgatttagagtgcacttctaccgctaataacccagaagaattcacattcgatttgaataaattggttgagacatgtcgaaacgatgagatagagtctcttgtgaaaaagaaacatgggcaagaagcttatacaatctttaggttattgctgaaacaaggctctccagttgagacggatgaaattactgacaggacaattctagacaagcaggttgttcatgaaactctatacaagctttggaaagatgaatacatagattcagagagagtcccttcaacatcagcaacaggaacaggaagcgctcagttctttgtttggagagtaaaaaatatttatagggaacacttcatggacaatctttaccatgctgctttaaacttgcgccagatggtcaattatatggctgaactactacttgagggttcaaaggatgaaatcaagcttcggaacagaaaaaacattttgatcctagctctcactagacatgatgaatcccttatgttgttccatgatttttgagaatactggaacaggatctggtatgtcatatttacatatatggatgtaaagttagatgactgagaataaagtagcttaactttttgcagatctttatttatgtgttatctgttgtgatgtttttcgtttttcatcatttgttggtgccagatacagatacaatggata

SEQ ID NO: 113434 - DNA, 1903 bp, Zea Mays
gttggtggcagagcggacgacaacgcacgcgcgcctcttcctcctcctccccgccgccgccgccgccgccgcgcgcgcctttgcgtgccccataccgtctcctccaacacgctcccctcgttggcatcaatttcccatcccacctgtccaccgtcgcccgccgctatctcgcacccgaacccagcgcctccctcgtcgccgccggcgcgccgccatggtgtcgcagcacggcatcctcctcgcagttaacatcatctccgaccatttcggtcctatcgtatccaaagtgtgtggctgccttctgcgccacggcgcgctgtcgttgcaggatatcgtccgccgcctcgaactctcgcccgggcaggtgaagaactccctcctcattctcattcagcacaactgcgttcaggcctacacaagccccagaggggctggcgataggacagtgacgctctacctggccatcttcgacaatgttctgcaccggctgcgcttctcaaagttcctttccgtcgtccgtgtggatattcctgagtcagaagttcttctcgaaggattacttcagaatggtaggctaacatttgagcaacttgtggagcgaacaatatttaaagtatcagaagacagccccttaccaacaagggaagaagtacgaatgaacttcaacaaacttgtctatgcgcattatgtggaacgttgcccaaaaccagaacctttttttgatcctcttgcggttgaacaacctacatccacaaggaaacgggctcctaaaactgttgaggcggttctttcacttgagcagaaagttgtctgtactgcagctctatctgacgctgaaagattttctgagataccatacttcatggacgggtcatcgagtgcaaaagatggccatcatgctgttgctggtaataagcgaaaacatgaaaccttagaagttgatgaagatgattcgataattgcagaaagtgaagtactttggcggataaattttgagagattcatattttgtttaaagaagaagttttgtgcagaacgaaagaaagcaaagatgaggctcggaacacttgctatatgggaagcattttttgaggccaatgtaacaaacaacgacaacaagactgtgacatcaccaatagatggaattttggaaagagtaggacaaaaggaaggaggcatgtcaatgactttggatcacataacaagtgtgttgaatgatttagagtgcacttctaccgctaataacccagaagaattcacattcgatttgaataaattggttgagacatgtcgaaacgatgagatagagtctcttgtgaaaaagaaacatgggcaagaagcttatacaatctttaggttattgctgaaacaaggctctccagttgagacggatgaaattactgacaggacaattctagacaagcaggttgttcatgaaactctatacaagctttggaaagatgaatacatagattcagagagagtcccttcaacatcagcaacaggaacaggaagcgctcagttctttgtttggagagtaaaaaatatttatagggaacacttcatggacaatctttaccatgctgctttaaacttgcgccagatggtcaattatatggctgaactactacttgagggttcaaaggatgaaatcaagcttcggaacagaaaaaacattttgatcctagctctcactagacatgatgaatcccttatgttgttccatgatttttgagaatactggaacaggatctggtatgtcatatttacatatatggatgtaaagttagatgactgagaataaagtagcttaactttttgcagatctttatttatgtgttatctgttgtgatgtttttcgtttttcatcatttgttggtgccagatacagatacaatggata

SEQ ID NO: 113435 - DNA, 2311 bp, Zea Mays
gttggtggcagagcggacgacaacgcacgcgcgcctcttcctcctcctccccgccgccgccgccgccgccgcgcgcgcctttgcgtgccccataccgtctcctccaacacgctcccctcgttggcatcaatttcccatcccacctgtccaccgtcgcccgccgctatctcgcacccgaacccagcgcctccctcgtcgccgccggcgcgccgccatggtgtcgcagcacggcatcctcctcgcagttaacatcatctccgaccatttcggtcctatcgtatccaaagtgtgtggctgccttctgcgccacggcgcgctgtcgttgcaggatatcgtccgccgcctcgaactctcgcccgggcaggtgaagaactccctcctcattctcattcagcacaactgcgttcaggcctacacaagccccagaggggctggcgataggacagtgacgctctacctggccatcttcgacaatgttctgcaccggctgcgcttctcaaagttcctttccgtcgtccgtgtggatattcctgagtcagaagttcttctcgaaggattacttcagaatggtaggctaacatttgagcaacttgtggagcgaacaatatttaaagtatcagaagacagccccttaccaacaagggaagaagtacgaatgaacttcaacaaacttgtctatgcgcattatgtggaacgttgcccaaaaccagaacctttttttgatcctcttgcggttgaacaacctacatccacaaggaaacgggctcctaaaactgttgaggcggttctttcacttgagcagaaagttgtctgtactgcagctctatctgacgctgaaagattttctgagataccatacttcatggacgggtcatcgagtgcaaaagatggccatcatgctgttgctggtaataagcgaaaacatgaaaccttagaagttgatgaagatgattcgataattgcagaaagtgaagtactttggcggataaattttgagagattcatattttgtttaaagaagaagttttgtgcagaacgaaagaaagcaaagatgaggctcggaacacttgctatatgggaagcattttttgaggccaatgtaacaaacaacgacaacaagactgtgacatcaccaatagatggaattttggaaagagtaggacaaaaggaaggaggcatgtcaatgactttggatcacataacaagtgtgttgaatgatttagagtgcacttctaccgctaataacccagaagaattcacattcgatttgaataaattggttgagacatgtcgaaacgatgagatagagtctcttgtgaaaaagaaacatgggcaagaagcttatacaatctttaggttattgctgaaacaaggctctccagttgagacggatgaaattactgacaggacaattctagacaagcaggttgttcatgaaactctatacaagctttggaaagatgaatacatagattcagagagagtcccttcaacatcagcaacaggaacaggaagcgctcagttctttgtttggagagtaaaaaatatttatagggaacacttcatggacaatctttaccatgctgctttaaacttgcgccagatggtcaattatatggctgaactactacttgagggttcaaaggatgaaatcaagcttcggaacagaaaaaacattttgatcctagctctcactagacatgatgaatcccttatgttgttccatgatttttgagaatactggaacaggatctggttataaatttctggtctttggagaaaccaaagcatggtgatttttctttggaattgtcaaagcttcgtacctatgatgttgttgagggagttgctcgtcaacttgaattggaccatgcatgaaaattcggcttacatcccacaattgctaatctcagcaacctaaaccacagcctgtcaagtatcgaacagtggagcatctgttggacatgctcatcctttacaatcagattaaccttttttgtttcttttggtcaatatgagcatgatttccgtgtaacaaaatgtgttggacttcctgaactttaacaaagattattacattcagttaaaacatcgtttcccccagtttatatgtaacatcagaatagatgttctttgtggttaaatgtcattgtgcgccaagtcatgcatctggtatgcttgtctgttgctgttaacgcctcgtaggttgtctggacgacttcatttggaacacatgccaacaggcaaacaagaggggcatatttatattgcagtttagagtaacagacatgatatcctactatttctttgt

SEQ ID NO: 113436 - DNA, 279 bp, Zea Mays
atgaacgaatccttttattcaaaacggaacctgcagtcattttgtctgaggaactgcaggatgcaggttcaggttacattgtacagcagtggtgcacgcagagcgcaagcaccagagtgctaccagactaccagagtgaggtcaaaatacgatgacccaggaacgaactaacgtacgaaagaatggtagccgatcagagaacgcaacaaaccaatcaacaaaattgttaacccggcgcaacgcagcaacacctcggaaaacgccgctgcggcgaggtgt

SEQ ID NO: 113437 - DNA, 1169 bp, Zea Mays
gccattgaaatatctctatttctactatattaaaccaccaatgtctccaggttccacggtcgctgtgctcccccacatttaaatagtaaaaataacaaaaaaaatatacatacataaagatttgaactatggttgctagttttaaattttaaaactcacattcacatccacctatccaattgaacaaacattttcctaagctcggacttggaggctcgcaaaacgccacaagaagcccgatccacacgagagtctgtcgcttgaaacggaccttatcagcatcgtcgctcggcccattcgaggcccacagagtgaggaggagtcgaggagcaggaggctagggtttaaggtgcacggcgatggcgacggcggcgaagaccctagcgcgggctggatcctccctcttcggccgcattctcgcgtccccttccataatccgccccgggctgccgctcgccgggctgcggccgcacttcccaccgccggcaccggccgggttggacgcttacgaggcggagaccgtcgccaggctgagctcgctccccggcgagatctccttcccctgcggcctcccctcgctccgcttcttcatcgacgacgttgaggatcctgttgctaatgaccctctccagttgcttccgaaaagaacttaccagcccagtaccatcaagcggaaaagaacccatggattccttacacgtaaatcgaccaagggtgggcgcaaggtgattgcccggagaatcgcaaaaggcaggcacagaatttcagtttagcaagatcccatagcagcactggatgttttctgtactactacagattcgtatcgtgttccttgtgtgaacgacgtattttaagccttttgaagtttttgcatgccaccctgctgaagcatgaagctgagcccccgcgcaagcagctgaaacaaactcttgctgcgaaataaacaagtcaaaggaactggaaaattgccgcgccgaatgagttcatttggagcagctgcgtgccgcatttgtgtttgtttgtgctggaattgccacgtatcagagatgcgtgcgtggtctgagtgtggtcgcagtagcacttggccttgttttcagagtgggggtcaagggggggtcctagtgtaatactttcctctcttataaatcaccaggagagattttattcta

SEQ ID NO: 113438 - DNA, 852 bp, Zea Mays
gcgcgttcaaaatgcttcaccggaggtgtcttcaagggaccacatacaaaaaaaaacttcaaacggtcctgtttttttttcccaaaaacttttacaatttccgttccataatggccttggtcgtatgcagctgtttatataaaatgcctaaaccccgtacccctagtccccgaccacctcaccgcatcgccaccggcccaccgcgcagccagatggcctcttcctcctcgtgcccgctcgcccccgggacaagcggatgcaagcccaggacgacgcggaccagcggcgtcgggttcggagtcgaagcaatggcgcggagcgtggcggcagtgaagctggagccgaagccggagccgtgggcggcggaagcagaggaggggtcgtcagttgtgccgcggtcgatggaggggccaccgtttccggcgccgttcgtggcgaagacgtacgagatggtgtcggacgcggccacggacgccgtagtgtcgtgggcgccctgcggcgcggggaacactttcgtggtgtgggacccgcaggcgctcgccaccggcatcctcccgcgcttcttcaagcacgccaacttcgcgtccttcgtcaggcagctcaacgtctacgtgtggctgctggagactctgctcaattggtgatattttcttttggagcatgactgggcatgagtgggcacgacattgtggcgacatcagaagaacatatgctgctagtcctgatgtagataactgactgcgcagggccagatgtgagcagactaggggaaaacttgacatttgcttggttttatttcatctgggttgaaacttgaaatagttccttgagatttggatcaactttgcttcc

SEQ ID NO: 113439 - DNA, 1837 bp, Zea Mays
gcgcgttcaaaatgcttcaccggaggtgtcttcaagggaccacatacaaaaaaaaacttcaaacggtcctgtttttttttcccaaaaacttttacaatttccgttccataatggccttggtcgtatgcagctgtttatataaaatgcctaaaccccgtacccctagtccccgaccacctcaccgcatcgccaccggcccaccgcgcagccagatggcctcttcctcctcgtgcccgctcgcccccgggacaagcggatgcaagcccaggacgacgcggaccagcggcgtcgggttcggagtcgaagcaatggcgcggagcgtggcggcagtgaagctggagccgaagccggagccgtgggcggcggaagcagaggaggggtcgtcagttgtgccgcggtcgatggaggggccaccgtttccggcgccgttcgtggcgaagacgtacgagatggtgtcggacgcggccacggacgccgtagtgtcgtgggcgccctgcggcgcggggaacactttcgtggtgtgggacccgcaggcgctcgccaccggcatcctcccgcgcttcttcaagcacgccaacttcgcgtccttcgtcaggcagctcaacgtctacggattcaggaaggtgaatccagatcgttgggagtttgcaaacgaatcattcttagcaggccagaagcatctgctgaaaagcatcaggaggaggcgcgcgtccaagcctcaggtagaagcatcgccaagaaacagcgcaagtgcttgttccggacagcccaacaaggatcccggggtggtcgagagtttgaaacgggaccgcgcagcgctcagggctgaagtcatcacgctaaggcagcagtacagcatttgcaaatcccaactcgtcgccctggaggagaggatcctgaacaacgagagggaccagcagaaggccatcgccttcttcgcaaaggtgctcagcaacccagctttcgtgcagcaggtcctgcgcaactacgccagggagagagagctacacggcgcttccaaaagacagcggctgatggaaaacgaaggacatcggcagggcgatttgccactgaggggtagcaccgaagccgcgtttgcgaccggtgcggctggcgtctctgtggggactgggagcacaaatgttggcacagccgcgagacaggaggagtctggttctgagttgaatgatcaggaggtgaacagtatttggtctgacgtgtgggacgagctggacctggacctggacgcggtaccaggcgctgaaatggaccggcgagaagcggacaagggcgtcgctggcttccacgacgtcgaggacttgagtggccggccttgcggttggggtgatgagttctcgtatctcgcggagccgatgcagttcgtggagcactatgactagtggtgcaagaatagcttgatctggagctggaggggatgatcagtggcttgttcatagcttcaccatactaggattctgccagctgagattcgtatatactggttgagttgacatgctggctgtggtgtggtgtatagcgtcagctcggacttctcagaacgtactgcaaaccaggatgtgataatttgtccttttcttttctaacttttgctggataaagtacagggtgcagcgaatgataccatcgtggagcatttagctttcggacattggtaccgccaacgatggcatatttcgcgatgttagaacttaacatgttgtgtcaagagtttgctcgacttgacctactatgttggtatcacttaggtctttgagcttgatattatgtattatttggatctccaaactttgattaatgtactccaatgtggcacggc

SEQ ID NO: 113440 - DNA, 3095 bp, Zea Mays
accgactcaccgtatacttggcggatttcgcccacgcccgcctctgccgaagaccagccgccgctgtcgacggcgaactcccgcggcgagtcgaccgccgtctcagaccctaaggcctaagccctagttccagcccacccagttccttaaccatggaggatgccctcgcgccgccgtctgtggccccgactccctcccccctcgccgccgctgccgtcctcacccgtcgtcggtcacacctcgacagtgcctccttccgcacgctctcccgcctcttctctcactgtctccacatcaacccgtcgccctgtggcatctcgccgcccgtgcccgagcccgtcgccgcggacttcgtcggtggggaccccgacgattccccagaaaggcctaatggcgctgatttcgatcggctaaaggatgtgcaaatcgaggcggcggatgcgggaggcccttcgcttcacgggactgtccatcaaccggccgcggcgaactctaccctcgacctggttgaggctgaggctgaggctctgcagctcgagggtgcggacgcggtaggggtcgtagaaagcacctcgtgtatgaccagagccgaggctggggaatcagcggtacttgtggtagaaagcacctcatgtaagaccactgctgaggtggaggagtcagcggttggagctggactggcgatggtgggtgacgtatctttgaagtcggtggagtctctcttggagacgaaggttgacgaatcggtagaggtagcagtgggtgatgatgaaggctgtcttttgtttgaagcgatgctgacaaacttcacagggttgattgatgatgttgatgctggagcaataccaacacagaggtgtgcagtttctggaggtgacctgcagaatagcaaggcatctgaggatttgaaacaactgggtgataggattgaagaaggagaacctcttagaaactgtgataatgggcagaatgatggtggtggtttcgaggaaggagagattgagggcgagtttcaggatttgggttcagaagaatctggaaattccgaacatggagacgaagatggtgaagatgagaaattggaagacaattccattagcagaggctcagggccaaataaatcttgtgattatggcacacaattcgggaatttgcaatcaattcctgaaacaggaaatgatcatcttatactgaacagggatgctattgtcagaggtgatgcacaaatatctgttaccagggctcaagccgtcacttatgatgaagttgtggattggaatgagactccgctgcctgacaatgagactgtcaaccctgggaagaagagaaaacgcattctgacagaagagagaaaagctaaaaaaacaaaaaataaaagaaagaaccgggcactgcaacggatagcggatggagtcaaaagaccaaaacttactcctgttacaaagccaaaaaaaccttgccacttctatgaccatgggaagtgccgccaaggaaataattgcaagttttcccatgattttacaccttcaacaaaatctaagccctgcacacattttgcatgtggttcttgtttgaaaggagaagagtgtccatatgaccatgagttgtcaaagtacgaatgccataactataaaaacaatggaacatgtgccagaggtgataattgcaaattctctcatgtgatgccaactacagaaggtactcccacacaagatgcaaagacttctgatgcttcactggcatatgagaaaacaaacaccagagagcatacaagaagccagaagaacgcaacagttcacaatgttgctcctagtaattctatcctaagaaacctggctggcgtctccagcaaatcccagaatgtttctaaccatattccaaagggcgtgcagtttctttccattggtaaaggtcaatccaatctggacagcctgcacctggatgctttgttcatggagaagcaaaggaatgcaaatggtactcaacataaccttggaggacatgaagcagaaaggcaaaaaattgtgaagcaaaatagccagaaaccgaatctattgctagacgataagaattcatcagaaggagctactaggcatccatgttcagacccccaaaaagctactttacctgttaattctattgcaacacctggatcaatacatactcagcatgaagtctcagaggcttctaggattttgcaggagttcttgtttggtgctggcagttagaggaaaaagtaagcacaggtttactagtcttcaaaagctgacttttgtggactccgtgaacaagttcaacccacactgtagttacttggaatggagcaaacagttgggtcaacttactgatgtcatggaaaagttgaacctcaagtcacgaggtagaacaacaggacttgatgtgtcattattgggttcctaacaagctgactgtttagtgaggcgcacctcctgtcagggaactcagattcctattcctccatgcaagagctttacgtccgtccgtttgccacatgagaatggccggctggtttagtcttgaatcatcatcatgattcagtacacatctacctttgctggcgaccaacattagcctggtgcagtgcatggtctgggcttgcatgcatgcaatgcccccgggatctccgttcctatctcttgggttgagatttacatatgaagcatagctgaaaaggttgtggtccgccgcagcagatgctgaaggccccaggtatgtgctggagccaggcatgtgagctgtgtgcccctctacgcctgggcgtcgtcacatgaccaggtgaccgaccgtgacgcctgtttctccctacagcagtcaagtttgttctgtcgatcatatgatggtgttcaattccttggagcaaattacccctctcccgggccccggcagtaaatacacggttcgtgctctattgtttatttgcgtgtggaaggaggtggttcagatgacccccccccccccccccccggatttaccgagaatcccggccgaggtgtgtgtgtatgtgtggtggttatcttgattcgccaagtattactattactgtcactgtcagtctcgaaaggaaagaaagcgag

SEQ ID NO: 113441 - DNA, 3229 bp, Zea Mays
accgactcaccgtatacttggcggatttcgcccacgcccgcctctgccgaagaccagccgccgctgtcgacggcgaactcccgcggcgagtcgaccgccgtctcagaccctaaggcctaagccctagttccagcccacccagttccttaaccatggaggatgccctcgcgccgccgtctgtggccccgactccctcccccctcgccgccgctgccgtcctcacccgtcgtcggtcacacctcgacagtgcctccttccgcacgctctcccgcctcttctctcactgtctccacatcaacccgtcgccctgtggcatctcgccgcccgtgcccgagcccgtcgccgcggacttcgtcggtggggaccccgacgattccccagaaaggcctaatggcgctgatttcgatcggctaaaggatgtgcaaatcgaggcggcggatgcgggaggcccttcgcttcacgggactgtccatcaaccggccgcggcgaactctaccctcgacctggttgaggctgaggctgaggctctgcagctcgagggtgcggacgcggtaggggtcgtagaaagcacctcgtgtatgaccagagccgaggctggggaatcagcggtacttgtggtagaaagcacctcatgtaagaccactgctgaggtggaggagtcagcggttggagctggactggcgatggtgggtgacgtatctttgaagtcggtggagtctctcttggagacgaaggttgacgaatcggtagaggtagcagtgggtgatgatgaaggctgtcttttgtttgaagcgatgctgacaaacttcacagggttgattgatgatgttgatgctggagcaataccaacacagaggtgtgcagtttctggaggtgacctgcagaatagcaaggcatctgaggatttgaaacaactgggtgataggattgaagaaggagaacctcttagaaactgtgataatgggcagaatgatggtggtggtttcgaggaaggagagattgagggcgagtttcaggatttgggttcagaagaatctggaaattccgaacatggagacgaagatggtgaagatgagaaattggaagacaattccattagcagaggctcagggccaaataaatcttgtgattatggcacacaattcgggaatttgcaatcaattcctgaaacaggaaatgatcatcttatactgaacagggatgctattgtcagaggtgatgcacaaatatctgttaccagggctcaagccgtcacttatgatgaagttgtggattggaatgagactccgctgcctgacaatgagactgtcaaccctgggaagaagagaaaacgcattctgacagaagagagaaaagctaaaaaaacaaaaaataaaagaaagaaccgggcactgcaacggatagcggatggagtcaaaagaccaaaacttactcctgttacaaagccaaaaaaaccttgccacttctatgaccatgggaagtgccgccaaggaaataattgcaagttttcccatgattttacaccttcaacaaaatctaagccctgcacacattttgcatgtggttcttgtttgaaaggagaagagtgtccatatgaccatgagttgtcaaagtacgaatgccataactataaaaacaatggaacatgtgccagaggtgataattgcaaattctctcatgtgatgccaactacagaaggtactcccacacaagatgcaaagacttctgatgcttcactggcatatgagaaaacaaacaccagagagcatacaagaagccagaagaacgcaacagttcacaatgttgctcctagtaattctatcctaagaaacctggctggcgtctccagcaaatcccagaatgtttctaaccatattccaaagggcgtgcagtttctttccattggtaaaggtcaatccaatctggacagcctgcacctggatgctttgttcatggagaagcaaaggaatgcaaatggtactcaacataaccttggaggacatgaagcagaaaggcaaaaaattgtgaagcaaaatagccagaaaccgaatctattgctagacgataagaattcatcagaaggagctactaggcatccatgttcagacccccaaaaagctactttacctgttaattctattgcaacacctggatcaatacatactcagcatgaagtctcagaggcttctaggattttgcaggagttcttgtttggtgctggcagttagaggaaaaagtaagcacaggtttactagtcttcaaaagctgacttttgtggactccgtgaacaagttcaacccacactgtagttacttggaatggagcaaacagttgggtcaacttactgatgtcatggaaaagttgaacctcaagtcacgaggtagaacaacaggacttgatgtgtcattattgggttcctaacaagctgactgtttagtgaggcgcacctcctgtcagggaactcagattcctattcctccatgcaagagctttacgtccgtccgtttgccacatgagaatggccggctggtttagtcttgaatcatcatcatgattcagtacacatctacctttgctggcgaccaacattagcctggtgcagtgcatggtctgggcttgcatgcatgcaatgcccccgggatctccgttcctatctcttgggttgagatttacatatgaagcatagctgaaaaggttgtggtccgccgcagcagatgctgaaggccccagcttggcgtggaagcaggcatgtgagctgtgtgcccctctacgcctgggcgtcgtcacatgaccaggtgaccgaccgtgacgcctgtttctccctacagcagtcaagtttgttctgtcgatcatatgatggtgttcaattccttggagcaaattacccctctcccgggccccggcagtaaatacacggttcgtgctctattgtttatttgcgtgtggaaggaggtggttcagatgacccccccccccccccccccggatttaccgagaatcccggccgaggtgtgtgtgtatgtgtggtggttatcttgattcgccaagtattactattactgtcactgtcagtctcgaaaggaaagaaagcgagacgaaattatggactgggcgacttgtgcgcctcaacaggtactctgtgcttcacgtcttgggaactgctggataggttcattttacgtgtctatctgcgggtgaaaatccttcctctgggaatcttgtcgtggct

SEQ ID NO: 113442 - DNA, 143 bp, Zea Mays
cccgtttcgttgttttcggttctcctttgcctttgtttcccttttctgctctttgggggttgagctctgaggttttcatacggggtttcatctctagcctaccccaacgtgcttgggacaaaaaggctttgttgttgttgttg

SEQ ID NO: 113443 - DNA, 4440 bp, Zea Mays
cctttggcgtctttgggatcctggctcgctctcttttcccttctccggttctcccctgaaagcgagcagcggatagataaagctcgggtcggctttggtgccacgtactggccttcttccccttcgctctgacactgttcctcttccctcctcctcctcctcctccccccacccacctcctcctgctctttccccgtgtgtccgtcctctcctccccggcgggcggccatgactgctgtggcctccctctagcctcgctgggcggctgctgtgccagctctagaaagatacgacagctgttggccttcagctgctggcgctgctcgactgcactgcacaccatagagaggaagggagagagagagagagggagggagaggcagaggcagaggcagaggggggagtgtgtgtgtgcgtgtctgtgcctgccatgtgtgatagaaagaatctggaattgctttccaagtcattgaccgcccagttccagtttccttccccccctcgttttgtccccctcctgagcctccttgattcctgtgttgcttgctgttcctccctccctccctgcctgcttgtgtgtgttgttgctgttattccctgcttggctgttcatgcatcaagcaagctccccagcatctttctctcccatacatacccccttgtctgatgcctgcttctgcttctgcttgcccatcccctccttcattcttgacgagttaaatgcatgcctttcagcagattgctgcacacatccctctcgatttattgcctgccaccacacccctttttcttccgctatcttccttctcctagctagctagctaggtagacacacagtcacacacacatatcagtagtggtgtgtatatgatagtatacagcaagtgcaagatcatcaggcgaagctagctactagccgccctcctcagctcggaggcggcttggacttcacctagtatgttccaccatcagcaggagctcctacaggcagaagctgcggcggcagatcgggagagcagcatgtccaacaacctcacctcctccgcgcccggcggccccaacgcggcgccagctgctgctgcggccaccggcaataataacaagcgaaagcggagcctcccaggcaaccccgaccccgaggcggaggtcgtggctctgtctccggcgacgctgatggcgacgaaccgcttcttgtgcgagatctgcgggaaagggttccagcgggaccagaacctgcagctgcaccggcgcgggcacaacctgccgtggaagctgaagcagcggggcgcgggcaaggaggcgcagcggaagaaggtgtacgtgtgcccggaggcgtcgtgcgtgcaccacgacccggcccgcgcgctgggcgacctcacgggcatcaagaagcacttcttccgcaagcacggcgagaagaagtggaagtgcgacaagtgctccaagaggtacgccgtccactccgactggaaggcgcactccaagatctgcggcaccagggagtacaagtgcgactgcggcaccgtattctccaggtaaaattgaagtaactaactagagagaccacctttgctatgctagctagatagcggctagccgatccatcttccttccatttgcccgctccagtgtgtcagtgtgcacgcacactggccaacctgatcctctcttgaactcttctttcaccatttggaggtcatgcatgcatgatgatcgtcagcccctgatgagatgagtgatgaatgcatgtggtgattgagatttcaactagtagatagggcactgattaattaaatgatgcgtcaggctagatcgataggatacgatgctagcagtagtagaggtagacaccagaccagagtgcagtgctgtggtgtactgcactggcaatggcactggggtcggctcggtttctgcctgctttgctgcttgcaaccagcgaagcgatgcagaagagagaaggatttgaaggttgcggattgggtgttggagaagaaaggcaagttgtccagggcgtcgtgcatgtgtgtccatggacagaaaagatggaccactttgtaactaagacctccgatccccctttgctcttttctttttgtccatggacgacgaggggaggcttcggaagcagctgttactgctgctagctgcatggtgaacggaacccgataataggcaatagggctcagagcttagcttgggcgcatgcgcgtgtctgattcatatattctttcgttcattttgttcgagctctgagagaagcccgagcaccgaaaagctagctagctagctacggggcatagggctgaggaagagagacctgcgacctccatccatggcgattggcgaggaaggaacgaggtgtagtggaggctggctgggagtgggacaggcatgtgattctctttgcagagccgaggcggccggctttctatctccgtcgctcgccccaatgctactccctatcctatgatcccctatccatgctgcctgctagagctagctgcatgactacacgcactgtcctcctctctcctgtgatgtcccttctctccccagtctttctctctctgtctctgtctctccaacaccagtcacacacggcagcattgcgttgctagcagcagcctaggcttgtagccatgacaggcaaacaagatcaaacgagatggaaggacgaaggaacttttgcttttagctttctctttctcttttcctttttttttttgcttccgatcgagctcgcctctgatcccggcagcacggacgggctacagctcctatgctgcagtctgcagcaggagagggtcgtaaagatttgattctcttcgtccttccttttctttttgcgtcgcatgcaatgcaacgcaacgtgtgcaggcgggacagcttcatcacgcaccgcgccttctgcgacgcgctcaccgaggagagcgccaaggccatcggcggcgtcaacgccatggcagcgccggtgcaccaccaccaccacccgatgctcttctcgccgccgcccgcgcacgtcatgcagcagcaggacgtcctcctcctccaggagcatcaacaccaccagcaccagcagcagcagcaggaggacgatgtcatgcagcagccgccgccgcagcagtgcaactacgccatgaagacggagatgccgccgtggccggcgatggcctacgaccacccgctgctgcagccgctctgcaacgccgccgccgcagcggcggcgcagggctcggcggccacgtccgcgccgcagctgcccgcggcctccgcgcacctgtcggccacggcgctgctgcagaaggcggcgcagatgggcgccaccatcggcggcgcgggctacacccagatggcgggtcccgcgacgagcgccaccgccgccttcggcctcggcctcccgggcctgcagaatgcccagcaccaccacccgcagcagcaagatggcggcggcggggtcatggcggccgggctcgcgaggacagccagctcccacggccgcggcggcgacgaaggcggcggaggcggatcaggcgacggcatgaccagggactttctcggcctgcgcgccttctcccaccgcgacatcctcggcctcgctggcctggactcctcgtgcatgggcgccatcaccgccagcgccagcatgggctgctacgagccacagcaacaacatacacagcctcaggcgccgcagcagcagcaaagcagcaacgaaccatggcacggcatggggcagccatagctagcttaggtcgtcgctacccattctggcaccaaagctactttctgtgcgtcttcctctcatcagccgtactacatcgccgtcgctgcttcaattctgattatcgctgccgccgcgcgcggtgcagaggcaaaactagctacggccggccgcccagagtgcaacgcgtggcttttgagtcgggtaatctcatcgtctcccgcccctcacttcggtcatcttttgctcctgttcatgctgtcatcccgtctgaacttttaaccacgcaatgcaagcaagcctgcaagctaggatgaggatgatagattggattggataatacacaagtacgcagggagttgtgtaattttttttcaggttggggaagaagatcgaccaacatgtaaactaataagctcggttcaattaagcagatgggaagaacaccatagctacgtgacagtaataataatacatgcatgcgttcatcgtctcttttgtctggtcactacatccatccatgtgtgcaattttggtgatataaaagtttctctttttttcccaaaaaccagtattatttggtggcattgacttgagagagtagattgtgaatgaactggagatggagtccttggtgtagtatagtagactgcaggatccgtagatgagctgaggtgcattcttgggtctacgagacatgcatgtgtggcctaccg

SEQ ID NO: 113444 - DNA, 1621 bp, Zea Mays
actggccttcttccccttcgctctgacactgttcctcttccctcctcctcctcctcctccccccacccacctcctcctgctctttccccgtgtgtccgtcctctcctccccggcgggcggccatgactgctgtggcctccctctagcctcgctgggcggctgctgtgccagctctagaaagatacgacagctgttggccttcagctgctggcgctgctcgactgcactgcacaccatagagaggaagggagagagagagagagggagggagaggcagaggcagaggcagaggggggagtgtgtgtgtgcgtgtctgtgcctgccatgtgtgatagaaagaatctggaattgctttccaagtcattgaccgcccagttccagtttccttccccccctcgttttgtccccctcctgagcctccttgattcctgtgttgcttgctgttcctccctccctccctgcctgcttgtgtgtgttgttgctgttattccctgcttggctgttcatgcatcaagcaagctccccagcatctttctctcccatacatacccccttgtctgatgcctgcttctgcttctgcttgcccatcccctccttcattcttgacgagttaaatgcatgcctttcagcagattgctgcacacatccctctcgatttattgcctgccaccacacccctttttcttccgctatcttccttctcctagctagctagctaggtagacacacagtcacacacacatatcagtagtggtgtgtatatgatagtatacagcaagtgcaagatcatcaggcgaagctagctactagccgccctcctcagctcggaggcggcttggacttcacctagtatgttccaccatcagcaggagctcctacaggcagaagctgcggcggcagatcgggagagcagcatgtccaacaacctcacctcctccgcgcccggcggccccaacgcggcgccagctgctgctgcggccaccggcaataataacaagcgaaagcggagcctcccaggcaaccccgaccccgaggcggaggtcgtggctctgtctccggcgacgctgatggcgacgaaccgcttcttgtgcgagatctgcgggaaagggttccagcgggaccagaacctgcagctgcaccggcgcgggcacaacctgccgtggaagctgaagcagcggggcgcgggcaaggaggcgcagcggaagaaggtgtacgtgtgcccggaggcgtcgtgcgtgcaccacgacccggcccgcgcgctgggcgacctcacgggcatcaagaagcacttcttccgcaagcacggcgagaagaagtggaagtgcgacaagtgctccaagaggtacgccgtccactccgactggaaggcgcactccaagatctgcggcaccagggagtacaagtgcgactgcggcaccgtattctccaggtaaaattgaagtaactaactagagagaccacctttgctatgctagctagatagcggctagccgatccatcttccttccatttgcccgctccagtgtgtcagtgtgcacgcacactggccaacctgatcctctcttgaactcttctttcaccatttggaggtcatgcatgcatgatgatcgtcagcccctga

SEQ ID NO: 113445 - DNA, 2768 bp, Zea Mays
actggccttcttccccttcgctctgacactgttcctcttccctcctcctcctcctcctccccccacccacctcctcctgctctttccccgtgtgtccgtcctctcctccccggcgggcggccatgactgctgtggcctccctctagcctcgctgggcggctgctgtgccagctctagaaagatacgacagctgttggccttcagctgctggcgctgctcgactgcactgcacaccatagagaggaagggagagagagagagagggagggagaggcagaggcagaggcagaggggggagtgtgtgtgtgcgtgtctgtgcctgccatgtgtgatagaaagaatctggaattgctttccaagtcattgaccgcccagttccagtttccttccccccctcgttttgtccccctcctgagcctccttgattcctgtgttgcttgctgttcctccctccctccctgcctgcttgtgtgtgttgttgctgttattccctgcttggctgttcatgcatcaagcaagctccccagcatctttctctcccatacatacccccttgtctgatgcctgcttctgcttctgcttgcccatcccctccttcattcttgacgagttaaatgcatgcctttcagcagattgctgcacacatccctctcgatttattgcctgccaccacacccctttttcttccgctatcttccttctcctagctagctagctaggtagacacacagtcacacacacatatcagtagtggtgtgtatatgatagtatacagcaagtgcaagatcatcaggcgaagctagctactagccgccctcctcagctcggaggcggcttggacttcacctagtatgttccaccatcagcaggagctcctacaggcagaagctgcggcggcagatcgggagagcagcatgtccaacaacctcacctcctccgcgcccggcggccccaacgcggcgccagctgctgctgcggccaccggcaataataacaagcgaaagcggagcctcccaggcaaccccgaccccgaggcggaggtcgtggctctgtctccggcgacgctgatggcgacgaaccgcttcttgtgcgagatctgcgggaaagggttccagcgggaccagaacctgcagctgcaccggcgcgggcacaacctgccgtggaagctgaagcagcggggcgcgggcaaggaggcgcagcggaagaaggtgtacgtgtgcccggaggcgtcgtgcgtgcaccacgacccggcccgcgcgctgggcgacctcacgggcatcaagaagcacttcttccgcaagcacggcgagaagaagtggaagtgcgacaagtgctccaagaggtacgccgtccactccgactggaaggcgcactccaagatctgcggcaccagggagtacaagtgcgactgcggcaccgtattctccaggcgggacagcttcatcacgcaccgcgccttctgcgacgcgctcaccgaggagagcgccaaggccatcggcggcgtcaacgccatggcagcgccggtgcaccaccaccaccacccgatgctcttctcgccgccgcccgcgcacgtcatgcagcagcaggacgtcctcctcctccaggagcatcaacaccaccagcaccagcagcagcagcaggaggacgatgtcatgcagcagccgccgccgcagcagtgcaactacgccatgaagacggagatgccgccgtggccggcgatggcctacgaccacccgctgctgcagccgctctgcaacgccgccgccgcagcggcggcgcagggctcggcggccacgtccgcgccgcagctgcccgcggcctccgcgcacctgtcggccacggcgctgctgcagaaggcggcgcagatgggcgccaccatcggcggcgcgggctacacccagatggcgggtcccgcgacgagcgccaccgccgccttcggcctcggcctcccgggcctgcagaatgcccagcaccaccacccgcagcagcaagatggcggcggcggggtcatggcggccgggctcgcgaggacagccagctcccacggccgcggcggcgacgaaggcggcggaggcggatcaggcgacggcatgaccagggactttctcggcctgcgcgccttctcccaccgcgacatcctcggcctcgctggcctggactcctcgtgcatgggcgccatcaccgccagcgccagcatgggctgctacgagccacagcaacaacatacacagcctcaggcgccgcagcagcagcaaagcagcaacgaaccatggcacggcatggggcagccatagctagcttaggtcgtcgctacccattctggcaccaaagctactttctgtgcgtcttcctctcatcagccgtactacatcgccgtcgctgcttcaattctgattatcgctgccgccgcgcgcggtgcagaggcaaaactagctacggccggccgcccagagtgcaacgcgtggcttttgagtcgggtaatctcatcgtctcccgcccctcacttcggtcatcttttgctcctgttcatgctgtcatcccgtctgaacttttaaccacgcaatgcaagcaagcctgcaagctaggatgaggatgatagattggattggataatacacaagtacgcagggagttgtgtaattttttttcaggttggggaagaagatcgaccaacatgtaaactaataagctcggttcaattaagcagatgggaagaacaccatagctacgtgacagtaataataatacatgcatgcgttcatcgtctc

SEQ ID NO: 113446 - DNA, 1793 bp, Zea Mays
tggccttcttccccttcgctctgacactgttcctcttccctcctcctcctcctcctccccccacccacctcctcctgctctttccccgtgtgtccgtcctctcctccccggcgggcggccatgactgctgtggcctccctctagcctcgctgggcggctgctgtgccagctctagaaagatacgacagctgttggccttcagctgctggcgctgctcgactgcactgcacaccatagagaggaagggagagagagagagagggagggagaggcagaggcagaggcagaggggggagtgtgtgtgtgcgtgtctgtgcctgccatgtgtgatagaaagaatctggaattgctttccaagtcattgaccgcccagttccagtttccttccccccctcgttttgtccccctcctgagcctccttgattcctgtgttgcttgctgttcctccctccctccctgcctgcttgtgtgtgttgttgctgttattccctgcttggctgttcatgcatcaagcaagctccccagcatctttctctcccatacatacccccttgtctgatgcctgcttctgcttctgcttgcccatcccctccttcattcttgacgagttaaatgcatgcctttcagcagattgctgcacacatccctctcgatttattgcctgccaccacacccctttttcttccgctatcttccttctcctagctagctagctaggtagacacacagtcacacacacatatcagtagtggtgtgtatatgatagtatacagcaagtgcaagatcatcaggcgaagctagctactagccgccctcctcagctcggaggcggcttggacttcacctagtatgttccaccatcagcaggagctcctacaggcagaagctgcggcggcagatcgggagagcagcatgtccaacaacctcacctcctccgcgcccggcggccccaacgcggcgccagctgctgctgcggccaccggcaataataacaagcgaaagcggagcctcccaggcaaccccggtaggtggtgggtggacgacgaccgaccgatcgatcgatcctgcttcttccctcctccctcgtcgtaattcgatccagtgattaatttatgagttgagttgagttggttctcggtcgctcgtttatgctctcttgacttgatggacggcttgaacatgtcgtcgtcgtcgtcagaccccgaggcggaggtcgtggctctgtctccggcgacgctgatggcgacgaaccgcttcttgtgcgagatctgcgggaaagggttccagcgggaccagaacctgcagctgcaccggcgcgggcacaacctgccgtggaagctgaagcagcggggcgcgggcaaggaggcgcagcggaagaaggtgtacgtgtgcccggaggcgtcgtgcgtgcaccacgacccggcccgcgcgctgggcgacctcacgggcatcaagaagcacttcttccgcaagcacggcgagaagaagtggaagtgcgacaagtgctccaagaggtacgccgtccactccgactggaaggcgcactccaagatctgcggcaccagggagtacaagtgcgactgcggcaccgtattctccaggtaaaattgaagtaactaactagagagaccacctttgctatgctagctagatagcggctagccgatccatcttccttccatttgcccgctccagtgtgtcagtgtgcacgcacactggccaacctgatcctctcttgaactcttctttcaccatttggaggtcatgcatgcatgatgatcgtcagcccctga

SEQ ID NO: 113447 - DNA, 1619 bp, Zea Mays
ggaagggagagagagagagagggagggagaggcagaggcagaggcagaggggggagtgtgtgttatacagcaagtgcaagatcatcaggcgaagctagctactagccgccctcctcagctcggaggcggcttggacttcacctagtatgttccaccatcagcaggagctcctacaggcagaagctgcggcggcagatcgggagagcagcatgtccaacaacctcacctcctccgcgcccggcggccccaacgcggcgccagctgctgctgcggccaccggcaataataacaagcgaaagcggagcctcccaggcaaccccgaccccgaggcggaggtcgtggctctgtctccggcgacgctgatggcgacgaaccgcttcttgtgcgagatctgcgggaaagggttccagcgggaccagaacctgcagctgcaccggcgcgggcacaacctgccgtggaagctgaagcagcggggcgcgggcaaggaggcgcagcggaagaaggtgtacgtgtgcccggaggcgtcgtgcgtgcaccacgacccggcccgcgcgctgggcgacctcacgggcatcaagaagcacttcttccgcaagcacggcgagaagaagtggaagtgcgacaagtgctccaagaggtacgccgtccactccgactggaaggcgcactccaagatctgcggcaccagggagtacaagtgcgactgcggcaccgtattctccaggcgggacagcttcatcacgcaccgcgccttctgcgacgcgctcaccgaggagagcgccaaggccatcggcggcgtcaacgccatggcagcgccggtgcaccaccaccaccacccgatgctcttctcgccgccgcccgcgcacgtcatgcagcagcaggacgtcctcctcctccaggagcatcaacaccaccagcaccagcagcagcagcaggaggacgatgtcatgcagcagccgccgccgcagcagtgcaactacgccatgaagacggagatgccgccgtggccggcgatggcctacgaccacccgctgctgcagccgctctgcaacgccgccgccgcagcggcggcgcagggctcggcggccacgtccgcgccgcagctgcccgcggcctccgcgcacctgtcggccacggcgctgctgcagaaggcggcgcagatgggcgccaccatcggcggcgcgggctacacccagatggcgggtcccgcgacgagcgccaccgccgccttcggcctcggcctcccgggcctgcagaatgcccagcaccaccacccgcagcagcaagatggcggcggcggggtcatggcggccgggctcgcgaggacagccagctcccacggccgcggcggcgacgaaggcggcggaggcggatcaggcgacggcatgaccagggactttctcggcctgcgcgccttctcccaccgcgacatcctcggcctcgctggcctggactcctcgtgcatgggcgccatcaccgccagcgccagcatgggctgctacgagccacagcaacaacatacacagcctcaggcgccgcagcagcagcaaagcagcaacgaaccatggcacggcatggggcagccatagctagcttaggtcgtcgctacccattctggc

SEQ ID NO: 113448 - DNA, 2321 bp, Zea Mays
gcctttcagcagattgctgcacacatccctctcgatttattgcctgccaccacacccctttttcttccgctatcttccttctcctagctagctagctaggtagacacacagtcacacacacatatcagtagtggtgtgtatatgatagtatacagcaagtgcaagatcatcaggcgaagctagctactagccgccctcctcagctcggaggcggcttggacttcacctagtatgttccaccatcagcaggagctcctacaggcagaagctgcggcggcagatcgggagagcagcatgtccaacaacctcacctcctccgcgcccggcggccccaacgcggcgccagctgctgctgcggccaccggcaataataacaagcgaaagcggagcctcccaggcaaccccggtaggtggtgggtggacgacgaccgaccgatcgatcgatcctgcttcttccctcctccctcgtcgtaattcgatccagtgattaatttatgagttgagttgagttggttctcggtcgctcgtttatgctctcttgacttgatggacggcttgaacatgtcgtcgtcgtcgtcagaccccgaggcggaggtcgtggctctgtctccggcgacgctgatggcgacgaaccgcttcttgtgcgagatctgcgggaaagggttccagcgggaccagaacctgcagctgcaccggcgcgggcacaacctgccgtggaagctgaagcagcggggcgcgggcaaggaggcgcagcggaagaaggtgtacgtgtgcccggaggcgtcgtgcgtgcaccacgacccggcccgcgcgctgggcgacctcacgggcatcaagaagcacttcttccgcaagcacggcgagaagaagtggaagtgcgacaagtgctccaagaggtacgccgtccactccgactggaaggcgcactccaagatctgcggcaccagggagtacaagtgcgactgcggcaccgtattctccaggcgggacagcttcatcacgcaccgcgccttctgcgacgcgctcaccgaggagagcgccaaggccatcggcggcgtcaacgccatggcagcgccggtgcaccaccaccaccacccgatgctcttctcgccgccgcccgcgcacgtcatgcagcagcaggacgtcctcctcctccaggagcatcaacaccaccagcaccagcagcagcagcaggaggacgatgtcatgcagcagccgccgccgcagcagtgcaactacgccatgaagacggagatgccgccgtggccggcgatggcctacgaccacccgctgctgcagccgctctgcaacgccgccgccgcagcggcggcgcagggctcggcggccacgtccgcgccgcagctgcccgcggcctccgcgcacctgtcggccacggcgctgctgcagaaggcggcgcagatgggcgccaccatcggcggcgcgggctacacccagatggcgggtcccgcgacgagcgccaccgccgccttcggcctcggcctcccgggcctgcagaatgcccagcaccaccacccgcagcagcaagatggcggcggcggggtcatggcggccgggctcgcgaggacagccagctcccacggccgcggcggcgacgaaggcggcggaggcggatcaggcgacggcatgaccagggactttctcggcctgcgcgccttctcccaccgcgacatcctcggcctcgctggcctggactcctcgtgcatgggcgccatcaccgccagcgccagcatgggctgctacgagccacagcaacaacatacacagcctcaggcgccgcagcagcagcaaagcagcaacgaaccatggcacggcatggggcagccatagctagcttaggtcgtcgctacccattctggcaccaaagctactttctgtgcgtcttcctctcatcagccgtactacatcgccgtcgctgcttcaattctgattatcgctgccgccgcgcgcggtgcagaggcaaaactagctacggccggccgcccagagtgcaacgcgtggcttttgagtcgggtaatctcatcgtctcccgcccctcacttcggtcatcttttgctcctgttcatgctgtcatcccgtctgaacttttaaccacgcaatgcaagcaagcctgcaagctaggatgaggatgatagattggattggataatacacaagtacgcagggagttgtgtaattttttttcaggttggggaagaagatcgaccaacatgtaaactaataagctcggttcaattaagcagatgggaagaacaccatagctacgtgacagtaataataatacatgcatgcgttcatcgtct

SEQ ID NO: 113449 - DNA, 118 bp, Zea Mays
cgaaataaggataaacatccgagttaatcttatctcgggacacgcggaccatccgggcctaagggccaggccgtccgctcattttggtgtccaacaccacgatgtcgactcggttagt

SEQ ID NO: 113450 - DNA, 281 bp, Zea Mays
cttcccttcgtgaggcacagccagatcagactattttatgagttcattagccaccctacatgaagtttttagaatacacccccttcgacagcataaatttgttcctcgagcagctcaaccctggtgattgtacaatcaaagggaacctcgatgccttctcatgtaagaaactaggaacatgcccattgcgtcttttgttgagcatgagctacatgctttcaataagctggtatattaatttgcagggaagcacactatgacgaccttcggctttcaacaaa

SEQ ID NO: 113451 - DNA, 401 bp, Zea Mays
tcctacgaggttcatagcaatggcggcaccggaatctctttccctcagtacaacgatggctacatggtgcaaacattaggtgagctacggcaagagctgttcaaccaagtggtgtttagtaaccacatgtgctctttccagtagggagagagcgaggacaaaagcgagtgataggatgacaggtaacacagcaaaatggtgtagccatgtttgaatatttaatgttgaaaagttatgatttattttttcttcttgtttttaaaatttgcaagagacaataatgttgagaactgtggaggtggaagctgccaccagatgagtttgtgatgttggacgcaatccattccctcgtgtggtggctgtaatggggaccatatgagtttgtgattttgagtaagcta

SEQ ID NO: 113452 - DNA, 719 bp, Zea Mays
ccgacgctgactcccacaccggccgccgcgcgagccccggcaccatctccgcacgagcagaaatgggggatgcgtgtttctcaacacagctaattgatggagatggggtcttcaacgtctctggattggagaacttcatgaaggatgccagattgggtgaatgcgggctctcctatgctgttgtatcaataatgggcccgcaaagtagtgggaaaagtacacttttgaatcatctttttggcaccaattttagggagatggacgccttcagaggaaggtcacagactaccaaaggtatatggttagcgaaggcccagaatattgaaccgtgcacccttgtaatggatttggaaggaactgatggaagggagaggggagaggatgacacagcatttgagaagcaaagtgcattgtttgctttggccgtttcagacattgtgttgattaatatgtggtgtcatgacattggtagagaacaggctgcaaacaagcctcttttgaagactgttttccaggtcatgatgaggttgttcagtcctcgtaaaacaacattgttgtttgtcattcgtgacaaatcaaggacacccctagaaaatcttgaaccaattttaagggaagacattcagaagatatgggatgctgttccaaaaccccatgcccataaagaaactccacttagcgaatttttcgatgtacaagttgtggcactgtccagttat

SEQ ID NO: 113453 - DNA, 789 bp, Zea Mays
ccgacgctgactcccacaccggccgccgcgcgagccccggcaccatctccgcacggcctccctcgacgtcgccggcgcgggggtggatctccgacctgaactttctctgattcctgattctattgagcagaaatgggggatgcgtgtttctcaacacagctaattgatggagatggggtcttcaacgtctctggattggagaacttcatgaaggatgccagattgggtgaatgcgggctctcctatgctgttgtatcaataatgggcccgcaaagtagtgggaaaagtacacttttgaatcatctttttggcaccaattttagggagatggacgccttcagaggaaggtcacagactaccaaaggtatatggttagcgaaggcccagaatattgaaccgtgcacccttgtaatggatttggaaggaactgatggaagggagaggggagaggatgacacagcatttgagaagcaaagtgcattgtttgctttggccgtttcagacattgtgttgattaatatgtggtgtcatgacattggtagagaacaggctgcaaacaagcctcttttgaagactgttttccaggtcatgatgaggttgttcagtcctcgtaaaacaacattgttgtttgtcattcgtgacaaatcaaggacacccctagaaaatcttgaaccaattttaagggaagacattcagaagatatgggatgctgttccaaaaccccatgcccataaagaaactccacttagcgaatttttcgatgtacaagttgtggcactgtccagttat

SEQ ID NO: 113454 - DNA, 896 bp, Zea Mays
gtacgttgtgaggaaattggtaatgagaaagtcggcagttttacatctgatgaggaatggcaacaattagaggaggctgttcaacatgactttgttcctggatttgggaagaagatcagcagccttcttgatagatgtttatcagagtatgacatggaggctatttattttgatgaaggtgtcagaagctctaaacggcaacagcttgagtctaaactcctacagcttgtcaatcctgcctatcaatctcttctaggtcacttgcgtactagaactttagaagcatttaatgagtcctttgacaaggctctagaaaaggagggatttgctgcagccgctcgcaattgtactcaaactttcttggagaagtttgataaaggatctgaagatgctgctattcaacaagtgaattgggacacctcaaaagtgaaggataagcttagacgtgacattgaggctcatgtagcttcagttcgagctgctaaattatctgaactttgtgccaaatatgaggcacaacttaccaaagctctggcggaaccagttgaatctcttctagattcagccagtgaagatacgtggccagctattagaaagcttcttcaacgcgagacaaaaactgccgtttcaggtcttcaatctgctgtgtcagcttttgaacttgatgaagcaactgagaaagaactgcttgtgaagctggagaagcatggaaggagtgttgttgagtcaaaggcaaaagaagaagctggaagggttttgattcgcatgaaggacaggttttcaatgctgttcagccgagatgctgactctatgcccagggtgtggacaggaaaggaggacataaaagctataactaaaaccgctcgctcagcttccatgaagttgctttctacaat

SEQ ID NO: 113455 - DNA, 1118 bp, Zea Mays
aggatggtgataacattgagaacactctttccgttgctcttgttgacacctcaaaacctgggactactgataggagtatccaattgaccgatccacttgcctccagttcatgggaaagggttggcgaggagaagactttaattacccctgtgcagtgcaaaaatttgtggaggcaattcaaggctgaaactgaatatacagtgactcaagccttagctgctcaggaagcaaataagaggaacaacaactggctaccacctccatgggcacttgctgcaatggctattcttggattcaacgagttcatgacattactgaggaacccgctttacctgtttgccatatttgtgatttatctcgttggaaaagccatttgggtgcaatcagaaatcggcagggaattccaacacggatttcttcctgccatcctttcactgtcgacgaagtttgtgcccactgtaatgaacatcctgaagagattagccgacgagggtcaagcacctgcagccgccccagagaggcagagagagatggagctccaaccaaaacccaccaggaacggttcttcatacaccaacgcgacgtcggcggggtcatccagcgtaaccacttcggagatcggacctgagtattcgagcccggtggcgcaatgatttagctgacctttagcctttggctggaagcccactctagcgcagttgagggaaacagggtgcctctcgagaacataggaacttaggaagattttaaggacagtcaggtgccttgcagttttttctaagcctgcccttcccccaaactgatgcaaggtggtgatggggtggcactgcccatcactattatttaaggatttttgggggctgggggggttgtttgtaagagcattgtagaatgatttcgtttaatttttttggtttctgtaacatgaatacatgatatgtgatggttgtatagaagatctggggggcgtagtagtgcccattctacacagcttatactgggcagggggttgcatagttgccagaagcttgtacatgtctttaaaccgccatcggattgcgatggagtagtattactggtgttctggaataacacggaggaacgtgttgtgacttggc

SEQ ID NO: 113456 - DNA, 1890 bp, Zea Mays
ccgccacccgctctccctccgctccggccaccaccgcgcgtctctcttatttgctgccagacatatccaaatccgatccatcagctagcgtccatggatgaagtgtggtgcggcctggacctgcagctgcaggcggacggcatccacgctggccctgacctccatggccatgaccatgaccccttctggtcagctctggcagagtgcgctgccagcttcctcgccagcgacgccgacgacaccggcggcctggtggcctccgctggcgacgtcgttcacgccaaggcggacggcatggacacgagcagcttcttcgccgacaacgaccaccacggcctgacccagcgccgagacgagcagcagcagcagcagcctgtgcactcgtcgtcctcgctgtcctccaaacgctcgctctccatcgacagcgggggctcctcgtcctccaccctcatcccgccgctcgacggcgccgccgctgccgccttctcgccggcgcccccgcagccgcaggacccgttcgccggggacgacgaggccatcatgctggccatgatggccgtcatctcctccgcgtcgccttcgtcctccgagtcctcgtcgccgccgcaccgagccgccggcgccggcgccgtgcagccgcgcgtacacctgcacggcggggacgacagcgccggccacgtgacggtcaggaccagcagcctcgccgtggcgcccaccagcgccgctgcacggcagcaggacgacgcctgcatggcggcggggagcaacaacagcagccaggtgtaccacatgatttccgagaggaagaggcgggagaagctcaatgacagcttccacacgctccggtcgctccttccaccctgttccaagaaggacaagacgacggtgctgacgaacgcggcgagctacctcaaggcgctggaggcgcaggtgtcggagctggaggagaagaacgccaagctggagaggcacgtcccccgcgacgacggcggcggcggcacggccgccacggcggcggcggtggcgcaccggagagccagagtgcatgtcgccagggcggcgccgggcgagccgcaggtgagcgtgacggtgatggtgatggtggagtgcgacatcgtcgacctggtgctgcgcgtcctggagtgcctccggtggatgggcggggtggtgagcgtgctgtccgtcgacgccgacacctactcgccgcaggcgatgctcaaggcgctcgccaacatcaagctgcacatcgtggacggcgactgctggaacgaggcgctgttccacgaggccatgacgaaggccgtgcacgacgcgacctcgccttcctcctcgccctcctgcgccgccgtggcccccctcgtggccgcagcctaagctcctgcatatgcatgcatgccgcggatcttccgccaagggtcgcatggctgtgggctgtgagagccgaccggttcagccgcgccatcgatcgtcatgcgtgcgtcagtcgcttcagcctctcggcagccatgcgtcgttgtcgtcgtcgaccattgaaacggtaaaacgtaccggcgccggtgacggacgagttcttctggaagaaagacgtacaacgagcgcgaggtcgggactgcaccgggggttagaggagttctagcaattaatataatttgtggttagcaagtaagaaaccctgtgttgccgccgtgatatgtgaccacgtacgtacgtagagaggttgcagaacatggaactgctgtctggttttaggttttgtgataccgtgtgggtgtggctagctagtgtgggcatgcatgttggcactccatcgtctgtaccaagtgagtgtggaggaattttgtacatagaaatcatacagagctcccatgagcagttcacatgaaatgaatg

SEQ ID NO: 113457 - DNA, 3393 bp, Zea Mays
cgtgttcttatctggaatgttcgaggattaaactcctcagctaggcaagcttctgttcgttccttagttgattctgctagaatagatatcgtctgtttacaagaaaccaaaatggatgttattagtcgtggaaccctcctttcagccttgggttctaatttcgatcaccatattgagctccctgctgttggttccagcgggggaattctggtagcatggaaacactgtgtggacaccactggagagttgtatgtgaggaataatagtgtatcggtgcagttctgcaattgtaatgggagaacatggtggctcacttgcgtgtatggcccacagggaaacagtgaaaaagtcctttttttgcaggagcttagggacctgagattgctgtgtcatggcccttggatgattgctggtgatttcaacatgatttataaagctgaagataagaataatactaacataaaccgagttatgatgggaagatttcgtagcttcatcaatgatcttgctctaagtgagcttcctttaattggtcggaaattcacttggtctagtcagcagaatcccccaaccctagtgaaacttgatagagttttatgcacactggactgggtggatttgtttccaaattccttacttcagagttctgcctccaatgactcagaccactgccccctccttttgggcctgaatgacaatagtatggcaggaaggcgcaggtttcattttgagtccttttggcctaagtttgagggatttctggaggctgtttcgttggcctggcattctgttccagctgtgcagtgtccttttgcaacgttgaactctaaactgaaagctactgctcgtgggctgcaggcttggagtgctaaaaaggttgggcatatttcagcctctttagcccttgcccgtgttctcctgcaccagttggaaattgttcaagacagtcgtggtctttccccagctgagctatggtttctcttatgccttaagaaacactcccttgctctatcttcacttcaaaggacaattgccaggcttcgttccagaattgggtggctgcgtgagggtgatgctaatactaaattattccacatgcattcaagattccgcaagaagaagaattttgttcctaaattaatctctaatggtgctgtcctaaccagccatgatgccaaagctgatctggtcaacgaattctatggcaatcttttgggacaatgcagcgatagagagcaaactatctctctggaaagtttgggaattccttgtcatgatctgtcagccttagatgcaccattcactgagaaagaggtatgggacacaattttgcaccttccttcggacaaggctccagggccagatgggttcacaggaaaattctatagagtctgctgggagattattaaggctgatgttatggctgttttctcggcggttgggagcagaaggttcgctaattttcagatccttaatactgcttatatcacccttattccaaagtttgagggggccgatcaagttaaaaatttcagacctatcagtttagttcatagtgttgcaaaattgctcactaaacttctcgctaatcgtttggctggaaggcttcatgatatggtttctcctaaccaaagtgcttttattaaaggtcgcttcattcaggataattatatgttggtgcagcaaaccacccgctacctccatcaacagaagcaacctaggatgcttctaaagcttgatatctcaaaggcctttgattcagtctcatggcccttcctcctggaagtcttgcaacatttgggttttggccaagtatggagagatattattagtggcttgctatggacttcctcatctcaggtgttacttaatgggttacctggacaacctattcttcatcgtcgtggtctccggcagggggatcctctgtctccttttctgttcatcttggtcatggatactctgggcttcttgattaataaggccgcacaggatggactgctgcagccccttgctcctcgagcattgcaacaccgggtttctctctatgcggatgatgtggtgatctttcttcggccggcagccatggatatcaatgttattctagattgtcttcagctgtttggagatgcttcgggtttacgaacgaatgttcagaaaagcagcgtgtaccctattagatgtggagatcaggaccttgctttgttgcagaacatgttgccttgtgagttagctgaattcccttgccgctatctgggtttaccgcttgccattaaaaagctttcaaaaatccaagtacaacccatcattgataagattgcaaatcaactctccggatggaaggctgagttattgactaaagctggtcgtaaggtgcacgtccagcatgttctcacagggatggtgatctacttggccatggctgttgaccttccagcttgggcccttaaagccattgataagattcgtcgaggttttctgtggcgaggtcgaagagatgtaaaaggtggccactgtcacgtggcttggggaattgtttgtaggcctcgcgaattgggtggtctaggcatttccagcatgaaagaacttgcttggtctcttagaatgagatggctttggctggctaaaactgagccatctcgcccgtgggcctctcttgctatccaggttcccaaaaaggtaaaagatttcttctccatggctatgcaaactaagcttggaaatggggctacaacctttttctggaccgataggtggttatcgggtcacagaattgcagagttagtccctcgattatttgggatcatccctaagagacgggttagcaagagaacagtggtggatgctatctctaatcagagctggatttctgacattcaaggagctctttcggttggaattatcaatgaatttctcattttgtgggatttaattgactcaattgttttaagacctcaagttgaagacaaacatttcttccgtctagctgcaaacggaaagttctcctcaaaggaagcatataggaaggtttggacggcagacaggctgcagaaaagaggtatggaccatccagagagatgtccactatgtgaccaggatcaagaaaccttggaccatatgttgattggatgtgtttttgctcgtgaattctggtttaaattgcttcttcaagtgaacctgcagtttcttgccccccaatctgaggatagtgcttttcttgaatggtggagaatgttatgtatcaaagtctctggaattgcaagggatggcctcaattctctagtcattctgggagtttggaccttatggaagcaacgcaatggatgtgtttttgacaataagaaccccagtattgctgatgctattagaagagttgagttggaggttcaccta

SEQ ID NO: 113458 - DNA, 1196 bp, Zea Mays
aacagctaccgactgggctattatttctccccgcgtgctctctctcgccgactaggctattgccgccgccgccctacaccagatgcccagttcttcgtcagccccttctccggcaacgagcacctaacagaggctgcagtatattctgtgagaatggcatggggtcaaggtgctaagaggtccatactagggcttctctttcgttctcagcaccaaactgctcgggcatactcttcttcagcattccagactcaccaattgagcactcatgttccccaagatggagtgtttattaggagattcggctctgaggtgtcttcttcagagcaaatgaaccttattaagcaactcagacaaagaacgagtgctccaatcaaagatgtcaaggcctctctagttacctgcaactgggatattgaggctgcacagaaggacctaaggaagagaggtgttgctcttgctgccaaaaagtcttcacgcactgctgctgaaggtttgctagctatcgcacaagatgacaaaagggctgctgtagttgagcttaactgtgaaactgatttcgtagcaagaaatgatgttttccagtacctggcttcatcattggcaaagatggctttatctgctcagggtcctggtgaattgttcatgccttttggtcctgagcttttagagaacatgcctatcaatctagatcaccctaagctcagtgtggaaacaactgtccaaagtgccgttacagaagttgctgcaatggttggggagaatgtgaaactcagaagaggcttcatgctttccacaactgcacatggtgttgtttcatcttatatgcatacctgccctcagccaggtgatggaatctcagttgtctgtgtttcttttcaagaatgtatattctttactcttcagattttattacccccctccccccaaggctaagttagattaaccattaccaatactcagcagtcttctactgaccagggagcatgcttacatgcttctcaccttttctaaccacttcactattctaaagctttttgacaactagaaaccacagttcgtttgtgtgtattcacgctaattctagtaactaatctattttcttagatttgttactgatgaaataatttattatcctgttttactggtatacggatgttttttaaaaattttgatgatagtgcggccatggatgt

SEQ ID NO: 113459 - DNA, 1602 bp, Zea Mays
aacagctaccgactgggctattatttctccccgcgtgctctctctcgccgactaggctattgccgccgccgccctacaccagatgcccagttcttcgtcagccccttctccggcaacgagcacctaacagtatattctgtgagaatggcatggggtcaaggtgctaagaggtccatactagggcttctctttcgttctcagcaccaaactgctcgggcatactcttcttcagcattccagactcaccaattgagcactcatgttccccaagatggagtgtttattaggagattcggctctgaggtgtcttcttcagagcaaatgaaccttattaagcaactcagacaaagaacgagtgctccaatcaaagatgtcaaggcctctctagttacctgcaactgggatattgaggctgcacagaaggacctaaggaagagaggtgttgctcttgctgccaaaaagtcttcacgcactgctgctgaaggtttgctagctatcgcacaagatgacaaaagggctgctgtagttgagcttaactgtgaaactgatttcgtagcaagaaatgatgttttccagtacctggcttcatcattggcaaagatggctttatctgctcagggtcctggtgaattgttcatgccttttggtcctgagcttttagagaacatgcctatcaatctagatcaccctaagctcagtgtggaaacaactgtccaaagtgccgttacagaagttgctgcaatggttggggagaatgtgaaactcagaagaggcttcatgctttccacaactgcacatggtgttgtttcatcttatatgcatacctgccctcagccaggtatgggtcgtatagctggattggtcacactagaaacagaagacagcagtactcttcttgattctgtcaaaagtgttgggtcatctattgcgatgcatattgttgcggcaaagccattattcttatcaaaagaactggtttctgcttcggctttagaaaatgagcgtgaaatacttcgaactcaggcccaaagttcagggaaatcccaaatggctatggataagatggtggaaggacgattgaggaagtactttgaggaagttgtgctcatggagcaaaaatatgttttaaatgacagcactaacattaagaccgtgctgaatgacttgtcgaaagaggttggttctaaggtaacaatcggtaacttcatcagaatggaggttggcgaagggattgagagaactgaagccgctgatggtttagaggttgctggtggcgctatgtagattccaggcagagatggttcgaacgagatcattaggatctatatgaaggtcccacttctctaaagttggggggccttggttttttccaataaaacttttgggctctcatctttgctccattggattgttacaggtgtgggctaggacggagataatgtttaggcaggcactagcgttctgggacctgcgaggctgcctagttgatttgtcagttcctagcttgtttggttacagttttggttgaaccctctctgattgaattacagttcgtgtggacgtataaaaaatcgaaatagagtgggaattgccccttgaact

SEQ ID NO: 113460 - DNA, 1731 bp, Zea Mays
aacagctaccgactgggctattatttctccccgcgtgctctctctcgccgactaggctattgccgccgccgccctacaccagatgcccagttcttcgtcagccccttctccggcaacgagcacctaacagtatattctgtgagaatggcatggggtcaaggtgctaagaggtccatactagggcttctctttcgttctcagcaccaaactgctcgggcatactcttcttcagcattccagactcaccaattgagcactcatgttccccaagatggagtgtttattaggagattcggctctgaggtgtcttcttcagagcaaatgaaccttattaagcaactcagacaaagaacgagtgctccaatcaaagatgtcaaggcctctctagttacctgcaactgggatattgaggctgcacagaaggacctaaggaagagaggtgttgctcttgctgccaaaaagtcttcacgcactgctgctgaaggtttgctagctatcgcacaagatgacaaaagggctgctgtagttgagcttaactgtgaaactgatttcgtagcaagaaatgatgttttccagtacctggcttcatcattggcaaagatggctttatctgctcagggtcctggtgaattgttcatgccttttggtcctgagcttttagagaacatgcctatcaatctagatcaccctaagctcagtgtggaaacaactgtccaaagtgccgttacagaagttgctgcaatggttggggagaatgtgaaactcagaagaggcttcatgctttccacaactgcacatggtgttgtttcatcttatatgcatacctgccctcagccagcttcaggtatgggtcgtatagctggattggtcacactagaaacagaagacagcagtactcttcttgattctgtcaaaagtgttgggtcatctattgcgatgcatattgttgcggcaaagccattattcttatcaaaagaactggtttctgcttcggctttagaaaatgagcgtgaaatacttcgaactcaggcccaaagttcagggaaatcccaaatggctatggataagatggtggaaggacgattgaggaagtactttgaggaagttgtgctcatggagcaaaaatatgttttaaatgacagcactaacattaagaccgtgctgaatgacttgtcgaaagaggttggttctaaggtaacaatcggtaacttcatcagaatggaggttggcgaagggattgagagaactgaagccgctgatggtttagaggttgctggtggcgctatgtagattccaggcagagatggttcgaacgagatcattaggatctatatgaaggtcccacttctctaaagttggggggccttggttttttccaataaaacttttgggctctcatctttgctccattggattgttacaggtgtgggctaggacggagataatgtttaggcaggcactagcgttctgggacctgcgaggctgcctagttgatttgtcagttcctagcttgtttggttacagttttggttgaaccctctctgattgaattacagttcgtgtggacgtataaaaaatcgaaatagagtgggaattgccccttgaactttttgcactgagtctggagtgaattagtgttagtgcaaagtagttgttttagctgtcatttttgtattaattaaactttgctagaatgacttgtgagtttgtaggataccttttgcaggctat

SEQ ID NO: 113461 - DNA, 1623 bp, Zea Mays
tctccccgcgtgctctctctcgccgactaggctattgccgccgccgccctacaccagatgcccagttcttcgtcagccccttctccggcaacgagcacctaacaggctgaaaaaaaatcattgatacacgtacgccgtcagaggctgcagtatattctgtgagaatggcatggggtcaaggtgctaagaggtccatactagggcttctctttcgttctcagcaccaaactgctcgggcatactcttcttcagcattccagactcaccaattgagcactcatgttccccaagatggagtgtttattaggagattcggctctgaggtgtcttcttcagagcaaatgaaccttattaagcaactcagacaaagaacgagtgctccaatcaaagatgtcaaggcctctctagttacctgcaactgggatattgaggctgcacagaaggacctaaggaagagaggtgttgctcttgctgccaaaaagtcttcacgcactgctgctgaaggtttgctagctatcgcacaagatgacaaaagggctgctgtagttgagcttaactgtgaaactgatttcgtagcaagaaatgatgttttccagtacctggcttcatcattggcaaagatggctttatctgctcagggtcctggtgaattgttcatgccttttggtcctgagcttttagagaacatgcctatcaatctagatcaccctaagctcagtgtggaaacaactgtccaaagtgccgttacagaagttgctgcaatggttggggagaatgtgaaactcagaagaggcttcatgctttccacaactgcacatggtgttgtttcatcttatatgcatacctgccctcagccaggtatgggtcgtatagctggattggtcacactagaaacagaagacagcagtactcttcttgattctgtcaaaagtgttgggtcatctattgcgatgcatattgttgcggcaaagccattattcttatcaaaagaactggtttctgcttcggctttagaaaatgagcgtgaaatacttcgaactcaggcccaaagttcagggaaatcccaaatggctatggataagatggtggaaggacgattgaggaagtactttgaggaagttgtgctcatggagcaaaaatatgttttaaatgacagcactaacattaagaccgtgctgaatgacttgtcgaaagaggttggttctaaggtaacaatcggtaacttcatcagaatggaggttggcgaagggattgagagaactgaagccgctgatggtttagaggttgctggtggcgctatgtagattccaggcagagatggttcgaacgagatcattaggatctatatgaaggtcccacttctctaaagttggggggccttggttttttccaataaaacttttgggctctcatctttgctccattggattgttacaggtgtgggctaggacggagataatgtttaggcaggcactagcgttctgggacctgcgaggctgcctagttgatttgtcagttcctagcttgtttggttacagttttggttgaaccctctctgattgaattacagttcgtgtggacgtataaaaaatcgaaatagagtgggaattgccccttgaactt

SEQ ID NO: 113462 - DNA, 1645 bp, Zea Mays
tctccccgcgtgctctctctcgccgactaggctattgccgccgccgccctacaccagatgcccagttcttcgtcagccccttctccggcaacgagcacctaacaggctgaaaaaaaatcattgatacacgtacgccgtcagaggctgcagtatattctgtgagaatggcatggggtcaaggtgctaagaggtccatactagggcttctctttcgttctcagcaccaaactgctcgggcatactcttcttcagcattccagactcaccaattgagcactcatgttccccaagatggagtgtttattaggagattcggctctgaggtgtcttcttcagagcaaatgaaccttattaagcaactcagacaaagaacgagtgctccaatcaaagatgtcaaggcctctctagttacctgcaactgggatattgaggctgcacagaaggacctaaggaagagaggtgttgctcttgctgccaaaaagtcttcacgcactgctgctgaaggtttgctagctatcgcacaagatgacaaaagggctgctgtagttgagcttaactgtgaaactgatttcgtagcaagaaatgatgttttccagtacctggcttcatcattggcaaagatggctttatctgctcagggtcctggtgaattgttcatgccttttggtcctgagcttttagagaacatgcctatcaatctagatcaccctaagctcagtgtggaaacaactgtccaaagtgccgttacagaagttgctgcaatggttggggagaatgtgaaactcagaagaggcttcatgctttccacaactgcacatggtgttgtttcatcttatatgcatacctgccctcagccaggtatgggtcgtatagctggattggtcacactagaaacagaagacagcagtactcttcttgattctgtcaaaagtgttgggtcatctattgcgatgcatattgttgcggcaaagccattattcttatcaaaagaactggtttctgcttcggctttagaaaatgagcgtgaaatacttcgaactcaggcccaaagttcagggaaatcccaaatggctatggataagatggtggaaggacgattgaggaagtactttgaggaagttgtgctcatggagcaaaaatatgttttaaatgacagcactaacattaagaccgtgctgaatgacttgtcgaaagaggttggttctaaggtaacaatcggtaacttcatcagaatggaggttggcgaagggattgagagaactgaagccgctgatggtttagaggttgctggtggcgctatgtagattccaggcagagatggttcgaacgagatcattaggatctatatgaaggtgtgggctaggacggagataatgtttaggcaggcactagcgttctgggacctgcgaggctgcctagttgatttgtcagttcctagcttgtttggttacagttttggttgaaccctctctgattgaattacagttcgtgtggacgtataaaaaatcgaaatagagtgggaattgccccttgaactttttgcactgagtctggagtgaattagtgttagtgcaaagtagttgttttagctgtcatttttgtattaattaaactttgctagaatgacttgtgagtttgtaggata

SEQ ID NO: 113463 - DNA, 1644 bp, Zea Mays
tctccccgcgtgctctctctcgccgactaggctattgccgccgccgccctacaccagatgcccagttcttcgtcagccccttctccggcaacgagcacctaacaggctgaaaaaaaatcattgatacacgtacgccgtcagaggctgcagtatattctgtgagaatggcatggggtcaaggtgctaagaggtccatactagggcttctctttcgttctcagcaccaaactgctcgggcatactcttcttcagcattccagactcaccaattgagcactcatgttccccaagatggagtgtttattaggagattcggctctgaggtgtcttcttcagagcaaatgaaccttattaagcaactcagacaaagaacgagtgctccaatcaaagatgtcaaggcctctctagttacctgcaactgggatattgaggctgcacagaaggacctaaggaagagaggtgttgctcttgctgccaaaaagtcttcacgcactgctgctgaaggtttgctagctatcgcacaagatgacaaaagggctgctgtagttgagcttaactgtgaaactgatttcgtagcaagaaatgatgttttccagtacctggcttcatcattggcaaagatggctttatctgctcagggtcctggtgaattgttcatgccttttggtcctgagcttttagagaacatgcctatcaatctagatcaccctaagctcagtgtggaaacaactgtccaaagtgccgttacagaagttgctgcaatggttggggagaatgtgaaactcagaagaggcttcatgctttccacaactgcacatggtgttgtttcatcttatatgcatacctgccctcagccaggtatgggtcgtatagctggattggtcacactagaaacagaagacagcagtactcttcttgattctgtcaaaagtgttgggtcatctattgcgatgcatattgttgcggcaaagccattattcttatcaaaagaactggtttctgcttcggctttagaaaatgagcgtgaaatacttcgaactcaggcccaaagttcagggaaatcccaaatggctatggataagatggtggaaggacgattgaggaagtactttgaggaagttgtgctcatggagcaaaaatatgttttaaatgacagcactaacattaagaccgtgctgaatgacttgtcgaaagaggttggttctaaggtaacaatcggtaacttcatcagaatggaggttggcgaagggattgagagaactgaagccgctgatggtttagaggttgctggtggcgctatgtagattccaggcagagatggtgtgggctaggacggagataatgtttaggcaggcactagcgttctgggacctgcgaggctgcctagttgatttgtcagttcctagcttgtttggttacagttttggttgaaccctctctgattgaattacagttcgtgtggacgtataaaaaatcgaaatagagtgggaattgccccttgaactttttgcactgagtctggagtgaattagtgttagtgcaaagtagttgttttagctgtcatttttgtattaattaaactttgctagaatgacttgtgagtttgtaggataccttttgcaggctattcacccatcttttgcc

SEQ ID NO: 113464 - DNA, 2772 bp, Zea Mays
atgtgggtgccaagcaggaaggctgccgctggtctgctatggactggtcgtcgaggtggtggtgatggacgacaagatgcagaccggcaatcagggctggaaaggagtgctgacaggtgttgggggggtagtgcaaggcaactgtttcagcgccttcaaggaccgtttgaggaagggactctcaagacacacttcgagaaaataatattgcttggtcaaaaattgcatcaaactcgtagaaaggatgagatccatgagctgaggcaaaaaaatccacttcatacttctcatggttttgcactttctcaagcatgtccagggaacttatctggtgtcattttgacgccacttgacctttgcgatggaccttcgaactcggatgcacttacaggatccaatacaagtgggttaggtctttcaaacaataactgctctgttggtcctactcttcctacatcaaatatgaacttaagattaccaggttctcctggtatggttttgggaagcaattcaccattgcctttgaatgctccctctagggatgttcagaggtatggtgtgcctagaccaacctcgatacagggtgacgagcaatcaagaattcattataaccagatggtaaatggcagaaaccttcagcaacctggagttcctgttcctggtgtgttgccatctggtgttgatcggggtgcccgaatgatgccacctgcccatggtgttggaatcatggctggactaaatcgaggtacacctattactaggccaggttttccaaggcttggttctcttggaaacatgtcacccaccgatggtcaaggcttaaaaaatactgtaaacgttcatcctggtgccatactgggacctggaagtactatgttgaggccacgtgacccaatgcagatgtttagacctggccagaattcagaggagcatagacagatgatgatgccagagtttcagttacaagtctcgcaaggaaataatcatgctgtgcatttcagcggtccaccatattccaacactggggcatcttcacctgttcaatctttacctgcccagcagtcccaaccacatcagatgccacaacaatcacacatgtatggaaacacacaccttcttcatacccaaggaacaaaccagtcaaatccacagcaacagcaggcttatgctatgcgcttggccaaagagaggcatatgcaacagatgatgccccaacaacagcgtccattatctgttgccagtgcagtgtcagctgtacagaatggctcaccgatgcaacagcagagccaaggatctgcaacttgcgtaatcccagctacacagacacaacataagcagcaatatcctgcacaaaatgcacaagataactcaatgcttccccatcagccttcagccaccactacacataaacagaagaagcaacagggccagcagcagcctagacaaaatcaacagcaacgaaatcaaggcagtcaacaagctaagcttatgaagagtttaggccgagggaacatgatgcagcagagtcctgtggatgttattcaagcaagtggcatatcaacaagctgtaaagatcaagttcctgataagaatatgatgcaacagggtccagggcattttgttgtaagtaaaggatcaatcccattgatacctcaacctgggaatcaaccaaatgtatacacttctcagatgcctccgtctccaatgcagacaccggatattagtaatcagggtgcagtcaagggttcttccaaccatgccttgttaacttcccagcaaggttcactccatacgccttcacagttggcacagcagcagcagcagcaactacggttcatgaatccgtcacagaataatatgcaaaggttgataatgcaacagaatcggcatgtgaacacagatggcaggattgagttacctgctgaccaagtacagcataaccaggtaatgtcatctgcctcacttgcaagaagtacagattcaggcagcccaggaatctcatctataagccagcggaaacaagagtcatctcatgacccaagtgcaattacctcaacctcgcagctagctagctcacctcaagacacctttgttggaagtgatagggtgttgccatcatccagccaaagcatgccgcaaaggcaaatgtccggtggtgtgcctgtacatggatatggcattggtggccaggtgcagctacaacagtctcggcagcaactccagtctcagcagcagcagcagcagcagcagaggcctgttgtccaaggtggtgtatatgctcacccctcaaattcaggacaaggatgatgctgaaccatactgggcctgcatttctgaagagcctcccttccccttgtaaagttacctgtacaggcgtccgtgctgtggaagatgtgtgcggatgatagtgctctttattcccaactttgagctaactgtagcctcctcggtgtcaggtagataattatttctcctcaccattttggtgccacactgctaccttccatgtagtttgaccctaggttgctggaggtggttcttgtgagggcaaactccttgagtcgtcaaattgtaaccacgacactgggcccagttgtatatttttgccgttgaggtccatgttagaggcaatctcttttgtataagcctgtatattcagctcacaagccagtcaatgaatgcaaagcctttctttgcgtcaaaccaggaatgtaaaaagcttgagcgttttgcgtcgatcacttatcttaacttgtcgtattcaactccgtc

SEQ ID NO: 113465 - DNA, 2658 bp, Zea Mays
gaatttttgtcattgtgtgtgctcataaaggtagcagcctatgtttggtaggaagtaacgtgataacggaaaccacaaaagccaaaagtttctacaggacgatgaccacccttgtggtgttgtatcccatgtgacctaaagatgacacattcaacaattaagtttagttgagatatgtatgttgtgtagcgaagagggtaaggtgtggcaatgagtatagaaaagcttattcaacattggatctgtggttatagaataagctatcgaatctaaaatgatctatgtggacaggttgtggtaggggttggcgtttgggtggatcgaagaaaaagattctccaatgttattttgtggtgggttcagaattttgtacatatccggcgaagcctccagacatgggtggaagcatttaagagatatttagagtagatggattatactccaaggaactgtatttatataatagcgtgatgaaattagcagtccctatgttagaaccatgacctaggatattaatgtttgttactactattactaacttgcttgaggcaaaaaggtttactggttactattgtgtcaaataaaaagcttagttcgttaattttgtttgagcaaggaaagttatggataaatttagaatttccatttgtgcttttctgcagttactaatactattatctgtttcttgtagcctggccagaattcagaggagcatagacagatgatgatgccagagtttcagttacaagtctcgcaaggaaataatcatgctgtgcatttcagcggtccaccatattccaacactggggcatcttcacctgttcaatctttacctgcccagcagtcccaaccacatcagatgccacaacaatcacacatgtatggaaacacacaccttcttcatacccaaggaacaaaccagtcaaatccacagcaacagcaggcttatgctatgcgcttggccaaagagaggcatatgcaacagatgatgccccaacaacagcgtccattatctgttgccagtgcagtgtcagctgtacagaatggctcaccgatgcaacagcagagccaaggatctgcaacttgcgtaatcccagctacacagacacaacataagcagcaatatcctgcacaaaatgcacaaggtagctcaatgcttccccatcagccttcagccaccactacacataaacagaagaagcaacagggccagcagcagcctagacaaaatcaacagcaacgaaatcaaggcagtcaacaagctaagcttatgaagagtttaggccgagggaacatgatgcagcagagtcctgtggatgttattcaagcaagtggcatatcaacaagctgtaaagatcaagttcctgataagaatatgatgcaacagggtccagggcattttgttgtaagtaaaggatcaatcccattgatacctcaacctgggaatcaaccaaatgtatacacttctcagatgcctccgtctccaatgcagacaccggatattagtaatcagggtgcagtcaagggttcttccaaccatgccttgttaacttcccagcaaggttcactccatacgccttcacagttggcacagcagcagcagcagcaactacggttcatgaatccgtcacagaataatatgcaaaggttgataatgcaacagaatcggcatgtgaacacagatggcaggattgagttacctgctgaccaagtacagcataaccaggtaatgtcatctgcctcacttgcaagaagtacagattcaggcagcccaggaatctcatctataagccagcggaaacaagagtcatctcatgacccaagtgcaattacctcaacctcgcagctagctagctcacctcaagacacctttgttggaagtgatagggtgttgccatcatccagccaaagcatgccgcaaaggcaaatgtccggtggtgtgcctgtacatggatatggcattggtggccaggtgcagctacaacagtctcggcagcaactccagtctcagcagcagcagcagcagcagcagaggcctgttgtccaaggtggtgtatatgctcacccctcaaattcaggacaaggatgatgctgaaccatactgggcctgcatttctgaagagcctcccttccccttgtaaagttacctgtacaggcgtccgtgctgtggaagatgtgtgcggatgatagtgctctttattcccaactttgagctaactgtagcctcctcggtgtcaggtagataattatttctcctcaccattttggtgccacactgctaccttccatgtagtttgaccctaggttgctggaggtggttcttgtgagggcaaactccttgagtcgtcaaattgtaaccacgacactgggcccagttgtatatttttgccgttgaggtccatgttagaggcaatctcttttgtataagcctgtatattcagctcacaagccagtcaatgaatgcaaagcctttctttgcgtcaaaccaggaatgtaaaaagcttgagcgttttgcgtcgatcacttatcttaacttgtcgtattcaactccgtcaccacggctggctagtcttcctccttgtcgtgcaggtgtttcacatcgttagcaagaacgtcagcatcgtcttttctacccaatcatcataaaaaaaaaagaaa

SEQ ID NO: 113466 - DNA, 655 bp, Zea Mays
gtgtccatcggcatatatccacacctgagtcccctccgccgcctgccgcactctcctgcgacgccacaaccacacgttcacggtagcgagagcttatcgtcgtcggcggtgaagatggtgtcgctgaagctgcagaagcggctcgccgctagcgtcctcaagtgtgggaaaggcaaagtctggcttgaccccaatgaagtcagcgagatctccatggctaactcccgtaagatttatcttcttccccacgttgattaattgctcactgggctgtgttcgtatggatctgtggctgagttatttaccttcttggttcgggatggttcggttggacggattatgctcgacgtttgctgtaatttttgaaactcttgtatggtcaaaggtggataatttatctggtttgcatgccctggctgccgttgcttatattggatcgatctctgcactattctttccaccatcacgttacggtgtttacctgcggccacacttagaaacctgtttatgtctagtactctagtttgtaggctctacctgttctagcttgttacttgtagtactatttaagctgatggcgcagtggtaaagccgctgctttgtgaccaggaggtcacgggttctgagtggtggaaaccgcctcttgtaagtgccg

SEQ ID NO: 113467 - DNA, 1047 bp, Zea Mays
gtgtccatcggcatatatccacacctgagtcccctccgccgcctgccgcactctcctgcgacgccacaaccacacgttcacggtagcgagagcttatcgtcgtcggcggtgaagatggtgtcgctgaagctgcagaagcggctcgccgctagcgtcctcaagtgtgggaaaggcaaagtctggcttgaccccaatgaagtcagcgagatctccatggctaactcccgccagaacatccggaagttggttaaggatgggtttatcatcaggaagcctcagaaggttcactctaggtcccgtgcaagaagggcacatgaggccaagcagaagggaaggcactctggatacggcaagcgcaggggtaccagggaggctaggctccccaccaagattctgtggatgaggaggatgcgtgttctgaggcgcctgctccgcaagtaccgtgaggccaagaagatcgacaagcacatgtatcatgacatgtacatgaaggtcaagggtaatatgtttaagaacaagagggtgcttatggagagtatccacaagtccaaggctgagaaggccagagagaagacactttctgatcagtttgaggccaagcgtgcaaagagcaaggcaagccgtgagaggaagattgctaggagggaggagaggctggcccagggcccaagagaaccaacagcacctgtcgcagccccagctccatctactgggtaagtgtcttggaactaggttttgtttccttggattttatcatgtttttttggttattgacgtgtttttcacccatgtcgcagggtgccaaagaaagcaaagaagtgaagtatggaaacaaagctgtagctttttggtactatataagcatgactttggagcacctgaagtattttgctgttatatagttcgtgtctcaatattctgagtcttgtatctctaccgttctgttggataatgcatgccgtaagagttgtttatggagcttttgttgttacaggacccctaaaaatgtttgtttgacggatgtttggaattgtggtcatgtttatg

SEQ ID NO: 113468 - DNA, 1070 bp, Zea Mays
gtgtccatcggcatatatccacacctgagtcccctccgccgcctgccgcactctcctgcgacgccacaaccacacgttcacggtagcgagagcttatcgtcgtcggcggtgaagatggtgtcgctgaagctgcagaagcggctcgccgctagcgtcctcaagtgtgggaaaggcaaagtctggcttgaccccaatgaagtcagcgagatctccatggctaactcccgccagaacatccggaagttggttaaggatgggtttatcatcaggaagcctcagaaggttcactctaggtcccgtgcaagaagggcacatgaggccaagcagaagggaaggcactctggatacggcaagcgcaggggtaccagggaggctaggctccccaccaagattctgtggatgaggaggatgcgtgttctgaggcgcctgctccgcaagtaccgtgaggccaagaagatcgacaagcacatgtatcatgacatgtacatgaaggtcaagggtaatatgtttaagaacaagagggtgcttatggagagtatccacaagtccaaggctgagaaggccagagagaagacactttctgatcagtttgaggccaagcgtgcaaagagcaaggcaagccgtgagaggaagattgctaggagggaggagaggctggcccagggcccaagagaaccaacagcacctgtcgcagccccagctccatctactggggtgccaaagaaagcaaagaagtgaagtatggaaacaaagctgtagctttttggtactatataagcatgactttggagcacctgaagtattttgctgttatatagttcgtgtctcaatattctgagtcttgtatctctaccgttctgttggataatgcatgccgtaagagttgtttatggagcttttgttgttacaggacccctaaaaatgtttgtttgacggatgtttggaattgtggtcatgtttatgaaaattagtgttgtgggtcttcgtgtgattgagcttgtaaattcggtgccatcagcgctgtgttagtgctgcgttagttccacgcgcagatgagctggacggacgtc

SEQ ID NO: 113469 - DNA, 282 bp, Zea Mays
atgaataaactcatcaaactcgatcacaccatttttcttctcatcaaacaaataaaaaactctatcaagaaaaagattctcgccgcttggagttttgaacagtgccagctgaagttcttccttgtggatgaggccgtcgtcgatgatggagcagctgatcttcttgtagagctcaaagagcgcctccacctcgttcaccgagaagcatcgggactcgtcggcgaggcgtgcgagctggcggaggttgggggaggtccatccacccgcagtggcgcggcgtag

SEQ ID NO: 113470 - DNA, 444 bp, Zea Mays
atggcgatgacggggaagaagaccgcgcagaggcgctcccccaacgacagcgagctctcggaccgctgccagggaagaaaacagacgaggaaccatgagatgaatccagagaagaggagagatctaccaagaacccgctggggatactcgccgggagaagggtggacattgcagccacctggcacctaccacgccgccggaggaggagcgggagttcatggcgaccgggcgccctgggcctggagtgaactgggaagccgcctcagtggctcgtggcattcgtgcgccgctttaaggctgtcaagcaacgaaaaaacgaactcgatggcgacagggaacgggatcgcaccatcaggcatcagcctcgggcagtgtttctgcctctgcctgcatgaggattcaacacccttggtcaccggggatcacggatcaccgtccatgtga

SEQ ID NO: 113471 - DNA, 1467 bp, Zea Mays
tttttattttgaaatggctttcagtagacaatactcgtggctttctattaaaaatatttgtggattcacttaaaatcatttttggattttttaaacaaataattcaacgaaatctttcagtaccctatctacattatttaaagacgccatagaataaggtgtgccaacgatcaaaatgaaaattactgagatgtcccctcggacacacagtggtcaaccgacgccgccggttggtgcccggatccttgtccgccctcctgctcactccactcgcctgccagccgcacaccaatcacctctgcggccggcggcgtctgcaacgccagtctctgatccgaccccgatcggcacacacgttctccatggcggagcagctcgcatcccaagatgctcccaatccccctgctccggcacagagggtactgatgacgaacacgcatggggagaaactcgtcggcctgctgcaccacatggggtctgacaaggttgtagttctctgccatggctttacgggctccaaggactatagcctcatcactgaccttgcggccgcactaacaaagcaagggattagtgtgtttcgctttgattttagtggaaatggagaaagtgaaggtgaattccagtacggcaactacaagaaggaggctgctgacttgcactctgttgtcttgtatcttcgccaggagaagtacgacgtagcagcaattgttggtcacagcaaaggtggagatgtggtcgttctatatgcctctatctacaaggatgtccccatggtggttaacctctctggccggtttcatttggagaaaggcattgaggagcgcctaggcaaagagtttatggatagaataaacaaggaaggctacatcgatgccaaagacaaatcaggaaatgttttgtacagagtaaccaaggagagcttgatggaacggctgagccatgatttgcacgcaacgagcctttccatcagcaaagagtgcaggttctttacaattcacggttcagctgacgagatcatacccgtggaagatgcgtatgagtttgcaaggcttataccaaaccacaagctgcgtgtcatcgagggagcaaatcactgctacactgctcaccgtagagaactttctgatgccgtagtagaagccatcacaaccagtgaggcaggggagaccacaccctagatctgatgcagaacggcagcctgcctttccaatcctgcaatgccgctcttccatctcagtcacattgccttgtcacaatttttaaaagaaaacgagttctttgaaaatatcgtttgaatctagacgttgttaactcgttgtatcatgacatccttaatgctacgtttggacatcgatattggagagtatgaaattgaattgggttgaataccgaatcagacgtgataatgaaataagatgtaatttcaattctattgtttggatgttactgaattggagtttggaa

SEQ ID NO: 113472 - DNA, 1463 bp, Zea Mays
tttttattttgaaatggctttcagtagacaatactcgtggctttctattaaaaatatttgtggattcacttaaaatcatttttggattttttaaacaaataattcaacgaaatctttcagtaccctatctacattatttaaagacgccatagaataaggtgtgccaacgatcaaaatgaaaattactgagatgtcccctcggacacacagtggtcaaccgacgccgccggttggtgcccggatccttgtccgccctcctgctcactccactcgcctgccagccgcacaccaatcacctctgcggccggcggcgtctgcaacgccagtctctgatccgaccccgatcggcacacacgttctccatggcggagcagctcgcatcccaagatgctcccaatccccctgctccggcacagagggtactgatgacgaacacgcatggggagaaactcgtcggcctgctgcaccacatggggtctgacaaggttgtagttctctgccatggctttacgggctccaaggactatagcctcatcactgaccttgcggccgcactaacaaagcaagggattagtgtgtttcgctttgattttagtggaaatggagaaagtgaaggtgaattccagtacggcaactacaagaaggaggctgctgacttgcactctgttgtcttgtatcttcgccaggagaagtacgacgtagcagcaattgttggtcacagcaaaggtggagatgtggtcgttctatatgcctctatctacaaggatgtccccatggtggttaacctctctggccggtttcatttggagaaaggcattgaggagcgcctaggcaaagagtttatggatagaataaacaaggaaggctacatcgatgccaaagacaaatcaggaaatgttttgtacagagtaaccaaggagagcttgatggaacggctgagccatgatttgcacgcaacgagcctttccatcagcaaagagtgcaggttctttacaattcacggttcagctgacgagatcatacccgtggaagatgcgtatgagtttgcaaggcttataccaaaccacaagctgcgtgtcatcgagggagcaaatcactgctacactgctcaccgtagagaactttctgatgccgtagtagaagccatcacaaccagtgaggggagaccacaccctagatctgatgcagaacggcagcctgcctttccaatcctgcaatgccgctcttccatctcagtcacattgccttgtcacaatttttaaaagaaaacgagttctttgaaaatatcgtttgaatctagacgttgttaactcgttgtatcatgacatccttaatgctacgtttggacatcgatattggagagtatgaaattgaattgggttgaataccgaatcagacgtgataatgaaataagatgtaatttcaattctattgtttggatgttactgaattggagtttggaa

SEQ ID NO: 113473 - DNA, 1386 bp, Zea Mays
cggtgggcggtggcagtggcacctgcttccactggagtggagggaaagcaccgaaaggcgcggctttttttacctctctctcgctttgcttgccccttcttttcacttccctccctccctccctttcctctcctccccgctccatggcccccgcggcgccagcgggcctggcctccgtcgcggtcgcggtcgcggttgccgtgctcgccgccgcggcgtcggcggccgtcacctacgaccgcaaggccgtcgtggtgaacggccagcgccggatcctgatgtccggctccatccactacccaaggagcgtccccgagatgtggccggatctgatacagaaggccaaggacggcggcctcgacgtcgtgcagacgtacgtcttctggaacggccatgagccctcccgtcgacagtactacttcgagggtcggtatgatctggtgcacttcatcaagctggtgaagcaggccggactctacgtgcacctccgcattggcccctacgtctgcgccgagtggaatttcggtggtttccctgtttggctcaagtatgtcccgggcattagctttaggactgataatgaaccgttcaagaatttcaccacaaagatcgttgacatgatgaagtccgaagggctctttgaatggcagggagggccaataattctttcccagattgagaatgaatttgggcccttggagtgggatcagggagagcccgccaaggcctatgcgtcatgggcagctaacatggcggttgcgctcaacacaagtgttccatgggtcatgtgcaaagaagatgatgccccggatccaattattaatacttgcaatggattttattgtgactggttctccccaaacaaacctcacaagcctacaatgtggactgaggcttggacatcttggtatacaggatttggtattccagttccacatagaccagtagaggatctagcatatggtgtggccaagtttattcagaagggtggctcttttgttaattattacatgtatcatggtggaacaaattttgggcgcacagctggtggtccattcattgcaactagctacgactatgatgctcctattgatgaatatggtgagctgaacacattctactttggtaaaaggcatgcattatacagtttgcatcaacctcctctcatgtaaggattactgctacgtaatttcccataatgtatcatgtatacatgattccatagatgctataaggttgatttaatagtactccccagtcatcttcaatgaatatgtatgtattttctgatatgtttatcctgttggcagtggcaacagcatgatatagtaatattcatatccacaatccctagtacatgggactacaagattttacttaggcctt

SEQ ID NO: 113474 - DNA, 1455 bp, Zea Mays
cggtgggcggtggcagtggcacctgcttccactggagtggagggaaagcaccgaaaggcgcggctttttttacctctctctcgctttgcttgccccttcttttcacttccctccctccctccctttcctctcctccccgctccatggcccccgcggcgccagcgggcctggcctccgtcgcggtcgcggtcgcggttgccgtgctcgccgccgcggcgtcggcggccgtcacctacgaccgcaaggccgtcgtggtgaacggccagcgccggatcctgatgtccggctccatccactacccaaggagcgtccccgagatgtggccggatctgatacagaaggccaaggacggcggcctcgacgtcgtgcagacgtacgtcttctggaacggccatgagccctcccgtcgacagtactacttcgagggtcggtatgatctggtgcacttcatcaagctggtgaagcaggccggactctacgtgcacctccgcattggcccctacgtctgcgccgagtggaatttcggtggtttccctgtttggctcaagtatgtcccgggcattagctttaggactgataatgaaccgttcaaggctgagatgcagaatttcaccacaaagatcgttgacatgatgaagtccgaagggctctttgaatggcagggagggccaataattctttcccagattgagaatgaatttgggcccttggagtgggatcagggagagcccgccaaggcctatgcgtcatgggcagctaacatggcggttgcgctcaacacaagtgttccatgggtcatgtgcaaagaagatgatgccccggatccaattattaatacttgcaatggattttattgtgactggttctccccaaacaaacctcacaagcctacaatgtggactgaggcttggacatcttggtatacaggatttggtattccagttccacatagaccagtagaggatctagcatatggtgtggccaagtttattcagaagggtggctcttttgttaattattacatgtatcatggtggaacaaattttgggcgcacagctggtggtccattcattgcaactagctacgactatgatgctcctattgatgaatatggtgagctgaacacattctactttggtaaaaggcatgcattatacagtttgcatcaacctcctctcatgtaaggattactgctacgtaatttcccataatgtatcatgtatacatgattccatagatgctataaggttgatttaatagtactccccagtcatcttcaatgaatatgtatgtattttctgatatgtttatcctgttggcagtggcaacagcatgatatagtaatattcatatccacaatccctagtacatgggactacaagattttacttaggccttgtttggctattcttatgccttattgattcgaatagatcagaaaaaattatgaaaaaa

SEQ ID NO: 113475 - DNA, 3083 bp, Zea Mays
gggaaagcaccgaaaggcgcggctttttttacctctctctcgctttgcttgccccttcttttcacttccctccctccctccctttcctctcctccccgctccatggcccccgcggcgccagcgggcctggcctccgtcgcggtcgcggtcgcggttgccgtgctcgccgccgcggcgtcggcggccgtcacctacgaccgcaaggccgtcgtggtgaacggccagcgccggatcctgatgtccggctccatccactacccaaggagcgtccccgagatgtggccggatctgatacagaaggccaaggacggcggcctcgacgtcgtgcagacgtacgtcttctggaacggccatgagccctcccgtcgacagtactacttcgagggtcggtatgatctggtgcacttcatcaagctggtgaagcaggccggactctacgtgcacctccgcattggcccctacgtctgcgccgagtggaatttcggtggtttccctgtttggctcaagtatgtcccgggcattagctttaggactgataatgaaccgttcaaggctgagatgcagaatttcaccacaaagatcgttgacatgatgaagtccgaagggctctttgaatggcagggagggccaataattctttcccagattgagaatgaatttgggcccttggagtgggatcagggagagcccgccaaggcctatgcgtcatgggcagctaacatggcggttgcgctcaacacaagtgttccatgggtcatgtgcaaagaagatgatgccccggatccaattattaatacttgcaatggattttattgtgactggttctccccaaacaaacctcacaagcctacaatgtggactgaggcttggacatcttggtatacaggatttggtattccagttccacatagaccagtagaggatctagcatatggtgtggccaagtttattcagaagggtggctcttttgttaattattacatgtatcatggtggaacaaattttgggcgcacagctggtggtccattcattgcaactagctacgactatgatgctcctattgatgaatatggtttgctgagagaaccgaaatggggtcacttgaaggagttgcataaagctatcaagctttgtgaaccagcattggttgcaggagacccaattgtaacttcacttggcaatgctcagcaggcatctgtttttagatcaagcaccgatgcctgtgtggccttccttgagaacaaggataaagtatcttatgctagggtatcattcaatggaatgcattatgatctacctccctggtccataagtattctcccagactgcaaaacaacagtctacaacaccgccagcgttggaagtcagatttcacaaatgaaaatggaatgggctggaggattcacatggcaatcatacaatgaggatataaactccttgggtgacgaatcatttgcaacagttggattactggaacagataaatgtgacaagggataacacagactacttatggtatacaacatacgttgatattgctcaggatgagcagtttctcagcaatgggaagaatcctatgctaactgttatgtcagctggtcatgctttgcatattttcgttaatggacaactaacagggactgtgtatggaagcgtagaagatccaaaattgacatatagtggaaatgtgaaactttggtcaggcagtaacactatttcatgcttaagtatagcagttggtctcccgaatgtgggagaacattttgagacttggaatgctggaattctaggtcctgtgacactggatggcctaaatgagggaagaagagatctcacatggcagaaatggacctataaggttggtctgaaaggtgaggctttgagtcttcattcacttagtggcagctcttcagtagagtggggagaacctgttcagaagcagcctctgtcatggtacaaggctttcttcaatgcacctgatggtgatgagccattagctttggatatgagtagcatgggtaaaggtcaaatctggataaatggacaaggtattggaaggtactggcctggctacaaagcttctggaacctgtgggatctgtgattaccgtggagagtatgatgaaaagaagtgccaaaccaactgtggtgactcttctcagagatggtaccatgttcctcgttcatggcttaatccgacggggaaccttttggtgatatttgaggagtggggcggtgatcctaccggaatttcgatggtgaaaagaatagcagggagtatctgcgctgatgtctccgaatggcagccatcgatggcaaactggcgaacaaaaggctatgagaaagccaaggtccacctccagtgtgatcatggacggaaaatgactcacataaaatttgccagctttggcacaccacagggctcctgcgggagctactctgaaggcggttgccatgcacacaagtcatacgacatattttggaagagctgcattggtcaagagcgctgtggggtaagcgtggttccagatgcatttggtggagatccatgccctgggactatgaaaagagccgttgttgaggctatatgcggctgagtcatatgatccatataacgtactggtttctacaataatgttaccctatatcaagctggcaagaggtgaaagtggcggcaactgcgacacacggattgccagggtttacaggaattagttgtatgttagatttaagcatcgtatgtgtatgtaacttaggtcacatgagacttgcatggaagaagtggttaggaccctagctgtgagaaactaagtcttgtagctctctacacagtagaattggtctggcaggtgagggtgcagatgagactctgctttattacctgagtccatgtgcgcggtggctcttgggttggagattgccaaaaggccagcaattggctttgcattatctggtcattcatttttttggtcattggagggtgcaatgtaaatgttcagggtcaatcatttatgaatttttctagctagtaatgaaacagtaaagaaaatgttggttcagattataaaacaccagttatcttcca

SEQ ID NO: 113476 - DNA, 2546 bp, Zea Mays
cagtctagcttatttgctcagattatataatctaaccccttggattatgataatccataagcaagtgaggaggtgcttatttcagattatttttttctcacttcctcactaccctttcaagtttcctagaaattacccaccattgccattataatctaccgaatcgtttttgcgcctatcggatcggagaagcccgccgcccaacagaaacacgccagataatctgggtaaacaaacaggactactcagattatataatccaaattatataatccagattatataatcatccaaaaataatccagattatataatctattggggtaaacaaacaggcctttagttgtctctcgtatttggaatcgtttcaatgctcagggttatacatgacttaagtggtctaagctcctcaagttgagtccgacttcacatgagagcgaatttcagtctgttgaagcgcggggcagggttcagcagttttctcgttcgccgagcaccagatccacgctcctccatgccagatctgtggctatcagggatctggtacccccagcccttcctgggccccgctgtcctcgatgtggcccacggtggtggtgctgtgctgctgcttccgtgtgcgcgttcgcgggctccttgacgtgggctgctctcgtgtctggtgggcactgggcggcggctgcactgtcactagcgcttcggcaggcacgcggccatgcggctcctccctttgggggctggttctttgtggtgcagtggctcccaatcaggttcccgcgtctgccgcgcagctgtgggacacctccacattggctggtggctgcggccgctgttcctggcccacagtcgctgctttggtttgcggatctgaggctggtgttcggctcctgaatggctatgggtggcttgggcgggcctgtctagctgctgctggcgacgatggcatccttgacattatgttcctcccctcgggggcagatgtgcagatgccttaccgcctagatcacatccttgtggcagatggtttgctgagagaaccgaaatggggtcacttgaaggagttgcataaagctatcaagctttgtgaaccagcattggttgcaggagacccaattgtaacttcacttggcaatgctcagcaggcatctgtttttagatcaagcaccgatgcctgtgtggccttccttgagaacaaggataaagtatcttatgctagggtatcattcaatggaatgcattatgatctacctccctggtccataagtattctcccagactgcaaaacaacagtctacaacaccgccagcgttggaagtcagatttcacaaatgaaaatggaatgggctggaggattcacatggcaatcatacaatgaggatataaactccttgggtgacgaatcatttgcaacagttggattactggaacagataaatgtgacaagggataacacagactacttatggtatacaacatacgttgatattgctcaggatgagcagtttctcagcaatgggaagaatcctatgctaactgttatgtcagctggtcatgctttgcatattttcgttaatggacaactaacagggactgtgtatggaagcgtagaagatccaaaattgacatatagtggaaatgtgaaactttggtcaggcagtaacactatttcatgcttaagtatagcagttggtctcccgaatgtgggagaacattttgagacttggaatgctggaattctaggtcctgtgacactggatggcctaaatgagggaagaagagatctcacatggcagaaatggacctataaggttggtctgaaaggtgaggctttgagtcttcattcacttagtggcagctcttcagtagagtggggagaacctgttcagaagcagcctctgtcatggtacaaggctttcttcaatgcacctgatggtgatgagccattagctttggatatgagtagcatgggtaaaggtcaaatctggataaatggacaaggtattggaaggtactggcctggctacaaagcttctggaacctgtgggatctgtgattaccgtggagagtatgatgaaaagaagtgccaaaccaactgtggtgactcttctcagagatggtaccatgttcctcgttcatggcttaatccgacggggaaccttttggtgatatttgaggagtggggcggtgatcctaccggaatttcgatggtgaaaagaatagcagggagtatctgcgctgatgtctccgaatggcagccatcgatggcaaactggcgaacaaaaggctatgagaaagccaaggtccacctccagtgtgatcatggacggaaaatgactcacataaaatttgccagctttggcacaccacagggctcctgcgggagctactctgaaggcggttgccatgcacacaagtcatacgacatattttggaagagctgcattggtcaagagcgctgtggggtaagcgtggttccagatgcatttggtggagatccatgccctgggactatgaaaagagccgttgttgaggctatatgcggctga

SEQ ID NO: 113477 - DNA, 2456 bp, Zea Mays
ctgcaggacacaaaggttgaaggcaagggagagagaggaagaagaaaggcaggaggagaggcggaacgacccgtctccctccacctctctctgccttctcctcctgcgccgccatcctcacatcccgtcgtcgcaccacccactgaccggccggttgcacccttatagtaccggacggtggcgcgatgcaaggaggcccactcagcccggacgagtaccgggtggcgtcgccgccggcgctgctgcaccagccggcgcccgtcatcgtcgtggccatcgaccgggaccgcaacagccaactggccgcgaagtgggtggtggaccacctcctctccggcgcctctcagatcgtcctcctccacgtggccgcccactaccccgccaaccatgggttcgccatggccgagacgacgcagagcgcgctggaggctgaaatgaaggagatctttgtcccctacagaggattcttcaaccggaatggggtaaatgtggatgtcttcgaggtagtgttggaagaggcagacgtgtccaaggccattctaggttacatcactgcaaacaagatccagagcattgcgctcggcggagccagcagaaatgcattcaccaaaaaattcaagaacgcggacgtgccgtcgaccctgatgaagtgcgcgccggactactgcaacatctacgtcgtggccaagggcaagtccgtcaatgtccggctcgccaagtgcggcgtcccgcccatgcacggtggcgccgacagcccttcggacaccgactccgtccgggaatcggggctgtacattcggcgtggctccaggggacacggacacctgccgccggtgatgcctgacgccaggcgctccatggacgggcgcagcaccctgccggagctcaccacgcgcccaccgttccgcgagcgctcgctcccgtcctcggccaccaagaacgtcgtcgtcctgccgggaaaggactactccgaggcgccctcccgctccgcgaggcacgactcgttcggcggcgacctcgacttcggcccgagcacgcgcttctcctccatggacttcggcgacaacctcgacctcaccgccagccccgctcgggagcccatgtcaccggccaccggcgcgcaacgggatattgaggtcgagatgcggcgcctccggctggaactcaagcagaccatggacatgtacaacgcggcgtgcaaggaggccatcaacgccaagcagcgggccaaggagatgcagctgatgaaactggaggaggagcgtcggctggaggaggccaggcacgccgaggagactgctctggcactggccgagatggagaaggccaagtgccgcgcggccatggaggcagccgaggcggcgcagagactggccgacctggaggcgcagcggcgccgcaacgccgaggtgcgcgcgcgccgggaggccgacgagaaggtgcgcgcactggatgccatctccaaccacgacttccggtaccgcaagtaccacatcgacgagatcgagatggccacggagcgcttctccgacgagctcaagatcggcgagggcggctacggccccgtctaccgcgcctccctggaccacacccccgtcgccatcaaggtgctccggcccgacgcgcaccaggggaggaagcagttccagcaggaggtggaggtgctcagctgcatccgccaccccaacatggtgctcctcctcggtgcgtgccccgagtacggctgcctcgtgtacgagtacatggagcacggcagcctcgaggaccggctgttccgtcggggcggcacgccgccgatcccgtgggcgcagcggttccggatcgcggcggagatcgcgacggcgctgctgttcctgcaccagacaaagccggagccgctggtgcaccgggacctgaagccggccaacatcctgctggaccgcaactacgtgagcaagatcagcgacgtcgggctggcgcgtctggtgccgccgtcggtggcggacagcgtgacgcagtaccggctgacggcgacggcgggcaccttctgctacatcgacccggagtaccagcagacggggaagctgggcgtcaagtcggacatctactcgctcggcgtgctcctgctgcaggtggtcaccgcgcggccacccatggggctcacgcaccacgtcgagaaggccatcgacgcgggcaccttcgcgcagatgctcgacatcaccgtcaaggactggcccgtcgaggaggcgctcggctacgcaaagctcgcgctcaagtgcacggagatgcggcggagggaccggccggacctcgcaaccgtcgtactgccggagctcaaccggttaaggaacctcggccacgcgtacgaggcacgcatgagcgccgtcgggaccaacagtggaagtggcgaaagtaatgaccaggtcagcgggagctcgccgacggcgggtggttcatggagaacggcggagagctag

SEQ ID NO: 113478 - DNA, 2763 bp, Zea Mays
ctgcaggacacaaaggttgaaggcaagggagagagaggaagaagaaaggcaggaggagaggcggaacgacccgtctccctccacctctctctgccttctcctcctgcgccgccatcctcacatcccgtcgtcgcaccacccactgaccggccggttgcacccttatagtaccggacggtggcgcgatgcaaggaggcccactcagcccggacgagtaccgggtggcgtcgccgccggcgctgctgcaccagccggcgcccgtcatcgtcgtggccatcgaccgggaccgcaacagccaactggccgcgaagtgggtggtggaccacctcctctccggcgcctctcagatcgtcctcctccacgtggccgcccactaccccgccaaccatgggttcgccatggccgagacgacgcagagcgcgctggaggctgaaatgaaggagatctttgtcccctacagaggattcttcaaccggaatggggtggatgtcttcgaggtagtgttggaagaggcagacgtgtccaaggccattctaggttacatcactgcaaacaagatccagagcattgcgctcggcggagccagcagaaatgcattcaccaagtacgcaaatcaccgattttctctctctctctctctctctcccgttatttagatcgcaccgtcagttgaaatgcgtctctcgcctcgggcagaaaattcaagaacgcggacgtgccgtcgaccctgatgaagtgcgcgccggactactgcaacatctacgtcgtggccaagggcaagtccgtcaatgtccggctcgccaagtgcggcgtcccgcccatgcacggtggcgccgacagcccttcggacaccgactccgtccgggaatcggggctgtacattcggcgtggctccaggggacacggacacctgccgccggtgatgcctgacgccaggcgctccatggacgggcgcagcaccctgccggagctcaccacgcgcccaccgttccgcgagcgctcgctcccgtcctcggccaccaagaacgtcgtcgtcctgccgggaaaggactactccgaggcgccctcccgctccgcgaggcacgactcgttcggcggcgacctcgacttcggcccgagcacgcgcttctcctccatggacttcggcgacaacctcgacctcaccgccagccccgctcgggagcccatgtcaccggccaccggcgtgagtgatttctgtgctatccaacccaccggacaccgttgcccctgacctacgcatgcgggcgcaggcgcaacgggatattgaggtcgagatgcggcgcctccggctggaactcaagcagaccatggacatgtacaacgcggcgtgcaaggaggccatcaacgccaagcagcgggccaaggagatgcagctgatgaaactggaggaggagcgtcggctggaggaggccaggcacgccgaggagactgctctggcactggccgagatggagaaggccaagtgccgcgcggccatggaggcagccgaggcggcgcagagactggccgacctggaggcgcagcggcgccgcaacgccgaggtgcgcgcgcgccgggaggccgacgagaaggtgcgcgcactggatgccatctccaaccacgacttccggtaccgcaagtaccacatcgacgagatcgagatggccacggagcgcttctccgacgagctcaagatcggcgagggcggctacggccccgtctaccgcgcctccctggaccacacccccgtcgccatcaaggtgctccggcccgacgcgcaccaggggaggaagcagttccagcaggaggtggaggtgctcagctgcatccgccaccccaacatggtgctcctcctcggtgcgtgccccgagtacggctgcctcgtgtacgagtacatggagcacggcagcctcgaggaccggctgttccgtcggggcggcacgccgccgatcccgtgggcgcagcggttccggatcgcggcggagatcgcgacggcgctgctgttcctgcaccagacaaagccggagccgctggtgcaccgggacctgaagccggccaacatcctgctggaccgcaactacgtgagcaagatcagcgacgtcgggctggcgcgtctggtgccgccgtcggtggcggacagcgtgacgcagtaccggctgacggcgacggcgggcaccttctgctacatcgacccggagtaccagcagacggggaagctgggcgtcaagtcggacatctactcgctcggcgtgctcctgctgcaggtggtcaccgcgcggccacccatggggctcacgcaccacgtcgagaaggccatcgacgcgggcaccttcgcgcagatgctcgacatcaccgtcaaggactggcccgtcgaggaggcgctcggctacgcaaagctcgcgctcaagtgcacggagatgcggcggagggaccggccggacctcgcaaccgtcgtactgccggagctcaaccggttaaggaacctcggccacgcgtacgaggcacgcatgagcgccgtcgggaccaacagtggaagtggcgaaagtaatgaccaggtcagcgggagctcgccgacggcgggtggttcatggagaacggcggagagctagcgggtggtacggcgtggccatgagtcagttagagagcgagcttgtgatggggagagttcttttgttggacggagagttcaaaatccaaaaatcttggtgtatgtacagttgtctatgaggaatactaacacgtcttgcagtgcttctgcctctc

SEQ ID NO: 113479 - DNA, 2621 bp, Zea Mays
ctgcaggacacaaaggttgaaggcaagggagagagaggaagaagaaaggcaggaggagaggcggaacgacccgtctccctccacctctctctgccttctcctcctgcgccgccatcctcacatcccgtcgtcgcaccacccactgaccggccggttgcacccttatagtaccggacggtggcgcgatgcaaggaggcccactcagcccggacgagtaccgggtggcgtcgccgccggcgctgctgcaccagccggcgcccgtcatcgtcgtggccatcgaccgggaccgcaacagccaactggccgcgaagtgggtggtggaccacctcctctccggcgcctctcagatcgtcctcctccacgtggccgcccactaccccgccaaccatgggttcgccatggccgagacgacgcagagcgcgctggaggctgaaatgaaggagatctttgtcccctacagaggattcttcaaccggaatggggtggatgtcttcgaggtagtgttggaagaggcagacgtgtccaaggccattctaggttacatcactgcaaacaagatccagagcattgcgctcggcggagccagcagaaatgcattcaccaaaaaattcaagaacgcggacgtgccgtcgaccctgatgaagtgcgcgccggactactgcaacatctacgtcgtggccaagggcaagtccgtcaatgtccggctcgccaagtgcggcgtcccgcccatgcacggtggcgccgacagcccttcggacaccgactccgtccgggaatcggggctgtacattcggcgtggctccaggggacacggacacctgccgccggtgatgcctgacgccaggcgctccatggacgggcgcagcaccctgccggagctcaccacgcgcccaccgttccgcgagcgctcgctcccgtcctcggccaccaagaacgtcgtcgtcctgccgggaaaggactactccgaggcgccctcccgctccgcgaggcacgactcgttcggcggcgacctcgacttcggcccgagcacgcgcttctcctccatggacttcggcgacaacctcgacctcaccgccagccccgctcgggagcccatgtcaccggccaccggcgcgcaacgggatattgaggtcgagatgcggcgcctccggctggaactcaagcagaccatggacatgtacaacgcggcgtgcaaggaggccatcaacgccaagcagcgggccaaggagatgcagctgatgaaactggaggaggagcgtcggctggaggaggccaggcacgccgaggagactgctctggcactggccgagatggagaaggccaagtgccgcgcggccatggaggcagccgaggcggcgcagagactggccgacctggaggcgcagcggcgccgcaacgccgaggtgcgcgcgcgccgggaggccgacgagaaggtgcgcgcactggatgccatctccaaccacgacttccggtaccgcaagtaccacatcgacgagatcgagatggccacggagcgcttctccgacgagctcaagatcggcgagggcggctacggccccgtctaccgcgcctccctggaccacacccccgtcgccatcaaggtgctccggcccgacgcgcaccaggggaggaagcagttccagcaggaggtggaggtgctcagctgcatccgccaccccaacatggtgctcctcctcggtgcgtgccccgagtacggctgcctcgtgtacgagtacatggagcacggcagcctcgaggaccggctgttccgtcggggcggcacgccgccgatcccgtgggcgcagcggttccggatcgcggcggagatcgcgacggcgctgctgttcctgcaccagacaaagccggagccgctggtgcaccgggacctgaagccggccaacatcctgctggaccgcaactacgtgagcaagatcagcgacgtcgggctggcgcgtctggtgccgccgtcggtggcggacagcgtgacgcagtaccggctgacggcgacggcgggcaccttctgctacatcgacccggagtaccagcagacggggaagctgggcgtcaagtcggacatctactcgctcggcgtgctcctgctgcaggtggtcaccgcgcggccacccatggggctcacgcaccacgtcgagaaggccatcgacgcgggcaccttcgcgcagatgctcgacatcaccgtcaaggactggcccgtcgaggaggcgctcggctacgcaaagctcgcgctcaagtgcacggagatgcggcggagggaccggccggacctcgcaaccgtcgtactgccggagctcaaccggttaaggaacctcggccacgcgtacgaggcacgcatgagcgccgtcgggaccaacagtggaagtggcgaaagtaatgaccaggtcagcgggagctcgccgacggcgggtggttcatggagaacggcggagagctagcgggtggtacggcgtggccatgagtcagttagagagcgagcttgtgatggggagagttcttttgttggacggagagttcaaaatccaaaaatcttggtgtatgtacagttgtctatgaggaatactaacacgtcttgcagtgcttctgcctctcatcacttcgacttttga

SEQ ID NO: 113480 - DNA, 2063 bp, Zea Mays
tcccagtatcgcctttgcccgcacacacggctcccattccatttccgctgcctgcctctgacgcgcacccacaccacctcgcctccctcagccctccgcagctcggcctctgcttgcgttgcgttgcgtgtgtatgtagtggccgcaacacaaaaatcaagagacgtgtatgtatatgcgacccccaacagccaacgaccggcctccaagcggtgggggtggaggagcagcagctggtgcaggtgcagcagcaggggacgacgacttcgccttctactgctcctacctccaggacgccgacgctgccgccgcctcagcgacgtcgacgctcgccctcgccgtcgacgaccccaaccccaaccccagcgccgcagggatgacgaacggccggcgccggaagcagcgcggggcagaggacgccggagccgccggggaaggggaggaggaggccaagaaggacggcaagaagcggtccatagccaagctgctcacctcgctggcggcgctggaggcggaggagcacgccgaccgcgcgggcgccgcggacgcgtccaggcgggagctggcgctgctcgagtccaacgccgacacccgctcgcaggccaccatggactactacgccaagatggagagcagcttcgacgccaccgccgagtccgaggccgccgccaggtccaagcgctccaggctcgccgcgtcggccgccaccgcggccgtcgtggccggggaggaggcggcagcgtcagcggcggcgtcgccctccgcgtcggcctcgccgacgcgcgccgcggggcaggggcagggaggccaccaccagcgccggctgtgggtcaaggaccggtcgcgcgcgtggtgggaccggtgcaacagcgccgactacccggaggaggagttccggcgcgcgttccggatggggcgcgggaccttcgacatgatctgcgacgcgctgggctcctcggtggccaaggaggacaccatgctccgcgccgccatccccgtccgccagcgcgtcgccgtctgcgtctggcgcctcgccacgggggagccgctccgcctcgtttccaagcgcttcggcctcggcatctccacctgccacaagctcgtcctggaggtgtgcgccgccatcaagtccgtgctcatgccgcgcttcctgcagtggcccgacgccgacgccgcggcgcgcttcaaggagggcttcgagcgcgcctcgggcgtgccgggcgtcatcggcgccatgtacaccacccacatccccatcatcgcgcccaagatctcggtggcggcctacttcaaccgccgccacacggagcgcaaccagaagacgtcctactccatcactctccagggcgtcgtcggccccgacggcgccttcaccgacgtctgcatcggctggcccggctccatgcccgacgaccaggtcctggagaagtccatgctccaccagcgcgccgcggcggggatgatgcacgactcgtggctggtggctggcgccagctacccgctcatggactgggtgctggtgccgtacacgcaccccaacctgacgtggacgcagcacgcgttcaacgagaaggtggccgagctccggcgcgtcgcggtggaggcgttcgcgcgcctcaaggcgcgctgggcgtgcctgcagaagcgcaccgaggtcaagctgcaggacctccccgtcgtgctgggcgcctgctgcgtgctccacaacatctgcgagattcggggcgaggaggtggacccagccatccgctgcgaactggtggacgacgagaccacgccggagaaccccgtgcgctccgagacggccagtcgcgccagggacaacatcgcgcacaacctgctccaccgtggcttgggcggcaacacattcttctgatctcatccgtcaccttcttcttttttatgctttgctagtacagtagtacagaattgggctggaacaagaaagaaataggcattcttttcttttaattacactagaagatgattttggtaggattcttatagaatctatctatctatctatcaccgagcgtttttaaccttttcacgctcgattttca

SEQ ID NO: 113481 - DNA, 2097 bp, Zea Mays
tcccagtatcgcctttgcccgcacacacggctcccattccatttccgctgcctgcctctgacgcgcacccacaccacctcgcctccctcagccctccgcagctcggcctctgcttgcgttgcgttgcgtgtgtatgtagtggccgcaacacaaaaatcaagagacgtgtatgtatatgcgacccccaacagccaacgaccggcctccaagcggtgggggtggaggagcagcagctggtgcaggtgcagcagcaggggacgacgacttcgccttctactgctcctacctccaggacgccgacgctgccgccgcctcagcgacgtcgacgctcgccctcgccgtcgacgaccccaaccccaaccccagcgccgcagggatgacgaacggccggcgccggaagcagcgcggggcagaggacgccggagccgccggggaaggggaggaggaggccaagaaggacggcaagaagcggtccatagccaagctgctcacctcgctggcggcgctggaggcggaggagcacgccgaccgcgcgggcgccgcggacgcgtccaggcgggagctggcgctgctcgagtccaacgccgacacccgctcgcaggccaccatggactactacgccaagatggagagcagcttcgacgccaccgccgagtccgaggccgccgccaggtccaagcgctccaggctcgccgcgtcggccgccaccgcggccgtcgtggccggggaggaggcggcagcgtcagcggcggcgtcgccctccgcgtcggcctcgccgacgcgcgccgcggggcaggggcagggaggccaccaccagcgccggctgtgggtcaaggaccggtcgcgcgcgtggtgggaccggtgcaacagcgccgactacccggaggaggagttccggcgcgcgttccggatggggcgcgggaccttcgacatgatctgcgacgcgctgggctcctcggtggccaaggaggacaccatgctccgcgccgccatccccgtccgccagcgcgtcgccgtctgcgtctggcgcctcgccacgggggagccgctccgcctcgtttccaagcgcttcggcctcggcatctccacctgccacaagctcgtcctggaggtgtgcgccgccatcaagtccgtgctcatgccgcgcttcctgcagtggcccgacgccgacgccgcggcgcgcttcaaggagggcttcgagcgcgcctcgggcgtgccgggcgtcatcggcgccatgtacaccacccacatccccatcatcgcgcccaagatctcggtggcggcctacttcaaccgccgccacacggagcgcaaccagaagacgtcctactccatcactctccagggcgtcgtcggccccgacggcgccttcaccgacgtctgcatcggctggcccggctccatgcccgacgaccaggtcctggagaagtccatgctccaccagcgcgccgcggcggggatgatgcacgactcgtggctggtggctggcgccagctacccgctcatggactgggtgctggtgccgtacacgcaccccaacctgacgtggacgcagcacgcgttcaacgagaaggtggccgagctccggcgcgtcgcggtggaggcgttcgcgcgcctcaaggcgcgctgggcgtgcctgcagaagcgcaccgaggtcaagctgcaggacctccccgtcgtgctgggcgcctgctgcgtgctccacaacatctgcgagattcggggcgaggaggtggacccagccatccgctgcgaactggtggacgacgagaccacgccggagaaccccgtgcgctccgagacggccagtcgcgccagggacaacatcgcgcacaacctgctccaccgtggcttgggcggcaacacattcttctgatctcatccgtcaccttcttcttttttatgctttgctagtacagtagtacagaattgggctggaacaagaaagaaataggcattcttttcttttaattacactagaagatgattttggtaggattcttatagaatctatctatctatctatcaccgagcgtttttaaccttttcacgctcgattttcaatttctctttgacacctttctccttccgacgcgc

SEQ ID NO: 113482 - DNA, 2629 bp, Zea Mays
acccccagtcccaccgagcacgcggcagcgcactgcgcacccgatcctcgcgccccccgcgcgtcccgtccccactggcgcggcctcgacacctgtcccccggccccccacgcgcgcgcgcacgggagtgcacgtagctttcctgcccctccgtccctcgcccgcccgcccgtccgtcgcctcgcgcggtcgcgcctcacctcgcccctccctccctcctttctgccggccactcccggctcccgagccacagcaattacccagctcagcggctgccgaaccccctccgcttcccggctctccaggtcgagaagggcgctgctcgccacctgcctttctttctacagttcgacgcactttggtggcggtgccgctactctccttcccgagttcctaacttcctaactaggagggcgggcgttgtctgcctgtgtgcttttggcgattcgggggcttgggctcggatctgcgcgtgccttcctccggacccgagcgaggctcgggcgcgaatttggggcggatcagcgcagatctggaggcacatgaggaggaggaggcggaggggtagcgggagcgatgcggtgcttctgcgaagggcttgagccgacctgggaaggtgattctggaggaggtggcggtggctgcggaggcggagggggaggctggaggagggatggaagacgtcgtagcagtcgtggcgtcactctccgcgccgccggcgccggcgtttagccccgccgcggcggggctcacgctgatcgccgcggcggtcgcggacccgatcgccgcggtggtcgtcggagccatggagggggtctccgtgcccgtgactgtgcccccggtcaggacggcgtccgcggtggacgacgacgcgctggcgccgggagaggaagggggagacgcctctttggccgggagcccgtgctcggtggtcagcgactgtagcagcgtggccagcgctgatttcgagggggtcgggctgtgtttcttcggcgcggcagcaggcgcggagggtggtcccatggtgttggaggactcgaccgcgtctgcagccacggtcgaggcggaggccagggtcgcggctggtgggaggagtgtcttcgccgtggactgcgtgccgctgtggggctacacttccatatgcggccgccgtccggagatggaggatgccgttgctatagtgccgcgattctttgacttgccactctggttgctcaccggcaatgcgatggtcgatggcctcgatcccatgacgttccgcttacctgcacatttctttggtgtctatgacggacacggtggtgcacaggtagcaaattactgtcgggaacgcctccatgtggccctactggagcagctgagcaggatagaggagactgcgtgtgcagctaacttgggagacatggagttcaagaaacagtgggaaaaggtctttgtggattcttatgctagagtggatgacgaggttgggggaaacacgatgaggggaggtggtgaagaagcaggcacaagtgatgctgctatgacactcgtgccagaacctgtggcacctgagacggtgggttcgacggcggtcgtcgctgtcatctgctcctcacatatcattgtctccaactgtggagattcacgggcagtgctctgccgaggcaagcagcctgtgcctctgtcggtggatcataaacctaacagggaggatgagtatgcaaggattgaggcagagggtggcaaggtcatacaatggaacggttatcgagttttcggtgttcttgcaatgtcgcgatcaattggtgacagatatctgaagccatggataattccagtcccagaggtaacaatagttccgcgggctaaggatgacgagtgccttattcttgccagtgacggcctctgggatgtaatgtcaaatgaagaggtatgtgaaatcgctcgcaagcggatacttctgtggcacaaaaagaacagcacaagctcatcatcagccccacgggttggtgactccgcagactcagccgctcaagcggctgctgaatgcttgtcaaagcttgctcttcagaaggggagcaaagacaacattactgtcgtggtagttgatctgaaagcacagcgcaagttcaagagcaaaacttaaccgtgacaagcgtagcaacaagttgctaagaacctatagattcggacagtcccaagttcggtcattttagttcgctgctttagtgcattgcttagcccagttccttatttttctcagttctttttaagccatgccaagggctgtattccccgtatacggtacagatcgcgaaatccctatcagggatggtttggtgatatcagggtttatatgttttcctgaccgtggtgactgtcctgttttcattcttctttcttcgctgccctgtattcattttgtcaagctggggcaggcatccaagtatttggcaatgtatatttgagcttgcaggatacaaaggaaacgaattgttatgaagggtacgtatcctgcctgcctgaatttgggaatctatcaactgcatcagctggtaatataagtatggactcgcaatctggatactggtggagagaacctaatggtccagaagggctgagttgtgctaaaaaagtttgaggcaac

SEQ ID NO: 113483 - DNA, 3118 bp, Zea Mays
gcttcctccgccgcggacgacggcgggcccagcacgagcggtagcgcggacgcgcacgcccgctacgccgacgccgacgacaatgcggcgggcgccgggggcccaaaggtctgggtcctcgtgctcctgttcgcgctgctcctgctgcccttcctgccctctgcgatgcgccgcggcggcggcggcggcgggacggtttgggcgggaggcggaagaggcactgagggagggtaccggtaccgccgcggcgggatcagcttcaagagcggctgggacgtcgtcaacctctgcctcgtgctcttcgccatcctctgtggtctcctcggccgcggcggcgacggggactcctcttcctccgcgacttcagcttacgcgtctgccaaggacgaccgtcatcgcctggcgtcctcggcggcgcccgccgcggagcccgtcacggtggcggcgactactacgagctcgggggactgggagcaggagggctacgactccatgtccgccatctacgccagcctgtcccgcaccaccaaccacgcccatgcctcggggatccgccggatgaagagcagcagctcctacccggagctgcgcctcggcagcgacggcgtctgggccctcgcgtccccggactccgcctggcgcttctacgacgacgccgagctgtaccgcgcccgccgcccggagcggcaggagcggacctgggacgtcgacccgcacgggagggcagcggcggcggaggtcaagaccatccccgtcgacaccttcgtcgagcgcggccgggcctcgcagtcgcagtcgcagtcgcagccgcggaggacgaggaggaggagcgtcgagaggctccccgagatggccgaggagaggccgctgcagcaacagagcgggggcgcgcgggcgccgccgaggctcaggaggtggaactccgaggttgttgatgtcatgttggaacaggaggcggcaccggcgcggagtagaaggtgggactcggaggtggtgggcgccatgccggaacaggacgcggctgtagcgccggcgaggctcaggaggtggaactcagagtcgctggatagcatactggagcaggaggcgagagtggcggcggcgaggagcacgaggtggggctcggaggtgatggacgccatgccggaacaggaggcagcggtagcgccggcgaggctcaggaggtggaactcggagtcgttggatagcatactggagcaggaggcgagagtggcgccggcgaggagcacgaggtggggttcggaggtgatggacgccatgccggaacaggaggcagcggtagcgccagcgaggctcaggaggtggaactcagagtcgttggatagcatactggagcaggaggcgagagtggcggcggcgaggagcaggaggtgggactcggaggtgatggacgccatgccggaacaggaggcagcggtagcgccagcgaggctcaggaggtggaactcagagtcgttggatagcatactggagcaggaggcgagagtggcggcggcgaggagcaggaggtgggactcggaggtggtggacgtcatgccggaacaggaggcggcgtggatgtaataccggagcaggaagcgccggtggctctggcgaggagcgggagatggagctcgggggcggtggacgtggtcccggagcaggaaaagccggtgatgatggcgcctgctgctccaccacctcctcctccgcctcctcgacggcgacggcgcagcgtcgagaaactgccgacatcagaggaactggagcaagagatagtagtggaagaggtgagaaaccccccgatgccgccgccatcgctggccatgttcccgcctggaacgccaccaccccctccgcctccgcttccgcctccctcgacggtgtcgcgcagcaagaagaagcgcagcggcagcgtgggcggcgccaaggagctagcgtccgccattgctacgttctaccagaagaagcgcaagagcattaccatgaaggccaagaggaggccccatgcccatcaccaccaccactccgatggccaatactactcgtcgccgtcgtcagatgcgtcagcgagcccggactccactgctcgcaccaccaccgccccgccgcggcctccgcctccgccccctccaccgccaccgccgtcctccatcttctccaatctcttcaggaacaagaagggcggcagtaagaaccgccgcatccactccgtcgcgccaccgcagccgccacccccgcctccaccggctcgacgatctaagaaaccgccaccgcctccgtctcggcccgcgcctccagcaccaccgccgccgccacaaccagtcaggacacggccgcagcgcgcccacgtgcacgcgtccacacagcagccgccattgtacccgaggcgcgtctactacacctactacccgctcccgccgccgtctccaccgctacctccacctcctcctccgccgccaccgctggtgccagagggcgaggatgactccccttcggtcacggcgtcgccggcgccggcgtactgcgcgagccccgacgtgaacacgaaggcggaccggttcatcgagagcttccgcgaggggctgaagctggagaagctcaactcgtaccgggagaagtggcagaggcagatccaagagaacgccgccgtcgagatcggggaggaggaggagggggagttcatggtgatcgggtccctcttcggcgacgacgacgaagaggacgaagacggcatctccttgccgcagacgccggcgaccgctgtcgccgtcggcttctaacgacactgacgttgaaggaaaaaaaaaaatccccgagaaaatggagagaacaaagatagcacaaaagagtgtttcttctggctgctaatcctggtttgtctacagtaaaagtactgtttttgagtgattttctttttcactagtttcgggtttgggtaaggaggaattgatttcgtgtgtgtgagagctgcggaggccttttgtgcttattttaaaatggcaaaaaaggcgctgtttgggtgttgcattagttgagctgctgtgagtttcatgtctatgcacgagcttttggagttgtaaaaaatatacaatgagtccatgatgaacaaagtaac

SEQ ID NO: 113484 - DNA, 1122 bp, Zea Mays
atggcgtcggaggtggaggacgaggcggcgacgccgctgctcgccaacggtgcagccgacgtccgccggaggagggaccaggcgaaggcaattctgtccacgcaggccgtcaggatcgccaccaaggccgagcagcatgagcgcttcatctttaaggtcacacacttgctgggtgttcttggatttgggggattttgctatctcttgggtgccagaccacaggatgtgccatatgtgtactgcctgttctatgtcatatttgttccgctccgctggatttactaccgctacaagaaatggcattactaccttctggacttctgctactatgccaacacctttctccttgtaatgattctcttctacccagaggatgaaaaactttttatggtttgcttctcgtttgcagagggtccgcttgcttgggcattaattgtgtggcgttgcagcttggttttcagttcatttgacaaacttgttagtgtcctgatacatctcttacctgggattgttctattcactatccggtggtggaatccacaaacatttgctgccatgcacccagaaggaagagatgctagagtcacatggccatatgtggaggacaaatcatatctgtggacatggcttttttttgttccgctagctgcttacaccctgtggcaacttatgtatttcctcatagttaatgtcctgcgtcgacagaggttgttaagggaccctgaagtcatgacatcctacagggagctctcgaagaaagcacagaaagcgaacaacatctggtggaggctgagcggactgctgggtgaccggaaccggcaggtcatgtacatactgctccaggcgctgttcacagtggcaacaatggcactgaccgtacctatattcctgtcctaccggatgcacgtggtgttcctgatactcaaggtgtgcgcgtcgacatggaacggtggcagcttcatcttggaggtgatgcctcggcaagtagtgcagaagcagctgaagaaactggacatgaagcccatggaacaggggagctcgacacaaggtgcgccaggtggtgatggtggcacattgggtaaccaccaccagcacacatccgaggagcatatccaggagtga

SEQ ID NO: 113485 - DNA, 420 bp, Zea Mays
atgcgcctgtgcgcagtaccactgtcatccgcgcttgcagccctggcgttcgcgctgttcctgctcaactcgggcgtcgccacgcgccgcgctctaggccgcggcgacgcctgggtggttgcgttcgtcgcggccgccacggtgcttgtgaccgctctcgtcgccacggtccgcgctcacgaccgcgcgcgcgaggaggggcgccggggcctgttcagggcagtggcgtgggctcagtccgccgcgctcacggctatgttcgcgcaccgtgtcgccgcgctcccgcaggccccggccatggcttgcctggtctggacgatggccggcggcacgatagccggagggttctactgcatctttctgcatggtcgggatggcgctgtcgtcggcgctggtggccgggatgcacgacaggcgtag

SEQ ID NO: 113486 - DNA, 371 bp, Zea Mays
gagttgagacaggagaaggcactgtcaatcagatcatcatgttggaaattcagctgcaagctctacaacggtgctacacaataatatctgccgaattaaatatctgtttgatcctatcactaccttttcctttgtgtttctttattgttgcatgtatgaatgctaccaccaatgatttatttttctctgactgtatgaaaagagaagaatcttgaagaactggtgtcaggtcgttccattccatcgccttgtttgcttcctcctgctactcggcaagagatcgcgtaatgtcagccagcatcttgagcgcagggcaagggttgtccagaggtacatgtccattgttgccatcagcatcaagacaggaagtg

SEQ ID NO: 113487 - DNA, 96 bp, Zea Mays
ctccatcgtcgtgttgcggcgctgccattgccacgagctccatatataaaatgggttgttcagatcataataactaaaacaatgacgtgccaagac

SEQ ID NO: 113488 - DNA, 3140 bp, Zea Mays
acattttcctcccactactacactttattaatcacacagaccgaatcccacgccttctctttccttccccttcgttctctccctgctgctctgctcctgccgcctggctgccgtgccgccgctgatccctctccctctcttccccctcaaagccccaattgccgggtgctcctcttccacccccattgccgactgcttcccgccagagagtggggaagggaggggggtgagaagggagatggcttcttggatagggagtgggtaagaatcacacgatgcagttacctccacctttctctcttctccttttgcgggcatattcttcacctccgcctgcctagatccttctttctttggcccggcttagcttccagtctcaccaacagttctgacctcggagcatctatcaatcggcccactccactctctgcgccggttccatcgggttttgatgcaagagtagaggagttgttgctaggttgttgtgactggttgttggagagcaggagccagattgaggagaatttcagccaattttagcggaaccgtaaaacccatcccgagaatttttcctgcgcctcctacggttaggagctgtggctggacagtgcctgcctacgctctggagttttagtgcagttttacaagttttcagtcaattttgatcaagctcaggggaagtaccaatttgggagtgctagctgctgctgcagcagcagctgcgggttccttggtggcagatgggttgctccaactctaaagtggacaatgaggagcctgtgaggcgctccaaggacaggaggcagctcatgaagcagctggtgcgccgccgccctgagcttgcagctgtgcacattgcgtacctgcacgccctccgtaacacaggagccactctccggcaatttgtggagctggagtctgcattgtcacagcagcctcccgtagaccttgtggtgccgccctcgcctactccacagcctcctcctcctcctcctcctgaactctcggtgacatcctcattgccaccctcgccatgccccccgccgcctgtcccttttagtccagtaacaaccataagaaagatggagaagagggatggtgagctcccaccaccaccaccacctctggttttgagtccgataagattaaggaagatggaggatgagttccatgggggtgattttactgatgatgacgacactgacagctgctcgactcctctaccaccacccctgccacccggcatagattgggaggacttggatccctacaatgtgtgccccttgagtttcccatctccatttgctgataggaatgataaagaagtggcctcgcatgtgaccatggacaatgatcctgaagtagacacagaattttatggagaggaggatgaaagcatgcttggcaataatgatgtcattgtggatagggtccatgtgaatccagccaagggtagggctctgggtgatggcaactcttcaacggtgagctgggtgacaaaggattcagactctatggcggtgccttggaggagtaagaagtcgcttgtagagattgttaaggagattgatgagtacttcttgaaagcagcagcaagtgggaatgacgttgtgatttttttggactctgctggtggacggcctgatgccttagaggtagaggcaaagaaaggtgcaggaaaaaattctaaacctgcgaaggttttctccacgctttcttggagctggtcttttaaatctcagcaggctagcagagaagcctcagttctgaattctagtgcttctggatatggttaccatggcaagacactggagaagctttatgacgaggaacaaaaactctacaagttaatcaaggatgaagaatttgcaaggctccagtataagaaacatgtctcagtgctacaaaagctggaatcaggagggcatgatagactgcatgccgaaagacttcgggattctattgaagaactgcaaactcggataatctcattggaagaagctgtgagtttggcatgtttttccatatcaaatctcagagacgaggaattatatcctcagatcattgaattatctgcagggcttgtgcatatgtggaaaaacatgcacgagtgccatcaggtccagaaccatattgcccagcaagttagtctccttggcaacagacctgggagtgaaccaacaagtgacactcatcgccaggcaacatctcagctggaaattgaggtgtctggatggcacactgccttctgcaatcttatcacatcgcagcgtgaatacgttagcatccttagccaatggattggtctcacagactgccttccggatgatggtggcttaatgagaagttcatctggaatccttagcctctctgaggaactccagcgtgctcttgacaggctaccagagaaggtagcagctgaagcgataaagacctttatgtcagtcatacactctatagttgtacagcaaagtgaagagcgccaactaaagaagaagtcagataacatggatagcaagttccagacccagttagagaaacacagtgaaaatacaatgcaaaactcggcccagcctccaaataagaataactattcagcatcaaagaatggaacgaaactggatgcatttataaagcaggtcgaggaggagaaagccagatacctaacctctgtgagggtaagccgagccatgacactgaacagtctgcagacaagccttcgaaatgtgttccatgctctggagggattctcaggagtgtgcgtacaggcatttgaaggtatcagcagatgcagtgaagttgctgttattcactcgggagcagcttcacctgctatttcctcgtgaccttgcttcaatgactgtgattattcattgtaagtaggcaaaggataaactggttccacgtgaatacccttcgcttctaattttcagaactttgaatagctttcgggggattatgtgaagtcaatataggcataatagtcttgaatacatcacaatgtctcaacttacattttggttcttattgcatgggatgtactgctctgtacataatcatttacattttgaccgaaccagtatttttctcccttcacattatatctatacataattgttttgattctgcctctgatttat

SEQ ID NO: 113489 - DNA, 1009 bp, Zea Mays
cttcccaaacggagagagaaacggaaggcgaatagaagaaaagcgtgctgttttttcatcctctcgtgtctcgtgtgtgcgcgcgagcgtgcgcctccctccccatctcgcgatcccagttcgatccgctcgcccgctctcccgatccgacccgccctccgcggccgggcaattcggccgccgccgctcggattcgcgtgggctcgccctcagattcgctctccccggcgccccaaaccctagatccgccgctggtcgtcccaccgccgccgccatgttttggcgcatgaccggcctctccgcggcctcgcccgtggatacaattctggacaaagaaaattttacattggaagaacttcttgatgaggatgaaattattcaggagtgcaaagcactgaactcaagactcataaacttcttacgtgacaagtcccaggtggaacagttgcttcattatattttggaagaagttccagaggatgctgaaaggaagcgctccttcaagttcccttttattgcttgtgaaatatttacttgtgaaatcgatgtcattttgaggaccttagtagaggatgaagagctaatggacttgcttttctcatttgtgaaacctgatcatccacatagcacattattgtctggttacttcagtaaggtggtaatatgtttgatgctgaggaagactgctccacttatgagttatgttcaggggcatccaaagatagttgtccagcttgttgacctgattggcatcacatcgataatggaggtgctgatacgactgattggtgctgatgagaccatatattcaaactatggtgatacattgcagtggttagaaaatacagatgtccttgaaatgattgcagacaagtttggctcatcgggcaagcctggtgcaatgaaacagaaactttgcattcaattgaaacattcttacctctatgacatggataacagtgtccatctcaattatgcaacaaaagtaacagggaaaccaccatattga

SEQ ID NO: 113490 - DNA, 2083 bp, Zea Mays
aggttgttccatcatgctcttgaagaatcaagacccaaatctgttctggttcattcactatcagtgtgcatatctttgctggatccgaaaagactagcatcagcttcgtatcaagcattcagaagcaacttaagtcatggggcattggtcacagccagtccagagacagttgatggcatgcttgacagtttaggcaacttgctgaagttactggacacttcggctactgaaagcgggttgccaacaacttatggatctttgcgcccacctcttggaaaacatcgtctgaagattgtagaattcatctctgtgctgcttacaattggaagtgaaactgctgaaaaagagctaagaaggcagtcagcaataaagcgctcgattgatttgttctttgagtatccatataacaactttttgcaccatcatgttgagaatataattgttgcttgcctggagggtaaaagacctgaagttgttgagcatgttcttcatgaatgtgatattgttggtaaaattcttgtctcagagaggttttcatccttgtcgactgagtctaatgggcctactgttccctctgaagggaaaacccctccaagaattggaaatgttggtcacatgacaagaatagccaataaacttattcagttgggcaatagtaacaacacaatccaggctcacttacaggaaaataatgattgggttgaatggcaaacaaatgtgctggtcaaacgcaatgaagtggagaatgtttatcattgggcttgtgggcgcccgacatctttacatgaccgtggtagggacagcgatgatgatgacttccgggacagggattacgacgtggcagctcttgctaataacttaagtcaggcatttcgttatgggatatatagcaacgatgacattgaagaggcacaaggatcacttgaacgagatgatgaggatgtgtattttgatgatgaatcagctgaggttgtaatatcttctttgcgtctgggagatgaccaggacagctccctctttacaaattcaaattggttcacatttgatggagagagaggcattgatgatcgtttatctgcctctgttccttcatcatcccccaattctctggagacttcactagaggccgaggaagctgatgatggtaaagtcattggcactgaggatgaaatggaaacagtatatcttggaaatggtagtgctgaggaggtaaaagatgtagcagaatgtaatgaacagccaaattgttgtactgaggatgagcgattgaaaaatactgaagggattgaacggcatccagatgtttcaaatcactataccgacatatgtacaaatgaggctgcctctgctgcagcagaatcttcagccccatcagttgagatagtggcaaagaaaacagtagatgaaccatcggaggcagaaagaacagtggatgaaccggcagaatcatctttggacagttctgtctctatacctttgcctgctcctgttaatggtagtgagcctgccaactcggaagcctcttccgaacaagttgcccatgacactgatgtgcagcaaccagtcaaggaagctcctgatgaggacgttaatgcaaagaaaactgatgtagccaaagcaagcgagtgaattagcaacatgttggactgagctgatcagagcaattacttgcgaactgaaaacactggagtgtagcctgtgctcagctgccacaagatagcctgaagcaaactgctgtacaataagcaagtgattgttctgccatcaacggtggcatatcactgtacaaatgagcaccattgactaacgcacataagtcgccttgtctgaaactggtcattttctttgaaattcaccctccagttcatgtgctttggtggcagacgtcgtggcatggtatatggtacctgagaacattctttgggtggcaactggttttggctacttagtcttctgttgcctgtaatatgagatgtgatgttatttctagtctagctattgttgtaatttttttggactctacatgtgtcagttcgacttcgaacaatttttttataaagattcgtcactgcattagaggacc

SEQ ID NO: 113491 - DNA, 112 bp, Zea Mays
ccaagataaccacgtggcaaagtcaagcaagaccgaaaaactagtgttgcatagaatgcaagttttatatcaatacacaatacaagttaaaataaaatacacaatacaagtt

SEQ ID NO: 113492 - DNA, 94 bp, Zea Mays
acatttacattgcaagaactacttcaggtttacaaaagatatatcttctcttagtcaacgagtgctgctatctggcccaacagggaaacaacta

SEQ ID NO: 113493 - DNA, 659 bp, Zea Mays
gttgttcctactcttccgcttacttctgctaggctgccctcgctccttctggaagcggcttcgtcgcttttctttccaccaacgatgccatctttctccgccgccggcaacatctgtaacccctctccagcgatgcaccacataggctagcacgcgcacgacgagctccaagcaacttgcattagttggagcttcatctgcaagacgggagccttcggcttcctttctcctcatcttcaccctgggccgagctaggcggcgtgtcggatgacggtgaggtgctcgtgctgcagggctaagctagaaccgcgggcaccaagaccctgtaccgctctgtcctctacaagctcgagtcgtcgagtgcctcgtcggagacaacaccggcattgtcctcgttgctgctcgcacgatcagggatgtccctttctttccccaagaataaatggattttatccaatatatttgctggaaaaccaagtttttctctctttgggaagatatcgatcacatccaggttgttccaccgaagctagcaacagtcgacagtccatcattgacgatcatccttcacagggacagaggtcttgaagtaaagcatcctcaaaggagaatgaagttccattttcagacatttgtttcatttagtgatgcccacaggt

SEQ ID NO: 113494 - DNA, 852 bp, Zea Mays
atatttcttttctgtcggaatgggatatgagtgggctgggccgaatgcaggcagggtcgtctggtgctacactgctactctttccacgaccccatggcaaaatagcaaatttctctcgattgtgatatcagcccacatagatataaccgtttggggaaaagaatcgtgggctgtgacctgtcgtcttcgtctccggcagagcaaagcggcggcgaggcgggagatatagaggagagacgagagcgggatggggtacctgtggagggtgcggctgtcttcatttgctgccggcgcggcgacggcttcggcggcggggttcttcctcctctacaaggaccacctgctcgcccgcgctgccatcatcagccaggtggaggacatcaaggaaacttctgaaaagcattatgcagccctaaataagaggatatcagcactggaaagcagaagagaaccaggaactatcaaagaggcatcagattaattctgagttgggcttatgtcatggttacatctgcccatgtgtttttgattgctgcaggcggtataaactgcagcattttaagctgtactattgtgttgttgaaattctatgaactctgaatttgaattgtgttacacttcttgtctatgtcgtctttatgagatggacaagatcaaataaaatacattttttcttgatagaataagttatcagatgtgtgcaaagtatcttttttttttgtcttcgtgaccatttgctaaacaacagtattggcacttgttagtctatggctctgtgcattgcattgcttttgagcacttcggcaatttacatgtgaattttgtacaatcacgggtgactgcaaagcctgt

SEQ ID NO: 113495 - DNA, 1139 bp, Zea Mays
cagtggtccgttccattgggattgggtgggtctggggacctaggcagaccagatggccgggctattcaccgagcaggctgctgtgtacgccgcagcacggccggcgtacccgaaggatctgtttgccaagctctcggcgctcactgctcaccaccgccgcgcttgggacgtcggtactggcaatggccaggcagccatcggtgtcgcggagcactacgacagcgtggtggccacggacgtgtccgcggaacagctgcggcacgccacgccacaccccaaggtccggtacctgcacacccgcgacgccacgccgggggaggaggacctcgtcgccatgctgggcggcggcgaggccagcgtggacctcatcacggtggcacaggccgtgcactggttcgacctcccggcgttctacggcgccgcgcgccgcgtcctgcggaggcccggcggggtgatcgcggtctggggctacaactaccgcgtgagccccgtggaggacatgatggcgcgtttcttcagcaccacgctgccctactgggacccccgagctcggtattgcactgacggataccgggacctgccgttccccttcgaggacatcgggctcgggaaggaaggagagccggcgagcctcgacgtggagcacgagatgtcgttcgagggcctgattggcatgctgaggtcctggtcggcggtgacgacggcgaagcagcagggcgtggacctgctgggggcccgcgtcgtgaaagagctggaggaagggtggggtggggcggagctggtgcggaaggtcacatacaaggccttcctcctggcaggcaccccggggcccatggctgatgagtaatcaatgaggacctgtttggaaatatagttttctcgttctacagtatttcaatactatagtatgtcgtatgttataacataaaactgtagttttagcaaaactaaagtaaaatcaaagtagttcttcatacatagcactgtttggtagcatatagtttttggcttatataaataaggaagataagtttaaattcaaatagctacaacttatgatgggctgcatcatcggtaagacaagtttaaattcaaaacagtctgttgtaaccatctgagtatcgaagttcacaaagttg

SEQ ID NO: 113496 - DNA, 1711 bp, Zea Mays
actcctccacctctcccacccaacaacaaaacaagcctaatggcttcctctccatctcacgccactgcgttgcctacttgccctagaaccctcgccgccgcccctctttaggattcccatgtccctggtcgccccctgacacgcccgccccggatcctgcaccggaattccgcgtggaattccgggccgaaccgcctctctgcgtgcgcctccgaccaccaaactctctcacacgcgcgcgcgcgcacgtctgaggcggttggattctccggtgggggtcccttggtctcgatttgctgctgatgggggtgccgaagcagcgctggacgccggaggaagaggccgcgctcaaggccggcgtcgccaagcacgggcccggcaagtggcgcaccatcctccgggactcggacttcagcgcgctcctgcgcctccgctccaatgttgacctcaaggacaagtggcgcaacttgagcgtcaccgcaggaggttacgggtctagagagaaggcaaggatggcgttgaagaaaggcaggcgcgtggtgcctaagcttactgctgagccaatggatgtagatgagaaggatatggacaacgctcatgacacagtcattgatgtggaaccgttagcaatggctttcgagcccttgccttttttggaaagcccagataagtcagttgctaggctcgatgatctcatagtagaagctataaggaagcttaacgagccatctgggtccaataaggcagtcatttctggatatattgaggaccaatactggccgcctgctgattttcaatacctgctatctacaaaattgaagtcattggttaattctggaaaattaatcaaggtctgtccctccctcctaccctggctagtctttttaggaataaagtggggccttcaagctgcatactatttgaatcgtgattgtaggtaaaccaaaagtacagaattgcaccaagttcttccttgggcggaataagcactaaggtatcctcttctgaagggatgaacacagaaaataataatgttaaacggctaactaagcctcaagtggttgctgaactggagaagatgaaaggcatgaccagggaagaggctgctgcctttgctgccaaggcagttgccgaggcagaagtagcaatggcagaagctgaggaagcagcaagagttgcagaggctgcagaaaatgatgctgaagctgcaaaggcttttcttgatgctgtcattttgtcaatgagaaacaggaacgctgcttccatgatacttcgagcttgctgatcctttacccatgcagcacaccgatgttctgctgcaaagattttctggatagacgagtttcttgtatagccttatagatcatggcgggttttcaacagcttgctgttgtcctgtgctgtgcagccaatcgacaacatgataacaagaatgatcgagaaagtagtcttcatttttttttgtttcccattgtgttgctttgtaattaaactatagccttttcccttcattagttgatgaagtgatgtcgtctaatagaacaactgtagtgaaaagaaaatgtcagaaagccgccttagttaatgcaaattgctgtgatagtatttttgcagaaatgattatatggtgacagcgtttaagattataactgccttgcagttgccgtcgattatatgcctgtaatagctagtttgggaactccatttttct

SEQ ID NO: 113497 - DNA, 1551 bp, Zea Mays
ctcccacccaacaacaaaacaagcctaatggcttcctctccatctcacgccactgcgttgcctacttgccctagaaccctcgccgccgcccctctttaggattcccatgtccctggtcgccccctgacacgcccgccccggatcctgcaccggaattccgcgtggaattccgggccgaaccgcctctctgcgtgcgcctccgaccaccaaactctctcacacgcgcgcgcgcgcacgtctgaggcggttggattctccggtgggggtcccttggtctcgatttgctgctgatgggggtgccgaagcagcgctggacgccggaggaagaggccgcgctcaaggccggcgtcgccaagcacgggcccggcaagtggcgcaccatcctccgggactcggacttcagcgcgctcctgcgcctccgctccaatgttgacctcaaggacaagtggcgcaacttgagcgtcaccgcaggaggttacgggtctagagagaaggcaaggatggcgttgaagaaaggcaggcgcgtggtgcctaagcttactgctgagccaatggatgtagatgagaaggatatggacaacgctcatgacacagtcattgatgtggaaccgttagcaatggctttcgagcccttgccttttttggaaagcccagataagtcagttgctaggctcgatgatctcatagtagaagctataaggaagcttaacgagccatctgggtccaataaggcagtcatttctggatatattgaggaccaatactggccgcctgctgattttcaatacctgctatctacaaaattgaagtcattggttaattctggaaaattaatcaaggtaaaccaaaagtacagaattgcaccaagttcttccttgggcggaataagcactaaggtatcctcttctgaagggatgaacacagaaaataataatgttaaacggctaactaagcctcaagtggttgctgaactggagaagatgaaaggcatgaccagggaagaggctgctgcctttgctgccaaggcagttgccgaggcagaagtagcaatggcagaagctgaggaagcagcaagagttgcagaggctgcagaaaatgatgctgaagctgcaaaggcttttcttgatgctgtcattttgtcaatgagaaacaggaacgctgcttccatgatacttcgagcttgctgatcctttacccatgcagcacaccgatgttctgctgcaaagattttctggatagacgagtttcttgtatagccttatagatcatggcgggttttcaacagcttgctgttgtcctgtgctgtgcagccaatcgacaacatgataacaagaatgatcgagaaagtagtcttcatttttttttgtttcccattgtgttgctttgtaattaaactatagccttttcccttcattagttgatgaagtgatgtcgtctaatagaacaactgtagtgaaaagaaaatgtcagaaagccgccttagttaatgcaaattgctgtgatagtatttttgcagaaatgattatatggtgacagcgtttaagattataa

SEQ ID NO: 113498 - DNA, 1361 bp, Zea Mays
ggtgaactactactgctaggaaaatctgtcgctctctctctctctcaacgacgccgcgatccagatccagccaggtatcaagtcatccttccgccgccgcgtactgcgcctatcttgcttctccggcggacgggcgtacccatcgtcctcgatcatcccccggactggatcggaacggagatccagccggacctgcggtgatcccttccttttctcggatagtatagtgagctagccaatgaagaggtaaattcgtcaggcttgtatcaagttagtagttcatggtgcctggatgagcagtagagatgctactggccgtggaaggaggagggttcttctcgtcttcagcttcggggtacagccatggccttgctctcttgctactcggacggaaagctgaggagaagcccgtcaaggcttcgccgtggaaccagtaccggctagtcgaccgggaggccgagcaggtgtaccacctgccctccgccaaggatcaggcgcctgggaaatgtgctccctttgtctgtttcggatgcacggctaatggcctcgaggtggcgtctccttccaaagcggtctccagcaatgcgctcggtaggggtacctcacaggaagaagcatcttgttcagcacacaaggcgttgacaactagtgcttccatcagtggcagtgagagacgtggctgtcttaagagcaactccaaaagggattctttggagcaccgtatagtggtgagcgagggggaagaaccacgcgagtctgtggaagaggtgcagaccttgagatctagcatagaacggaggaaagttcagtggacagatacatgtggaaaggagctttttgagataagggagtttgaaacaagcgacgagggcctgtcggatgatgatgcagaaaacgatggtttccggaaatgtgaatgtgtgattcagtagatttcatctctgcacaacaagcctgacagaaacatctcatgggaagcctgccctgctgggaaagatgtgccacggagactactttgccgctgaaatgatcgacgacagtcgaaacaaaacaaacagccatgaatcgatatcgtgctagagtatttgttggttatatgcttaactagtctgctcagcagggttatagtttcgatgcccacctgtacaatatcaagatcccctttctttcttttctgtcacattttatttttctcgctttccattgtgttttcacgcccgctgtaccatatgaggctgccatgttacctcctccagggattttggatccctgacatcatgctgttttattttgttttgctcctgacgtatttagtgatggcttgttgatagtttcgtccaaattggtaacattcattcttc

SEQ ID NO: 113499 - DNA, 1365 bp, Zea Mays
tctgtcgctctctctctctctcaacgacgccgcgatccagatccagccaggtatcaagtcatccttccgccgccgcgtactgcgcctatcttgcttctccggcggacgggcgtacccatcgtcctcgatcatcccccggactggatcggaacggagatccagccggacctgcggtgatcccttccttttctcgtgtatatgatggattgtttcctttgcaggatagtatagtgagctagccaatgaagaggtaaattcgtcaggcttgtatcaagttagtagttcatggtgcctggatgagcagtagagatgctactggccgtggaaggaggagggttcttctcgtcttcagcttcggggtacagccatggccttgctctcttgctactcggacggaaagctgaggagaagcccgtcaaggcttcgccgtggaaccagtaccggctagtcgaccgggaggccgagcaggtgtaccacctgccctccgccaaggatcaggcgcctgggaaatgtgctccctttgtctgtttcggatgcacggctaatggcctcgaggtggcgtctccttccaaagcggtctccagcaatgcgctcggtaggggtacctcacaggaagaagcatcttgttcagcacacaaggcgttgacaactagtgcttccatcagtggcagtgagagacgtggctgtcttaagagcaactccaaaagggattctttggagcaccgtatagtggtgagcgagggggaagaaccacgcgagtctgtggaagaggtgcagaccttgagatctagcatagaacggaggaaagttcagtggacagatacatgtggaaaggagctttttgagataagggagtttgaaacaagcgacgagggcctgtcggatgatgatgcagaaaacgatggtttccggaaatgtgaatgtgtgattcagtagatttcatctctgcacaacaagcctgacagaaacatctcatgggaagcctgccctgctgggaaagatgtgccacggagactactttgccgctgaaatgatcgacgacagtcgaaacaaaacaaacagccatgaatcgatatcgtgctagagtatttgttggttatatgcttaactagtctgctcagcagggttatagtttcgatgcccacctgtacaatatcaagatcccctttctttcttttctgtcacattttatttttctcgctttccattgtgttttcacgcccgctgtaccatatgaggctgccatgttacctcctccagggattttggatccctgacatcatgctgttttattttgttttgctcctgacgtatttagtgatggcttgttgatagtttcgtccaaattggtaacattcattcttc

SEQ ID NO: 113500 - DNA, 1031 bp, Zea Mays
gacaatcgcagcaggtcagcaccagaatatctgaatgtgctgcgcccatgctgagttcctgaaaacctcacgaactgacctgaccgttaggagacaacacgttcctgggccctgtgttcgcggacggaaacttggcaccacacactcttatccacaacgagagcgtgggtgtgtgtcccaacattctccacgcgttccttccttccctccatctcctctctgttcatagcctcccaagaaacaagagccaaacagcgcttgcgaagctcaagcgccgcagcaatgtctctggccccgtccatcccttccatcaaggtgaaggtgggggccgtctcggtcgctcctccacaccgcgcatgccgatccttcgcggtgatcaggagctccaaggcagagggccccatccggagacctgcggcgcctccgctgtcgccaccgccgccgatgccacccaagacgccggctctgtccactcctcccaccctgtcgcagcctccgacgcccgtgaagcccgctgctccacccacgtcgtcgcagccgatgccaccttctcctgagcccaagccagttgacgccacagcccagatgcggaagccggtggctggggccatgacgctggagtaccagaggaaggtggccaaggacctgcaggagtacttcaagaagaagaagctggaggaggccgaccagggtccgttcttcgggttcttgcccaagaatgagatttccaacggaaggtgggccatgtttgggtttgcagtagggatgctaacagagtatgcaacaggctcggattttgttcagcaaatgaagatccttctctccaattttggaattgtggacttggattaatggtggacttttggtgttttcgttatgtacaagtcttttaaatgtaatgtacttacttgatatggtatatagaaaatttcatattgcacgttgttcaacttagtttcattgtgctgtcctttttggatagacattaatcccaatttccagtttccttcgattagatacctggatttata

SEQ ID NO: 113501 - DNA, 2167 bp, Zea Mays
atggccctcacagaatcgcccgatcccagcccctccaccggcgacccattctgctcacttccatgcgggccccagcccgccacgaatccccgttcccagtcccgcctgctccgacctcgcctttctccatctagggtttctctctccatttccaccccatcggaccggagcttcgcatggagtcatcgcagtctcggaagcggacgcgccaagcgtatgactgcgccgccgcgctgccaccagagcgagaagtggtagcgaggggtggcgcgtcgcctccatggagggaggatgaccgcgacggacactacgtcttcgatctcggcgagaacttgacccgccgatataaaatcttgagcaaaatgggagaaggttcgggttttctgcaatctgtcgtctcctcttctggtgggtatcctcgttattattctaatgaagagggctacgagttgggttttcgtaggtacatttgggcgtgttttggaatgctgggaccgtgaaacacgtgaatatgttgccataaaagttgttcgcagtatccgcaagtaccgtgatgctgcaatgattgagatagatgtgctcaatcgccttgcagaaaatgagaaatacagatctctgtgagtatctcagaaacctgattatgtaaagtataaccctattctgtttctgactcgtcagttcctcttcaattaccagctgtgttcaaatacagagatggtttgactatcgtaatcatatatgcattgtaagtactagcttttggtcaattatactagtttctagaagtcagttaccaattctgagaatgcatttcatttttgtggatttgcggatgtgttgttgtttatattatttatcttactggccctcccaatacgccttgtatggaatgagagactcatctataaaaactatcacaactctcctgtagttagattggcttgacagtaaaatcattttgttcttcactcatgaaggttccctcatatggtcccaaatttaaaatatactttattcaatggatatcgatgattttgtcaggtttttgagaagcttgggccaagcttgtatgattttctaaagagaaatagataccgacctttccctgtggaacttgtgcgggagtttggacggcaactgttggaatctgtagcatatatgcatgacttgaggcttatccacactgatctgaagccagaaaacatactacttgtgtcttctgagtatataaaagttccaagtacaaagaagaattcacaagatgagatgcatttcaagtgcttgccacagtccagtgccataaagctgatagattttggtagtaccgcctttgataatcaggaccataactcgattgtttctacgaggcattacagggcacctgaaataatcttaggtttaggctggagttttccatgtgatatttggagtgttggctgtattcttgttgaactatgctctggggaagcattgtttcagacacatgagaatctggaacacctagcaatgatggagagagttttgggacctctaccagagcatatgatacggaaatcaagttcttctgctcagaaatatttcaggagggcaacacgtttaaattggcctgaaggtgctgtttcaagagaaagcatcagagctgtgaagaaactggatcgactaaaggacttggtatcgaggaacgctggccattcgaaggcagagctggcagacttgctatacagtatcctccggttcgagccatcagaacgtctgacagcgcaagaagctctggagcatccattcttcaggaacccgacatgacttgttggacaggcttgactcgtgtaactctctgcttcaagaaggtatcgaggaagcaggcagagccgtccattgcaaagctgatgggtatcttgctcctcttttaccagagagtttgtgtaagcctgtcagtaaggcttcttgcggtggtgataaagctgatggctttggtcacccaatgtaatgtacactagcattttttttttacctagggagtttagtgcctgtatgttgttaaccgggacgcgctatgagctgcgtcccaatgccctggttccataatccaattgcagatgttgaaaatcaagcatgaagggatccctgcgcagctgtgctcccgtagctgcaatagtctgttggatgc

SEQ ID NO: 113502 - DNA, 2087 bp, Zea Mays
atggccctcacagaatcgcccgatcccagcccctccaccggcgacccattctgctcacttccatgcgggccccagcccgccacgaatccccgttcccagtcccgcctgctccgacctcgcctttctccatctagggtttctctctccatttccaccccatcggaccggagcttcgcatggagtcatcgcagtctcggaagcggacgcgccaagcgtatgactgcgccgccgcgctgccaccagagcgagaagtggtagcgaggggtggcgcgtcgcctccatggagggaggatgaccgcgacggacactacgtcttcgatctcggcgagaacttgacccgccgatataaaatcttgagcaaaatgggagaaggttcgggttttctgcaatctgtcgtctcctcttctggtgggtatcctcgttattattctaatgaagagggctacgagttgggttttcgtaggtacatttgggcgtgttttggaatgctgggaccgtgaaacacgtgaatatgttgccataaaagttgttcgcagtatccgcaagtaccgtgatgctgcaatgattgagatagatgtgctcaatcgccttgcagaaaatgagaaatacagatctctctgtgttcaaatacagagatggtttgactatcgtaatcatatatgcattgtttttgagaagcttgggccaagcttgtatgattttctaaagagaaatagataccgacctttccctgtggaacttgtgcgggagtttggacggcaactgttggaatctgtagcatatatgcatgacttgaggcttatccacactgatctgaagccagaaaacatactacttgtgtcttctgagtatataaaagttccaagtacaaagaagaattcacaagatgagatgcatttcaagtgcttgccacagtccagtgccataaagctgatagattttggtagtaccgcctttgataatcaggaccataactcgattgtttctacgaggcattacagggcacctgaaataatcttaggtttaggctggagttttccatgtgatatttggagtgttggctgtattcttgttgaactatgctctggggaagcattgtttcagacacatgagaatctggaacacctagcaatgatggagagagttttgggacctctaccagagcatatgatacggaaatcaagttcttctgctcagaaatatttcaggagggcaacacgtttaaattggcctgaaggtgctgtttcaagagaaagcatcagagctgtgaagaaactggatcgactaaaggacttggtatcgaggaacgctggccattcgaaggcagagctggcagacttgctatacagtatcctccggttcgagccatcagaacgtctgacagcgcaagaagctctggagcatccattcttcaggaacccgacatgacttgttggacaggcttgactcgtgtaactctctgcttcaagaaggtatcgaggaagcaggcagagccgtccattgcaaagctgatgggtatcttgctcctcttttaccagagagtttgtgtaagcctgtcagtaaggcttcttgcggtggtgataaagctgatggctttggtcacccaatgtaatgtacactagcattttttttttacctagggagtttagtgcctgtatgttgttaaccgggacgcgctatgagctgcgtcccaatgccctggttccataatccaattgcagatgttgaaaatcaagcatgaagggatccctgcgcagctgtgctcccgtagctgcaatagtctgttggatgcaagtatcgtgatgtcacgagtttgggatttgttgcattccgactgcatgggtggtgtgaagaatgggcatgaaatgccgtgtcctgttgttgagacttgtgtgtagctggtgaagtgttgttgttgatggagtacaacttgtggaaagagagtgcgcataggctagaaagtacagtatcttcatactaggtaagggatgtttctgaagctcatgtgcaccgcgattgcatgttggcaccgaatcttatcgtacctcatggatccctcactcgtgctgtttcgtcctgacatggac

SEQ ID NO: 113503 - DNA, 1502 bp, Zea Mays
cggcgacccattctgctcacttccatgcgggccccagcccgccacgaatccccgttcccagtcccgcctgctccgacctcgcctttctccatctagggtttctctctccatttccaccccatcggaccggagcttcgcatggagtcatcgcagtctcggaagcggacgcgccaagcgtatgactgcgccgccgcgctgccaccagagcgagaagtggtagcgaggggtggcgcgtcgcctccatggagggaggatgaccgcgacggacactacgtcttcgatctcggcgagaacttgacccgccgatataaaatcttgagcaaaatgggagaaggtacatttgggcgtgttttggaatgctgggaccgtgaaacacgtgaatatgttgccataaaagttgttcgcagtatccgcaagtaccgtgatgctgcaatgattgagatagatgtgctcaatcgccttgcagaaaatgagaaatacagatctctctgtgttcaaatacagagatggtttgactatcgtaatcatatatgcattgtttttgagaagcttgggccaagcttgtatgattttctaaagagaaatagataccgacctttccctgtggaacttgtgcgggagtttggacggcaactgttggaatctgtagcatatatgcatgacttgaggcttatccacactgatctgaagccagaaaacatactacttgtgtcttctgagtatataaaagttccaagtacaaaggtttaggctggagttttccatgtgatatttggagtgttggctgtattcttgttgaactatgctctggggaagcattgtttcagacacatgagaatctggaacacctagcaatgatggagagagttttgggacctctaccagagcatatgatacggaaatcaagaaatatttcaggagggcaacacgtttaaattggcctgaaggtgctgtttcaagagaaagcatcagagctgtgaagaaactggatcgactaaaggacttggtatcgaggaacgctggccattcgaaggcagagctggcagacttgctatacagtatcctccggttcgagccatcagaacgtctgacagcgcaagaagctctggagcatccattcttcaggaacccgacatgacttgttggacaggcttgactcgtgtaactctctgcttcaagaaggtatcgaggaagcaggcagagccgtccattgcaaagctgatgggtatcttgctcctcttttaccagagagtttgtgtaagcctgtcagtaaggcttcttgcggtggtgataaagctgatggctttggtcacccaatgtaatgtacactagcattttttttttacctagggagtttagtgcctgtatgttgttaaccgggacgcgctatgagctgcgtcccaatgccctggttccataatccaattgcagatgttgaaaatcaagcatgaagggatccctgcgcagctgtgctcccgtagctgcaatagtctgttggatgc

SEQ ID NO: 113504 - DNA, 1929 bp, Zea Mays
acccattctgctcacttccatgcgggccccagcccgccacgaatccccgttcccagtcccgcctgctccgacctcgcctttctccatctagggtttctctctccatttccaccccatcggaccggagcttcgcatggagtcatcgcagtctcggaagcggacgcgccaagcgtatgactgcgccgccgcgctgccaccagagcgagaagtggtagcgaggggtggcgcgtcgcctccatggagggaggatgaccgcgacggacactacgtcttcgatctcggcgagaacttgacccgccgatataaaatcttgagcaaaatgggagaaggttcgggttttctgcaatctgtcgtctcctcttctggtgggtatcctcgttattattctaatgaagagggctacgagttgggttttcgtaggtacatttgggcgtgttttggaatgctgggaccgtgaaacacgtgaatatgttgccataaaagttgttcgcagtatccgcaagtaccgtgatgctgcaatgattgagatagatgtgctcaatcgccttgcagaaaatgagaaatacagatctctctgtgttcaaatacagagatggtttgactatcgtaatcatatatgcattatatgcatgacttgaggcttatccacactgatctgaagccagaaaacatactacttgtgtcttctgagtatataaaagttccaagtacaaagaagaattcacaagatgagatgcatttcaagtgcttgccacagtccagtgccataaagctgatagattttggtagtaccgcctttgataatcaggaccataactcgattgtttctacgaggcattacagggcacctgaaataatcttaggtttaggctggagttttccatgtgatatttggagtgttggctgtattcttgttgaactatgctctggggaagcattgtttcagacacatgagaatctggaacacctagcaatgatggagagagttttgggacctctaccagagcatatgatacggaaatcaagttcttctgctcagaaatatttcaggagggcaacacgtttaaattggcctgaaggtgctgtttcaagagaaagcatcagagctgtgaagaaactggatcgactaaaggacttggtatcgaggaacgctggccattcgaaggcagagctggcagacttgctatacagtatcctccggttcgagccatcagaacgtctgacagcgcaagaagctctggagcatccattcttcaggaacccgacatgacttgttggacaggcttgactcgtgtaactctctgcttcaagaaggtatcgaggaagcaggcagagccgtccattgcaaagctgatgggtatcttgctcctcttttaccagagagtttgtgtaagcctgtcagtaaggcttcttgcggtggtgataaagctgatggctttggtcacccaatgtaatgtacactagcattttttttttacctagggagtttagtgcctgtatgttgttaaccgggacgcgctatgagctgcgtcccaatgccctggttccataatccaattgcagatgttgaaaatcaagcatgaagggatccctgcgcagctgtgctcccgtagctgcaatagtctgttggatgcaagtatcgtgatgtcacgagtttgggatttgttgcattccgactgcatgggtggtgtgaagaatgggcatgaaatgccgtgtcctgttgttgagacttgtgtgtagctggtgaagtgttgttgttgatggagtacaacttgtggaaagagagtgcgcataggctagaaagtacagtatcttcatactaggtaagggatgtttctgaagctcatgtgcaccgcgattgcatgttggcaccgaatcttatcgtacctcatggatccctcactcgtgctgtttcgtcctgacatggac

SEQ ID NO: 113505 - DNA, 1896 bp, Zea Mays
acccattctgctcacttccatgcgggccccagcccgccacgaatccccgttcccagtcccgcctgctccgacctcgcctttctccatctagggtttctctctccatttccaccccatcggaccggagcttcgcatggagtcatcgcagtctcggaagcggacgcgccaagcgtatgactgcgccgccgcgctgccaccagagcgagaagtggtagcgaggggtggcgcgtcgcctccatggagggaggatgaccgcgacggacactacgtcttcgatctcggcgagaacttgacccgccgatataaaatcttgagcaaaatgggagaaggttcgggttttctgcaatctgtcgtctcctcttctggtgggtatcctcgttattattctaatgaagagggctacgagttgggttttcgtaggtacatttgggcgtgttttggaatgctgggaccgtgaaacacgtgaatatgttgccataaaagttgttcgcagtatccgcaagtaccgtgatgctgcaatgattgagatagatgtgctcaatcgccttgcagaaaatgagaaatacagatctctctgtgttcaaatacagagatggtttgactatcgtaatcatatatgcattgtttttgagaagcttgggccaagcttgtatgattttctaaagagaaatagataccgacctttccctgtggaacttgtgcgggagtttggacggcaactgttggaatctgtagcatatatgcatgacttgaggcttatccacactgatctgaagccagaaaacatactacttgtgtcttctgagtatataaaagttccaagtacaaaggtttaggctggagttttccatgtgatatttggagtgttggctgtattcttgttgaactatgctctggggaagcattgtttcagacacatgagaatctggaacacctagcaatgatggagagagttttgggacctctaccagagcatatgatacggaaatcaagttcttctgctcagaaatatttcaggagggcaacacgtttaaattggcctgaaggtgctgtttcaagagaaagcatcagagctgtgaagaaactggatcgactaaaggacttggtatcgaggaacgctggccattcgaaggcagagctggcagacttgctatacagtatcctccggttcgagccatcagaacgtctgacagcgcaagaagctctggagcatccattcttcaggaacccgacatgacttgttggacaggcttgactcgtgtaactctctgcttcaagaaggtatcgaggaagcaggcagagccgtccattgcaaagctgatgggtatcttgctcctcttttaccagagagtttgtgtaagcctgtcagtaaggcttcttgcggtggtgataaagctgatggctttggtcacccaatgtaatgtacactagcattttttttttacctagggagtttagtgcctgtatgttgttaaccgggacgcgctatgagctgcgtcccaatgccctggttccataatccaattgcagatgttgaaaatcaagcatgaagggatccctgcgcagctgtgctcccgtagctgcaatagtctgttggatgcaagtatcgtgatgtcacgagtttgggatttgttgcattccgactgcatgggtggtgtgaagaatgggcatgaaatgccgtgtcctgttgttgagacttgtgtgtagctggtgaagtgttgttgttgatggagtacaacttgtggaaagagagtgcgcataggctagaaagtacagtatcttcatactaggtaagggatgtttctgaagctcatgtgcaccgcgattgcatgttggcaccgaatcttatcgtacctcatggatccctcactcgtgctgtttcgtcctgacatggac

SEQ ID NO: 113506 - DNA, 1535 bp, Zea Mays
tgctcacttccatgcgggccccagcccgccacgaatccccgttcccagtcccgcctgctccgacctcgcctttctccatctagggtttctctctccatttccaccccatcggaccggagcttcgcatggagtcatcgcagtctcggaagcggacgcgccaagcgtatgactgcgccgccgcgctgccaccagagcgagaagtggtagcgaggggtggcgcgtcgcctccatggagggaggatgaccgcgacggacactacgtcttcgatctcggcgagaacttgacccgccgatataaaatcttgagcaaaatgggagaaggtacatttgggcgtgttttggaatgctgggaccgtgaaacacgtgaatatgttgccataaaagttgttcgcagtatccgcaagtaccgtgatgctgcaatgattgagatagatgtgctcaatcgccttgcagaaaatgagaaatacagatctctctgtgttcaaatacagagatggtttgactatcgtaatcatatatgcattatatgcatgacttgaggcttatccacactgatctgaagccagaaaacatactacttgtgtcttctgagtatataaaagttccaagtacaaagaagaattcacaagatgagatgcatttcaagtgcttgccacagtccagtgccataaagctgatagattttggtagtaccgcctttgataatcaggaccataactcgattgtttctacgaggcattacagggcacctgaaataatcttaggtttaggctggagttttccatgtgatatttggagtgttggctgtattcttgttgaactatgctctggggaagcattgtttcagacacatgagaatctggaacacctagcaatgatggagagagttttgggacctctaccagagcatatgatacggaaatcaagttcttctgctcagaaatatttcaggagggcaacacgtttaaattggcctgaaggtgctgtttcaagagaaagcatcagagctgtgaagaaactggatcgactaaaggacttggtatcgaggaacgctggccattcgaaggcagagctggcagacttgctatacagtatcctccggttcgagccatcagaacgtctgacagcgcaagaagctctggagcatccattcttcaggaacccgacatgacttgttggacaggcttgactcgtgtaactctctgcttcaagaaggtatcgaggaagcaggcagagccgtccattgcaaagctgatgggtatcttgctcctcttttaccagagagtttgtgtaagcctgtcagtaaggcttcttgcggtggtgataaagctgatggctttggtcacccaatgtaatgtacactagcattttttttttacctagggagtttagtgcctgtatgttgttaaccgggacgcgctatgagctgcgtcccaatgccctggttccataatccaattgcagatgttgaaaatcaagcatgaagggatccctgcgcagctgtgctcccgtagctgcaatagtctgttggatgc

SEQ ID NO: 113507 - DNA, 1145 bp, Zea Mays
caaggttaataaccgcctttttatggccactatcaatactagcttgctccccctttttttgtttcttgtaccttgattttgatagttttgcgtgtgtatctcttctatgtgtattgcctgcttgttatatttaaccagcgacattgaaatttcttgggaactcttgtaatatatttttgtttcttccatttattttctaatattcttttattgtgcttacatgtgtcacctggaatatgtagttcttctgctcagaaatatttcaggagggcaacacgtttaaattggcctgaaggtgctgtttcaagagaaagcatcagagctgtgaagaaactggatcgactaaaggacttggtatcgaggaacgctggccattcgaaggcagagctggcagacttgctatacagtatcctccggttcgagccatcagaacgtctgacagcgcaagaagctctggagcatccattcttcaggaacccgacatgacttgttggacaggcttgactcgtgtaactctctgcttcaagaaggtatcgaggaagcaggcagagccgtccattgcaaagctgatgggtatcttgctcctcttttaccagagagtttgtgtaagcctgtcagtaaggcttcttgcggtggtgataaagctgatggctttggtcacccaatgtaatgtacactagcattttttttttacctagggagtttagtgcctgtatgttgttaaccgggacgcgctatgagctgcgtcccaatgccctggttccataatccaattgcagatgttgaaaatcaagcatgaagggatccctgcgcagctgtgctcccgtagctgcaatagtctgttggatgcaagtatcgtgatgtcacgagtttgggatttgttgcattccgactgcatgggtggtgtgaagaatgggcatgaaatgccgtgtcctgttgttgagacttgtgtgtagctggtgaagtgttgttgttgatggagtacaacttgtggaaagagagtgcgcataggctagaaagtacagtatcttcatactaggtaagggatgtttctgaagctcatgtgcaccgcgattgcatgttggcaccgaatcttatcgtacctcatggatccctcactcgtgctgtttcgtcctgacatggac

SEQ ID NO: 113508 - DNA, 2016 bp, Zea Mays
gacgaatcctcctgggtcgtccgatacgatactccgatgccggcgtctggctagccggtctcggcgtggcacaccgcgcgcctgcccttctctcatcctttaaatacggccccggccagccggccttgccatccatctatccatcaccaccacctcctcctccttcccacgactcccgagcgctttctccgcctgcgtgtggcggcagcatggcgactgcgaacgggagcagcaaggggccgttcgaggtgcccaaggtggaggtcaggttcaccaagctcttcatcgacggcaagttcgtcgacgccgtctccggcaagacgttcgagacccgggaccctcgcaccggcgaggtgatcgccagcatcgcggagggaggcaaggccgacgtcgacctcgccgtcaaggccgcccgggaggccttcgacaacgggccctggcccaggatgacgggatacgtaagggccttgtagccggccccatccatctcggttttattcaaatgctcaacacgcttgtttcccgcaggagcgtggtcggatcctccacaggttcgcggacctgatcgacgagcacgtggaggagctggcggcgctggacacggtggacgccggcaagctgttcgccgtgggcaaggcgcgggacatcccgggcgccgcgcacctgctgcgctactacgccggcgccgccgacaaggtgcacggcgcgacgctcaagatggcgcagcggatgcacgggtacacgctcaaggagcccgtgggcgtggtgggccacatcgtgccctggaactaccccaccaccatgttcttcttcaaggtagggcccgcgctcgccgcaggctgcgccgtcgtcgtcaagcccgccgagcagacgccgctgtccgcgctcttctacgcgcacctcgccagggaggccggcgtccccgccggcgtgctcaacgtcgtgccgggattcgggcccacggccggggccgccgtcgccgcccacatggacgtcgacaaggtcagcttcaccgggtccacggaggtcggccgcctcgtcatgagggccgcggccgagagcaacctcaagcccgtgtcgctcgagctgggcggcaagtctcccgtcatcgtcttcgacgacgccgacctcgacatggccgttaacctcgtcaacttcgccacctacaccaacaagggcgagatctgtgtggccggcacgcgcatctacgtgcaggaagggatctacgacgagttcgtgaagaaggccgccgagctcgccagcaagtccgtggtcggagacccgttcaacccgagtgtcagccaaggcccccaggttgacaaggaccagtacgagaaggtcctcaggtacattgacatcgggaagcgcgaaggcgccacgctggtcaccggagggaagccctgcggcgacaagggctactacatcgagcccaccatcttcacggacgtcaaggacgacatgacgatcgcacaggatgaaatctttgggccggtgatggctctcatgaaattcaagaccgtggaggaggtgatccagaaagcgaacaacacccggtacggcctggccgccggcatcgtgaccaagaacatcgacgtcgccaacaccgtgtcgcggtccatccgcgccggcgccatctggatcaactgctacttcgcgttcgacccggacgcgccgttcggcgggtacaagatgagcgggttcggcaaggacatgggcatggacgcgctcgacaagtacctgcagaccaagaccgtcgtcactccgctgtacaacactccatggctctgaccgacctcatcctgtccgatgaacagttcaacatcacaaacaagaagaaacatgtcttgtaagatactcctccaaaggatcggttgcctgtacctgtactcttacacctgcatggattgatgatgcagtgcaatgtagcattcagaacaataaagacatgtttcggactgctggtgtctgatcggttgaagagcatgtttcagtattactatttcttttcaccgacaa

SEQ ID NO: 113509 - DNA, 2027 bp, Zea Mays
gacgaatcctcctgggtcgtccgatacgatactccgatgccggcgtctggctagccggtctcggcgtggcacaccgcgcgcctgcccttctctcatcctttaaatacggccccggccagccggccttgccatccatctatccatcaccaccacctcctcctccttcccacgactcccgagcgctttctccgcctgcgtgtggcggcagcatggcgactgcgaacgggagcagcaaggggccgttcgaggtgcccaaggtggaggtcaggttcaccaagctcttcatcgacggcaagttcgtcgacgccgtctccggcaagacgttcgagacccgggaccctcgcaccggcgaggtgatcgccagcatcgcggagggaggcaaggccgacgtcgacctcgccgtcaaggccgcccgggaggccttcgacaacgggccctggcccaggatgacgggatacgagcgtggtcggatcctccacaggttcgcggacctgatcgacgagcacgtggaggagctggcggcgctggacacggtggacgccggcaagctgttcgccgtgggcaaggcgcgggacatcccgggcgccgcgcacctgctgcgctactacgccggcgccgccgacaaggtgcacggcgcgacgctcaagatggcgcagcggatgcacgggtacacgctcaaggagcccgtgggcgtggtgggccacatcgtgccctggaactaccccaccaccatgttcttcttcaaggtagggcccgcgctcgccgcaggctgcgccgtcgtcgtcaagcccgccgagcagacgccgctgtccgcgctcttctacgcgcacctcgccagggaggccggcgtccccgccggcgtgctcaacgtcgtgccgggattcgggcccacggccggggccgccgtcgccgcccacatggacgtcgacaaggtcagcttcaccgggtccacggaggtcggccgcctcgtcatgagggccgcggccgagagcaacctcaagcccgtgtcgctcgagctgggcggcaagtctcccgtcatcgtcttcgacgacgccgacctcgacatggccgttaacctcgtcaacttcgccacctacaccaacaagggcgagatctgtgtggccggcacgcgcatctacgtgcaggaagggatctacgacgagttcgtgaagaaggccgccgagctcgccagcaagtccgtggtcggagacccgttcaacccgagtgtcagccaaggcccccaggttgacaaggaccagtacgagaaggtcctcaggtacattgacatcgggaagcgcgaaggcgccacgctggtcaccggagggaagccctgcggcgacaagggctactacatcgagcccaccatcttcacggacgtcaaggacgacatgacgatcgcacaggatgaaatctttgggccggtgatggctctcatgaaattcaagaccgtggaggaggtgatccagaaagcgaacaacacccggtacggcctggccgccggcatcgtgaccaagaacatcgacgtcgccaacaccgtgtcgcggtccatccgcgccggcgccatctggatcaactgctacttcgcgttcgacccggacgcgccgttcggcgggtacaagatgagcgggttcggcaaggacatgggcatggacgcgctcgacaagtacctgcagaccaagaccgtcgtcactccgctgtacaacactccatggctctgaccgacctcatcctgtccgatgaacagttcaacatcacaaacaagaagaaacatgtcttgtaagatactcctccaaaggatcggttgcctgtacctgtactcttacacctgcatggattgatgatgcagtgcaatgtagcattcagaacaataaagacatgtttcggactgctggtgtctgatcggttgaagagcatgtttcagtattactatttcttttcaccgacaaccgcgttggtttcttgtgaacattttttggtgcctattttcgcgataggaacttatggcaatataatgcttggcatatcat

SEQ ID NO: 113510 - DNA, 1474 bp, Zea Mays
cctcctccttcccacgactcccgagcgctttctccgcctgcgtgtggcggcgctggacacggtggacgccggcaagctgttcgccgtgggcaaggcgcgggacatcccgggcgccgcgcacctgctgcgctactacgccggcgccgccgacaaggtgcacggcgcgacgctcaagatggcgcagcggatgcacgggtacacgctcaaggagcccgtgggcgtggtgggccacatcgtgccctggaactaccccaccaccatgttcttcttcaaggtagggcccgcgctcgccgcaggctgcgccgtcgtcgtcaagcccgccgagcagacgccgctgtccgcgctcttctacgcgcacctcgccagggaggccggcgtccccgccggcgtgctcaacgtcgtgccgggattcgggcccacggccggggccgccgtcgccgcccacatggacgtcgacaaggtcagcttcaccgggtccacggaggtcggccgcctcgtcatgagggccgcggccgagagcaacctcaagcccgtgtcgctcgagctgggcggcaagtctcccgtcatcgtcttcgacgacgccgacctcgacatggccgttaacctcgtcaacttcgccacctacaccaacaagggcgagatctgtgtggccggcacgcgcatctacgtgcaggaagggatctacgacgagttcgtgaagaaggccgccgagctcgccagcaagtccgtggtcggagacccgttcaacccgagtgtcagccaaggcccccaggttgacaaggaccagtacgagaaggtcctcaggtacattgacatcgggaagcgcgaaggcgccacgctggtcaccggagggaagccctgcggcgacaagggctactacatcgagcccaccatcttcacggacgtcaaggacgacatgacgatcgcacaggatgaaatctttgggccggtgatggctctcatgaaattcaagaccgtggaggaggtgatccagaaagcgaacaacacccggtacggcctggccgccggcatcgtgaccaagaacatcgacgtcgccaacaccgtgtcgcggtccatccgcgccggcgccatctggatcaactgctacttcgcgttcgacccggacgcgccgttcggcgggtacaagatgagcgggttcggcaaggacatgggcatggacgcgctcgacaagtacctgcagaccaagaccgtcgtcactccgctgtacaacactccatggctctgaccgacctcatcctgtccgatgaacagttcaacatcacaaacaagaagaaacatgtcttgtaagatactcctccaaaggatcggttgcctgtacctgtactcttacacctgcatggattgatgatgcagtgcaatgtagcattcagaacaataaagacatgtttcggactgctggtgtctgatcggttgaagagcatgtttcagtattactatttcttttcaccgacaa

SEQ ID NO: 113511 - DNA, 127 bp, Zea Mays
ctatccggtgagccaacggtcgtcagcgcaacggtcggccgcgcaatccgtgggcgcgtggcccgcaccaacggtcggcagggggcaccggactgtccggtgcgctatagggcccgaagctgcaacg

SEQ ID NO: 113512 - DNA, 1655 bp, Zea Mays
atagagacagggagggggagtggtccgaggtcaataggatataactccaggactcctctccatcagaatcagagacgagtcgagtgagggggcagaggccacaaaacagagagtacccaaacgatcgatctgtgcatctccccgtccgtcccgcaaccatctaattcagaagcagacatcaatggcgagcaacggctgcaacggcaacggcaacggcaacggcaacggcaaggcggctccggcgggtgtggtggtaccggagatcaagttcaccaagctcttcatcaacggcgagttcgtcgacgccgcctccggcaagacattcgataccagggacccacgtaccagggctacacgctcaaggagcctatcggcgtcgtgggcgtcatcatcccctggaacttccccaccatgatgttcttcctcaaggtcagcccggcgctcgccgcgggctgcaccgtcgtcgtcaagcccgccgagcagacgccgctttccgcgctctactacgcgcacctcgcaaagatggccggcgtccccgacggagtgatcaacgtcgtccccgggttcggccccaccgccggcgccgcgctcgcctcccacatggacgtcgacagcgtggccttcaccggctccacagaggtgggtcgcctcatcatggagtcggccgcgcggagcaacctcaagacggtctcgctggagctcggcggcaagtcgccgctcatcatcttcgacgacgccgacgtcgacatggccgttaacctgtcgaggcttgccgtcttcttcaacaagggagaggtttgcgtggcgggatcgcgcgtgtacgtgcaggaagggatctatgacgagttcgtcaagaaggccgtggaggccgcgcggagctggaaggttggagacccgttcgatgtcaccagcaacatgggccctcaggttgacaaggaccagtttgagagggtcctaaagtacattgagcatggcaagagcgagggagcgactctgctcaccggcggcaagcctgccgccgacaaagggtactacattgagcccaccatctttgtcgatgtcactgaggacatgaagatcgcgcaggaagagatcttcggccccgtcatgtccctcatgaagttcaagacggttgatgaggtgatcgagaaggccaactgcaccaggtacgggctcgccgccgggatcgtgaccaagagcctggacgtcgccaaccgggtgtcccggtcggtgcgcgccggcaccgtgtgggtgaactgctacttcgccttcgacccggacgcgcccttcggcgggtacaagatgagcggcttcggccgggaccaggggctggcagccatggacaagtacctgcaggtcaagagcgtcatcaccgcgctcccggactcgccatggtactgagttgagccagggaccgatggaaccccatcgatctcttcttgtgcagtgtacatgcgtcatgcgtgcgtgctcacacagctgggttgctgctttgtgcttgtgttcgtctctggtttgtggctcatgtgtgttagtctgcaccctatccttctgtacgtagctgccggacatgcaaatagtatgttaagtacaccatataaactcttgttttataaattcaagtttagcttggagccttcactccttcagccttg

SEQ ID NO: 113513 - DNA, 1971 bp, Zea Mays
atagagacagggagggggagtggtccgaggtcaataggatataactccaggactcctctccatcagaatcagagacgagtcgagtgagggggcagaggccacaaaacagagagtacccaaacgatcgatctgtgcatctccccgtccgtcccgcaaccatctaattcagaagcagacatcaatggcgagcaacggctgcaacggcaacggcaacggcaacggcaacggcaaggcggctccggcgggtgtggtggtaccggagatcaagttcaccaagctcttcatcaacggcgagttcgtcgacgccgcctccggcaagacattcgataccagggacccacggaccggcgacgtgctggcccacgtagcagaggcagacaaagctgatgtggacctggcggtgaagtccgcccgggacgccttcgagcacggcaagtggccccgcatgtcaggctacgagcgcgggcggatcatgagcaagctggcggacctggtggagcagcacacggaggagctggcggcgctggacggtgccgacgccgggaagctgctgctgctgggcaagatcatcgacatccccgcggccacgcagatgctgcgctactacgccggcgccgccgacaagatccacggcgacgtcctgcgcgtctccggcaggtaccagggctacacgctcaaggagcctatcggcgtcgtgggcgtcatcatcccctggaacttccccaccatgatgttcttcctcaaggtcagcccggcgctcgccgcgggctgcaccgtcgtcgtcaagcccgccgagcagacgccgctttccgcgctctactacgcgcacctcgcaaagatggccggcgtccccgacggagtgatcaacgtcgtccccgggttcggccccaccgccggcgccgcgctcgcctcccacatggacgtcgacagcgtggccttcaccggctccacagaggtgggtcgcctcatcatggagtcggccgcgcggagcaacctcaagacggtctcgctggagctcggcggcaagtcgccgctcatcatcttcgacgacgccgacgtcgacatggccgttaacctgtcgaggcttgccgtcttcttcaacaagggagaggtttgcgtggcgggatcgcgcgtgtacgtgcaggaagggatctatgacgagttcgtcaagaaggccgtggaggccgcgcggagctggaaggttggagacccgttcgatgtcaccagcaacatgggccctcaggttgacaaggaccagtttgagagggtcctaaagtacattgagcatggcaagagcgagggagcgactctgctcaccggcggcaagcctgccgccgacaaagggtactacattgagcccaccatctttgtcgatgtcactgaggacatgaagatcgcgcaggaagagatcttcggccccgtcatgtccctcatgaagttcaagacggttgatgaggtgatcgagaaggccaactgcaccaggtacgggctcgccgccgggatcgtgaccaagagcctggacgtcgccaaccgggtgtcccggtcggtgcgcgccggcaccgtgtgggtgaactgctacttcgccttcgacccggacgcgcccttcggcgggtacaagatgagcggcttcggccgggaccaggggctggcagccatggacaagtacctgcaggtcaagagcgtcatcaccgcgctcccggactcgccatggtactgagttgagccagggaccgatggaaccccatcgatctcttcttgtgcagtgtacatgcgtcatgcgtgcgtgctcacacagctgggttgctgctttgtgcttgtgttcgtctctggtttgtggctcatgtgtgttagtctgcaccctatccttctgtacgtagctgccggacatgcaaatagtatgttaagtacaccatataaactcttgttttataaattcaagtttagcttggagccttcactccttcagccttg

SEQ ID NO: 113514 - DNA, 287 bp, Zea Mays
ttcccagttcccataattatgattttgtgtacaaccgtagacacagtgaaaaagcaaagttctatactcacactatgtttggcataaatcactttcgaacacttcttcccaaaaaagatatttgcactctacctacattgcacaatgcattatcaccaaagaatcttcctgctcaatgcataagctattcagttccatattttcatattttccttcatgtttctgagtgtacatgggtcacaatcagtaagaataacctacatattaatgaattttgcatgacatat

SEQ ID NO: 113515 - DNA, 995 bp, Zea Mays
cattttactgtgttgcaggaagcacacagtttttggcaagcttgttgttggaagtgatgttctaaagaaaatcgagcaagtagatgtgcaatcccctgattcaactcctgttattccagttactatagtaaattgtggagagctcattgaacacaaagatattggctctatgtcaatagaaattgataaaaagagggctgccaaatcaaagttgacaagggatataacttctgacgaggaaagtaatgaaggacaacacaagagatgtcgtaaacaaatcttcaaaaaggagaaggaagaagaggagatattcttattcggaatcagatagctcttcttagtcagagactgaatcatctgattatgagagcgattctgatacttactctagtgactcatctgatgtcagcagctcaagtgatgacaggcgaaggcgcagaaagagacactcaaagaaaaataaatgcaagcattcaagaagaaagcgtgaccataggcgcgaaagaaggcgtaggaagcgtggtaggaaatcaaaacagaagtcaaaaaggtctgttaacattgtcaaattgatcattcctgacctttgatctgtaatataaaaaggagcaggcctagtgctagaggctcccaaatgagtgaggtgaatggttaaactcaggtaacaataaaagatcaaaaccctaattcgtccagtaatcggtggcgcataagtgactccagaactgcttactcgctaacaacaggggaaaatacaatgaataaggacaatccaggcatgagagtggaggatcatcttactctgcgaacgttgcggcagaggcggaaccgctagcgggcggcggcggaggcaggtgaacgcacgagacgacggctgcttcggcgatggtggagaagccctggcgctgcttgtgcttggcgttggccatgcatttgacgaagacgattccccggcgcttcaccaccttgcagaaccggcacaggtgcttcaccgt

SEQ ID NO: 113516 - DNA, 723 bp, Zea Mays
aatacgaggaggagcagagcagcaggtgtctccatggatgcaagccaggatgtgtgggactgggactgggagctggtcctgccagaccacaggagcttctccctgagcaatggcggcaagaatcttgatgataaagaaacagtcgagcatgatctgctgcccccatcaggagacgttgacgtgcacgacgagtgcaagggcatcggcgtgctggatgagacctgcaaatccgccgtgcctagtgttgccgatccgataatgaattctgagggtggcgaggaagagaaggcaatccagagacctgatgccgaggagtccgtcaccgccgacagcaagtttgctcaagaggaggaggaggaagaagaagatatcaagaaggacggcgacgataaggttggagccctgatcggcgcgctgtgctcgtttggggtcgcagccgccaccgcctgcgtctttctcatcggcggcaggctgcatcatcaccacacgcagcagcacaaaattcagctgcagttcttcggcgatgataagaggatccagcaagttgtgcgccagacgtcaaggctgaaccagaaggccatgtcgtttgcgatgggggcaggagcgtcacggcattttggaaggccacgtgtaaaacgtagcaaaaaacattagttactaaaatgtatatatatatgtacacataataatatatatgctattcatcacctaagttaaacttca

SEQ ID NO: 113517 - DNA, 2312 bp, Zea Mays
cggttcctgtgcgccgccgccctgtcgagcctgccggtgccgcgagcatcgactcatcccgttccaaatcgacccaaacccattgcagaccaacacacaatatggcaagtgcggtgccgcgcgccctgcgcatgtcccacgcgcaattcatcgagcaccttcgctgcgcggcctcgtccgaccgcacccctcgcaccggcgaggctcttcacggctgggcgctcaagtccggcgcagcctcccacgcgcctgtctccaactctctcatcaccttctactgttccctcccgcggcctctactcggcgcagcctacgtcgtcttcgccgacatccccgccgccttgcgcgacgtcgcctcgtggaactccctcctcaacccgctctcccgccaccaccccgtctccgcgctctcccatttccgctccatgatgtcctcccccgaggccgttctcccctcgccgcactccttcgctgccgcgttcactgccgccgcccgtgtgccctctgcgtccgctggcgccgtcacgcacgcgctcgcgtgcaagctgccatcctcctgcggctccaataatgtcttcgtctcgaccgcccttctaaacatgtactgcaagctgggagctgtttctgatgccaagagagtgtttgatggaatgctacatcgcaatgcagtgtcctgggctgccatggtgtcaggttatgccactgggaagtgttctgaggaggcctttgagctcttccggctgatgcttcagaagtgcccattggagaaaaatgagtttgtaaccacagcagttcttagcgcagttagcgtgccactgggtttgcttatggggacgcagttgcatgggctggtattaaaggatggtttggtgggatttgtgtctgttgagaattcgcttgtcacaatgtatgcaaaggctgagtgtatggatgcagcaatgagggtgtttgggtcatctaaggagaggaactccatcacatggtcagcaatgatcacagggtatgctcagaatggagaagccaattgtgcagctaggatgttcctacagatgcattcgtcaggatttacgccaactgaattcacctttgttggggtactgaacgcatgcagtgacatgggcgcattagtggttgggaagcagacacattgtttgatggtgaagcttgggtttgaaacgcaggtttatgtgaagagtgcactggtggacatgtatgccaagtgtggttgtattggtgatgcaaaagatgggtttcatcaattatatgatgttgatgatgttgtcctttggacagcaatgattaccggacatgtgcagaatggggagcatgaggaagccctgatgttgtattccaggatggacaaacagggcattatacccagttatttaactgtaactagtgtacttagagcctgtgcatgccttgcagcactggaccttgggaagcaattgcatgcacaaatattgaagtgtagatttagcttggggggttctgttggaacagctctgtccactatgtattcgaagtgtggaaaccttgaagatagcatggttgtcttcagaaggatgcctgatagggatgttatttcatggaactcaattatttctgttttttcacaacatgggcgtggaagtgatgcacttgacatgtttgaggagatgaagctagagggaacggcaccagatcatataacattcattaatttgctatctgcttgtagccacatgggcttagttgacagaggctggttttattttagggcaatgaccaaagactataatttaattcctacacttgatcactatgcttgcatggttgatattcttagccgtgcaggccagttaaaagaagcaaaggacttcatagattcgataactattgaccatggtacatgcctatggcgtatagtcctaggggcatgtcgcagtttacgtgattttgatgttggagcatatgcaggtgagcagctgatggagttaggtactgaggactcatctgcttatatactgttatcaaacatctatgctgcccagcggaagtggaatgatgttgagcgggtgagacatttgatgagactccgaggtgttagcaaagatctggggtgtagctgggttgagctctacaaccgagttcatgtgtttgttgttggggaacaacaacatcctgaagcggaaaatataaatgtagagttgataaggctagcgaagcatatgaaggacgaagagtgtttcctgtttgatgacgaaaaggatgaactaggagattctcatgaaggtgaacaaatggaattgatatcaacaacatattactga

SEQ ID NO: 113518 - DNA, 1396 bp, Zea Mays
aattttcgaacccttctgccgttcgtgtgcacctggatggggtccataaatatagaaggcctcttcatcttcctattctcctttctctaaaccgccgcttctgttctgatctgctccccgaaactactaaaacaaatcgaagtggggaacagacaagagagaagggagatggcggaggcggtggcggtggcgtacgaggagcaacggcggaggcagatagaaatgaacaagcggaagctggaggagctgcagctccaccacctctccgccgccgtcagagaggccgccgccgctgccaaaccctcgtcggccaagaagcggaaggcgccggtgccgcgggacgccgccacggagccgccaaggcggtccgaccgactcgccaacctccctgagaagccaatgtaccgcgaggtcagggtgaacttgccatttccggagggcagcaagtccaatgcgcgggtgccgctggacgctgccaactccgtggtggtggagccactacggtggtccgaccgactcgccaacctccccaagaagcccatgtaccacgaggattcggacgaggagaggagctacgccatctctaaggctgaggagctggtgcaagagctgggctccagcttccccatcttcacccagcccatgacactgtcccatgtctccggaggcttctggctgggcctcccgaagcatttctgccgggagcacctgcctaagagtgatgagacgatcaccttggtggatgaggaggatgacgagtcagacacgttctaccttgcaatgcaggctggcctcagcactggatggaaagagttcgccatccagcacaagctgcttgatggagattgcttggtcttccaactgattgagcggacaaagttcaaggtctacataattcgagcaactttgtacttcgaaagtgatcactgatgaaactagtagcttctaatatggttattggagcacggaaattactgaaggtacacaattttgaggatggtgaatagctgtcctgatgtgaacatgtttccttgttccttcactcagttatgaggcagttgcgttggacaagctctcatctggaatttgctcggcatcttgaactttttgggtggcagaaagttagctgatatataaatgtttacttaacctagtatctagttatttagcagctgctaatttgtgtaattgggcttaccaattgcacggttcagaaacctgcactatgtaaggggatgttgatggcaattgacctcattttataaatgattgatgtctgtccatatttctcttggatcaatttcagtgttcagtcaatcctgtgtggttcattttcttatagttatttggtaccaccattagtggctttgtggtgttagtattcagacacatggtc

SEQ ID NO: 113519 - DNA, 1333 bp, Zea Mays
atagaaggcctcttcatcttcctattctcctttctctaaaccgccgcttctgttctgatctgctccccgaaactactaaaacaaatcgaagtggggaacagacaagagagaagggagatggcggaggcggtggcggtggcgtacgaggagcaacggcggaggcagatagaaatgaacaagcggaagctggaggagctgcagctccaccacctctccgccgccgtcagagaggccgccgccgctgccaaaccctcgtcggccaagaagcggaaggcgccggtgccgcgggacgccgccacggagccgccaaggcggtccgaccgactcgccaacctccctgagaagccaatgtaccgcgaggtcagggtgaacttgccatttccggagggcagcaagtccaatgcgcgggtgccgctggacgctgccaactccgtggtggtggagccactacggtggtccgaccgactcgccaacctccccaagaagcccatgtaccacgaggattcggacgaggagaggagctacgccatctctaaggctgaggagctggtgcaagagctgggctccagcttccccatcttcacccagcccatgacactgtcccatgtctccggaggcttctggctgggcctcccgaagcatttctgccgggagcacctgcctaagagtgatgagacgatcaccttggtggatgaggaggatgacgagtcagacacgttctaccttgcaatgcaggctggcctcagcactggatggaaagagttcgccatccagcacaagctgcttgatggagattgcttggtcttccaactgattgagcggacaaagttcaaggtctacataattcgagcaactttgtacttcgaaagtgatcactgatgaaactagtagcttctaatatggttattggagcacgggtacacaattttgaggatggtgaatagctgtcctgatgtgaacatgtttccttgttccttcactcagttatgaggcagttgcgttggacaagctctcatctggaatttgctcggcatcttgaactttttgggtggcagaaagttagctgatatataaatgtttacttaacctagtatctagttatttagcagctgctaatttgtgtaattgggcttaccaattgcacggttcagaaacctgcactatgtaaggggatgttgatggcaattgacctcattttataaatgattgatgtctgtccatatttctcttggatcaatttcagtgttcagtcaatcctgtgtggttcattttcttatagttatttggtaccaccattagtggctttgtggtgttagtattcagacacatggtc

SEQ ID NO: 113520 - DNA, 186 bp, Zea Mays
atggcggtcgccggcttctcctgcgctgccatggacagctgcatgagcccggaggagaagaaggccgtgaacaggagcacgtacgccatcacggatgccatcaattattcacagctgctgaaggagccgaagaagatgaaatgcgaattaatgccctgtgactgtgaacccgaaaaggctctgtga

SEQ ID NO: 113521 - DNA, 768 bp, Zea Mays
atggattctggccaaatgttgaaaaggagatggtttagtgtatttttttgccaaaaagttgtccctgcagaaatcaaaaggatcaagcaacatattgctagggggtttggtgatgtagggaagtgcccaagagcgtctgaactagttacgaaggagatgacggactatttgaagaagaatgcaaggaataagattctgttgttagataatgaagaggaggatgtagaagagggacaaggagatgcacagaaagatggtggtgcaatccctgtaccaaattatggcacaataggagggaaagtgaagaggaaatttgctcaaaatgatatccagtccttcatggtccatactaagaaaagagattgtttagaacataaaaggttgaacagaatggtgtatgttagctacaaccgaaagatggcaaatagatttcaatggattaggaagctcaactcaaagggaaagaaaagcaaccccttgatcctacaagagttccaatggaaaaatgagtgggttggtgaacattttgaggacaataatgatgaaaattctctttcgggggttgttgataaagctgttggtgcaactgaacatctaaagggtagaaatctcgctagagctgttaaccaaacatactctagaacaagcaagcgtgttgtttctcttcctccacaatctggtgaatctgattctgatgaagaaatgcaagaacaaggagaaaaaaactttttgctgcatccactgaagatggaaggagctttgaactag

SEQ ID NO: 113522 - DNA, 1560 bp, Zea Mays
atggcggcgtcggagcgggaggccgcgctcctcacacgcgtggcagcgaaccacctctttctcgcgcagttcgagcccctgcgtgcggtgctcctcagcctccgccgccgtgacccggtgctatgtgcggacttcctccgcgcggtcgccgctgcgggcggccgcgtcccgggcgtgctctggtccgctccccctgcctgcccgtccccatcccacctcgcctggcttgccgtgctcgaactcgccgccctcccctccactcccaatcccgaggcgctgcgcctgaaggcagagttcctggtcctcctccagcccatcgctgacgaccccgccattggcgccgaggccagagaaatcctcacgaaactgctggatttgggggtgacgaggttgaagctcgaggtcgaaggcggaggggacgcaggtgctagtgccgaggaagcctccgtgaaggatctgagagggctatgggaagtgttcctcgacaacgcctttgtgtttgatgcgttgtgcataggcgtctcgaggcagatcgccttggacaggggtttcggtgtggatgtgctcctatggctgcggcggaacgtgcaacttgcccatttggatgccgtgaagactcttgtcacggaaggtgatctggatgctgctcctggccatcttcggtttctttgccttgaccatggactggagaaggatgagtacaaggttgtcatagcagagcttctcagaaagggatgggcaaaaacatccaattatggtggaacatggtctgagttgcagaataggataactaaattatatggagcagctcttcaatctactagtcccgagctcgtgcaacttgttcagctcattctggataacattctttctgaagaaattgaagatcatgatgtctctgatgctaatgggatgcctcttcctttcgaaaaatttctcgaaacattgttgttggagagggatactgactcagatgacaaggtcttgttggatgcggctataacgtcctgcaaaaaagatctgtaccattattgccgattgtctggaaagcacatgcttgaagtagtcttggaaactgctctatcatcaattaagagggagcagcttcttgaggctgttgatgttgtttcgttgttcccccttctccacccactggttgctgtcttgggatgggatattttgaagggtaaaacaggtctgcggagaaagctaatgcagctgttctggacaagcaaatcccaaggtctacgactacaggaatattcacattaccgtagcccgacagatgaggtgctatttgacgtagtcccaggaataaaatttcaagatgcgatcgagcttgttggtatgcagccacttccttcaacaactgccgcttggaagaggatgcatgatattgaactgatgcacatgcgatattctcttcagtcagttgcgcttgctctaggagagatggaaaagtgtacaggtgcactttttgttggcgaagacattttattgttcctcgaagtagcaaagttgtggagctatcagttcaatgaactattaggagcaacctaa

SEQ ID NO: 113523 - DNA, 185 bp, Zea Mays
cacccgcatttgcaactattgtgaaacacacaggcattttaattatctctacaacttcctggttctaaaagatgaccatgttgcttctggcctttgttgtattcaattatttatgaattcaatgtctcaagaggaggctttgaggcatttgggacatgccaagacacatttcgaagaagccttat

SEQ ID NO: 113524 - DNA, 1387 bp, Zea Mays
caatcagggtatgattgccacaggttgttgcacttcccttagtgcgccaccctccttggctatatattgtaatcccttcaccatctaatacattaattctattcagccacttgtcttacaccctcatattttcttcttaataatataatgatgtatgatgtctagttctcttgcgcgtttgagaaaaaaaagttcaccgcacttagccaacttgtccttgactttatcatttgttgaaactacttttcaaaattgtacgcttattattttgcaggcgaaggtgcatggttgttgaaactctggctgaaaagcattttgatttagctttcagaatgcttcatgagtttgatctcccagctgttgatatttatgctggggtagctgcatccctcgcagaaaggaaaaaagggggccagttgacagagttcttgaagaatataagggggactatagatgatgatgaatgggatcaggttattggtgctgctataaatgtttatgccaacaagcataaagaaagaccagatcgccttatcgacatgctaatcagcaatcacaggaaagtacttgcttgtgttgtctgtggacgtctaaaaagtgcattccaaatagccgcacgaagtggaagtgtcgctgatgttcaatatgttgcccatcaggcattacatgcaaatgcattgacagtgcttgatatgtgtaagcaatggctcgcgcagtacatgtgataccatagatacttgctgagagagttctcacgtgaagacagaaaaactaaggggcatttggtttgaagagtcaatctattttagatgatgttgtgtatcataagtttattttataaatttggtggaataaattcgttctccatattattactaattatgagcttatgatgaatgaaatgctgatgaatcaatttattatattcaacaaactaaaaaagaaagtgagaggtgagaagatgatagactatcttaatccttaaaccaaacatgtcacaagtaatcaaagcaaggaaccatctgaaagctggtgttcaatcctcatatcccatttcaacttctttccgctttccacttcgtgcagcacaatgcctccatgtgtatatgcctctttaagggcatattcgttatactatcctattgcattctttggtctttgctgctccctcggtcctaaattataaaatattttctagatttatagctttttgttatgtatttaaatatacattgtatctaaatatatagtaaaaaataatgtacgtagaaaaatcaaaacgttttataatttagtgttgtaaagctttgtaatttcattacttgtccatccagtgagactgtttaattgtgagcgcttggcagcccacaaaacagtcagtgccagc

SEQ ID NO: 113525 - DNA, 105 bp, Zea Mays
gggttgccgaggccgaacagcaggcaggcaatagcaagcagaagcacaggagcagccgcgggcgggtcgccatcaggccgcgtcaaatcccaccaaaacaaagca

SEQ ID NO: 113526 - DNA, 1939 bp, Zea Mays
acatcacataaacctttctcttttctctctctctagtctctctcctctgcgcctctgcctctatttcttctcgtcctcccaggacctcaagtccccccctcctcctccccatccccagtccccacacccacccacccggacccggtgccgcgctctgcaggcggaggaagaccagcgacgggcggacgtgcttcatgaggagtgtgccgtgagacaactctgcgagtcaagaacaactggtgaggcgaaggtgagaatgggatgatgattgattaatcactaaggcctgccttgcccttttgttttgcttggattctctgagtgatgactgcccatatgaattgcttcctactcctctcatgctttgttcactgaattaatatatgttgcttacaagcgaagaaatctattattaaaacaaaaatagagaagatgctgcgagttcattaaaccctatcagtccgtctgttgattgcgtagtatcgattgctgctgcttgtgaaatgatttcctatccataagggaaaaaatgattcatttaattctgttttgatacggtcaagatcttgttctgaaactgatagcatgagttaacttgtctccagaattgtggatgttcaaactagtagtggtaaataagtcaaactttaccaagttagtagaaatttaaaggcgatgccacatgtctaagttattaactccaaattaatgcagcgaagaaagccgagaggggagaccaaatggcaactgattcctcagctctgcaggcttcctctgagtcgattgcgcaaaagatggggttcttcagagtccctgaccttcttgtaaaactgagcgccaaatgtttgagcgatctggatgtggttcgcagcccaacatcgcccttggacctcaagtttttcactggccttggcaacaaatcacccggtgacgccagccagaaccagaagatcttgcttggtgacagggttgggcttggacttgtggattccctcactgatgacaaccccgcaccactaggtggtagaaaggttctttttcttggatctgagatgaggattattgataacctgtctcgcaagaacagctccaccgctcctgatcaagctggggaagttgaacagaaggatgataatatgtctgacggactgatgggcagtgccatgtcccttggtgacatcatcaactcagaggattacactcgtgttgtctcccgtggccctaatcctaggactacccacttttttggagatcgtgtttttgagcttcaagctgagcagctgatgcctgttgagagtaaggtcgatcagagtacgtctcctgtggaagacggtctgatgagcttctgttatttttgcagtgagaagctcaaagaagcggaagacatctacatctatcagggtgacaaatccttttgcagcgtggagtgcagggaaaatttcatggtagattatgagatggaagaagcatatcatcctgcgtctcctaggagcccaccctctgacggtggtcggattttccaactgatccgttgagtcagcatcagtaacaactcgatatggtcatatctgaagtgctgtctgaggttaataagttgcagccatggatgtgatcatgtttgcagtagttgttgcccggagattttgtttgtcgcggcactgatgaatttacctcacctattgatttcttttgttttgcgtacttggatcctcgaatttttggaggagtccaaaaaatgactacctccggtcataatattatcttgatcggagatgagtgtgtgtgtgtgtcctcgcgtctcaacttgagttgtttgcttcgaccgcattttcagtggctcactcatatgtggacgcctcttattaatatcatgtatctgaacctatgttttgatattttctgaaatgaaatggtaaagaataaagttttatgttacttg

SEQ ID NO: 113527 - DNA, 1475 bp, Zea Mays
acatcacataaacctttctcttttctctctctctagtctctctcctctgcgcctctgcctctatttcttctcgtcctcccaggacctcaagtccccccctcctcctccccatccccagtccccacacccacccacccggacccggtgccgcgctctgcaggcggaggaagaccagcgacgggcggacgtgcttcatgaggagtgtgccgtgagacaactctgcgagtcaagaacaactggtgaggcgaagcgaagaaagccgagaggggagaccaaatggcaactgattcctcagctctgcaggcttcctctgagtcgattgcgcaaaagatggggttcttcagagtccctgaccttcttgtaaaactgagcgccaaatgtttgagcgatctggatgtggttcgcagcccaacatcgcccttggacctcaagtttttcactggccttggcaacaaatcacccggtgacgccagccagaaccagaagatcttgcttggtgacagggttgggcttggacttgtggattccctcactgatgacaaccccgcaccactaggtggtagaaaggttctttttcttggatctgagatgaggattattgataacctgtctcgcaagaacagctccaccgctcctgatcaagctggggaagttgaacagaaggatgataatatgtctgacggactgatgggcagtgccatgtcccttggtgacatcatcaactcagaggattacactcgtgttgtctcccgtggccctaatcctaggactacccacttttttggagatcgtgtttttgagcttcaagctgagcagctgatgcctgttgagagtaaggtcgatcagagtacgtctcctgtggaagacggtctgatgagcttctgttatttttgcagtgagaagctcaaagaagcggaagacatctacatctatcagggtgacaaatccttttgcagcgtggagtgcagggaaaatttcatggtagattatgagatggaagaagcatatcatcctgcgtctcctaggagcccaccctctgacggtggtcggattttccaactgatccgttgagtcagcatcagtaacaactcgatatggtcatatctgaagtgctgtctgaggttaataagttgcagccatggatgtgatcatgtttgcagtagttgttgcccggagattttgtttgtcgcggcactgatgaatttacctcacctattgatttcttttgttttgcgtacttggatcctcgaatttttggaggagtccaaaaaatgactacctccggtcataatattatcttgatcggagatgagtgtgtgtgtgtgtcctcgcgtctcaacttgagttgtttgcttcgaccgcattttcagtggctcactcatatgtggacgcctcttattaatatcatgtatctgaacctatgttttgatattttctgaaatgaaatggtaaagaataaagttttatgttacttg

SEQ ID NO: 113528 - DNA, 1602 bp, Zea Mays
acatcacataaacctttctcttttctctctctctagtctctctcctctgcgcctctgcctctatttcttctcgtcctcccaggacctcaagtccccccctcctcctccccatccccagtccccacacccacccacccggacccggtgccgcgctctgcaggcggaggaagaccagcgacgggcggacgtgcttcatgaggagtgtgccgtgagacaactctgcgagtcaagaacaactggtgaggcgaagcgaagaaagccgagaggggagaccaaatggcaactgattcctcagctctgcaggcttcctctgagtcgattgcgcaaaagatggggttcttcagagtccctgaccttcttgtaaaactgagcgccaaatgtttgagcgatctggatgtggttcgcagcccaacatcgcccttggacctcaagtttttcactggccttggcaacaaatcacccggtgacgccagccagaaccagaagatcttgcttggtgacagggttgggcttggacttgtggattccctcactgatgacaaccccgcaccactaggtggtagaaaggttctttttcttggatctgagatgaggattattgataacctgtctcgcaagaacagctccaccgctcctgatcaagctggggaagttgaacagaaggatgataatatgtctgacggactgatgggcagtgccatgtcccttggtgacatcatcaactcagaggattacactcgtgttgtctcccgtggccctaatcctaggactacccacttttttggagatcgtgtttttgagcttcaagctgagcagctgatgcctgttgagagtaaggtcgatcagagtacgtctcctgtggaagacggtctgatgagcttctgttatttttgcagtgagaagctcaaagaagcggaagacatctacatctatcagtaagtgatccaatttagtagatgaatcactgctatggatgttgttgttttttttcattcttgcataggcctgccgttctatggatggttgtttgatgtttggcatcctgtgtgtcgattgcaggggtgacaaatccttttgcagcgtggagtgcagggaaaatttcatggtagattatgagatggaagaagcatatcatcctgcgtctcctaggagcccaccctctgacggtggtcggattttccaactgatccgttgagtcagcatcagtaacaactcgatatggtcatatctgaagtgctgtctgaggttaataagttgcagccatggatgtgatcatgtttgcagtagttgttgcccggagattttgtttgtcgcggcactgatgaatttacctcacctattgatttcttttgttttgcgtacttggatcctcgaatttttggaggagtccaaaaaatgactacctccggtcataatattatcttgatcggagatgagtgtgtgtgtgtgtcctcgcgtctcaacttgagttgtttgcttcgaccgcattttcagtggctcactcatatgtggacgcctcttattaatatcatgtatctgaacctatgttttgatattttctgaaatgaaatggtaaagaataaagttttatgttacttgttg

SEQ ID NO: 113529 - DNA, 656 bp, Zea Mays
gataatattattgttcccgcaaactgttgatcacaggcagcctatagggaccgatcccctttcccccaactcccccccaagcagccgcgaagagagatcccgcgctcaaccaccgcttctcggccgcggcccccttcggccctcctttcctccggtggccgccggggacggggagcgaagaagcctccatccctcctttcctccgttggtcgccggggacggggagcgaataagcctccctccctccttccctccggtggttgccggggacggggagcgaatcctccattcctccttccctccggtggtcgccggggaccgggatcgaagatgttctatggggccatggtttgggatccgtggctgatcgtgtcgcagatcgtgtgcctgcagtgcctctactacctgtcgctgggcgtcgccatggcgctcctcgtcggcacccgcgtcccgcgactcacccttctctacttcttcgacttcgccacgctcaccccgcgcacccccacgggttggtgcgccatcgcatcattcattcttgccgctgtcgcagggtacgccgcagctccctaacctcactctcatccacttggttcgtctgaaactggaacggtatcttctggtagtagtcaaaacgcgaaatatgcctgtcgcgc

SEQ ID NO: 113530 - DNA, 2035 bp, Zea Mays
gataatattattgttcccgcaaactgttgatcacaggcagcctatagggaccgatcccctttcccccaactcccccccaagcagccgcgaagagagatcccgcgctcaaccaccgcttctcggccgcggcccccttcggccctcctttcctccggtggccgccggggacggggagcgaagaagcctccatccctcctttcctccgttggtcgccggggacggggagcgaataagcctccctccctccttccctccggtggttgccggggacggggagcgaatcctccattcctccttccctccggtggtcgccggggaccgggatcgaagatgttctatggggccatggtttgggatccgtggctgatcgtgtcgcagatcgtgtgcctgcagtgcctctactacctgtcgctgggcgtcgccatggcgctcctcgtcggcacccgcgtcccgcgactcacccttctctacttcttcgacttcgccacgctcaccccgcgcacccccacgggttggtgcgccatcgcatcattcattcttgccgctgtcgcaggtgctgggttcatgctttatgtgattgagagagccaagaagtgcctggactttgcagcaacactctacataatccatctcttcatttgcattgtttatggtggatggccagcttccattacatggtgggttgttaatatcactggtttggcaatcatggctctcctaggtgaatacctatgcatccggcgggagttgaaagaaattccaatatcacggcttcgtgcaagtgtttaatctcacatggtaaaagagtacaggtgtttcaaattgtgttgcccctggaggtgtttgttaatatgttacttaaggaatacaatgaatgccttgttccgtggtttgcaatttgatacttagcaaacttcccatagagcgttcatctgatacccaatctcccagtaggccatgataaactgattggtctcagagttcccaccaacggaaatggcacctcagtttctaaatcattcattcaagtcctctttatgaaaaaaagcctgccctgcctcttatgaaaagaagtgttcctcccttgcctatgttctagtgacagctcgctgcttgacaacgtatgactagatatcaacatgtgcattctttagtgatatattgttcttacttcttaatgcactcatggactcttgtctagatgtatcttgcaaataatatatctagtgttatatgctaatccatgctttgctaggagagttgtgatctaccccgtccttttgatggacgatatgcacagctgtgctcgtgtgaaaaaatggcaataaaggaccgctttcagcccaaagaaaaaagagctcgattggggatcgaaggttaggttactggatcactaattaaaccagtctttaccggtcaaagtagaagtagcgtctttgatttatccatataaatgtactccctctttttttttttgtcgctggatagtgcaaaattgaactattcaacaacaactgaaaagaaacagagggagtatttgtcatgttcttatataaacaagttcttatataaacaaggttaaaccaatcaattattcaaaacctatgtggctagatacaatgtcaatttgctactagtggtggtcaatttgttaccgtttggttctggggtataataggatggaaatggagccgctccactcttaatttattgttgtttgaactggttctgtataggatagaaagactctaaaaaagaaaaaaaatatgtaaagtgttgaaccacccggctctccaaaatctcttagactgagccgctgtctggtatggaaccaaacactacctaggggtttttcatttttccaagagaaattagttcattttttctaagaaaaatacgaaactaacccttaatctatgtccgggatttaggatgttccagcaatgcataaactccagagacaaacaaagaagcagcagaacattataaaaaacaagaagatccaaaacagccgataaaggtaccgagccttata

SEQ ID NO: 113531 - DNA, 710 bp, Zea Mays
ataaaaatacaaagtatgcaaaatgagaagcaaggggttgaaggaggatcccctgcccctgcggcggagctggaggtctccctccgcgagttcaccctgtcggacgcggacgcggaggcgttcatgtcgtgggcgtccgaccctcgcgtggtccgcttccagcgccgcgacgcctacgagcacgtggaccaggcccgccgctacatcgccgaccacgtcctgccgcacccgtggtaccgcgccatctgcgccggcgcgggcgcgcccctccccgtggtgggttccatctcagtgaaggccgggcccgccgaggacgggcggctgttcagggcgtccgtggggtaccgcctggcgcacgcgcactgggggcggggcatcgcgacgcgcgcggtgcgagcggcggccgcggccgttttcacggcgtggccctggctgctgcggctggaggccgtggcggacgtggacaacccggcgtcgcagcgcgtgctggagaaggccgggttcgccagggagggcgtgctgcggaagtacgtcctgctcaagggccggcccagggacatggtcatgttcagcatcgtcgtcgagacggagcaggacaatccggatgggctgtagatcgtgggccgcgatgctatgggctcctggcctttcgctgctgcgtaacgttccaggcagccatgtatcatgtactgtatgtatgatgatagtat

SEQ ID NO: 113532 - DNA, 899 bp, Zea Mays
accagtacaaccaactcctccacctcctcgcacatcaacgtgtcacgccgtcggtctgtggccgccaacaccgccaaggcaatcgagtgcgtcgctgatggccgccatctccgccttcgccgcctccgtctcctagaagattccgcgcaggcgctcgtccgtgacacacgaagaagataatcacaaagataatcacaaaagagataatcacaaagatcgaagaagctgcaaagccgcttggctttgatgttcagaagaaaaaatacaagatgcggatggagaacccgaaagtaggtagaaagggcaatctgaatgttgcaactgaggtcttccaaatagccccatccctacatgtagtcgagctaaagaaggcgaagggggacactctgagttccaaaagttctacagaagcctgtcgacccagctgaaggatgttgtgtggaagtgcgacagcgaggtgggcggcaacagcacggcagcatgaaagcgccctttgaactttccactggacggcaccagttttcctttgtacatagcttctctttcgtatgatcatgtgtccattgcagagtcagttttgcaacaagttctttggtttatttgttgacggcgagtaagcccggtgaaacaaccgccctggaggctgttgtggatgagcttactggcgtgtttagttcgtttcacgatcgggaggttgaatggaatgggaaccacaatcaaggatgtagtagtttgtgtagtaacgaggtatcgaggtagatacatcagatggtgtaagggagtaccagctgttagttcatggcttcaagcttagccccccttcaatttgtttgatgatgtattacttcacaataaacattattacttagatgtatgaggtgagcacacttggtcttttg

SEQ ID NO: 113533 - DNA, 1689 bp, Zea Mays
cactcccaatgcgcgcgccgcgatgacgacgccaccgcgcaacgcgaccctccccgtcctccttgtcctcctcctgctcgcgccgcacctcctcgccacagcgccggcgtttgctagccgcggcctcagcgcgtccgacgccgcccacatccggaggcgccagctgctgcagtaccacggcggcggcgccggcaatggcagcggcgtggtcgtcgacccgtcctacgcgttcccgaacccgcgcctccgcgacgcgtacgtggcgctgcaggcgtggaggcgcgccatcctctccgacccgcacaacgtgacgggctcgtggacgggccccgacgtgtgcgcctacgccggcgtctactgcgcgccctcgccgcaggaccccgacctcaccgtcgtcgcctccgtcgacctcaaccacgccgacctcgccggacacctcccggaggagctgggcctgctcgctgacctcgccgttctccacctcaactccaaccgcttctgcggcctcgtgccccggtcgctggacaagctccacgcgctccacgagctcgacctcagcaacaaccgcctcgtcggcgccttccccgacgtcgtgctccgcctgcccagcctcagatacctcgacctgcgcttcaacgacttcgagggacccgtgcccagcgagctcttcgaccgaccgctcgacgccatcttcatcaactccaaccgattccgtttccagatccccgacaacttcggcaactcgccggcctccgtgctcgtgctcgccaacaacgacttcggcggctgcctcccggcctccgtcgccaacatgtcgtccacgctcaacgagatcatcctcatgaacacggggctcaagtcctgcgtgccgccggagctcggcgcgctcatgggcctcaccgtgctcgacctcagcttcaacaagctgatgggcgccatccccgacgagctcgcgcgcctccacagcatcgagcagctcgacctcggccacaaccgcctcgtcggcgacgtgccggaggagatctgccgcctgccgcacctccagaacttcacctattcctacaacttcatcaccggcgagccgcccgtctgcctgcacgtcaagagccttgacgaccgccggaactgcatcccctaccgccccgaccagaggtcgccagagcaatgcaacttcttcaggaaccaccaccacgtcaactgcgatgccttcaagtgcaagaagttcatcctgccgtcgccacccctgccgccaccaccttcacctcctccgccgtctcctcctccaccgtcgccgtctccaccgccgccttcgcctcccccaccatcccctcctccgccatcaccatcccctcccccaccttcgcctcctccaccatctcctccaccaccttcacctcctccgccgtctcctccacccccgtccccatcccctcctcctccttctcccccaccgccgtctcctccacctccatccccatcacctcctcctccttctccccaaccgccgtcgccacctccaccatctccatcgccgccacctctctattacgaggagtcaccagaggaacggtacctctccccgccgtatccggatacgctgaggtgccgctgccgcagtactacgaggtgtcacggcagcaccgttacctctcgccgtatccacggcgtacaagtgagtcgccacctccc

SEQ ID NO: 113534 - DNA, 588 bp, Zea Mays
aggaggtttcaacagaggatcggtacctctccccgccgcctccggcctacaccgaggtcccgccgccgccctactacgaggagtcaccggaggagcgttacctctcgccgcctccaccagcgcaccaggagtcgccacctcccatccaccacgacccgccacctccaccctactacgaagtgtctccggaggaccggtacctctcgccgccgccaccaccatccccggctagcttgcccaaatacgactactcgtcgcctccaccgccttcttccccgccgtactcggaggtgtcacctgaggagcggtacccgtcacctccgccgccgccacgggcattgcccaagctgcctgtgtatgactactcgtcgccgccaccgccagcggccgcctggacaccgtagtgaaaaaaaaaattgattcgttcgaggagattttccgtcccttgtgatcatacattgttttaatttgttgtggtaaaaagaagatgatactgaattgatcctttgtttcatttcctcctcttgtatctaaaattttcttcttggatcttttcgctactgatgacgatgatgattgatctggttc

SEQ ID NO: 113535 - DNA, 702 bp, Zea Mays
atgtgccgacgtacccacacacgtacacttgcgaagtcaagtggtatagtatatggagttattctgagacgacgacgactggccgatccatcgtacgtatcagttgttttcgctggcctcgacctcgtcgctgccgggggggcagggacacggcttctttggcggtggcggcgccctgggcgtcggtggctttggcgctggcggcctcggcgtcggcgtcggcgtcggcgtcggcggtggcttgggggcaggcgggccgtggtggaagcacttgttgcagcagctcttcaggcacatcactttctcgttgctaaagggtgggtagcagaggcagttggtggcgacgcactggtggtagcagagggccggcaggtcctcgaagcactcgctgaggcacctgtccttgcacttgccgccggagacggcagcgacgacgacgtgggaggagccctcggagtggcgggcgacgacgtcgtcaaaggcgtcctcgtcgcggcagttccccgtgcacgacttgaagcacttccagtggtacatgtgctcgtcgtccaccgccatcgccatcgctgccgccgcgaagagcgcggcgacagccaggacgacgccgagcgccccgccctgcgctttgtagcccgccatcactggctagctagctactactaccttagctgctcggtcgtcctcctaggtacggtgagctga

SEQ ID NO: 113536 - DNA, 756 bp, Zea Mays
atgtgccgacgtacccacacacgtacacttgcgaagtcaagtggtatagtatatggagttattctgagacgacgacgactggccgatccatcgtacgtatcagttgttttcgctggcctcgacctcgtcgctgccgggggggcagggacacggcttctttggcggtggcggcgccctgggcgtcggtggctttggcgctggcggcctcggcgtcggcgtcggcgtcggcgtcggcggtggcttgggcttcgccggggcaggcggcttcggaggaccaggcattggcggcctcggcttcggggcaggcgggccgtggtggaagcacttgttgcagcagctcttcaggcacatcactttctcgttgctaaagggtgggtagcagaggcagttggtggcgacgcactggtggtagcagagggccggcaggtcctcgaagcactcgctgaggcacctgtccttgcacttgccgccggagacggcagcgacgacgacgtgggaggagccctcggagtggcgggcgacgacgtcgtcaaaggcgtcctcgtcgcggcagttccccgtgcacgacttgaagcacttccagtggtacatgtgctcgtcgtccaccgccatcgccatcgctgccgccgcgaagagcgcggcgacagccaggacgacgccgagcgccccgccctgcgctttgtagcccgccatcactggctagctagctactactaccttagctgctcggtcgtcctcctaggtacggtgagctga

SEQ ID NO: 113537 - DNA, 755 bp, Zea Mays
caaaaaccgcagcgtacaagaaaagggaaaaatctcaccataccgcaacgcgccgctcccaaatctagggttcctttttgaccatggcggcggcggcggcggccaagtctcgcgcggagaggatggcgtggctggagaggagggattgccggagggggaggccaagggcgagggagaagagaaggagcaggagcccttcgccgtgcccacttccggcgccttctacatgcacgatgaccggtttcaggaggagaaccgcggcaggcgcaggcgaatgtttggtgcaaggaagttatgggatgctaaagatgatcaagcttgggtgcatgacagatttgaggagatgaacttgcatgatgatcgctatgaagaccagcggatgtctagaggtcgttttagaggtcgtggtggtcgaggtaaagcaagaggtggtggccgtggttttcccagaggtgggaagcagcccaattaccatgaagatggcaacacccaaaaccgccccccaaaggtagtgagagggaggggacctcgacgttatgaagctgttgcaaggagcagcagagaggttgttggatcccaacgaaagcaagcagctagatttcgagagcctgttccaaatgctgcagcagccagaaattctggtcaagtttcacatgcacaacaagaggctgctcctcccaaaaagaatgtcatcagctcaagcctgaattctgcatcccctccattttatccctctggtgcagcttgtcaagatt

SEQ ID NO: 113538 - DNA, 1185 bp, Zea Mays
caaaaaccgcagcgtacaagaaaagggaaaaatctcaccataccgcaacgcgccgctcccaaatctagggttcctttttgaccatggccgacccgccggcctccgacgcacagccggagcaggcgcccgccgccgctgctgcttccaatgaccctgccgaggacgccacggtcgagaagcccctcgcggcgccgcccacgccgaagctggacgccgctgcggcggcggatgggtcagcgtatgaggtggaggatgatgagtacgtgagcgatcccaacgatgagccgtttcctacgatgcgtcgtcgagaggccagcgacgacgaggggtccgaggacgggaggcccagggcgcggatcggccctgaccaggacgacgacggccaggggggccccgaggcgtacgacgacgaggtggacgaggaggatgaggagtactacgacgaggaagaggaggacctgggagagggattcgaggagtacgaagggcgcgcggcacctcccatggaggacggcggcggcggcggcggcggccaagtctcgcgcggagaggatggcgtggctggagaggagggattgccggagggggaggccaagggcgagggagaagagaaggagcaggagcccttcgccgtgcccacttccggcgccttctacatgcacgatgaccggtttcaggaggagaaccgcggcaggcgcaggcgaatgtttggtgcaaggaagttatgggatgctaaagatgatcaagcttgggtgcatgacagatttgaggagatgaacttgcatgatgatcgctatgaagaccagcggatgtctagaggtcgttttagaggtcgtggtggtcgaggtaaagcaagaggtggtggccgtggttttcccagaggtgggaagcagcccaattaccatgaagatggcaacacccaaaaccgccccccaaaggtagtgagagggaggggacctcgacgttatgaagctgttgcaaggagcagcagagaggttgttggatcccaacgaaagcaagcagctagatttcgagagcctgttccaaatgctgcagcagccagaaattctggtcaagtttcacatgcacaacaagaggctgctcctcccaaaaagaatgtcatcagctcaagcctgaattctgcatcccctccattttatccctctggtgcagcttgtcaagatt

SEQ ID NO: 113539 - DNA, 232 bp, Zea Mays
atggtgggcgtgataggtttcatgctgatggtcctgttaggtcatcccttggaagggtgcccaacggcgtcactgaattcaggatttacatcatcatttggtaaatcctacccaatccactattgtccgggcttcaggggggcaattcaaacattgtaatatcttcaaataatcagcctacttcatcgcttcaccaaacgtcaaggatttctacacatccacaaagtcatgg

SEQ ID NO: 113540 - DNA, 675 bp, Zea Mays
tagagatgacttcagccagtgaagcatcttgtaaggtgaactgcatctgaataagctgcttatggccctatttaggccctttgtgatctccagttctgatctggagcactttgggtggctttggtatccttacttatgttaggtcttatgcctgttcgtgctggagttatctgatgggtcacttcacagcaaaggaggggtggcatttgttacttgaattgtagtattgctcggttgtgttgcgtcaggaaatgccaaatttgttggttgttgctgcgtctgaagatgtgcacggttgttgaggagagcttgaaaatattggtctggttgggctgataaagttaagagtattttttaagtacaccttgttagtgaatccggttggtgtcggtctactctgctgaagaccaagcggcttcattgccgcagcttgtatcttttggaatccgttgaaatgtgcgtgcggtttgactactttcagcttaaatgagcgtgcccaacatggatttttcggttacctgcaagaaaagccaacagaataatccgcccgtcgtttccccccgggtgatagaaaatttatttcatggttaaaagtttcaaagaacaatgttctattctgtgatgtggaatgaactacattctatcttaccggagctagaaacgaatcaaaacctt

SEQ ID NO: 113541 - DNA, 646 bp, Zea Mays
tagagatgacttcagccagtgaagcatcttgtaaggccctatttaggccctttgtgatctccagttctgatctggagcactttgggtggctttggtatccttacttatgttaggtcttatgcctgttcgtgctggagttatctgatgggtcacttcacagcaaaggaggggtggcatttgttacttgaattgtagtattgctcggttgtgttgcgtcaggaaatgccaaatttgttggttgttgctgcgtctgaagatgtgcacggttgttgaggagagcttgaaaatattggtctggttgggctgataaagttaagagtattttttaagtacaccttgttagtgaatccggttggtgtcggtctactctgctgaagaccaagcggcttcattgccgcagcttgtatcttttggaatccgttgaaatgtgcgtgcggtttgactactttcagcttaaatgagcgtgcccaacatggatttttcggttacctgcaagaaaagccaacagaataatccgcccgtcgtttccccccgggtgatagaaaatttatttcatggttaaaagtttcaaagaacaatgttctattctgtgatgtggaatgaactacattctatcttaccggagctagaaacgaatcaaaacctt

SEQ ID NO: 113542 - DNA, 784 bp, Zea Mays
tatctcaggttctctactatgtgtaatctcgtatcaagattaatgagtatcgtgatcgtataattttgaatcctatcaacccatatggcaaggcaaagaaaattacagtggacatcatcctagattttacaaaatcaaaggagcaaccagacatggctgtcatgatctaagatacttcaacgtgattggatcgaacccagacaaatgactaggagaagctccaagggccactttgtcaagggtctgtgcaatgcacttactggtgcatgatttactggaggttgtgcacatgaatgtgccacgcattggtatgtgggttggagttgaagcaggtaattttcaccaacattggtatgtgaactggagttgaagcaggagacatgattgtcattcctatcctgtgcacactgcctcctcgccgtcattcgtcgttgctctcgcagtcccgataccggagcatggttgccaggggagagcagtccaaggcaaatttgccatgttggagcagtcacaggagccaaggggctgcagtcacaggtcctgctagccaggatggagcaatcataggacctcctagcagtccaaggcaaatttgcgaggtggagtagttgcaacttctgaaacccacgtgataacatgctcaagcgttcgtatgataaaaaagaagatggcacataatcaaaagaagacctcctgttttgtgtttgtgaacctgtttgtatttttttgaacttgttttgtgaacctctatctgtaaacctgtaaaatctgaagtcgtgaatat

SEQ ID NO: 113543 - DNA, 1015 bp, Zea Mays
gtccatcacgcgccccgacctcttcacccacctcgtcctcgtcggcgcatccccgaggtacatgaactcggaggactacgagggcgggttcgacgagctcgacatcaaggcgatgctgtcgaggatctcgtcggacttccgcggctgggccgagggcttcgtgccgctcgccatcggcggcagcgcggacgaccaaccctcggcggcggagctgctggcgcggagcttcttcgccatggacccgcgcgtggcgcacggcctggcgcgcatgatcttcctgggcgaccagcgcgagctgctgggtgacgtggccgtgccgtgcacgctggtgcacgtctccggcgacttcgcggcgcccccctgcgtcgggcgctacatgcaggcccgcatgcgcaccgcctccatgtataccatcgactcggtgggacacttcccgcagctcgtcacgcccgacgagatgctcaggatactcgaccgcattctcgtcggctccgctgcttcccaagaggaggagactaccgcggcggcggcggctgccgccaagaccgagacgacgagtagcgaggtcgtatcctctggtggtgttgccgatgcgctggagtccaagggccgtatcgacgtggcgacatagtgctcctgctgctctggtgcaacatccctctcgaagtctcgatctatcagccttggctggctcttgtgctggtctcagttgatttgcttcggtccacactccacacgtttaacttacattattgcgcttttggattttctaatgcgtagaaacattaccatggttcgttcggaatttttagccatcacgtcacccaaactgcgtgtattattggtttgatcatggattgaattaaatgaaacactgagtgttaaagcattgtaaatgacatgcatggtttgcagccttgcaggattctagcttcctagaattatttatttttttggaaaatatttcatggattgaattaaatgaaacacttgagtgttaaagcattgtaaatga

SEQ ID NO: 113544 - DNA, 1604 bp, Zea Mays
ctccagaattccccaaaaccctcatcaccgctctcccgtgtcccttccggccggtgtaaccatggatggtatgcttccctagctagatggagaggcaagggatgaacgagcacctgatgatgtaccacgccatgggcaccatacgggacgtcctgagctcctggctcccggacccgctcgtctatgccggcgccctcctctccgccgatttctcgtcccccgccggcgggagcgacgtcgccgaggatcgaatcagcgcgctcccggaaagtatcctacgcggcatcgtctcacgtcttcccgtcaaggacgccgcgcgcaccaccttgctctcgtcgcgctggctcccgctctggcgctccacgccgctcgtcctcatcgacgcccttgtagttccgagcgctggtcacggcgggaacgccctatccggcgcggtgaccgccgtggtgtctcaggtcctggaggcacacccgggccccttccgctgcgtcgacctcaccagcaactccatggccgcacaccacgccgaactcgtgcgctggttctacctcctcgccaccaagggcgtagaggagctcatcttcgtgaaccggccctggccgctcgacgtgcccctccccgtcgcgatcttcagcctgccgttcatcaggcgcctccacctcggcgtctggcggttccccaacaccgcggcactactctcccgtggcgttgccttccccagactccaggagctccgtctcggctgcatggccatggatgacgaggacctcgacttcgtcctggccaggagtccagtcctggagaccctcgtgctctacacgagccaggggcaagtgaacctcggaatcagcagcagcagcctgtggtccgtgcagctgtgcatgtgcgtcgtccatcacgtcgcggtcgtggacgccccgcgactggagcggctcttcctgtgggagaccatttctgctttctccagtgacagagtccgcaccaggatcaagattgggcgtgccccctgtctgcgcttagtgggctttctggagcctggagtacatgttcttgaggtcggcgacactgtcatcaagattgggacaaaggcaagcgcaaataccatgattccaagcgtcaagatattggcgttgaaggtgcgtttcggagtccgcaacgaagccaagatgctccctagcttcctcagatgctttcctaacatcgagacattgcatattgagtctaggaaagctgaccaaccgactggcacactgagtcgcaagttctggcaggagaacgctcgtgctgaatgcgtgcagtcacacatcaaggagatcgttttccacgagtaccgggggaaaagaagcgagcttgccttcattaagttcatcctggagaacgcggatgcactgcaggagatggcgattgtgtgtgtcaatggtagtttctcttcgtgggacgaggctgccgccaaagtgacgaaggatctcacctgtgttaaacgggccagtcagaactgcaatgtggaggtcttggagagttctaattctagaggaagttcgtcttggagctgccaggtggcatctgatccttgtgttattgacccttttgagtactgctactga

SEQ ID NO: 113545 - DNA, 1619 bp, Zea Mays
atcctcaagctccagccaggttgcagcgtgtgtgagggtggtaaatcttctgtccacaccagtgttcacatctccccttcccaagtttgcccagtccctaggtggtgaccatcgtcagcagttagtccacctcgccgtgaccaggtaactttcaaagtttccttagccgagctatacatgttttgtgctctacatcagatagtgaagctcatatgatgatgaacaaatctccttaagacagtcttgttggatgttatatgaaaattggagtaacagctgctcaaatctagactgtctggcggctgaaactgaattgtattcagtccactgtgaactgaaattcagcacaagggtgtctagtttggagccctatggtaattagtgcaaggcaaattgggttaggaattctttagcaaactgaaaggacatatataggagaacaaattccctaaagagggttggacttggtgctacacaaaaagaggagttaaagtggctccaagttgtgctgtccgactggagatatgtaaatttagttaactattgctggcagtttgagttagtttttacccaactttggagccttgtggtaattactccaaggggaaatgggttagggattccacatccagataaaagaccacatcaaggacaacaagtttcattcaaagaatgggcttgctactgtataagttggcagtaaaaaggtgtcccaaacttctctgccagagtgggtgcagtgctgtttcagttcactgaaactgaacttttttgtgattttgctctattttgtggcatcataacttttgattagtatggtttcagtctggggatgctatgccaaagtagtagagctatgtctagagaataacttggagtaaatgagttgtgtttgttgttgagggaatttgtgagttacaaagcactgaacagagagagaggaatggagcactaaaagatgaattcagagaactgaaaataggttcaatgaattgtggctgattcttggacactataaattgtagtacatgcagtttggatccttgcttaatgcataaataaagtacttggttggttatggaggcaaggtttcctagtttggttggtgaattgagttgtgatattagattatttagctctcttaaggttttgttagtttttgtatgcacctttagagaggtgtaagtcctgtgatgcttcttagtattttcttttcaagttgcataagcataaacatccatgatcatgttatttcatatagaactcccagcacgaggactgaagattcaagctgaagtggtgactgaagaggaatctactccagtggctgctgatcaagtggaggagccatctaactgggtagcttgtagagggatctagacctcttcactgcaacaaaggcaagccccggtgcatgcaaccccttccttgtgtttttaaataatttttgcacactttaagtctagtgaaatgtgcattaggtttataggagttgcttgaaaccctttgatgcattgccttccttgatatccatacctttatagatacttctggtgaagtatcaaaatatgattttcaaaaatgcttagccctgcttagatcttgtggatagaggttgt

SEQ ID NO: 113546 - DNA, 1422 bp, Zea Mays
gtttacggattctttttctagcatttctcaattcttttttgttccggccccaatatgctctgtctcaaagtcaatttgcctacgagttcgaacgaaccgacaagaaggagcaatacacaagagagaagacaaggaatagcgccagcggcggccagggtgccgctcgatctctatgacttgttcttccctccctttcttcccttcacaaggttcctgaggcccgctttgagctgagatggattcgtcccagtagtgttctgggtgctcccgtttcttgatttcttccgaacttaggcattactgtttacagaatacgaccacaagattccggacactgtgttttgctcttctccgagtttgcactttgcttgatattccatttggaggagctgcgatgggctgtctgcaaacaaagcacgccagtcgatcgccgcacttgctggatacacgggaagctgtagcccttgctgctgaaacatcttgtgagaaagtggatcttccagattttgttaatattgctactggaacactgcggcgtgagaattgaattccatcttccataagaaagaggaatcaaacggttgctttcagatatactgccatgttttcctgcttacattcatgcctacctccttatttttttcccatattttttcggttaacaagcctagcgaaaacaccgtggcattgcaacttctctgactaactctgatacgcatgtattgttgtgtacttgtgttttgggtctagtttgttaagctccacctattgttgcagttacagtgagtgaagttgaagcactgcatgacctcttccggaaaataagtaattcagttatcagagataatctaattcacaaggaagaattccaacttgctctctttaggggcaagaagcagcaaaatctctttgttgatagggtatttgacttgtttgatcaaaaacgaaatggtgtaattgaatttggtgagtttgttcgatctcttggtgtgtttcatccagatgcaccagaagatcagaaagttgcatttgcatttaagttgtatgacttaaaacagacaggctttatagaacggcatgagttaaaggagatggtgctggctctgctggacgaatcagatttggatattgcgagcgacgctgtcgagatgattgttgacaggacatttgatcaggccgacacaaaaggtgatgggaagatagatcaggaagaatggactgaatatgctaaagacaatccatacgtgctgaggaatatgacccttccatacctcaagtaagtgtgcatgggaggagttttttttttcttcttttttttgtaatatttctgaatggtatattagcaggacatcttgatcaatagagttgccatgttatttgaccatagaagtctattattaagggttgcatcagttttgttta

SEQ ID NO: 113547 - DNA, 998 bp, Zea Mays
gtttacggattctttttctagcatttctcaattcttttttgttccggccccaatatgctctgtctcaaagtcaatttgcctacgagttcgaacgaaccgacaagaaggagcaatacacaagagagaagacaaggaatagcgccagcggcggccagggtgccgctcgatctctatgacttgttcttccctccctttcttcccttcacaaggttcctgaggcccgctttgagctgagatggattcgtcccagtagtgttctgggtgctcccgtttcttgatttcttccgttacagtgagtgaagttgaagcactgcatgacctcttccggaaaataagtaattcagttatcagagataatctaattcacaaggaagaattccaacttgctctctttaggggcaagaagcagcaaaatctctttgttgataggttgcatttaagttgtatgacttaaaacagacaggctttatagaacggcatgagttaaaggagatggtgctggctctgctggacgaatcagatttggatattgcgagcgacgctgtcgagatgattgttgacaggacatttgatcaggccgacacaaaaggtgatgggaagatagatcaggaagaatggactgaatatgctaaagacaatccatacgtgctgaggaatatgacccttccatacctcaaggacattactatggtattcccaagctttgtgatgcactcagaaatcagtgaaacagacatggctgtctaacctgaaaagtaactgcaaactcacagcttctctgcacagcctgatgtatattaatgatggaaccggaatcttttcatcaagaaaaggttaatttgcaaccttctctcgtgaacagaaatttgtggactggtgtaaatggtgggaataggaaaggtgttctgttatattaccgacaagcaaacgagcaatctagcatctatctgattgtcgttttcagacactcgtgattagcttcaatatttttcctcacc

SEQ ID NO: 113548 - DNA, 1597 bp, Zea Mays
gtttacggattctttttctagcatttctcaattcttttttgttccggccccaatatgctctgtctcaaagtcaatttgcctacgagttcgaacgaaccgacaagaaggagcaatacacaagagagaagacaaggaatagcgccagcggcggccagggtgccgctcgatctctatgacttgttcttccctccctttcttcccttcacaaggttcctgaggcccgctttgagctgagatggattcgtcccagtagtgttctgggtgctcccgtttcttgatttcttccgaacttaggcattactgtttacagaatacgaccacaagattccggacactgtgttttgctcttctccgagtttgcactttgcttgatattccatttggaggagctgcgatgggctgtctgcaaacaaagcacgccagtcgatcgccgcacttgctggatacacgggaagctgtagcccttgctgctgaaacatcttgtgagaaagtggatcttccagattttgttaatattgctactggaacactgcggcgtgagaattgaattccatcttccataagaaagaggaatcaaacggttgctttcagatatactgccatgttttcctgcttacattcatgcctacctccttatttttttcccatattttttcggttaacaagcctagcgaaaacaccgtggcattgcaacttctctgactaactctgatacgcatgtattgttgtgtacttgtgttttgggtctagtttgttaagctccacctattgttgcagttacagtgagtgaagttgaagcactgcatgacctcttccggaaaataagtaattcagttatcagagataatctaattcacaaggaagaattccaacttgctctctttaggggcaagaagcagcaaaatctctttgttgatagggtatttgacttgtttgatcaaaaacgaaatggtgtaattgaatttggtgagtttgttcgatctcttggtgtgtttcatccagatgcaccagaagatcagaaagttgcatttgcatttaagttgtatgacttaaaacagacaggctttatagaacggcatgagttaaaggagatggtgctggctctgctggacgaatcagatttggatattgcgagcgacgctgtcgagatgattgttgacaggacatttgatcaggccgacacaaaaggtgatgggaagatagatcaggaagaatggactgaatatgctaaagacaatccatacgtgctgaggaatatgacccttccatacctcaaggacattactatggtattcccaagctttgtgatgcactcagaaatcagtgaaacagacatggctgtctaacctgaaaagtaactgcaaactcacagcttctctgcacagcctgatgtatattaatgatggaaccggaatcttttcatcaagaaaaggttaatttgcaaccttctctcgtgaacagaaatttgtggactggtgtaaatggtgggaataggaaaggtgttctgttatattaccgacaagcaaacgagcaatctagcatctatctgattgtcgttttcagacactcgtgattagcttcaatatttttcctcacc

SEQ ID NO: 113549 - DNA, 1313 bp, Zea Mays
gtttacggattctttttctagcatttctcaattcttttttgttccggccccaatatgctctgtctcaaagtcaatttgcctacgagttcgaacgaaccgacaagaaggagcaatacacaagagagaagacaaggaatagcgccagcggcggccagggtgccgctcgatctctatgacttgttcttccctccctttcttcccttcacaaggttcctgaggcccgctttgagctgagatggattcgtcccagtagtgttctgggtgctcccgtttcttgatttcttccgaacttaggcattactgtttacagaatacgaccacaagattccggacactgtgttttgctcttctccgagtttgcactttgcttgatattccatttggaggagctgcgatgggctgtctgcaaacaaagcacgccagtcgatcgccgcacttgctggatacacgggaagctgtagcccttgctgctgaaacatcttttacagtgagtgaagttgaagcactgcatgacctcttccggaaaataagtaattcagttatcagagataatctaattcacaaggaagaattccaacttgctctctttaggggcaagaagcagcaaaatctctttgttgatagggtatttgacttgtttgatcaaaaacgaaatggtgtaattgaatttggtgagtttgttcgatctcttggtgtgtttcatccagatgcaccagaagatcagaaagttgcatttgcatttaagttgtatgacttaaaacagacaggctttatagaacggcatgagttacgtcgcagttaaaggagatggtgctggctctgctggacgaatcagatttggatattgcgagcgacgctgtcgagatgattgttgacaggacatttgatcaggccgacacaaaaggtgatgggaagatagatcaggaagaatggactgaatatgctaaagacaatccatacgtgctgaggaatatgacccttccatacctcaaggacattactatggtattcccaagctttgtgatgcactcagaaatcagtgaaacagacatggctgtctaacctgaaaagtaactgcaaactcacagcttctctgcacagcctgatgtatattaatgatggaaccggaatcttttcatcaagaaaaggttaatttgcaaccttctctcgtgaacagaaatttgtggactggtgtaaatggtgggaataggaaaggtgttctgttatattaccgacaagcaaacgagcaatctagcatctatctgattgtcgttttcagacactcgtgattagcttcaatatttttcctcacc

SEQ ID NO: 113550 - DNA, 1302 bp, Zea Mays
gtttacggattctttttctagcatttctcaattcttttttgttccggccccaatatgctctgtctcaaagtcaatttgcctacgagttcgaacgaaccgacaagaaggagcaatacacaagagagaagacaaggaatagcgccagcggcggccagggtgccgctcgatctctatgacttgttcttccctccctttcttcccttcacaaggttcctgaggcccgctttgagctgagatggattcgtcccagtagtgttctgggtgctcccgtttcttgatttcttccgaacttaggcattactgtttacagaatacgaccacaagattccggacactgtgttttgctcttctccgagtttgcactttgcttgatattccatttggaggagctgcgatgggctgtctgcaaacaaagcacgccagtcgatcgccgcacttgctggatacacgggaagctgtagcccttgctgctgaaacatcttttacagtgagtgaagttgaagcactgcatgacctcttccggaaaataagtaattcagttatcagagataatctaattcacaaggaagaattccaacttgctctctttaggggcaagaagcagcaaaatctctttgttgatagggtatttgacttgtttgatcaaaaacgaaatggtgtaattgaatttggtgagtttgttcgatctcttggtgtgtttcatccagatgcaccagaagatcagaaagttgcatttgcatttaagttgtatgacttaaaacagacaggctttatagaacggcatgagttaaaggagatggtgctggctctgctggacgaatcagatttggatattgcgagcgacgctgtcgagatgattgttgacaggacatttgatcaggccgacacaaaaggtgatgggaagatagatcaggaagaatggactgaatatgctaaagacaatccatacgtgctgaggaatatgacccttccatacctcaaggacattactatggtattcccaagctttgtgatgcactcagaaatcagtgaaacagacatggctgtctaacctgaaaagtaactgcaaactcacagcttctctgcacagcctgatgtatattaatgatggaaccggaatcttttcatcaagaaaaggttaatttgcaaccttctctcgtgaacagaaatttgtggactggtgtaaatggtgggaataggaaaggtgttctgttatattaccgacaagcaaacgagcaatctagcatctatctgattgtcgttttcagacactcgtgattagcttcaatatttttcctcacc

SEQ ID NO: 113551 - DNA, 663 bp, Zea Mays
acggaacacaaggaatttattttgagggaagaaataaaggcagaaatcagtccgcacgcgggggattgcaaccaacaaagaattacatgcaccaaaatcaacaattgagcgagcaaattattgaggcaatgttgcaacgatgtgcccgtctttgctggcattcagcactaggtaaactcttacaaagaaacaaaattgtgaaccaaggcaggtaccatcgtcgtcgtttcgacaagcatcagctaagagtatcaattataaagcaggtcttgaccagtggaaatcatctagaccttatagccggtcaaggtgaaacctctgccgacaatctcgcctacgcagaaccatgcatagagctcaactccaaataaactcgcaatgccaaggtcctcgaccgtgaggtccttcctgttcttccatacctgcttgacacaatcaagctccttccagaatgactcatagcgacctggtaggctgaacaaacacaacaaaggttagaaaccatgaaaagtaaaatcctgaatggcacaagttacatattgcgtctaactgctgttcctaatgctattattaagtttcaacaggccatttgcatttagacaaacaatgatgtactaattggagctccttgatacttaaaattttgtcaagccatttctattt

SEQ ID NO: 113552 - DNA, 2245 bp, Zea Mays
ccaccacctcccccctccatctcgctctcgctctcgctccgcccctctctccctctctcattggccattccgcccgcatgaaaccccaaaccctcgccggcatcgccgtcgccgcagcagcgcccgcgtagcccgcccctctcgccctcgccccccctccccgcgccccgatcccgcccgctccgcagccgatcctgccgggagcacgaccgatgacgatgaacggcgccgctgcaccggagcgctcgcccccagcctcgcccccgcctctggtccaggcccaggcgcctccgtcgccatctccgactcagccgctcgagtggaggttctcgcaggtgttcggtgagcgcagcgccggggaggaagtccaggatgttgacatcatctcagcaatagagttcaataaatcgggacatcatcttgccactggagacaggggtggacgagttgttttatttgaaaggactgatgtcaaagatcatgcctctagaaaagatgctgagaaagctgattattctatcagcaggcatcctgagtttcgctacaaaactgagtttcaaagccatgagccagagtttgattacctcaagagcttggaaattgaagagaagattaaccaaataaagtggtgtcaagcaacaaattgtgcattgtttcttctatccacaaatgacaaaacgataaagttttggaaggtccaagaaaagaaagtaaaaaaggtatctgagatgaatttggaccgttcaactgctcctacaaatggtagtcctggtggtacgggatatctgcgcccatctctctcaaatggcaatgttctaaaacctggcggacttcctttgctacgccttcctgtggttacaacccaagaaacaagccttgctgcgagttgccgaagagtatatgctcatgcacatgactatcatataaattcaatatcaaataacagtgatggtgagacatttatatcagctgatgatttgcggataaatctttggaatttggaaatcagcaatcaaagtttcaatattattgatgttaagcctacaaacatggaagatctcactgaggtgataacatctgctgaattccatcctactcattgcaatacattggcgtatagtagctctaagggctccattcgacttgttgatctgcggcaatcagccctttgcgacaatcattcccaaatctttgagcagcatgaggccccaggttcaagatcatttttcactgagattatagcttcaatttcggacataaaattttcgaaggatgggaggcatattctcagtcgtgactacatgactctgaagctttgggatgttaagatgaattctggtcctgttgcaacattccaggttcatgagtatctaaggcctaagttatgtgatttatatgaaaatgactcaattttcgacaaatttgagtgttgtcaaagtggtgatggattaagagtagcaactggttcctacagcaacatttttcgcgtgtttggttgccgttctggtagcagtgaagcaacaacacttgaagcaacccgaaaccctacaaggcggcaggtccagactacctctagagctaccagatccctaagtactctgacaagggccgttagacgaggtggagagagcactggaatagatgccaatggaaattcctatgatctgagcacaaagttgctccatttggcctggcacccatctgaaaatctaattgcttgtgctgcagccaatagcttgtacatgtactacgcataaacaagcgaaacgaacagagcgacagtttttttttgttggttgctcccggtgagaaagacacgtttagccaatggtggattgaagccaggagttggtggagatggtgtattttgtgccagtcggaagcagttcttttcggtgccatatagagctgtccagagtccaagaggaagtgactcgatcattcccgggaagcagctttgattctgattattattattttttgtgtggggaaaggcttgtctttcccccataggttcatttagatttaaatataaggtcctagcttgacaacatctgggcatctgtagtagacgatgttaaaggggatgggtatggcgacgatccaccgttgtattcatgttgccatgggtttgtaacttcagggtggccgttggagcttttcatagttttatcttacagatcgaccttattttttttcccttgcgtggggaaccttgttttcgaagaatgccaggaccttcgtc

SEQ ID NO: 113553 - DNA, 2496 bp, Zea Mays
ccaccacctcccccctccatctcgctctcgctctcgctccgcccctctctccctctctcattggccattccgcccgcatgaaaccccaaaccctcgccggcatcgccgtcgccgcagcagcgcccgcgtagcccgcccctctcgccctcgccccccctccccgcgccccgatcccgcccgctccgcagccgatcctgccgggagcacgaccgatgacgatgaacggcgccgctgcaccggagcgctcgcccccagcctcgcccccgcctctggtccaggcccaggcgcctccgtcgccatctccgactcagccgctcgagtggaggttctcgcaggtgttcggtgagcgcagcgccggggaggaagtccaggatgttgacatcatctcagcaatagagttcaataaatcgggacatcatcttgccactggagacaggggtggacgagttgttttatttgaaaggactgatgtcaaagatcatgcctctagaaaagatgctgagaaagctgattattctatcagcaggcatcctgagtttcgctacaaaactgagtttcaaagccatgagccagagtttgattacctcaagagcttggaaattgaagagaagattaaccaaataaagtggtgtcaagcaacaaattgtgcattgtttcttctatccacaaatgacaaaacgataaagttttggaaggtccaagaaaagaaagtaaaaaaggtatctgagatgaatttggaccgttcaactgctcctacaaatggtagtcctggtggtacgggatatctgcgcccatctctctcaaatggcaatgttctaaaacctggcggacttcctttgctacgccttcctgtggtagttacaacccaagaaacaagccttgctgcgagttgccgaagagtatatgctcatgcacatgactatcatataaattcaatatcaaataacagtgatggtgagacatttatatcagctgatgatttgcggataaatctttggaatttggaaatcagcaatcaaagtttcaatattattgatgttaagcctacaaacatggaagatctcactgaggtgataacatctgctgaattccatcctactcattgcaatacattggcgtatagtagctctaagggctccattcgacttgttgatctgcggcaatcagccctttgcgacaatcattcccaaatctttgagcagcatgaggccccaggttcaagatcatttttcactgagattatagcttcaatttcggacataaaattttcgaaggatgggaggcatattctcagtcgtgactacatgactctgaagctttgggatgttaagatgaattctggtcctgttgcaacattccaggttcatgagtatctaaggcctaagttatgtgatttatatgaaaatgactcaattttcgacaaatttgagtgttgtcaaagtggtgatggattaagagtagcaactggttcctacagcaacatttttcgcgtgtttggttgccgttctggtagcagtgaagcaacaacacttgaagcaacccgaaaccctacaaggcggcaggtccagactacctctagagctaccagatccctaagtactctgacaagggccgttagacgaggtggagagagcactggaatagatgccaatggaaattcctatgatctgagcacaaagttgctccatttggcctggcacccatctgaaaatctaattgcttgtgctgcagccaatagcttgtacatgtactacgcataaacaagcgaaacgaacagagcgacagtttttttttgttggttgctcccggtgagaaagacacgtttagccaatggtggattgaagccaggagttggtggagatggtgtattttgtgccagtcggaagcagttcttttcggtgccatatagagctgtccagagtccaagaggaagtgactcgatcattcccgggaagcagctttgattctgattattattattttttgtgtggggaaaggcttgtctttcccccataggttcatttagatttaaatataaggtcctagcttgacaacatctgggcatctgtagtagacgatgttaaaggggatgggtatggcgacgatccaccgttgtattcatgttgccatgggtttgtaacttcagggtggccgttggagcttttcatagttttatcttacagatcgaccttattttttttcccttgcgtggggaaccttgttttcgaagaatgccaggaccttcgtcatgtttgatgcgaaccctagaataggaaacatactgtcattttattgtatgtacatttttaataggttggagtggttcttctgttgtttagttatattcttttaccagtgcaacatgtcaacatgcccttgtcagctttgtcatacccttcatcacaggttcatcttggactggagcttagaaaccgggaacatgacatggtcaccggaacgtggcaacaatttgattcatgtggtgttaaatcttag

SEQ ID NO: 113554 - DNA, 715 bp, Zea Mays
gccgtgcgcgcgcgcccccgcggcgacaaccgggcgaccgccgccgacctacgccaggtgccaagccgttcctcagtcccatcacgaggccttcaacgagcccttcgccggcgacgagaaaccacacggcaagcattcaagcaaagtaccggagcggagcagagcagatttaaaagggaaataatagacagggtcaaagcctcacagggattaccggagctggaggacgaggtggctggtgactgccgacagttgatgcaggaggcgaagggagaggtgatctcgtggagcatcactgagcacgagtgtgattgacaactgacgatgagacgaacgactcctgtttctggtggctaggagtggaggggcaggagagaaggttggagaatagtggattggaagtgggccagtctgttgttggaaccctaagacctaatgggctggttgacgggctgagagatgaaacccaagccttttttatttaagtcgtccatgacttaaaaccgcgactaaccgtctgagttagacgattagtcagatgactcgttattaagtcgaccaattcgtgtcgaaatgtatactgatgctaaaaaacgatacggctgactaatcgcgattggtcgaacgacttaaaaacactgctcatgtcattcctatatggaatgtgagatgtatttttttttctatactggtgtacaaatgttcattagacaaa

SEQ ID NO: 113555 - DNA, 961 bp, Zea Mays
ctcgacctccccgaacccgaactcctctcaggtcgagcctagggttagggtttcgtccctccggccccgattcgaaccaatccgcctcggcctccgccgcgccatggccgccggctccatcgtggtggacttcccttccatgggcgccgccctctgcttccccagcctcgattcactcctccgcgactccgcctcgggcttcctcgctgccgtctccaacgccccagcccccggcgcagccgacctcaccaactttcaccgcgtcttctcgcgcgtcctcagcgcctacccggacccaccgctcgaggctgtctggttcttctccgcgctctccttccacgaccgtcccgacgacctccgctccctgctccagctcctctccgccttcaccgcctcctcgcccggcaccgccaagccgcttgcccttctcgcccctgtcgtttccgagctcttccacgccgacaagccgcgcagggagaccgagaccctcgttgaggccgtcctcagctacatcagcatctgcagcaaccgctctgccccctcttcgaccgtgggcgccaccgcagacgctgtgagcctgctgccggcctttggggagctcgtcaaagtgtggagcgtgcgctactcgagggagaggtgcccgttccaagtgctgttcccgctcgctggggacgaggccaggcgggagctcatgaaggaaggctgcagcgttgactacctcgccggggtggtgctggctgaggcgttccttctcaggctctgcctcaaggtgcagaatgcaacaggggtgcctcgctctgagctgcagaaggagctcaagatctgggcagtcagctccatcccggtcttccagaaccaccgattcttcggtaagtgtttcacggccaatttcttattcttccttttagcatcacttgtagtgactcgagattgtgttggcatgttttgcccgtggatttaa

SEQ ID NO: 113556 - DNA, 2155 bp, Zea Mays
ctcgacctccccgaacccgaactcctctcaggtcgagcctagggttagggtttcgtccctccggccccgattcgaaccaatccgcctcggcctccgccgcgccatggccgccggctccatcgtggtggacttcccttccatgggcgccgccctctgcttccccagcctcgattcactcctccgcgactccgcctcgggcttcctcgctgccgtctccaacgccccagcccccggcgcagccgacctcaccaactttcaccgcgtcttctcgcgcgtcctcagcgcctacccggacccaccgctcgaggctgtctggttcttctccgcgctctccttccacgaccgtcccgacgacctccgctccctgctccagctcctctccgccttcaccgcctcctcgcccggcaccgccaagccgcttgcccttctcgcccctgtcgtttccgagctcttccacgccgacaagccgcgcagggagaccgagaccctcgttgaggccgtcctcagctacatcagcatctgcagcaaccgctctgccccctcttcgaccgtgggcgccaccgcagacgctgtgagcctgctgccggcctttggggagctcgtcaaagtgtggagcgtgcgctactcgagggagaggtgcccgttccaagtgctgttcccgctcgctggggacgaggccaggcgggagctcatgaaggaaggctgcagcgttgactacctcgccggggtggtgctggctgaggcgttccttctcaggctctgcctcaaggtgcagaatgcaacaggggtgcctcgctctgagctgcagaaggagctcaagatctgggcagtcagctccatcccggtcttccagaaccaccgattcttcggggtcttgctgaacatgctcttgaactctccactgcctgtttactctctagtgagcgctgatgatgaaatcttgttgagagatgtcctttatgattctcttatcctggtggactattctttcattaacaatggtgttggagttgatcttttgcctatatacgtgttgagattggttatcactcttgatgctgtcaatgatgccaggaggaaaggtgatcaagggagagcagtgtcatttatcaatgctttctcaacctcaaatgttcccaattttctcatcaagtgggctacttttcaagctggctctggtgcactcagcaaaccaattgccaatacaccgcaatctattattaagtggcttgtcgaccttgaagtcaaggggctcaaagtgtttggagactacagttcttgtattatggagaggtttgcttatgatggggtcaagaatggccatgggaacatgattcattcagatgcggaccttttcttttttgataagcagagtggtagggagtttatggacaccaaaggcagcgaggatgaagctgtggatgagatggagactgcaggtaataatgcttttatggctgctgcccagtcaatgaagggggtgactgacggcatgaggaagaggaagagctgcggatacgaagatgcaacagctgtgaagtttgtgaagtacaaggttgaagacagctcgctgaaggactacctatcagcagctaatggcataagcagtggcagtgaggtagagaacccgcagtctgatgatgagatggaagaatcaaactgatgcatagaaacgagatcacccgctaatgcttactttggacagttgcttttgagagttccttggacagccgcctttttttggagccaggaccagtcttgtttcagctgccgcttgttaatgatgccgtgcagaatccgcaagacggccccatctccagctaggcattcggatgtagtagtaaccgttagctgaccatacttgacatggagcatatgatgtttgctatgggccatatcgtgctctctgttgttatgacgcagctatagtagagtagagacctaaaaatgtagtcttgcttcaagttacttttgtaatagctgggtacttcgttatcccacggaaccagttggaagtaatgaaatcttaaccttctcctgtgtatagtgtctttttttgtgctgacgacatgcggtcaaacagtacgttttctttttttcttttgtgaatgatgagtgaatatggtgaaatattaccaacatgtttggtttgatg

SEQ ID NO: 113557 - DNA, 467 bp, Zea Mays
atgcgcgcctcacctgacgatgtgatcctctcctcttctacccatgccgatctgcgctccgcgctgacgcccatgcccacgaatcgactagtccgagggtctccgctgccggccctgcgagtctacgctaccggacaagtcgtcacgacgcactgctcggccttggcgttcgctgcgagtgcggccgcctggccgacgaccggaaggcatttgatagaatgctgcaccgagacgtggtcgccaggaccgccgtgatgtccgcgcgtcgccacgcggaatgggtctgcgattgcacggtgcccatggcctgtacggtgctcggtggtactggacctggtgttcatggggtaggtctaagttttcactttgcatgtggaacccaacgggatctcttctgtagggtttctgtcagcttctagtcgtgtggtgtgggctactcgatgaatgaactacttttactttatact

SEQ ID NO: 113558 - DNA, 1852 bp, Zea Mays
tcacattttccatttcttttacatttttctttgttttcttctcatttgacactatataaatgatacgaaaaaattgtatttattaatttttaaaccaataaattcgaaatatcaataataattacattgcttgttttgatgttctgtaattgttgtcggtaacgcgcaacatagtataatatcgttgctaaaatatgttttcaaatggacaagcttgcaccgtaagccagtactcttcttcgagaagccatagcctagcttcccttgcacgacaagcgaatggcttgtatccgaagcgtacttcctctataaatacgaagtgagccttccatacttcactcaaccttgcatttccaaagtccacaaccatgaatccctacttagaaaacaattttcttgtgcgcttgatggaagaaatggaagaggaagaagaagagttgcagttggcgaggcacatggtcaataggaggcgacgtgcacacaatgagcgtcgtcatggtggttcgatcccagggcgtgttaggattcatcgtgatcacatgagcggcgatgcaagaatccgagcggactactttggagcgaacccggtgtacacggatgctcaatttcgtaggaggttccgcatgcgtcgccatgtctttgagcgccttgttgatgttgtgcaacaagtggatccatattttattcagcgtccaaattgtgcgggtgagataggtctttctgctctacagaaagttgttgctgctgttcgaatccttgcttacggtattccggctgatgccgttgacgaatacgtacgaattggggaatctactgctcatgaagcattgaaacacttttgcacggccgtccaaaccgcgtttgctccctattatctccgtgcaccaaatgcagaagatatcgcacgccttctccaagttggcgagtcacgtgggtttcctggtatgcttggtagtgttgattgcatgcattgggagtggcgtaactgcccaagttcatggaaggggatgtttacagggcgtggtaaacatcctaccatgatcttggaagctgttgcgtcgtatgacctgtggatatggcatgcatattttggtctgccaggtagttgcaacgacataaatgttcttcaccgttcaaaccttttcgaaaggcatctgagcggtgacacacctccggtttcattcactgtgaatggtcacacgtacaatatgggatattacctagcagacgggatttaccctgactggcccgcatttgtcaagacaatccgtaacccctatgacgttagaacgcaacactttgcaacgattcaagagtctgctcgaaaagatatagaacgagctttcggtgtactccagaagagatggggtgtggtccgtggacctgcatacggatggagtcctgaacacattggggacatcatgaaaacatgcataatattgcacaacatgatagtagaagacgaaggtccattgtctttgaacacaacctttgaaaacatcggagtggtggcagacacaactcaaggttcactggaagagcgcaacgacttcgtcaatcaaaggtacaaccaactgaaagaccgcaacaaatatactcagcttcagatagatctgatacaccatcactgggcgcgacatggatccggagttgcataggatgcaatgaaacaagttctgtcatggctgttcttatctactgtcgaactgtctttgtttactttacattgttctactgtctgtgttagtgtcatgtttgttcttatcaagtgtgtgtactttgtgtcttggtgttgaagtgtcgtagtgtctcatgctgcttttcaattcaataacaaggagtactactgtca

SEQ ID NO: 113559 - DNA, 1388 bp, Zea Mays
cccaactgtataaaaggcagctgctgtgttctgttatgacacagccatcacacgcatactgcatacacaacacagagcatcagaaggagctacgatctgatcgacatggctgccgccaccatggctatcacctcccgcgcgctcgtcggcaagccggcggctggcacgagggacgtcttcggcgagggccgcatcaccatgcgcaagaccgccgccaagcccaagccggcggcctccggcagcccctggtacggtgccgaccgcgtcctgtacctgggcccgctgtccggctcacctccgagctacctgaccggcgagttccccggcgactacgggtgggacaccgcggggctgtcggcggacccggagaccttcgccaagaaccgcgagctggaggtgatccactgccgctgggccatgctcggcgcgctcgggtgcgtgttcccggagctgctcgcccgcaacggcgtcaagttcggcgaggcggtgtggttcaaggcgggctcccagatcttcagcgagggcgggctcgactacctcggcaacccgagccttgtccacgcgcagagcatcctggctatctgggcgtgccaggtggtgctcatgggcgccgtcgaggggtaccgcgtcgccggcggcccgctcggggaggtggtcgacccgctgtaccctggcggcagcttcgacccgctcgggctcgccgacgacccggaggcgttcgccgagctcaaggtgaaggagatcaagaacggccgcctcgccatgttctccatgttcggcttcttcgtgcaggctatcgtcaccggcaagggccccatcgagaacctcgccgaccacctcaccgaccccgtcaacaacaacgcctgggcttacgccaccaacttcgtccccggcaagtgagcgagggcatgatgcttgcatgcgtgtaccgtagacgtacgtattcctacgtactgcaggttgcaccagtatttgtgaagggagctttgggagccagagattgtaccgctagtgtatttgtatgcatgatgtggagctgatcaataaaatatgttgtaaatatattatgtcttcatttatgcataatgtacatgattgttgtgagcacgccatgcataaaatacatggtcaacaaataaaaaagaacggagggaatagattgcaagcgtagctcatgctgacaacgacaattggagccaaattcacgtgaagatatgtgaaaaacgatctactacataaaaccctaaacccatgcatccagaagatcaaaactaaatttattgtttgacaatgactgaaattgtctctgctcgaggctgtagtgtaaaacagtattttacacgaccatatatacgacctgctggagccagtctagccatatgcacgat

SEQ ID NO: 113560 - DNA, 1028 bp, Zea Mays
gacacagccatcacacgcatactgcatacacaacgcagagcatcagaagcagctgcgatctgatcgacatggctgccgccaccatggctatcacctcccgcgcgctcgtcggcaagccggcggctggcacgagggacgtcttcggcgagggccgcatcaccatgcgcaagaccgccgccaagcccaagccggcggcgtccggcagcccatggtacggtgccgaccgcgtcctgtacctgggcccgctgtccggctcgcccccgagctacctgacaggcgagttccccggcgactacgggtgggacaccgcggggctgtcggcggacccggagaccttcgccaagaaccgcgagctggaggtgatccactgccgctggggccatgctcggcgcgctcgggtgcgtgttcccggagctgctcgcccgcaacggcgtcaagttcggcgaggcggtgtggttcaaggcgggctcccagatcttcagcgagggcgggctcgactacctcggcaacccgagcctggtccacgcgcagagcatcctggccatctgggcgtgccaggtggtgctcatgggcgccgtcgaggggtaccgcgtcgccggcgggccgctcggagaggtggtcgacccgctgtaccctggcggcagcttcgacccgctcgggctcgccgacgacccggaggcgttcgccgagctcaaggtgaaggagatcaagaacggccgcctcgccatgttctccatgttcggcttcttcgtgcaggctatcgtcaccggcaagggccccctcgagaacctcgccgaccacatcgccgaccccgtcaacaacaacgcctgggcttacgccaccaacttcgtccccggcaagtgagcgagggcatgatgcttgcatgcgtgtaccgtagacgtacgtattcctacgtactgcaggttgcaccagtatttgtgaagggagctttgggagccagagattgtaccgctagtgtatttgtatgcatgctgtggagctgaacaataaaatatgctgtaaatata

SEQ ID NO: 113561 - DNA, 234 bp, Zea Mays
tagtgtaccctagacgtacgtattcctacgtactgcaggttgcaccagtatttgtgaagggagctttgggagccagagattgtaccgctagtgtatttgtatgcatgatgtggagctgatcaataaaatatgttgtaaatatattatgtcttcatttatgcataatgtacatgattgttctgaggatcaggttgtgagcacgccataaaatacaaggtcaacaaataaaaaaga

SEQ ID NO: 113562 - DNA, 2637 bp, Zea Mays
cacttgtctctttaatggccactgcttccaacgcctctgtcccggcttccacgcgttcgcagtgagggctagggtttccccgcgtcccgtcgccgtcgccgtcgctctgcaaggtggagagggtgctgcactgctgctgccgtcggtggcggttggaggctggagctcgttcgtcgctgtcgcttccccggcattactggttgtcttgaagaagaagatgatggtgggctcttcccgccaccagctgctgcagaggaaggggaagtccgtggctgacaagggcgccgccgccgccgccgccactgtggcggcagagaaggtggtggtcgcggtgagggcagccacgagggagatctccaagacggccatcatctgggcgctcacgcatgtcgtgcagccaggcggaagcatcatacttcttgtcgtcatcccggcacacagctctggcagaaagttctggggctttccgctgttcgctggagactgtgcaagtggccataagtctatgttggatcagaaatgtgatttatcagagttgtgttctcaaatgttgaagaaaattgatgtgtatgacatagacaagataaatgtgaggtataagcttgtttccggctctccttctggtgttgtagctgctgagtgcaagcaagcacaggcaagctgggttgtgctagacaaggatttgaagcatgaggagaagcgttgtgtggaggagcttcagtgcaacattgttgttatgaagcgatctcagcctaaagtccttcgacttaatcttgtgggatctcctgataaagagtctaaagcaacatgtgcagttccacctgtgctagatggttctaccagtaaaattgcaactgatgttaaggaagcacggagttcaattcgaggacctgttgtaaccccaaatagcagcccagacctggagacacctttcggaagtactgaagcgggaacttcctctgtctcgagttcagaccctgggacatctccgttttctgcttctgaaacaaatggttctctgaagaaagaggtgcaacaaacaaaggataaaattcagcattcagatgctaatatttctgattcagacagtgaaacattgagccctccagcaaatttctcacttcagccatggatgtctgatattctacagggaccagcatcgtcaagatcacttggaaaagttccacgaaaaaatcgcactgcaactgcagatgttttgttggaaaagttttccaagctggatctcctgaatgaaattaatgctatgagaagcaggtcagacttaaacttccgaggagatgtcagggatgttgttttgttggcaaggaatgcacctcctggaccacctccgctttgttcaatatgtcagcacaaggcacctgtttttggaaagcctcctcgctggtttagttatgctgaactggaacttgcaactggtggtttctcacaagcaaacttcttagctgaaggtggatttgggtctgttcatcgaggtgtccttcctgatggccaggctattgctgttaagcaacacaagcttgctagttcccagggtgatgttgagttctgctcagaggtggaagttcttagttgtgcacaacatcgaaatgttgtaatgctgataggtttttgcgttgaggacagaaggcgtttattggtttacgagtacatctgcaatagatctttggattcacatctctatggtcataatcgagaaacattggagtggactgcacgacaaaagattgcagttggtgctgctcgtgggctgcggtaccttcacgaggaatgtagggttggctgcataatccatcgtgacatgagaccaaacaacatccttgtcacacatgatttcgaaccactggttggagatttcggcctggcgcgatggcaacccgatggagacatgggcgttgaaacaagagttatcggcacattcggctatctggctcctgaatatgcacagagtgggcaaataacagagaaggctgatgtatactctttcggggttgtgttagtggaacttgtcactgggcggaaggctgttgacattaaccgaccaaagggtcagcagttactaactgaatgggcacgcccattcttggaggagtatgcaattgacgagctcatagacccacgactcggagagcgctactctgaaaatgaggtgtactgcatgctgcacgcggcaaacttgtgcataagacgcgacccacattcaaggcctcgcatgtcccatgttcttcgcattcttgagggtgacatggtcgtggaatctggtggttctgttactggcagtagtgattctgggagcagaagctggaggatgctgaacgaacagcaacattgccaggagtacagtagcccggctcaacaagagtcgcaaagggcaggcgaggggaaacgctcctacagtgccttgagggcctcttgggaccgagacaagcagagtatctccaacagatattagtgccgtctcataatgcagtgcagctgagattgtttagtcctgtattattccttcgccctacctcccggtctcaattttttttggcttgctcttttgtcttcacttcgtagcaatttgtaggccgaaagcttttgctgatacattgccctggtgtatagtagaaatgg

SEQ ID NO: 113563 - DNA, 2596 bp, Zea Mays
cccagcccaacactttgaactggggaaacggccgcctccttttttaacgcaatcatctctaccgggcgtgttgctcgcctttttgcttccgctccgcctgccaagcaggcccggcgtccaactctggtggcaactgccagggcagcccggcattactggttgtcttgaagaagaagatgatggtgggctcttcccgccaccagctgctgcagaggaaggggaagtccgtggctgacaagggcgccgccgccgccgccgccactgtggcggcagagaaggtggtggtcgcggtgagggcagccacgagggagatctccaagacggccatcatctgggcgctcacgcatgtcgtgcagccaggcggaagcatcatacttcttgtcgtcatcccggcacacagctctggcagaaagttctggggctttccgctgttcgctggagactgtgcaagtggccataagtctatgttggatcagaaatgtgatttatcagagttgtgttctcaaatgttgaagaaaattgatgtgtatgacatagacaagataaatgtgaggtataagcttgtttccggctctccttctggtgttgtagctgctgagtgcaagcaagcacaggcaagctgggttgtgctagacaaggatttgaagcatgaggagaagcgttgtgtggaggagcttcagtgcaacattgttgttatgaagcgatctcagcctaaagtccttcgacttaatcttgtgggatctcctgataaagagtctaaagcaacatgtgcagttccacctgtgctagatggttctaccagtaaaattgcaactgatgttaaggaagcacggagttcaattcgaggacctgttgtaaccccaaatagcagcccagacctggagacacctttcggaagtactgaagcgggaacttcctctgtctcgagttcagaccctgggacatctccgttttctgcttctgaaacaaatggttctctgaagaaagaggtgcaacaaacaaaggataaaattcagcattcagatgctaatatttctgattcagacagtgaaacattgagccctccagcaaatttctcacttcagccatggatgtctgatattctacagggaccagcatcgtcaagatcacttggaaaagttccacgaaaaaatcgcactgcaactgcagatgttttgttggaaaagttttccaagctggatctcctgaatgaaattaatgctatgagaagcaggtcagacttaaacttccgaggagatgtcagggatgttgttttgttggcaaggaatgcacctcctggaccacctccgctttgttcaatatgtcagcacaaggcacctgtttttggaaagcctcctcgctggtttagttatgctgaactggaacttgcaactggtggtttctcacaagcaaacttcttagctgaaggtggatttgggtctgttcatcgaggtgtccttcctgatggccaggctattgctgttaagcaacacaagcttgctagttcccagggtgatgttgagttctgctcagaggtggaagttcttagttgtgcacaacatcgaaatgttgtaatgctgataggtttttgcgttgaggacagaaggcgtttattggtttacgagtacatctgcaatagatctttggattcacatctctatggtcataatcgagaaacattggagtggactgcacgacaaaagattgcagttggtgctgctcgtgggctgcggtaccttcacgaggaatgtagggttggctgcataatccatcgtgacatgagaccaaacaacatccttgtcacacatgatttcgaaccactggttggagatttcggcctggcgcgatggcaacccgatggagacatgggcgttgaaacaagagttatcggcacattcggctatctggctcctgaatatgcacagagtgggcaaataacagagaaggctgatgtatactctttcggggttgtgttagtggaacttgtcactgggcggaaggctgttgacattaaccgaccaaagggtcagcagttactaactgaatgggcacgcccattcttggaggagtatgcaattgacgagctcatagacccacgactcggagagcgctactctgaaaatgaggtgtactgcatgctgcacgcggcaaacttgtgcataagacgcgacccacattcaaggcctcgcatgtcccatgttcttcgcattcttgagggtgacatggtcgtggaatctggtggttctgttactggcagtagtgattctgggagcagaagctggaggatgctgaacgaacagcaacattgccaggagtacagtagcccggctcaacaagagtcgcaaagggcaggcgaggggaaacgctcctacagtgccttgagggcctcttgggaccgagacaagcagagtatctccaacagatattagtgccgtctcataatgcagtgcagctgagattgtttagtcctgtattattccttcgccctacctcccggtctcaattttttttggcttgctcttttgtcttcacttcgtagcaatttgtaggccgaaagcttttgctgatacattgccctggtgtatagtagaaatgg

SEQ ID NO: 113564 - DNA, 4414 bp, Zea Mays
actgttgtttgtactaggcgagcatcacttccacttgctttatacttgctttcgcttgctgcttcatggtcatgggtcttgggtctttggttgttgagttatttgcttccgcaattgggcttctggcttagagcttctggatttgtaggcattactggttgtcttgaagaagaagatgatggtgggctcttcccgccaccagctgctgcagaggaaggggaagtccgtggctgacaagggcgccgccgccgccgccgccactgtggcggcagagaaggtggtggtcgcggtgagggcagccacgagggagatctccaagacggccatcatctgggcgctcacgcatgtcgtgcagccaggcggaagcatcatacttcttgtcgtcatcccggcacacagctctggcagaaagttctggggctttccgctgttcgctggagactgtgcaagtggccataagtctatgttggatcagaaatgtgatttatcagagttgtgttctcaaatgttgaagaaaattgatgtgtatgacatagacaagataaatgtgaggtataagcttgtttccggctctccttctggtgttgtagctgctgagtgcaagcaagcacaggcaagctgggttgtgctagacaaggatttgaagcatgaggagaagcgttgtgtggaggagcttcagtgcaacattgttgttatgaagcgatctcagcctaaagtccttcgacttaatcttgtgggatctcctgataaagagtctaaagcaacatgtgcagttccacctgtgctagatggttctaccagtaaaattgcaactgatgttaaggaagcacggagttcaattcgaggacctgttgtaaccccaaatagcagcccagacctggagacacctttcggaagtactgaagcgggaacttcctctgtctcgagttcagaccctgggacatctccgttttctgcttctgaaacaaatggttctctgaagaaagaggtgcaacaaacaaaggataaaattcagcattcagatgctaatatttctgattcagacagtgaaacattgagccctccagcaaatttctcacttcagccatggatgtctgatattctacagggaccagcatcgtcaagatcacttggaaaagttccacgaaaaaatcgcactgcaactgcagatgttttgttggaaaagttttccaagctggatctcctgaatgaaattaatgctatgagaagcaggtcagacttaaacttccgaggagatgtcagggatgttgttttgttggcaaggaatgcacctcctggaccacctccgctttgttcaatatgtcagcacaaggcacctgtttttggaaagcctcctcgctggtttagttatgctgaactggaacttgcaactggtggtttctcacaagcaaacttcttagctgaaggtggatttgggtctgttcatcgaggtgtccttcctgatggccaggctattgctgttaagcaacacaagcttgctagttcccagggtgatgttgagttctgctcagaggtggaagttcttagttgtgcacaacatcgaaatgttgtaatgctgataggtttttgcgttgaggacagaaggcgtttattggtttacgagtacatctgcaatagatctttggattcacatctctatggtcataatcgagaaacattggagtggactgcacgacaaaagattgcagttggtgctgctcgtgggctgcggtaccttcacgaggaatgtagggttggctgcataatccatcgtgacatgagaccaaacaacatccttgtcacacatgatttcgaaccactggttggagatttcggcctggcgcgatggcaacccgatggagacatgggcgttgaaacaagagttatcggcacattcggctatctggctcctgaatatgcacagagtgggcaaataacagagaaggctgatgtatactctttcggggttgtgttagtggaacttgtcactgggcggaaggctgttgacattaaccgaccaaagggtcagcagttactaactgaatgggcacgcccattcttggaggagtatgcaattgacgagctcatagacccacgactcggagagcgctactctgaaaatgaggtgtactgcatgctgcacgcggcaaacttgtgcataagacgcgacccacattcaaggcctcgcatgtcccatgttcttcgcattcttgagggtgacatggtcgtggaatctggtggttctgttactggcagtagtgattctgggagcagaagctggaggatgctgaacgaacagcaacattgccaggagtacagtagcccggctcaacaagagtcgcaaagggcaggcgaggggaaacgctcctacagtgccttgagggcctcttgggaccgagacaagcagagtatctccaacagatattagtgccgtctcataatgcagtgcagctgagattgtttagtcctgtattattccttcgccctacctcccggtctcaattttttttggcttgctcttttgtcttcacttcgtagcaatttgtaggccgaaagcttttgctgatacattgccctggtgtatagtagaaatgggtaatttcctatattacaaagccggttggaaaacggcgttgattaaggtatccacgtcacctcatttgatatcagccgtatgatctagatctactggatacgagccatcttgctcccacctgccgccagccgcctccacataaatatttttttcctgaatctccacactaccagagtcttccagcggcttcctctccctcctcagattcctctcctcgcgttctccctcgctaccacgcttgcgtgaatgccctcaccgcctctccccgtgctcgcccaaatcaccgcctctccctccctgtcgcccctgcgccacggtggttcacgcctttgaagtcacctcactcatcctgccgatgcagtcacccacaccgcctcctcccctccgctcaagccgcaccgcgatagctacacgccgcgacatcagctgccagcagcgccccccctaacaacgtcgcggcgtcctcgtgggctaaccccctccatcacttcttctcgccgggagctccatccaccttctccagcacccccacccccgctcaaatggtgtcagaagggctgagagaaaattgggaggtggaagagatgcgctcaccaatcatctctgcgagagaaagcagtgcgcagccacatgggcccagcaatagcagcgtcacatggtggtggccatcgtcacgtcgagctagagatgtcaatgggtaattccccatcgggttatagcatcccagacccatccccatcatgtttgatacatccccatacccatacccatacccatcatgggtacaaaactcatcccatacccatctccattcgggtttcgggtccccaatgggtccccatccccaattaaggaataactaggtactaacatctagcacaaactatccagatttcatacatcaccacatcggcaagcactcatccacgaactattgtccattcatccattcatcagaagagaaatcagtacttgggaccaatataagaaatggagtctgccgggtttgatggccgactcggcctcaactcattcatacaaacaggacatgtgtacgcatatgaaataaccatgggtaatcgggttcggattattgcttcccaaacccatacccgtttacccaatgggtggagattttgtcccatatccatacccatggggacaatttttgtcccatacccgtaccctaataggggaattccccatgggttatcgggtatcgggtccccattgacatctctacgtcgagctctccctctccaccaactaacagttcctgacagtggagcagaaattcattaagagcatatagggattcacaagtgattttgagcccaacaatctcgctgccaccgatactcctggttcgtatatttggttactcaaaacatgagatgatcctctgaagtagaaagggaaacactgaatacgctcttgctgaaatattctatagaaagacacaattccattttggcagatgcaagtgaaagatctacagggaagaaattggggtagcatataaccgccgcaagggaaaatatggtgtagcagatgaggatataatcttatatggtcaatgtgtttgaattggtccaaccattgatattgcttcacggttgctagacttgagagtcgcggttttgcatagtcctatattttatctgcactaagagtaatatatacagccaagcagacgtttggtttaacatttacaaggtatgtttggtacttttgtttttttggaattaatggttgtccgatgcttgtcattcatatgagttctaatatcatgcccccttaaagtactcatcatcaaaa

SEQ ID NO: 113565 - DNA, 4795 bp, Zea Mays
actgttgtttgtactaggcgagcatcacttccacttgctttatacttgctttcgcttgctgcttcatggtcatgggtcttgggtctttggttgttgagttatttgcttccgcaattgggcttctggcttagagcttctggatttgtaggcattactggttgtcttgaagaagaagatgatggtgggctcttcccgccaccagctgctgcagaggaaggggaagtccgtggctgacaagggcgccgccgccgccgccgccactgtggcggcagagaaggtggtggtcgcggtgagggcagccacgagggagatctccaagacggccatcatctgggcgctcacgcatgtcgtgcagccaggcggaagcatcatacttcttgtcgtcatcccggcacacagctctggcagaaagttctggggctttccgctgttcgctggagactgtgcaagtggccataagtctatgttggatcagaaatgtgatttatcagagttgtgttctcaaatgttgaagaaaattgatgtgtatgacatagacaagataaatgtgaggtataagcttgtttccggctctccttctggtgttgtagctgctgagtgcaagcaagcacaggcaagctgggttgtgctagacaaggatttgaagcatgaggagaagcgttgtgtggaggagcttcagtgcaacattgttgttatgaagcgatctcagcctaaagtccttcgacttaatcttgtgggatctcctgataaagagtctaaagcaacatgtgcagttccacctgtgctagatggttctaccagtaaaattgcaactgatgttaaggaagcacggagttcaattcgaggacctgttgtaaccccaaatagcagcccagacctggagacacctttcggaagtactgaagcgggaacttcctctgtctcgagttcagaccctgggacatctccgttttctgcttctgaaacaaatggttctctgaagaaagaggtgcaacaaacaaaggataaaattcagcattcagatgctaatatttctgattcagacagtgaaacattgagccctccagcaaatttctcacttcagccatggatgtctgatattctacagggaccagcatcgtcaagatcacttggaaaagttccacgaaaaaatcgcactgcaactgcagatgttttgttggaaaagttttccaagctggatctcctgaatgaaattaatgctatgagaagcaggtcagacttaaacttccgaggagatgtcagggatgttgttttgttggcaaggaatgcacctcctggaccacctccgctttgttcaatatgtcagcacaaggcacctgtttttggaaagcctcctcgctggtttagttatgctgaactggaacttgcaactggtggtttctcacaagcaaacttcttagctgaaggtggatttgggtctgttcatcgaggtgtccttcctgatggccaggctattgctgttaagcaacacaagcttgctagttcccagggtgatgttgagttctgctcagaggtggaagttcttagttgtgcacaacatcgaaatgttgtaatgctgataggtttttgcgttgaggacagaaggcgtttattggtttacgagtacatctgcaatagatctttggattcacatctctatggtcataatcgagaaacattggagtggactgcacgacaaaagattgcagttggtgctgctcgtgggctgcggtaccttcacgaggaatgtagggttggctgcataatccatcgtgacatgagaccaaacaacatccttgtcacacatgatttcgaaccactggttggagatttcggcctggcgcgatggcaacccgatggagacatgggcgttgaaacaagagttatcggcacattcggctatctggctcctgaatatgcacagagtgggcaaataacagagaaggctgatgtatactctttcggggttgtgttagtggaacttgtcactgggcggaaggctgttgacattaaccgaccaaagggtcagcagttactaactgaatgggcacgcccattcttggaggagtatgcaattgacgagctcatagacccacgactcggagagcgctactctgaaaatgaggtgtactgcatgctgcacgcggcaaacttgtgcataagacgcgacccacattcaaggcctcgcatgtcccatgttcttcgcattcttgagggtgacatggtcgtggaatctggtggttctgttactggcagtagtgattctgggagcagaagctggaggatgctgaacgaacagcaacattgccaggagtacagtagcccggctcaacaagagtcgcaaagggcaggcgaggggaaacgctcctacagtgccttgagggcctcttgggaccgagacaagcagagtatctccaacagatattagtgccgtctcataatgcagtgcagctgagattgtttagtcctgtattattccttcgccctacctcccggtctcaattttttttggcttgctcttttgtcttcacttcgtagcaatttgtaggccgaaagcttttgctgatacattgccctggtgtatagtagaaatgggtaatttcctatattacaaagccggttggaaaacggcgttgattaaggtatccacgtcacctcatttgatatcagccgtatgatctagatctactggatacgagccatcttgctcccacctgccgccagccgcctccacataaatatttttttcctgaatctccacactaccagagtcttccagcggcttcctctccctcctcagattcctctcctcgcgttctccctcgctaccacgcttgcgtgaatgccctcaccgcctctccccgtgctcgcccaaatcaccgcctctccctccctgtcgcccctgcgccacggtggttcacgcctttgaagtcacctcactcatcctgccgatgcagtcacccacaccgcctcctcccctccgctcaagccgcaccgcgatagctacacgccgcgacatcagctgccagcagcgccccccctaacaacgtcgcggcgtcctcgtgggctaaccccctccatcacttcttctcgccgggagctccatccaccttctccagcacccccacccccgctcaaatggtgtcagaaggtacgggaaccaatgggtttgaaggctgttcttatggaatataatgagctagccattaaaccacggaagggctgagagaaaattgggaggtggaagagatgcgctcaccaatcatctctgcgagagaaagcagtgcgcagccacatgggcccagcaatagcagcgtcacatggtggtggccatcgtcacgtcgagctagagatgtcaatgggtaattccccatcgggttatagcatcccagacccatccccatcatgtttgatacatccccatacccatacccatacccatcatggatttcatacatcaccacatcggcaagcactcatccacgaactattgtccattcatccattcatcagaagagaaatcagtacttgggaccaatataagaaatggagtctgccgggtttgatggccgactcggcctcaactcattcatacaaacaggacatgtgtacgcatatgaaataaccatgggtaatcgggttcggattattgcttcccaaacccatacccgtttacccaatgggtggagattttgtcccatatccatacccatggggacaatttttgtcccatacccgtaccctaataggggaattccccatgggttatcgggtatcgggtccccattgacatctctacgtcgagctctccctctccaccaactaacagttcctgacagtggagcagaaattcattaagagcatatagggattcacaagtgattttgagcccaacaatctcgctgccaccgatactcctggttcgtatatttggttactcaaaacatgagatgatcctctgaagtagaaagggaaacactgaatacgctcttgctgaaatattctatagaaagacacaattccattttggcagatgcaagtgaaagatctacagggaaggtatcttttgttcttatattttggttgcttaacaaataccttacgtagaaactataatcttctctctaatcatatcttagtggaaagtttattcttccattgaacatcccactgagtgtaatacatatgcagaaattggggtagcatataaccgccgcaagggaaaatatggtgtagcagatgaggatataatcttatatggtcaatgtgtttgaattggtccaaccattgatattgcttcacggttgctagacttgagagtcgcggttttgcatagtcctatattttatctgcactaagagtaatatatacagccaagcagacgtttggtttaacatttacaaggtatgtttggtacttttgtttttttggaattaatggttgtccgatgcttgtcattcatatgagttctaatatcatgcccccttaaagtactcatcatcaaaagtttccatgtgaatgttttaaatgtatatttaaagggttggaagacatcagactgttattcaaacaggatcttaagtgtcgtgaaagactacaagtgaggttcaacttggcaaattatttttccagtaactaaggagcaacaattttatgtattttagcttgacatatgaatctaggtacttacatttttggaatcgggcaaacagtgatagtttgaatcacatgttttgccaaaaggaattattagaactgttcaaagttggaaaaaatacatatttatgttttctta

SEQ ID NO: 113566 - DNA, 2669 bp, Zea Mays
actgttgtttgtactaggcgagcatcacttccacttgctttatacttgctttcgcttgctgcttcatggtcatgggtcttgggtctttggttgttgagttatttgcttccgcaattgggcttctggcttagagcttctggatttgtaggcattactggttgtcttgaagaagaagatgatggtgggctcttcccgccaccagctgctgcagaggaaggggaagtccgtggctgacaagggcgccgccgccgccgccgccactgtggcggcagagaaggtggtggtcgcggtgagggcagccacgagggagatctccaagacggccatcatctgggcgctcacgcatgtcgtgcagccaggcggaagcatcatacttcttgtcgtcatcccggcacacagctctggcagaaagttctggggctttccgctgttcgctggagactgtgcaagtggccataagtctatgttggatcagaaatgtgatttatcagagttgtgttctcaaatgttgaagaaaattgatgtgtatgacatagacaagataaatgtgaggtataagcttgtttccggctctccttctggtgttgtagctgctgagtgcaagcaagcacaggcaagctgggttgtgctagacaaggatttgaagcatgaggagaagcgttgtgtggaggagcttcagtgcaacattgttgttatgaagcgatctcagcctaaagtccttcgacttaatcttgtgggatctcctgataaagagtctaaagcaacatgtgcagttccacctgtgctagatggttctaccagtaaaattgcaactgatgttaaggaagcacggagttcaattcgaggacctgttgtaaccccaaatagcagcccagacctggagacacctttcggaagtactgaagcgggaacttcctctgtctcgagttcagaccctgggacatctccgttttctgcttctgaaacaaatggttctctgaagaaagaggtgcaacaaacaaaggataaaattcagcattcagatgctaatatttctgattcagacagtgaaacattgagccctccagcaaatttctcacttcagccatggatgtctgatattctacagggaccagcatcgtcaagatcacttggaaaagttccacgaaaaaatcgcactgcaactgcagatgttttgttggaaaagttttccaagctggatctcctgaatgaaattaatgctatgagaagcaggtcagacttaaacttccgaggagatgtcagggatgttgttttgttggcaaggaatgcacctcctggaccacctccgctttgttcaatatgtcagcacaaggcacctgtttttggaaagcctcctcgctggtttagttatgctgaactggaacttgcaactggtggtttctcacaagcaaacttcttagctgaaggtggatttgggtctgttcatcgaggtgtccttcctgatggccaggctattgctgttaagcaacacaagcttgctagttcccagggtgatgttgagttctgctcagaggtggaagttcttagttgtgcacaacatcgaaatgttgtaatgctgataggtttttgcgttgaggacagaaggcgtttattggtttacgagtacatctgcaatagatctttggattcacatctctatggtcataatcgagaaacattggagtggactgcacgacaaaagattgcagttggtgctgctcgtgggctgcggtaccttcacgaggaatgtagggttggctgcataatccatcgtgacatgagaccaaacaacatccttgtcacacatgatttcgaaccactggttggagatttcggcctggcgcgatggcaacccgatggagacatgggcgttgaaacaagagttatcggcacattcggctatctggctcctgaatatgcacagagtgggcaaataacagagaaggctgatgtatactctttcggggttgtgttagtggaacttgtcactgggcggaaggctgttgacattaaccgaccaaagggtcagcagttactaactgaatgggcacgcccattcttggaggagtatgcaattgacgagctcatagacccacgactcggagagcgctactctgaaaatgaggtgtactgcatgctgcacgcggcaaacttgtgcataagacgcgacccacattcaaggcctcgcatgtcccatgttcttcgcattcttgagggtgacatggtcgtggaatctggtggttctgttactggcagtagtgattctgggagcagaagctggaggatgctgaacgaacagcaacattgccaggagtacagtagcccggctcaacaagagtcgcaaagggcaggcgaggggaaacgctcctacagtgccttgagggcctcttgggaccgagacaagcagagtatctccaacagatattagtgccgtctcataatgcagtgcagctgagattgtttagtcctgtattattccttcgccctacctcccggtctcaattttttttggcttgctcttttgtcttcacttcgtagcaatttgtaggccgaaagcttttgctgatacattgccctggtgtatagtagaaatgggtaataggtttacaagtatattgagctgcaagttagaccctctccaacaaggactcgtaaacgcactacaccaa

SEQ ID NO: 113567 - DNA, 2753 bp, Zea Mays
cgtcaaaccctttccttagacgatcttacgatgtcttatgtttccgtttacgaaacagtaatccacgtgtcggtccatgggccttcgcgttgatttcgcccagcagattacgtgtatcgggcccacgaatccagcaaccaagcacgcagtttttccagctctcctcacccgtaacgctcgcggcggccgaaccctagctttatcgccgccatctgcttcttctccactgcggttgccgaaccctagagattctccccccgtcgcccgaacgtcgtcgcattcaccttctccaccgcatagagggagacgatgtcgccttgttcttcttcaccgagggtcccgaaatcggccggccttcaggcacctccacacacgggaacatcatacatgaagaacgtagaccgacctccatctaatccaaagcggattataattcagtctactcaagagtgctttagtgtcgacataccccgtgttccggcgaaaactgttagacacaaaccaatgcaggctggtgatgaggacgataactttatgccattatcgaagaagcggaaggagctcaaaattacaaaggagacggtgcaacttattttggggttaccaaatgctggtggagaaacggcattaggcattgatgaagctgttgctgcaaacaatttaagggctaaacttggtttatcaaaagaagattttagtgttgcagctcttcaagatcgtttaaggaaagggtttgacgatgatctaagcagcagatccttcttcctgatactgtgcaataggttgttgttccctactgccagctggggaataactaaccatgaggttcttttaactgaggaaatgtatcgtttccacgagatagactggtaccagctaatattcaatgatttatgccaaactgccaagaagtgacatactaggagcgttacaaatgtttctacaacaatttacggatgttccatcatcattcttgtaagcatgtcactttttgtcttttatatgtagccatatttttttatgcaaaattcatatacatttagattatattttgttatgtctcacaatgattcatgttatgcttttgcagctgtattatttggatcatcttcatgattcagctacacctcagaataaacgtggaacaccacgcatcaaatattttgataggaatattattcaagcattgacaagagctgacaagggcaagatacgccaaggacaagaaccatttgtacattgttcggtatttttttatgcgtttatcatattttttttatcaatttaatttgtcttatatatggtatatggatagaagcagtgtcgtttatatttacaaatgaaactccactttatatgatgtgcagtgtcatttaaattttatgttgtcaacaatctcgtgttatgcttgttttctctcaagtttatgatataattatcaccgctgtacagtcataaacttcactgtgtgaccagtttatgcagtaaacaacgtcgtgttatgcattgttgcccatacttttataatacaattatcactgttttatgcttgttttgtctcaagtttatgatacaattatcaccgttttatactggaaacatctctttgtacagtcatgcttcacaggctgaccagtttatacaataaacaacgccatgttatgcatagttgcacatatatgtatgctacattcgacaatgttctatgctttataagtttcacaatctgaacaattcaacgctatgttttgaacatgtgttatgtatccttggatttccagctaccctttcagcattctttccttccattgaacaattcaaccatttacaattcttacgctccctatatttcttcaacgaaaatccaacctcgtatgcatattgactataaaaattatacgcctcgtccacgttactaaatgtcataccgactttaggtatcaatcttatatcaatattgtccggctgcgcacaaaaatttaacgtttacgattcaatagcgattaaatctaacgtaatataggtacaacattaaaaaaagtatgtaagaaaataatagtatcataattgggagaacttacatggctttgaagaatatgaggtgtatcctgttcatgcgccccaatatgtctcatgggaatgtgcttatctgcgccgaccacgtctaccgattttgtgtgctcatcaatatgtcaaggtgccctcaatgtcgcggggggagtaacagatacaccctctgtgtaactggtgatcgcagacgctacaggatgcatgtccattgaaatagacgtacatgttgatctatgcacagacgctacaggttgcatgtcatcgccagcgccgatgctggacattttctcgccgttaatcgccacccggtgctctcccttccgccgccgttaaccgccgccaatatcaaagatacgaacgtggacgagcggctgtaaattagaatttgtttcctcccgtaactgtgcctttatttacgcgaacgtggagcacgtctttccttatctcaaagcggtggagatttaaatgttgcatggtttatactatcatgttacacagcgttatgcagtcgtaaacggtgtgcacatggtaatatttgttcccgtgattcgtggcacaaaagattccttctatacatgatttatgcacattactacatatttttatgcgtgcgtaaaacgcctgtcacgtatcatccgggattcatggctatcatatgcatgactgacgcagcttgcgtacag

SEQ ID NO: 113568 - DNA, 606 bp, Zea Mays
atgtcgccttgttcttcttcaccgagggtcccgaaatcggccggccttcaggcacctccacacacgggaacatcatacatgaagaacgtagaccgacctccatctaatccaaagcggattataattcagtctactcaagagtgctttagtgtcgacataccccgtgttccggcgaaaactgttagacacaaaccaatgcaggctggtgatgaggacgataactttatgccattatcgaagaagcggaaggagctcaaaattacaaaggagacggtgcaacttattttggggttaccaaatgctggtggagaaacggcattaggcattgatgaagctgttgctgcaaacaatttaagggctaaacttggtttatcaaaagaagattttagtgttgcagctcttcaagatcgtttaaggaaagggtttgacgatgatctaagcagcagatccttcttcctgatactgtgcaataggttgttgttccctactgccagctggggaataactaaccatgaggttcttttaactgaggaaatgtatcgtttccacgagatagactggtaccagctaatattcaatgatttatgccaaactgccaagaagtga

SEQ ID NO: 113569 - DNA, 813 bp, Zea Mays
gtttatattttacaccatattccacaacatacaaatatatcaacagttatatatcacaacatattttcgcataaaacatctcacacacaatcacgtaacaatatttaaatccatagtctcatcaattacatcacaaaagtctcatccatagtctcatcaattacatcacaaaagtctcatccatagtcataataagacacatctcatcatccagtactaataagagacaatatctcatacatagtcataataaaagtctcaagtattagaacacaataacatggaagctcacggtcgtcgatcaccatcgggttacagtgacgagtgatggtcgatacctccactagcgaagagggtttcgacaaagtctaacctgtcttctcgttcatgcgtcggcaaggtagctggaggggtctaatatacatgtacaaatgatatttgttgagttacatcataatataactaacaacaagtaaatgatgatgaatttgcatacctgatgttcggtagatggagatgtaggtataggtggaggtgaagaccaaggataatgaacaggaggtggtgggggcaccgggacgtgtatcccttgggcctgtgctagttgttataaatttgtcgaactcattcacatcaacgttttaaatcaatacatatcttaaagtgaaagctattatcttttgaacttacttgtatgagtgtttgctgctgttgaatctatgtagcataatattcatgttgcgcggcttgttgcttcaagtaatcctgatgtcacctaagttcttctcgcagttgctccacttctgctggatc

SEQ ID NO: 113570 - DNA, 2331 bp, Zea Mays
atggcttctgtaaatctacaccgtccgcccctgcttacgcccacgttcgtcctcgtctccacgcccatgttcgtcccccgcctccccctattccacccccctgttcgcacctgccgcccctgctccccctgttcgcacccgccgcccctgctccccctgtcccgcgccgcggtgacaggatccgagaacacccctgcggacgcgtccaggattcaaggcctccccctcccttcccctgccctcactcgtacgccgtcgccccctccaccgccgtcgtgcgagagggaggagggacctctggatctccgtggggcgtggaggagtgggacgacgcacgcggaggcagccccggtcggttgctgctgtatccgtccaggatcgggggaattccaggaggcagtgatgtccaacagagacgaggtgtctgtttttgtcaagtgcttgcggcttggcgccgccgagtacctggtgaagccgctgcgcacgaatgagctgctgaacctttggacccatgtgtggcagcggagacggatgcttggtttgcccaagaaaaacttcttcaatgacaacttcgagttggtgctctcagaacctagcgatgccaataccaatagcaccaccctcctctcagatgagaccgacgataggcctaaaggaaacacgaatcaagaaacaggcacctcaaagcaacttgaatacgagtctaatcctttagttgctgagcccgaccagagagaaaagatggagggtgttccaggctctgccctagatgccagtcaaaaatcctctccgagaagagtgttttcacgccctataaaaactaacctgagggttgccgagtcgtctgcatttctagcatatgtcaagtcaagcaccccagccaccagctcatttgacagcgaattacaaaggggtggcagccgattagattccttggataaccagggtaattgctctagcgcaaccgatagaagtgacaccggtactgatgtaaatattcggaacaaagaagcttttgagatgcctgcgcagtaccctatggtatggttttcttcctctaacatgcatatggagcgaagcagcgaaggccataatgatacttcaggaactccacctgcataccatttcccattttattatccagggatggtagagcacaacatggcactttcgtcggcgcaagattttcaagcaaacataaacaatgctcaagcacatacaccgcaagaaggcacatttaagatttgccattatgcaggggagctcttctatatgcaacatgatagtggtcctgattggctgattttcattccaggctcaactgttcaagctgatgcagtagttggagaatatgggtttcttctcttgcgttcgattgcatctcaagacccacttagtgtttcaattgctgttttgcaacagttgaacatcccccctgaaatgtatcaagttggctacacaaaattgtttttccgtacaggacaggttgctgcactggaaaatgctaaaatacagatgcttcatggaaccctccgtattcagaaacacttccgggttatacgtggtgaaagagcaagaatacactttgataatcttgtcaagagatggagggcagctgttctaatacagaagtacactaggcgtcgacttgcagctaacatgtttaatgatcaactgaatcatatcattcttcttcagtctgtgatgcgtgggtgcctgactagaaggaaatacaagtgcctgcagaatgaaaaggagtcaaaggccagtcacaacatagttccaggggaaacaaggaagaataatgctgagtcaagaataagccattgtgtagattttagaaatttaccaattcacattcgtacaccattgattcatttgaagtgtcaggatgtgaaatatgggaagcgtgtgcacattcttccaattgatggtacagttcaaggcattacagggaacctatttgatgccttcttgaaacatactgaaatattttgtgatggggagcctattaagagagaggatgaggagcgtcttgatgaagttggttattatgatgttggtggagttagaaagcaaatggcccaaatcagagagcttgttgagcttccactacgtcatcctcagcttttcaaatctattggtgtgaagccaccaaagggcatattgctatatgggccacctggttctggaaagactcttattgctcgtgctgttgcaaacgagactggagcctttttctttctaatcaatggcttagctgttccattgaattggcgcccgctcagtacaaaattcgtcagtactatgatcggcggtggcatccaatag

SEQ ID NO: 113571 - DNA, 1586 bp, Zea Mays
atcaagttaccactaaagtccaaactacacgacctagaagtgggcagcaagtaatatcacttttgtgtggtttgccacccaataaacatatccacatcgacagccaagcattcatgacacagagaaccatatttatatagtgggctctccgtaagtttctttgagccgggtagctacacagtacgcacacctatcccggctgcagcgcggttccagccactggtgccacgtggtttgtgctcttgtgggcacactggcctccacccatctctctcacgtctccccatccgcagcaaaggcacacagtacagattcggcccatcgttttatagccacaccatggctaggaagtgctcacactgtggcaactgcggccacaactccaggacctgcgggagagaaaccatgctctgcgaagctggcgacaacggcggccatggcggcctaaggctcttcggagtgcaggtccgtatcggcggcggcggcgcaggctcggcgtccatgaagaagagctacagcatggactgcctgcagctcgcggctcctggttgttccctcgtctcgccgtcgacgtcctcctcgtcgtcgtcgctgctgctgatgtcgattgaggagggatcggagaggggggcgccaaatgggtacctttctgacggacctcatggcagagctgtgcaggagaggaaaaaaggagttccatggagcgaggaggagcacaggcagttcctttccggcctggagaagctgggcaagggcgactggcgaggcatctccaggagctacgtgccgacgaggaccccgacgcaggtcgccagccatgcacagaagttcttcctcaggcagagcagcttggggaagaagaagcgccgctccagcctctttgacatggtgccgatttgcgagaacagtgcgagcatctccgatccgctgagcagcgaaggggcctcaacctctctgtcgctgaacgtgccacgccacggcgtcacctccgtctccgagagggcggccttggacctgaattcgacggaggaagacgacagcagggcggacgcgtcgtcggcatcggcatcaggtgcagggaccagaccaccgttcccggcagcgcagacggagccgctgcagccttcgtcgcttggccgtgggcgcggtcaccactgctctccgttggacctggagctggccatgtcgctgcctgccccatccatcggaacatgacgcgccgccgccgccgccgtacttatcgccatggaatcccacgcaggtcgcgccagaattcttcagcgcaggttgccaaggccgaggccgtgcgtgcctgctgtctcgcacaaacgtcccacgtgtaatcagaaccgggtctgctcctgtatgagtatgacatgactatgccatgttccccgcgcaggattgaaaccgtaaggttacgctagttgctagctttttattttgaacccttgtgaatgatattgttacgaaaaatagctcctaacataggttcactgtgatatatgttatatacactgtgatatatgttatgtagaccatatgttcgctttgatattaaatttattttttatggctattaaata

SEQ ID NO: 113572 - DNA, 1782 bp, Zea Mays
ttcaattcgggcgagagaagtgtctgaaagttgacatttcaatttggccgcccagtccagtcgtcgccatggcgacctacgacaaggcgatcgagtcctacaagaaggcggtgaccacggcggcgtcgctggcggcgtcggcgatgctggtgcgcggcgtggtgaacgagctggtcccctacgaggtgcgggacctgctcttctccggcctgggctacctgcggtcgcgcatgtcgtcgcggcacacggtggtgatcgaggagacggaggggtggaccagcaaccagctgtacgacgcggcgcgcacgtacctggccacccggatcaacaccgacatgcagcgcctccgcgtcagccgcgtcgacgagggcaagagcctcatgttcagcatggaggagggcgaggagatggccgacgtgcacgccggcgccgagttcaggtggcgcctcgtctgccgcgacggagccggcaacggcgtgggcaacggcggcggcaacggccacggccacggccacgcccgcggcggcagctaccgcgtcgaggtccgctccttcgagatgagcttccacaggcggcacaaggagaaggccatcgcgtcctacctcccgcacatcctcgccgaggccaagaagatcaaggaccaggaccggacgctcaagatctacatgaacgagggcgagtcctggttcgccatcgacctccaccacccgtccaccttcaccacgctcgccatggaccgcaagatgaagcgggccgtcatggacgacctcgagaggttcgtcaggaggaaggagtactacaggcggatcggcaaggcctggaaacggggctacctgctctacggcccgcccgggaccggcaagtccagcctcattgccgccatggccaactacctcaagttcgacgtctacgatctcgagctcaccgaggtcaactggaactccacgctccggaggttgctcatcgggatgaccaaccgctccatcctcgtcatcgaggacatcgactgctcgctcgatctgcaacaacgtgcagacgaagctcaggatgctggtaccaaatccaatccttcagaggacaaggtgacactctctgggctgctcaacttcgtggacggcctctggtcaacaagcggagaggagaggatcatcatcttcacgaccaactacaaggagcggctcgacccggcgctgcttcggcccggcaggatggacatgcacatccacatggggtactgctgcccagagtcgttcaggatcctggcctccaactaccactccatcaccgaccacgacacgtaccctgagatagaagccctgatcacggaggtgatggtgaccccagcagaggtcgctgaagtgctcatgaggaatgaagacaccgacgtcgcgcttgagggcctcatccagttcctcaatgggaagaaagaccacgccaaggatgatagtcgtcaaggttaaaatgtggaccatgtgagaccaaaggggacgagaaagagatgacgacgaaaaaagaaaaaaaaaacatgtcccggtcgtcgatcaaaatctcaatgatgccagagtagcgtggatatcaaatatcagcaccatatcagtagcgccagtataacctgccgacaatgtatggttttcatattttaataagatatcatttttttttggaacagcagtgtaatctggtgctatgatcattcgatgtcttcttaaaaccaaactaaccaattgtatcatataaataggtattaagatatttattcaaatataattattgtttatttct

SEQ ID NO: 113573 - DNA, 321 bp, Zea Mays
atgagtatgtgcaacaactttaaaaagtgccatttttatgctatacaaataaccaatgttgtcaaaaacctacagagtacagggcgttttgcataccaacaccgcttctcacagcagatcaatcttcagaactggtgtccaccgcattttctccttgtagctcgttttcttctcgtagatcatactcaacaactagcccaagattatcaacaaacttatggtacacctggcaccctgcacactgaagaaaaactgtgcctctttcataggctactctgtttatcaagcgcttggtcctttcgccacatgcgttgcatgtaa

SEQ ID NO: 113574 - DNA, 2200 bp, Zea Mays
ccagttgttcaacacgcgcgcgctccgtctctgttttctttttccgaataacctgcgcgctccctccgacttccagcggtgcgcagtggcctttctttgtggcttccagcggctgtgactgggcgagcgccgacgctgctctactacagctgcccaggtcttcgtcgggcactttgccagcgacgtgcaccaaccagggtagaattttctgcaaaaccacaaaatggctcaggccgcaaggctgaatctgagaatgcagaaagagattaagcttctattggatgatccaccccatggggtttctcttaatctttctgaagacaaaaatgtcttgtcatcgttatcaagtatcgaagccaaaattgaaggacccgagggaacagtttatgccaagggagttttcattttgaagatacaaattcctgaaaggtacccttttcaaccaccgaatgtgacttttgttactcccatttatcatcccaatattgacaatggaggacgcatttgccttgatattctcaatttgcccccaaagggagcctggcaaccatcactcaacattgctactgtgttgacaagcattggcttgctgctaagtgagccaaacccggatgatgggttgatggctgaaataagccgagaatacaaatacaatagacaagtatttgacacaactgctcagttatggacagataagtatgctagttctgctgctgttggtgctagcggttggtgttctgtagatgctgatgtcctggcacagaatacacagatggaggacacaaataacctgggatcactgccaaatgtttctaaaaaagtttgtgaagggaatcaaaggaagatgcggttactgggacaaaagttatcactaaagtatgaaagatctgaagagagtatgaaaactgtcaagcaagacccagttgctagctacctaccatccatggcaggatccacttatcctactgcttgtttttcagatgtttcaggcagaaagaatgatacttcagagaacatgtctatcagtactgatagtggagtggtttcaaagcaagatcaccaaggccataaaaaggaattgcagttacctggccagagtctttttgttacctcagaagccccttgcaaaagcagcgatgccagtgatatgctatctaatcatcttccaatagatgcatctgatgctaaagatcatgtcatgcaatcttctgatggcattttagagaataattcggcaaggagaattggcggatcatcagctagcgcatataaagcaccggaaggaaaccgaaggaatatcagggcactgaagttgtcactgaaatcagtaaagcctgaaaagaaaaacaacgatcaaaatgaaaatatggctccaaaccatctgccttcacagtcaagctttagctatttgcagaaaaggcccttagatgctgtttcaaggaaaaaattcgacggaggtcctgcactggttcaacagaatcctaacactgagcagaaaccatcgaacactaacatggtatcaaatgaagagcgcaaccaaggtctaaagatgctgtgttcacaacgcaggaggctgtcactgaaatcggagccgcggctgcctagagtagaaaatgcctgtgaaaaggagactaagcgacccaataattttcctctaagcgatgagaaactcaatgaactgccatcatctgaaccaatccccaaaggtgaacccgtggcacccagtgaactcccattttcggcgccagcagtcctcaaaagtcaaaccagggcccttggctctgctggtggacagaaagactccagctcaggcaattcctgtgtcaatgaaaacacgcttgccatcgagaatgctgttgtttcagacagtgaagatagcgcagacgagcgtgaaaggcccccaagatcaaggctatcattgatgcggagacgactgggtggaaagctgaggacttagtgtcaccgcagaactatttctatgctgcgttgtaaattcttggaaggcgagtattccaatttgctcaaacaaattgtgcctgcgtttgtggtagatcaggccctataggttagtatatgtgttagagaactctgtcgtcctacaacgtcgtggagggtgctctgttggtggtactccttttgttggtaacgaaatttgaagaactagatttttcttatgcaattcagttttagcagctgcgta

SEQ ID NO: 113575 - DNA, 2042 bp, Zea Mays
ttttcacagcaactttatgttgttcggtttgtatgctgattcctactctttaaattagaaattgaaggacccgagggaacagtttatgccaagggagttttcattttgaagatacaaattcctgaaaggtacccttttcaaccaccgaatgtgacttttgttactcccatttatcatcccaatattgacaatggaggacgcatttgccttgatattctcaatttgcccccaaagtttttgttgttgatgatgatattgttgcacagggagcctggcaaccatcactcaacattgctactgtgttgacaagcattggcttgctgctaagtgagccaaacccggatgatgggttgatggctgaaataagccgagaatacaaatacaatagacaagtatttgacacaactgctcagttatggacagataagtatgctagttctgctgctgttggtgctagcggttggtgttctgtagatgctgatgtcctggcacagaatacacagatggaggacacaaataacctgggatcactgccaaatgtttctaaaaaagtttgtgaagggaatcaaaggaagatgcggttactgggacaaaagttatcactaaagtatgaaagatctgaagagagtatgaaaactgtcaagcaagacccagttgctagctacctaccatccatggcaggatccacttatcctactgcttgtttttcagatgtttcaggcagaaagaatgatacttcagagaacatgtctatcagtactgatagtggagtggtttcaaagcaagatcaccaaggccataaaaaggaattgcagttacctggccagagtctttttgttacctcagaagccccttgcaaaagcagcgatgccagtgatatgctatctaatcatcttccaatagatgcatctgatgctaaagatcatgtcatgcaatcttctgatggcattttagagaataattcggcaaggagaattggcggatcatcagctagcgcatataaagcaccggaaggaaaccgaaggaatatcagggcactgaagttgtcactgaaatcagtaaagcctgaaaagaaaaacaacgatcaaaatgaaaatatggctccaaaccatctgccttcacagtcaagctttagctatttgcagaaaaggcccttagatgctgtttcaaggaaaaaattcgacggaggtcctgcactggttcaacagaatcctaacactgagcagaaaccatcgaacactaacatggtatcaaatgaagagcgcaaccaaggtctaaagatgctgtgttcacaacgcaggaggctgtcactgaaatcggagccgcggctgcctagagtagaaaatgcctgtgaaaaggagactaagcgacccaataattttcctctaagcgatgagaaactcaatgaactgccatcatctgaaccaatccccaaaggtgaacccgtggcacccagtgaactcccattttcggcgccagcagtcctcaaaagtcaaaccagggcccttggctctgctggtggacagaaagactccagctcaggcaattcctgtgtcaatgaaaacacgcttgccatcgagaatgctgttgtttcagacagtgaagatagcgcagacgagcgtgaaaggcccccaagatcaaggctatcattgatgcggagacgactgggtggaaagctgaggacttagtgtcaccgcagaactatttctatgctgcgttgtaaattcttggaaggcgagtattccaatttgctcaaacaaattgtgcctgcgtttgtggtagatcaggccctataggttagtatatgtgttagagaactctgtcgtcctacaacgtcgtggagggtgctctgttggtggtactccttttgttggtaacgaaatttgaagaactagatttttcttatgcaattcagttttagcagctgcgtattgagcaagtattggtggttctacttttttttaaccagatgtttccggagggcatgtacagtgtaggaatgctaagagaacagtggaagtcttgtacatgatggcaagatc

SEQ ID NO: 113576 - DNA, 1194 bp, Zea Mays
agggactcgcggttcgtggcggccctggccagagtctgcgcccgctcctgcccccgccccgggccaggccaccctcgcctcctcgcgcctataaagtgcgggcgtacggcgtacccgattgccccaagccgcaaccgcaaccaccttcccaaatctcagtagtcgcctctcgtcgtcttcgtctagcccggcccgttccaaaacctccgtagccgccgccgccaccccggcgaccgaagatgatctccccggacgcagcccgcaacgtagtcggcatcatcggcaatgtcatctccttcggcctcttcctgtccccagtgctgacgttctggcggatctacaaggccaaggacgtggaggagttcaagccggacccttacctggcgacgctgctcaactgcatgctctgggtgttctatggcatccccgtcgtccaccccaacagcattctcgtcgtcaccatcaacggcatcggcctcgtcatcgaggccgtctacctcactatcttcttcctctattccgacagccagaagcgcaagaaggcgttcgcgatcctggccgtggagattctgttcatggtcgccgtggtgctcggtgtgatcctcggcgcgcacactcacgagaaacgttccatgatcgtcggcatcctctgcgtcatcttcggctcgatgatgtacgcctcaccactcactatcatgagtcgagtgatcaagaccaagagcgttgagtacatgcccttcctcctgtcgctggtgagcttcctcaacggctgctgctggacggcctacgcgctcatccgcttcgacctctacgtcacgatcccgaacgccctgggcgcattcttcggcctcgtccagctgatcctctacttctgctactacaagtcgacccccaagaaggagaagaacgtggagctgcccaccgtctccagcaacgtcggcggcggcaacgtcaccgtcagcgttgagcgatagatgatgtagctgccgccgcccgtcgagaacgaactcgacgagacgtgctttacccacaagtagttttggccttgtctaattgctcttctcggatgatcgtttaagtgagtgttagttagttttgccctgcgtgtgatgtcaggaacaattaatatatccatgtggctgtgtttgccattctagataattaagaacaatcgtatctgattgctaccactta

SEQ ID NO: 113577 - DNA, 1016 bp, Zea Mays
agatcgggctgtcgggttttggtttcgttcgatcgatttcgctgggtgtctctctcggggtgctcaactgctcacgcgtggttaatttctcgctttggtttcaggcaatgtcatctccttcggcctcttcctgtccccagtgctgacgttctggcggatctacaaggccaaggacgtggaggagttcaagccggacccttacctggcgacgctgctcaactgcatgctctgggtgttctatggcatccccgtcgtccaccccaacagcattctcgtcgtcaccatcaacggcatcggcctcgtcatcgaggccgtctacctcactatcttcttcctctattccgacagccagaagcgcaagaaggcgttcgcgatcctggccgtggagattctgttcatggtcgccgtggtgctcggtgtgatcctcggcgcgcacactcacgagaaacgttccatgatcgtcggcatcctctgcgtcatcttcggctcgatgatgtacgcctcaccactcactatcatgagtcgagtgatcaagaccaagagcgttgagtacatgcccttcctcctgtcgctggtgagcttcctcaacggctgctgctggacggcctacgcgctcatccgcttcgacctctacgtcacgatcccgaacgccctgggcgcattcttcggcctcgtccagctgatcctctacttctgctactacaagtcgacccccaagaaggagaagaacgtggagctgcccaccgtctccagcaacgtcggcggcggcaacgtcaccgtcagcgttgagcgatagatgatgtagctgccgccgcccgtcgagaacgaactcgacgagacgtgctttacccacaagtagttttggccttgtctaattgctcttctcggatgatcgtttaagtgagtgttagttagttttgccctgcgtgtgatgtcaggaacaattaatatatccatgtggctgtgtttgccattctagataattaagaacaatcgtatctgattgctaccactta

SEQ ID NO: 113578 - DNA, 1949 bp, Zea Mays
aatttaattttagctaggcgtgtgatgcacgtgggaatgggatttgcggggagggggagaatgagaaagacagtgcggggagggggtaatgggaatggcagaacaacacagaatggcagccgggaagacagtgtgggaatgggaatggcagaacacggaatggcagcctaccccttaccgccttaataagtagtagagatatataccacaacatgtatttgatgtttatggaaatcttttttctttctatgaaacttatagacggtaccagcggcggctctaaccctgccgtatgacaatggagcaatgcagtaagcgccgaggagggcgagactcagaggggaaaacctgacagccgtcgaggaggagcaatggaggggcgagactgggagcaattgagccgctcgcgaggagcaatggagccgatccgttttgtggaacggatctaagaaaaccagtcgtaacaacgctcagtatacgaagaaagcgcgtttgagtaaaaaaaccaagacggaaggtgttgtaatactacaatcttaattgtcacgttcggaatactaattttcggaagcccagtaaaggcttgttcggttctaccccaatccatatggattgagggagtttcaatccctagtaaggtgtcgttcgtttctttcggaatggaggcatggaataattcgtagccggtttgtttctctaatttatataagttttgatcagctggaatgatttctagtccattcctggacaaatgagcaagacataggtcaaaatctctttcaatccgtattaatccccttcaattcatatagattgaaaataaccgaacaagctacaactacaatagaagttgcttggttcaaaaaaaaaactcgtctctctcggggtgctcacctgctcacacgtggttaatttctcgctttggttgcaggcaatgtcgtatccttcggcctcttcctctccccagtgtaggcgctcatcgatcggtccgggttcatctggctctgggtggttttttgatttggttagggttttgtttgtactgatatatggagaggaactgagaccaactgcggtctgcggcactgcgctcgccgccagcctccctagggtttccttccccgtcgaccatcagcgcctccccagatttggacctaagccctcgcggacgtgcgcgccggccgcctggttgccggtcgaatccgccctccagccgctgccaacgtcgatctgctactgacgcaccgcaagggagcatttagctgtagtgagatggatatcctttatcagtgtaaggaggttttgaagatccagaagtttcggcgtatggtgtcatatgctggattctactgcttcacttccctcattacttatgcttacacaagcaatacgacaagggctgggatgtcaagggctgaccagtattattcctcctaccctgctggtactgaactactaactgacactgcaaagctttacaaggctgcattgggcaattgttttgaagtagatgaatggggcccaatagagttctccatcatggcaaaacattttgaccggcaagggaaaccaccatatgcctaccatgctcaatatctggcacaccttctctcccatgggcagctcgatggaagcggttaaatgcaggatgtattgttggtaactgcatcaacgcaactagaatttcactatatcttgtataaaaatgttgcctttgctagaacaatgagttcagactgcaccagtttagaagttacagaactggcatcagaaacaagttctgaatttttttggtcattggctggtacgatatcagtgttgaatttgtgcgatcgccgaacaatttctgaaaaaaaacatgaccttgtcttgttggaacatttacactgtccttttattgttgaataaaccactgaatgttaatgcatgcattaattcggccgttgtgt

SEQ ID NO: 113579 - DNA, 1914 bp, Zea Mays
aatttaattttagctaggcgtgtgatgcacgtgggaatgggatttgcggggagggggagaatgagaaagacagtgcggggagggggtaatgggaatggcagaacaacacagaatggcagccgggaagacagtgtgggaatgggaatggcagaacacggaatggcagcctaccccttaccgccttaataagtagtagagatatataccacaacatgtatttgatgtttatggaaatcttttttctttctatgaaacttatagacggtaccagcggcggctctaaccctgccgtatgacaatggagcaatgcagtaagcgccgaggagggcgagactcagaggggaaaacctgacagccgtcgaggaggagcaatggaggggcgagactgggagcaattgagccgctcgcgaggagcaatggagccgatccgttttgtggaacggatctaagaaaaccagtcgtaacaacgctcagtatacgaagaaagcgcgtttgagtaaaaaaaccaagacggaaggtgttgtaatactacaatcttaattgtcacgttcggaatactaattttcggaagcccagtaaaggcttgttcggttctaccccaatccatatggattgagggagtttcaatccctagtaaggtgtcgttcgtttctttcggaatggaggcatggaataattcgtagccggtttgtttctctaatttatataagttttgatcagctggaatgatttctagtccattcctggacaaatgagcaagacataggtcaaaatctctttcaatccgtattaatccccttcaattcatatagattgaaaataaccgaacaagctacaactacaatagaagttgcttggttcaaaaaaaaaactcgtctctctcggggtgctcacctgctcacacgtggttaatttctcgctttggttgcaggcaatgtcgtatccttcggcctcttcctctccccagtgtaggcgctcatcgatcggtccgggttcatctggctctgggtggttttttgatttggttagggttttgtttgtactgatatatggagaggaactgagaccaactgcggtctgcggcactgcgctcgccgccagcctccctagggtttccttccccgtcgaccatcagcgcctccccagatttggacctaagccctcgcggacgtgcgcgccggccgcctggttgccggtcgaatccgccctccagccgctgccaacgtcgatctgctactgacgcaccgcaagggagtgtaaggaggttttgaagatccagaagtttcggcgtatggtgtcatatgctggattctactgcttcacttccctcattacttatgcttacacaagcaatacgacaagggctgggatgtcaagggctgaccagtattattcctcctaccctgctggtactgaactactaactgacactgcaaagctttacaaggctgcattgggcaattgttttgaagtagatgaatggggcccaatagagttctccatcatggcaaaacattttgaccggcaagggaaaccaccatatgcctaccatgctcaatatctggcacaccttctctcccatgggcagctcgatggaagcggttaaatgcaggatgtattgttggtaactgcatcaacgcaactagaatttcactatatcttgtataaaaatgttgcctttgctagaacaatgagttcagactgcaccagtttagaagttacagaactggcatcagaaacaagttctgaatttttttggtcattggctggtacgatatcagtgttgaatttgtgcgatcgccgaacaatttctgaaaaaaaacatgaccttgtcttgttggaacatttacactgtccttttattgttgaataaaccactgaatgttaatgcatgcattaattcggccgttgtgt

SEQ ID NO: 113580 - DNA, 887 bp, Zea Mays
aagacgacgcttgatgacatttatctctcgagccaggttcaccaggaggcgaaacaatctcgcctactcccctacccgttcagacttctccacacagccgccgcgagacatgctacggcgcgccgccactacggctacgctcaatggccgcgcggcggcgtggttccgtcacctcacccgtaggccgatgacgcttccgcccgctcatctcgggcgccaccatctgcaggcccaactccgaccaccacgcgtcgtgtgggtgccgccgctcccgcacttgtgtggcgcgcggggctacagctacactcgcatggcgcggcgcatcccaatcgcgaggcccgacgggtactccagctccgacggcgaggcagaggatccggacgcgggcgaggccggggagatcacggagcctgtcggcgagggcgcggagggcgacaactcggagggcagcgagaccgaggtggaggggttcatgctggacttgtcatctgacaacttgttcggcgacagcgacggtgacggcgacggcgacgaggaaggcacagaagagggagggaaatagcgaggcgggatttcgctgtggggagctggcgaatcgagcttcgtcttggggaaggtacgttcgtcaggtgctcgtggaaatgccgtaaagcatcgcgtctattttagccaggtgctagggtagacggaaggtttaagttacgacgatggtgtgtttttggatatttgaatatttgatattggttttaccaacgttttcaactagaaatagcatttcctctatttttttactgtactatctagtgctccgatgccatgttccgtgtttcagagtagcgtgtagggaagagacaaagacagacgactagtgaagcgctgctcttctc

SEQ ID NO: 113581 - DNA, 2394 bp, Zea Mays
atggatgatggtagagaagaagaagcagacgatgataattctgcgtcattgcacagagctgcaccagacacatgcagtggtctaccagcagcgcccacatcaagaattatatctccaaactgtggtgtgagtccacggataaatatagtaacaccacctgcagaattacgagcgccaggggtcaatgatggcaatacaacagtaattgaaacaatggtagcagcaaatcaaatggtgcctatgaggaccattagtgatcatgaacaagatacacctaatatcctccgaagtcatcctgaaagtattgatccaacaatggtgcctaggatcggtatgacatttggaaatgtcgatgaggcatacaatttttacagtcgttacgcatatgagactcatgatcctgagtacatggagtttctcagttcaatgcagcaaagcagaatcccgcaacactgtatcatggacttcgtgtctgagatgcatggtggtccagaaaacgtaccaattacagcaaaggacattgctaatttggataatccacaatttttctctgatttccagttagacagcgaaggaaaaatattgagtattttttggtctcatgctagtcagcaaggagagtatgttgattttgggaatgcagttacctttgatacaactcataagactaatttgtatggaaaacccctaggaatgtttgttggtgcaaaccaacacctacaatgcacagtgtttgggttctcattattgggagatgaaactgttgaaacattcgagtgggtatttaatgcattcaagacatgcatggggactgaaggaccaagagtcatgttgacagatcaagatcctgcaatgccagtggcattacgtcgggtcttcccaaacacagtccacaggttgtgtctatggcatgtgcaaaataggtacatgccatttctaaatgagttgtatgcacgatatgctgaagcggattttaagacaaaattccagtctatagtacatcatccattgactgaaatagagtttgaggctgcatggaaattgttgattgatgaattcaacctgcatgaagatggaacacttagaaaattatatgcaatgcgtaaggagtggatacctgtttttttcaaacatgactattgtgggcttatggtgtctacgcaaagtagcgagagcatgaacaaactcgtgaagagcgctcatgtagattcaaacaccccacttcatgagtttgctaagcaaatgttgaaactactgcatagcaggaagatgcaagaaggaaaggaaacactaggatgtatgggtcaaaaagaaaccacaactctatatatgttcgaaattagggttgcaagggcatacaccagggctgtgatgaatagattcgaggagtcaataaaatacgctactgcatataggataacacttgatccagatggagacgcaaatgattggttggtgcagcatacatcaagatcgaaaagaatcgtgtgggggcaacaccaattcaaagtgaatgcagatgtagaggcaggaaagtttaaatgtgaatgcaaacagtgggaacacacaggactattttgtgtgcatctaatccgaacattcatgcacattcaactagagaggatacctaaggaatacattctacagcgttacacatactcagctaagcaagatgtggaattttcaagagatgacaggaaaatgagtggaaaagatggagaaacaaaatcatataggcaaaaaatgttgcttaaaaaggcaatgaaggtagtaaaccaagctagtatgtcaaaggcagggagtgataaggctttggacacaatggatgaactgttggagatgcttgggcgtttagagccagatataggatgtgaaaatgctggtggtgcaactactggagagggcaaccatggcgaagaggatgatgttggaaacgctggagatgaacatgtatcgcaatgtgataacgaggagcatgtggcagtacattcacgacaacaagatggagacttaaatattgatgcacatcatcaatctgaactgcaaatgacgcttgttggaaatgatgattgtgaaggaacacaatatggggatgttagaaagagactggaatatgatgtagatggcataagcttattgcgtccaattaatgcaaggccaaagggaaggacaataaaaactagtgaacaaagagttctaaaactaggtgcgaaaggagaaaagaagaagactcgaaagtgccaaaaatgtggcattgctgatggacacaacagtcgaacctgcttgtctgtagaggaaaatagggttaaattggctagccttgccgatagaaaaagaggacgaccgcctgggtctagaaacaaaaattcaacaatggccccacagtggaattag

SEQ ID NO: 113582 - DNA, 779 bp, Zea Mays
gccgaatgctatcaagaaacgaacgaacagatgtgatggggattgggggcaatacacaagacctatgtgagcaaaaaacaggtgttcgcaaaaattcgcagcgccgacctagcaccccttttcgtggcggcggtgctccttttggtacagatgtcccatttggaccaccaggtcctgacatgctcccgacatttgtcaattggagtacctatggagctgtgacaccaatacaagatcaaggagactgtggttcgtactgggcatttggtgtcaccggtctcatagaggcagctcacttcatacgaaacaaggagttaataaaactttctgagcaacacctgatagatggaaacaacctcaggaactttggatgcaaacatggatcatgctccgaggccctagactacattatgagaaacggtggaattatcaatgcagaaagttacccatacaaggaagcccaagggcctgtccggtctatcacggtgagacaacaagtcattttagcctatttagaaattagatgcgcattgatttgggccttgtttggaatagctctagctctaggaaatttggtagagcagctaggtcgaggacacggcgacgaggaagttgttccaaaggacaccatggtcgtggttgctaaagtttggatgacatcgggagagggaagagatcatgggcgtgctcacctgcggctcaaatcggtagtgacaactctcgttgaagatggcttactctttgtcttgaagagtaatacaacattattcgggctatag

SEQ ID NO: 113583 - DNA, 1433 bp, Zea Mays
gttgacatcggttcaccgtccgcccgggtacattccgtacgtacaagaggcggtcgcgacgctctagcttgcattgcaccagcgcgcagagcggaaggaggtggaaagcgcccagagagatctcgagagagagagagaggctggtcggcacatactagttcattccgtttggatagagacgcacgcaacgcaggccaccacaacgtgaggagcgggaggaggagggagagggaggatgcaggcgcatcaccgtcagtcgtactacgcggtgctcggcgtgcagccgggcgccaccgccgccgagatccgcgccgcctaccaccgcctcgccatggtgagtacttgagtaccgtaccgaccgactccctgcagtcggtaacaaacaatcgctttggtgtatatatgccattggcccgcgtgtggaaacagatcgtgacatatacttcctctgacggcgacgcagaggtggcacccggacaagatcgccagcggcggcggcggcgccgatccggcgcgcgcggaggaggccaagagcaggttccagcagatacacgaggcgtaccaagtgctgtcggatgacaagaggagggcgctgtacgacgccggcatgtacgacccgctggacgacgacgacgaccaggaggacgtcgagggattccacgacttcgtgcaggagatggtctcgctcatggccagagaggtaactatcagcagctatatagctagctacctgatgttcatgccaatcaaggtgcaaaatgccgtgcgctgctccagcaatcgatgattgattaatatctcgcgcgcaggagcccgtgtacagcttggccgagctgcaatccatgctggacgggatgatcaaggatttcaccgcgccacagccttggcctagcggcttctacactggtggcggtggcggtggggcgtcgtcgccgtcgccgctcggcaaaccaagcagccaagagcagagtacggcttcgtcacgcttgcatccctacgggttcggggacgcgccgtgcttcagccgcacggcgttctcacaatgatggcgatgatgaataaataaatttatacatggatcgagcttttatccttctggcagcaatgggggttttctcgctcgtggaggtggagggagagtaagaacccgtgaaagccatcgtccgccagggtcagactctgattggcagttgcaattgctttggactgcggctgcagggatgaaagaaggtgaggtgggaagatagaccacaaggggcacgtagtcgcctagaatctccacccacaaggggtgtttgtttgtttgtactgtttggtttggtttggttttcgtctcttgcctggcatggtagagatgagttatgccagagcatttgtatacaagggtatgccattgccatcaagaataagttacgtcaatacaatttgtacat

SEQ ID NO: 113584 - DNA, 692 bp, Zea Mays
agtgatcgctcactgaaccagttggaagaagaaagggtagcacgagaaacccggaatgctgctgccgctgcaggtagcggtcgtggtcaccatgctcgcgtccccggcgggggtgctgggcatcgccaccgacgaggactgcaggtgcttcatgtgcgtctgcgacctggacccgtatccgcccccgccggaggcgccgacccaccactcaccgccggcgcagccgcagccgcagccggtcccctcgccgcccccgcccccgcccccgccgccggcgccggcgctccccgcgtactacccgccgcagccgtacgggtacccgtggccgaccacgtacgggccaccggcgggggagatgtacccgcgggacgacaggaggagggagtccaagtccggtgcgcccccgcggcacggcggctgcgggcgcgccagcttggccctcgccagcaccagcttggctctgctgctgtggcttgagtgattgttttagtcgcgccgtgtcgttcggttcgattaatgcctacgtaaatcgagtatatgtatggcgaccaaactttcgtgttggggtaataatggggttgcattgcatgttgtcgctggctgtcagtgtactaaatttatgagatagagctgctgctaaaaaaaccagcagacgagcagctccttttttgtttaaatttttcggttactga

SEQ ID NO: 113585 - DNA, 529 bp, Zea Mays
ttttttttttcgtgccgcggtgccgttgctgcggtctgttgcaaacaagatggaggaggggttcatcggggcgcgcaggaggagctgcaccggctaccagcggctgcgggcaccgccgccgacgactccgggcagaggcacctgcaggctcggacggcgagcggtcctcggctcgggaggctggaggttcgtccggctacgccgccgccgccgccgccgtgccagcgcgccgcggtggtcgtcgccgctgcagctgctcagccggatcctcgacacgtacatcacctccatgctgtcgcagccaccaccgaacatcttgaagccactgaacatgccgccgccgaagctgcgccgtgatgcttcaccggggacggggtcgtcgagacgccgcgatgcaggcgggagcgggagaggcgtcttgctcaacatctgcgtggccgaggtgctcctacggcggaccacgtcggaggtcaggcggtcgccgttgcagccaacgaaggacgcgcggcgccgcagcgtccgtgcatag

SEQ ID NO: 113586 - DNA, 1328 bp, Zea Mays
acacgtttctttatcgtaactttttcactgctccagtgaaggcacacatccgccgccgtttcttctcccatcatcttcctcgcagcgccggcgctccctctcccgctcccttccttactcgcgctcggcacacaggcggcggcgctcgggctctcagcgacggcgtcagcggcttaccctcgcgccctcgcctccggtcctccgcacaccggccggtgaccctgcgtgcgtgcctatctctctcatcccgcccccggtggatcgtcaacgccaccggccccgccagctgcgccgcgcgcggcctgatggctgcgggagccagcagccgctgctccaccaaggcgttcgcgccgctttggtagcgcttatgccccaaagcgaagcgttacccgtcctcctagcgcttcagcgcgctgaagcgtgcgcttagtgccgccttttggaaccctggcctcttcgcatttgcagggagaagactcagtttatcccttgcactcccttcccagaccccactcatgtagagcctccggcactgggacaacattgcatctgaactgcattggatcctaagagatgatggatgagtcttttcttgataggatggtttcccaacttcggtcaacatgcaagtactacactggatatcccaaggacttagggcgatcaagaattataccattcacatctgagcgtcagtttgtgcagctattacatgaaggcaggcctgtagtcgttgcctttactattaagtgcacatatacacagcatcttgataaagttctggaagaggccgcagctaaattttatccacatatcaagtttgtccgagttgagtgcccgaagtaccctgggttttgcctcacaaggcaaaggaacgaatatccatttgttgaagtattctacaacccagaacaggctgcaagcccaggaaagagcgtggatcctaacatcaccaagtattctgtaaaagtgctaccgttcaactatgaccaaagcgtgtatggatttcgagaatatttcaagaagcatggtttcaagtattctgaaacaaactagatctgttgttaaagatctgcctcgagagtagtcctagggacttgagtagcatgtggaggcagttgttgtatggagttgaaatggcgtgaggctctaatgggaggccttgactagttcattcgagaatgcctgtcatgtattcatttgtatacgggctactgctcatgcctagagatttgcttttccgtacctatgaaccattggatttggtaatgttttacctctcaaagcccggagtgagcaatttgcatcattttttcaagcactgtcga

SEQ ID NO: 113587 - DNA, 1421 bp, Zea Mays
acacgtttctttatcgtaactttttcactgctccagtgaaggcacacatccgccgccgtttcttctcccatcatcttcctcgcagcgccggcgctccctctcccgctcccttccttactcgcgctcggcacacaggcggcggcgctcgggctctcagcgacggcgtcagcggcttaccctcgcgccctcgcctccggtcctccgcacaccggccggtgaccctgcgtgcgtgcctatctctctcatcccgcccccggtggatcgtcaacgccaccggccccgccagctgcgccgcgcgcggcctgatggctgcgggagccagcagccgctgctccaccaaggcgttcgcgccgctttggtagcgcttatgccccaaagcgaagcgttacccgtcctcctagcgcttcagcgcgctgaagcgtgcgcttagtgccgccttttggaaccctggcctcttcgcatttgcagggagaagactcagtttatcccttgcactcccttcccagaccccactcatgtagagcctccggcactgggtctgtcctttattactataactgtgatacttttagttctgattctgattgggcagttgatcgtgtggtgcagtccagtgagggaaattattggacaacattgcatctgaactgcattggatcctaagagatgatggatgagtcttttcttgataggatggtttcccaacttcggtcaacatgcaagtactacactggatatcccaaggacttagggcgatcaagaattataccattcacatctgagcgtcagtttgtgcagctattacatgaaggcaggcctgtagtcgttgcctttactattaagtgcacatatacacagcatcttgataaagttctggaagaggccgcagctaaattttatccacatatcaagtttgtccgagttgagtgcccgaagtaccctgggttttgcctcacaaggcaaaggaacgaatatccatttgttgaagtattctacaacccagaacaggctgcaagcccaggaaagagcgtggatcctaacatcaccaagtattctgtaaaagtgctaccgttcaactatgaccaaagcgtgtatggatttcgagaatatttcaagaagcatggtttcaagtattctgaaacaaactagatctgttgttaaagatctgcctcgagagtagtcctagggacttgagtagcatgtggaggcagttgttgtatggagttgaaatggcgtgaggctctaatgggaggccttgactagttcattcgagaatgcctgtcatgtattcatttgtatacgggctactgctcatgcctagagatttgcttttccgtacctatgaaccattggatttggtaatgttttacctctcaaagcccggagtgagcaatttgcatcattttttcaagcactgtcga

SEQ ID NO: 113588 - DNA, 1752 bp, Zea Mays
acacgtttctttatcgtaactttttcactgctccagtgaaggcacacatccgccgccgtttcttctcccatcatcttcctcgcagcgccggcgctccctctcccgctcccttccttactcgcgctcggcacacaggcggcggcgctcgggctctcagcgacggcgtcagcggcttaccctcgcgccctcgcctccggtcctccgcacaccggccggtgaccctgcgtgcgtgcctatctctctcatcccgcccccggtggatcgtcaacgccaccggccccgccagctgcgccgcgcgcggcctgatggctgcgggagccagcagccgctgctccaccaaggcgttcgcgccgctttggtagcgcttatgccccaaagcgaagcgttacccgtcctcctagcgcttcagcgcgctgaagcgtgcgcttagtgccgccttttggaaccctggcctcttcgcatttgcagggagaagactcagtttatcccttgcactcccttcccagaccccactcatgtagagcctccggcactgggtctgtcctttattactataactgtgatacttttagttctgattctgattgggcagttgatcgtgtggtgcagtccagtgagggaaattattggttggttctcacaggctctctaacttatgccagtcctgttataggttatcagttcctctgtatattagtcatatatacagcacttgcccttgggaatgggggagacaaatgttcagttttatgtacttatgtcagaaatctcatattactatatgagataagtctcttcctaattactatattagataagcttccaaccagtgtttattcataccattgtctctctctgtctaatatgttgtttaatgaactctgtttcccccttattagtgcatgcatgattgtccattcttatttttgtccatcattaattacctgttcattaccataggacaacattgcatctgaactgcattggatcctaagagatgatggatgagtcttttcttgataggatggtttcccaacttcggtcaacatgcaagtactacactggatatcccaaggacttagggcgatcaagaattataccattcacatctgagcgtcagtttgtgcagctattacatgaaggcaggcctgtagtcgttgcctttactattaagtgcacatatacacagcatcttgataaagttctggaagaggccgcagctaaattttatccacatatcaagtttgtccgagttgagtgcccgaagtaccctgggttttgcctcacaaggcaaaggaacgaatatccatttgttgaagtattctacaacccagaacaggctgcaagcccaggaaagagcgtggatcctaacatcaccaagtattctgtaaaagtgctaccgttcaactatgaccaaagcgtgtatggatttcgagaatatttcaagaagcatggtttcaagtattctgaaacaaactagatctgttgttaaagatctgcctcgagagtagtcctagggacttgagtagcatgtggaggcagttgttgtatggagttgaaatggcgtgaggctctaatgggaggccttgactagttcattcgagaatgcctgtcatgtattcatttgtatacgggctactgctcatgcctagagatttgcttttccgtacctatgaaccattggatttggtaatgttttacctctcaaagcccggagtgagcaatttgcatcattttttcaagcactgtcga

SEQ ID NO: 113589 - DNA, 974 bp, Zea Mays
acacatccgccgccgtttcttctcccatcatcttcctcgcagcgccggcgctccctctcccgctcccttccttactcgcgctcggcacacaggcggcggcgctcgggctctcagcgacggcgtcagcggcttaccctcgcgccctcgcctccggtcctccgcacaccggccggtgaccctgcgacaacattgcatctgaactgcattggatcctaagagatgatggatgagtcttttcttgataggatggtttcccaacttcggtcaacatgcaagtactacactggatatcccaaggacttagggcgatcaagaattataccattcacatctgagcgtcagtttgtgcagctattacatgaaggcaggcctgtagtcgttgcctttactattaagtgcacatatacacagcatcttgataaagttctggaagaggccgcagctaaattttatccacatatcaagtttgtccgagttgagtgcccgaagtaccctgggttttgcctcacaaggcaaaggaacgaatatccatttgttgaagtattctacaacccagaacaggctgcaagcccaggaaagagcgtggatcctaacatcaccaagtattctgtaaaagtgctaccgttcaactatgaccaaagcgtgtatggatttcgagaatatttcaagaagcatggtttcaagtattctgaaacaaactagatctgttgttaaagatctgcctcgagagtagtcctagggacttgagtagcatgtggaggcagttgttgtatggagttgaaatggcgtgaggctctaatgggaggccttgactagttcattcgagaatgcctgtcatgtattcatttgtatacgggctactgctcatgcctagagatttgcttttccgtacctatgaaccattggatttggtaatgttttacctctcaaagcccggagtgagcaatttgcatcattttttcaagcactgtcga

SEQ ID NO: 113590 - DNA, 1769 bp, Zea Mays
cggtccacaaagacaattatctcgctgtctgccgactgccggtgtcagcttcctccggatcaagaagcggcaggtagagcagagaagccagctagctagcgagctgaggagagatggaagcgcagaacggctacagcccgcttcttgccggggacgaccacgaggcgatccacgccaccggcgccggtgatgaaggcgacgacgtcaagctcaggctgctcggatacaagcagcagctcaagcgcgacctctcggtggtagccaacttctccgtgagcttctccatcgtgtcggtggtaacgggcgtgacgacgctgttcgggacgggcctccagttcggcgggccggcgacgatggtgtacggctggcccatcgccggcgccttcaccgcggccgtgggcctcgccatggccgagatctgctccgcctaccccacctccggcggcctctacttctggagcgccaggctctgcacccaccgccgctggggacccttcgccgcctggctcaccggctgggtgctgtccaacttcgccttctccttctccatcatctcggtgctgacggggatcacgacgctctacaacacggggctcaacttcggcgggcccgccaccatgacgttcggctggttcgtcgccggcgccttcaccatggccgtcggcgcctccatggccgagatctgctcctccttccccacctccggcggcctctactactggagcgcgcgcctctccggcaagcgctgggcgcccttcgcctcctggatcaccggatggttcaatgttgtcggacagtgggcggtgaccaccagcgtggactactccctggcgcagctgatccaggtgatcatcctgctcgccaccggcggcaagaacggcggcggctacctggcgtccaagtacatggtgatcggcttccacgccgccatcctgctcagccacgccgtcatcaacagcctccccatcaccttcctctcctttttcggccagttcgccgcggcctggaacatgctaggtgtgtttgtcctgatggttgccgtgccgaccgttgccaccgagagggccagcgccgagttcgtgttcacccacttcaacaccgacaacggcgccggcatccgcagcaacttgtacatctttgtcctgggcctgctcatgagccagtacacgctcacaggatacgacgcctcggcgcatatgaccgaagagacgaagaacgcggacaagaacggccccatcggcatcatcagcgccatcggcatctccatcctcgtgggctggggctacatcctcggcgtcaccttcgcggtcaaggacataccctacctgctgagccccgacaacgacgccggcggctacgccatcgccgaggtgttctacctcgccttcaagagccgctacggcagcggcgccggcgggatcgtctgcctgggggtcgtcgccgtcgccgtctacttctgcggcatgagctccgtcaccagcaactccaggatggcctacgccttctccagggacggcgccatgcccttctcctccgtctggcacaaggtcaacaagcaggaggtgcccatcaacgccgtctggctctcggctctcgtcgcgctctgcatggcgctgccggtatatgtaaatttcggttttttttttcttccacacacgcatgaaggattcggcagtctcgtctcatcagtcatccatgtgaacccgcgaaccatatatgcagtctctgggaagcctggtggcgttccaggccatggtttccatcgcgac

SEQ ID NO: 113591 - DNA, 1606 bp, Zea Mays
cggtccacaaagacaattatctcgctgtctgccgactgccggtgtcagcttcctccggatcaagaagcggcaggtagagcagagaagccagctagctagcgagctgaggagagatggaagcgcagaacggctacagcccgcttcttgccggggacgaccacgaggcgatccacgccaccggcgccggtgatgaaggcgacgacgtcaagctcaggctgctcggatacaagcagcagctcaagcgcgacctctcgttcaatgttgtcggacagtgggcggtgaccaccagcgtggactactccctggcgcagctgatccaggtgatcatcctgctcgccaccggcggcaagaacggcggcggctacctggcgtccaagtacatggtgatcggcttccacgccgccatcctgctcagccacgccgtcatcaacagcctccccatcaccttcctctcctttttcggccagttcgccgcggcctggaacatgctaggtgtgtttgtcctgatggttgccgtgccgaccgttgccaccgagagggccagcgccgagttcgtgttcacccacttcaacaccgacaacggcgccggcatccgcagcaacttgtacatctttgtcctgggcctgctcatgagccagtacacgctcacaggatacgacgcctcggcgcatatgaccgaagagacgaagaacgcggacaagaacggccccatcggcatcatcagcgccatcggcatctccatcctcgtgggctggggctacatcctcggcgtcaccttcgcggtcaaggacataccctacctgctgagccccgacaacgacgccggcggctacgccatcgccgaggtgttctacctcgccttcaagagccgctacggcagcggcgccggcgggatcgtctgcctgggggtcgtcgccgtcgccgtctacttctgcggcatgagctccgtcaccagcaactccaggatggcctacgccttctccagggacggcgccatgcccttctcctccgtctggcacaaggtcaacaagcaggaggtgcccatcaacgccgtctggctctcggctctcgtcgcgctctgcatggcgctgccgtctctgggaagcctggtggcgttccaggccatggtttccatcgcgacgatcgggctgtacatctcgtacgcgctgccgatcctgttccgggtgacgctggcgcgcaagtacttcgtgccggggccattcaacctgggccgctacggcgtcctggtcggctgggtcgccgtgctctgggtggccaccatcaccgtgctcttctcgctgccggtcacgtacccggtcaccaaggacacgctcaactacacccccgtcgccgtcggcggcctcctcttcctcgtcctcgcgtcctggctgctcagcgccaggcactggttcaagggccccgtcaccaatctggacggatgaatatgtataattggacatgtatagtagagaggctggcagagacggaagagttgttgccaacgacatgttgtaactactttgttccaaaaattaactagcaaggaaaccgacaggatgaattttctcgatcgtgaaatgcatcagcatgtcgattgcgagcacca

SEQ ID NO: 113592 - DNA, 1870 bp, Zea Mays
cggtccacaaagacaattatctcgctgtctgccgactgccggtgtcagcttcctccggatcaagaagcggcaggtagagcagagaagccagctagctagcgagctgaggagagatggaagcgcagaacggctacagcccgcttcttgccggggacgaccacgaggcgatccacgccaccggcgccggtgatgaaggcgacgacgtcaagctcaggctgctcggatacaagcagcagctcaagcgcgacctctcggtggtagccaacttctccgtgagcttctccatcgtgtcggtggtaacgggcgtgacgacgctgttcgggacgggcctccagttcggcgggccggcgacgatggtgtacggctggcccatcgccggcgccttcaccgcggccgtgggcctcgccatggccgagatctgctccgcctaccccacctccggcggcctctacttctggagcgccaggctctgcacccaccgccgctggggacccttcgccgcctggctcaccggctggttcaatgttgtcggacagtgggcggtgaccaccagcgtggactactccctggcgcagctgatccaggtgatcatcctgctcgccaccggcggcaagaacggcggcggctacctggcgtccaagtacatggtgatcggcttccacgccgccatcctgctcagccacgccgtcatcaacagcctccccatcaccttcctctcctttttcggccagttcgccgcggcctggaacatgctaggtgtgtttgtcctgatggttgccgtgccgaccgttgccaccgagagggccagcgccgagttcgtgttcacccacttcaacaccgacaacggcgccggcatccgcagcaacttgtacatctttgtcctgggcctgctcatgagccagtacacgctcacaggatacgacgcctcggcgcatatgaccgaagagacgaagaacgcggacaagaacggccccatcggcatcatcagcgccatcggcatctccatcctcgtgggctggggctacatcctcggcgtcaccttcgcggtcaaggacataccctacctgctgagccccgacaacgacgccggcggctacgccatcgccgaggtgttctacctcgccttcaagagccgctacggcagcggcgccggcgggatcgtctgcctgggggtcgtcgccgtcgccgtctacttctgcggcatgagctccgtcaccagcaactccaggatggcctacgccttctccagggacggcgccatgcccttctcctccgtctggcacaaggtcaacaagcaggaggtgcccatcaacgccgtctggctctcggctctcgtcgcgctctgcatggcgctgccgtctctgggaagcctggtggcgttccaggccatggtttccatcgcgacgatcgggctgtacatctcgtacgcgctgccgatcctgttccgggtgacgctggcgcgcaagtacttcgtgccggggccattcaacctgggccgctacggcgtcctggtcggctgggtcgccgtgctctgggtggccaccatcaccgtgctcttctcgctgccggtcacgtacccggtcaccaaggacacgctcaactacacccccgtcgccgtcggcggcctcctcttcctcgtcctcgcgtcctggctgctcagcgccaggcactggttcaagggccccgtcaccaatctggacggatgaatatgtataattggacatgtatagtagagaggctggcagagacggaagagttgttgccaacgacatgttgtaactactttgttccaaaaattaactagcaaggaaaccgacaggatgaattttctcgatcgtgaaatgcatcagcatgtcgattgcgagcacca

SEQ ID NO: 113593 - DNA, 1915 bp, Zea Mays
cagccgcggaacgcccagagcggccacacttgcatgattccatccctcctccaattagcagcagcaccgatataatttatcctcctcctcccctggcctcaagctcaccgccgtctcctaccgcagcaacacagcctccgccagtcaccgagctagctagacccacgcgccgcgccatgacgtggaacaggtccgcggccgacggcggcggcagcagcgccgggacgaccgccggcgacgacaccggcctggcgcgactgcgggagctcgggtacaagcaggagctgaagcgcgacctctcggtgctgtccaacttcgccttctccttctccatcatctcggtgctgacggggatcacgacgctctacaacacggggctcaacttcggcgggcccgccaccatgacgttcggctggttcgtcgccggcgccttcaccatggccgtcggcgcctccatggccgagatctgctcctccttccccacctccggcggcctctactactggagcgcgcgcctctccggcaagcgctgggcgcccttcgcctcctggatcaccggatggttcaatgttgtcggacagtgggcggtgaccaccagcgtggactactccctggcgcagctgatccaggtgatcatcctgctcgccaccggcggcaagaacggcggcggctacctggcgtccaagtacatggtgatcggcttccacgccgccatcctgctcagccacgccgtcatcaacagcctccccatcaccttcctctcctttttcggccagttcgccgcggcctggaacatgctaggtgtgtttgtcctgatggttgccgtgccgaccgttgccaccgagagggccagcgccgagttcgtgttcacccacttcaacaccgacaacggcgccggcatccgcagcaacttgtacatctttgtcctgggcctgctcatgagccagtacacgctcacaggatacgacgcctcggcgcatatgaccgaagagacgaagaacgcggacaagaacggccccatcggcatcatcagcgccatcggcatctccatcctcgtgggctggggctacatcctcggcgtcaccttcgcggtcaaggacataccctacctgctgagccccgacaacgacgccggcggctacgccatcgccgaggtgttctacctcgccttcaagagccgctacggcagcggcgccggcgggatcgtctgcctgggggtcgtcgccgtcgccgtctacttctgcggcatgagctccgtcaccagcaactccaggatggcctacgccttctccagggacggcgccatgcccttctcctccgtctggcacaaggtcaacaagcaggaggtgcccatcaacgccgtctggctctcggctctcgtcgcgctctgcatggcgctgccgtctctgggaagcctggtggcgttccaggccatggtttccatcgcgacgatcgggctgtacatctcgtacgcgctgccgatcctgttccgggtgacgctggcgcgcaagtacttcgtgccggggccattcaacctgggccgctacggcgtcctggtcggctgggtcgccgtgctctgggtggccaccatcaccgtgctcttctcgctgccggtcacgtacccggtcaccaaggacacgctcaactacacccccgtcgccgtcggcggcctcctcttcctcgtcctcgcgtcctggctgctcagcgccaggcactggttcaagggccccgtcaccaatctggacggatgaatatgtataattggacatgtatagtagagaggctggcagagacggaagagttgttgccaacgacatgttgtaactactttgttccaaaaattaactagcaaggaaaccgacaggatgaattttctcgatcgtgaaatgcatcagcatgtcgattgcgagcacca

SEQ ID NO: 113594 - DNA, 1934 bp, Zea Mays
cagccgcggaacgcccagagcggccacacttgcatgattccatccctcctccaattagcagcagcaccgatataatttatcctcctcctcccctggcctcaagctcaccgccgtctcctaccgcagcaacacagcctccgccagtcaccgagctagctagacccacgcgccgcgccatgacgtggaacaggtccgcggccgacggcggcggcagcagcgccgggacgaccgccggcgacgacaccggcctggcgcgactgcgggagctcgggtacaagcaggagctgaagcgcgacctctcggtgctgtccaacttcgccttctccttctccatcatctcggtgctgacggggatcacgacgctctacaacacggggctcaacttcggcgggcccgccaccatgacgttcggctggttcgtcgccggcgccttcaccatggccgtcggcgcctccatggccgagatctgctcctccttccccacctccggcggcctctactactggagcgcgcgcctctccggcaagcgctgggcgcccttcgcctcctggatcaccggatggttcaatgttgtcggacagtgtgtgccgctctatgcagtgggcggtgaccaccagcgtggactactccctggcgcagctgatccaggtgatcatcctgctcgccaccggcggcaagaacggcggcggctacctggcgtccaagtacatggtgatcggcttccacgccgccatcctgctcagccacgccgtcatcaacagcctccccatcaccttcctctcctttttcggccagttcgccgcggcctggaacatgctaggtgtgtttgtcctgatggttgccgtgccgaccgttgccaccgagagggccagcgccgagttcgtgttcacccacttcaacaccgacaacggcgccggcatccgcagcaacttgtacatctttgtcctgggcctgctcatgagccagtacacgctcacaggatacgacgcctcggcgcatatgaccgaagagacgaagaacgcggacaagaacggccccatcggcatcatcagcgccatcggcatctccatcctcgtgggctggggctacatcctcggcgtcaccttcgcggtcaaggacataccctacctgctgagccccgacaacgacgccggcggctacgccatcgccgaggtgttctacctcgccttcaagagccgctacggcagcggcgccggcgggatcgtctgcctgggggtcgtcgccgtcgccgtctacttctgcggcatgagctccgtcaccagcaactccaggatggcctacgccttctccagggacggcgccatgcccttctcctccgtctggcacaaggtcaacaagcaggaggtgcccatcaacgccgtctggctctcggctctcgtcgcgctctgcatggcgctgccgtctctgggaagcctggtggcgttccaggccatggtttccatcgcgacgatcgggctgtacatctcgtacgcgctgccgatcctgttccgggtgacgctggcgcgcaagtacttcgtgccggggccattcaacctgggccgctacggcgtcctggtcggctgggtcgccgtgctctgggtggccaccatcaccgtgctcttctcgctgccggtcacgtacccggtcaccaaggacacgctcaactacacccccgtcgccgtcggcggcctcctcttcctcgtcctcgcgtcctggctgctcagcgccaggcactggttcaagggccccgtcaccaatctggacggatgaatatgtataattggacatgtatagtagagaggctggcagagacggaagagttgttgccaacgacatgttgtaactactttgttccaaaaattaactagcaaggaaaccgacaggatgaattttctcgatcgtgaaatgcatcagcatgtcgattgcgagcacca

SEQ ID NO: 113595 - DNA, 994 bp, Zea Mays
atctccaatgccgcggcgtcctctgtcctgatgagccctgacgcggtcgagtgcagaccgaagagacgaagaacgcggacaagaacggccccatcggcatcatcagcgccatcggcatctccatcctcgtgggctggggctacatcctcggcgtcaccttcgcggtcaaggacataccctacctgctgagccccgacaacgacgccggcggctacgccatcgccgaggtgttctacctcgccttcaagagccgctacggcagcggcgccggcgggatcgtctgcctgggggtcgtcgccgtcgccgtctacttctgcggcatgagctccgtcaccagcaactccaggatggcctacgccttctccagggacggcgccatgcccttctcctccgtctggcacaaggtcaacaagcaggaggtgcccatcaacgccgtctggctctcggctctcgtcgcgctctgcatggcgctgccggtatattctctgggaagcctggtggcgttccaggccatggtttccatcgcgacgatcgggctgtacatctcgtacgcgctgccgatcctgttccgggtgacgctggcgcgcaagtacttcgtgccggggccattcaacctgggccgctacggcgtcctggtcggctgggtcgccgtgctctgggtggccaccatcaccgtgctcttctcgctgccggtcacgtacccggtcaccaaggacacgctcaactacacccccgtcgccgtcggcggcctcctcttcctcgtcctcgcgtcctggctgctcagcgccaggcactggttcaagggccccgtcaccaatctggacggatgaatatgtataattggacatgtatagtagagaggctggcagagacggaagagttgttgccaacgacatgttgtaactactttgttccaaaaattaactagcaaggaaaccgacaggatgaattttctcgatcgtgaaatgcatcagcatgtcgattgcgagcacca

SEQ ID NO: 113596 - DNA, 541 bp, Zea Mays
agaatccatgcagcgtcccattgtttctcgaggatccatgtcatcttgcgataaaaaagattctacattttcatccaaggaaccatcttccaacagacgttcaacatcaccctgaagcgggtttgctggagaagtcaagcttccagtgccatcagagccaaacatcatcaatggttttgaagggccaccattatactgcagctgtggaatggacattgcatctcctggcgtgtgagtagatggtgttgagggtgcagagctaggagatggcccagcagtgttcgctgttcctgaactattagctctaccagaggatgagacaggtttctttctcttctttgatacttgttcaggaaatccaaaagagtttggcaagtttccatcaataggcaagctcccaactcctggttttccatgctgatggagaagctggtttgaactttgagattgctgtccagagagcgcaggttgctgaagctgctgctgctggctatgactttgctgctgctgctgctgctgtagaagagcaaatttcttctac

SEQ ID NO: 113597 - DNA, 667 bp, Zea Mays
cggtgccatctggttcggtggcaccatgtcgggcatctataaagtgaaccctaggccgctaggcttcattttttgatgccccatccagacgcacgagcgatgatggcggtccgggatgagcgagcggcgacggcgcgacctcggaggcgcgagcgacggtgcccccttcgcacgacagcggtggttccccgacgagggggcggtgacgatgaccccggaggcgcgagcgccggccgtggcccagggagccgcgagcggccagaggctcgtgcggcggtgtcgaccaaaggtgtgcgcgatggtggaggttcctcgagtgcgcacggcagcgacgaccccatccagaggtcgcgcgaggcgggactgtctccagcggcggcggccacacgaggcacgcgtggctccggcagtgtcggtggtcgcgcaaggcgcgtgctgcaagggtctgtggtccgcacgacggttcaggcgtccttcgatcaccaattcctccgatctagtggtctcggttgcgtcctcagacgatgacctcccccaatcctttgtttcatacatgcggttgttgggtgaccacatactaggatttttttcattaattatgatgtacgatgtaagtatttatgcaactttctataatgatttatatcttgcacgatattagcatcca

SEQ ID NO: 113598 - DNA, 732 bp, Zea Mays
atgcaattgaatccggccaaggacatttaccccgctagctgcgtcgtcacggcgtcggggcggcgggaggcgtgccccccgaccgctcctcctccgacgtggcgcgcacgccctcgctctcctccgtcgtggtccggccgccgtggccggcgccgatctcctcgaccatccttaccacgtcgggggcgtcggggcgcgcgtcggggaccgtggccacgcacgccatggccacctgcagcagggccaccatctcctcctcggcgctggcgcccaggcgcaccagctcgacgtcgaacacctcggcggtccactcctcccgcaccacggactgcacccagcggggcaggtccagcgtgccgtcgccctccagcgacgcgtgcgagggggacttgcccgtcaggagctccagcagcagcacgcccagggagtacacgtccgacttgtacgtcagccgccgcgcgtccaccgcctccggggcgcggtacccgccgccccgcgccgccgtcgacgccgcgaacagctggtgcagcccgaagtcggagagcgccgccgcgtccgcgtccgggcggagcagcacgttcgacgccttcacgttgccgtgcaccaggttgtgcgccgtgtgcaggtgcgccagcccgcgcgcggcggacagcgccgcccgcatgcgcgcctcccagtccagcggcgtccggcccgagccccggctccctgcgcgtgcatgcacaaactccc

SEQ ID NO: 113599 - DNA, 826 bp, Zea Mays
caaaaatctatcaatcgacacccctcctcgctcgccagttagctaccggtttctctctcgcgcgaggatggccgtcgcggagacgtcgagcggcggcggcggcgaagtccacatatcgatcccgcccatggcggccaccaccaccccagacgggatacgcgagagctcggcagcaccgagccccttacgtagccgcggtagcaccccgccgcggcagctcaaggcggccccagcgcctgcggtagctgacacgccggcgacggccatagacaagacgctggcgagcgtcgccaatctcgcgaagctactgccgactggcaccgcgctggcgttccagtcgctgtccccttctttcaccaaccggggcgcgtgtctcccctccaaccggtacctcacggccgcactgctctacctctgcctcgtctcgtgcgtcttcttctccttcaccgacagcttcgtcggcaccgacggcaagctctactacggccttgccacggtcaagggcttcctcgtgttcaactacaccggcgacgaagacgacgagggcgatgccgagcgaaggaggcaggtcttcaaggacctccgcaggctgaggatacggtgggtggactacgtgcacgcgggattctctgccgtggtgttcctgacggtggcgttcggcaccgccgccgtgcagagctgcttcttccccaacgccggggagaacgtgaaccaaatgctcatcaatctgcctctcggcgccgggttcttctccaccatggtgttccttgttttcccgacgacacggaagggaatcgattacaccgggcatttcaccaatgtttag

SEQ ID NO: 113600 - DNA, 2343 bp, Zea Mays
gcaagagtgaaaagaattgaacatcatcacaaagtgattacaaaatatcatatgggaaaataatcgatcgcataaatttaacaagacaatttgattggaaacggtgctcctcttcttctcctactattctactactaggtgagtgcccgtgcgttgcaacggaaccgtataataacacgataacttatgtacatatgaaaccagtagtacttacacattagctttttcagattttgaatctccgcttctttagctttgatttgaagatctttctttgttctgtcctttttcagcgcagtgcattaatttttctgcaaacaagattacagagaatcatcacctgctgatcatactgagttatctaaaaacaatccccactaaccagtaaaagaaagagttggtcagcagcaccagttttagtagtagtagatcagacctcatctcaatttagattcaaacaagattggtaataattaactcaaagtgtttttcttgagttttgttccgagtaatttgaagcatctgtttcactcgtgtcgttacaagtttacctacaacacaagagaaacatagtttttgtttggtctctgacattattattctgaaccttatgcctggagttataacattatccggtttggcctgttgggttctcgctttagcatcatagatggataaaattctactgcacattgtcacttattgttgatggcatgatgagccccaattcacacgcctggctaactgcccaatctatttgcatgcagacgaatctatttacctgtattgtaggctacttattgaatagtttatggttgatcatcgtaactattgaggattgaacaaggtgttgaaacttcagatgaaacagatcacattcctagatctatttagccaacttgtgcttccatcctactttgttctaaaatgaacttttgatgaacttgagaagtttaagaagcctagtgatgacatcaatggcgacatggctagcttgtccactctgtttgcaaacaggaaaaaaaggacactttatgaagggtgatgccgtcattgttattaaaggcgatttgaaaaatctagagggttgggttgagaaagtagaggatgaaaccgttcacatcaggccaaaaatatctgatctctcgaaaacattagccttcaatgaaaaggagctttgcaaatatttcaagcctggtgaccatgtcaaggtgatctcaggagttcaagaaggtgctactggcatggttgttaaagtggaagggcatgtcttgatcattttgtctgacacaactaaagaacatgtgagtaattgttttatcaagattatgtagaaacatttaaactgatctatctaaaataatttgtccttaacgtgctcttgttggatgacacatatccgtgtgtttgctgatcatgtcgttgaaagctctgaaattaccacaggaatcaccagaatcggtgattatgaactgcatgatcttgtcctactctgttctaaaatgtagtagttgttgttagatgagctatgcaagatgtctttcctttagctaatcaggtaaatcaggaaccactcaatcagttgacagttgggttcaggatgtccatatgcatgggtctacgaccatacaaggcatcagagaatgaagcaaactgcactggtatatttaaggcacactcacacaacaaacttcagagaatgaaagcactacaatacagttacgaaaacacgccactgacacgcttaaacgtttaagacaacacagtataaaaaaaggccagtgatagtcgcctagagggggggtgaatagggcgagactgaaatttacaaatataaacacaactacaaaccgggttagcgttagaaataaaaccaagtccgcgagatagggcgcaaaacaaatctcgagcaaataaggagtgtgacacaaggatttgttttaccgaggttcggttctcgcaaacctactccccgttgaggaggccacaaaggccgggtctttttcaaccctttccctctctcaaacggtcccccggaccgagtgagcttctcttctcaaatcacttgggaatcaaacttcccgcaaggaccaccacacaattggtgtctcttgcctcaattacaagtgagtgtttgatcacaagaaagaatgccaaagaaaagaagctatccaagcgcaagagctcaaatgaacactacaaatcactctctctagtcactaaagctttgtgtggagttgggagaggatttgatctattttggtgtgctttgcaatgaatgctagctcttgtatagtggttggaagctggaaaacttggatgcaatgaatggtggggtggttg

SEQ ID NO: 113601 - DNA, 498 bp, Zea Mays
atggcgacatggctagcttgtccactctgtttgcaaacaggaaaaaaaggacactttatgaagggtgatgccgtcattgttattaaaggcgatttgaaaaatctagagggttgggttgagaaagtagaggatgaaaccgttcacatcaggccaaaaatatctgatctctcgaaaacattagccttcaatgaaaaggagctttgcaaatatttcaagcctggtgaccatgtcaaggtgatctcaggagttcaagaaggtgctactggcatggttgttaaagtggaagggcatgtcttgatcattttgtctgacacaactaaagaacatgtgagtaattgttttatcaagattatgtagaaacatttaaactgatctatctaaaataatttgtccttaacgtgctcttgttggatgacacatatccgtgtgtttgctgatcatgtcgttgaaagctctgaaattaccacaggaatcaccagaatcggtgattatgaactg

SEQ ID NO: 113602 - DNA, 807 bp, Zea Mays
ggctttatcctagaaatccaatgtccggccacaacacgctgcgagtgtctcggtagcttcttccccattcacattcggccattctccaccgtccaaccaaccaccggcggcggcacaagggaagcgaagaggaatcaacgcgatgtctgcgaccacggcggcggtgcccttctggcgggcggccgggatgacctacatcggctactccaacatctgcgctgcgctggtacggaactgcctcaaggagcccttcaagtccgaggccgcgtcccgcgagaaggtccatttctccatctccaagtggacggatggcaaacaggagaagcccagtgagtaatctgcccgctccttcacccatgcgttcatgtccgccgtccttgaaagattcgacgcgatctgcctggatgttatgtggtacggtctaaggtaggatcctagggtttgcgatttagttcttaataaagccgagcatggatatagatctaggttgatctagtggttcactgacggtgtcctgacttctgatgatgatttgtgtcattttgtttcgcgtgctggtggcgtttgcatttcacggccaatcgtagctgctgatggcgtaaatctgatctggtgtggtgattgatcgagttggtaaaaaatgtgaagggtacaaggtaaatgattgattggggatgtcaccatagtcaacggtcagtactcatgctgtggccaacagatcgtgcattttgcactgcagaatactctgtttacagagtggagtttgtaatgggagataggatgggtaaggctgctagagataacctt

SEQ ID NO: 113603 - DNA, 650 bp, Zea Mays
ggctttatcctagaaatccaatgtccggccacaacacgctgcgagtgtctcggtagcttcttccccattcacattcggccattctccaccgtccaaccaaccaccggcggcggcacaagggaagcgaagaggaatcaacgcgatgtctgcgaccacggcggcggtgcccttctggcgggcggccgggatgacctacatcggctactccaacatctgcgctgcgctggtacggaactgcctcaaggagcccttcaagtccgaggccgcgtcccgcgagaaggtccatttctccatctccaagtggacggatggcaaacaggagaagcccactgtccgcacagaatccgatgaataaagctctggtgccatagtggcatagtccttgctacagatgatttgaagtgttgttgcaagtttccggaacatgctatttagctggcttgattttatagtcaatgctgaataataaatactttttacgacaattgtctttttcgttgctaattgcactcgccctacctgaatcagtcatgtgaacatcatggaatgcttcagttttgtacaaactaaatttgttgtgctgtccgacagattctatgtctggtccttaaaaataaaggaataatgaatgtagtgtttttgaaggcccc

SEQ ID NO: 113604 - DNA, 681 bp, Zea Mays
atgtctgcgaccacggcggcggtgcccttctggcgggcggccgggatgacctacatcggctactccaacatctgcgctgcgctggtacggaactgcctcaaggagcccttcaagtccgaggccgcgtcccgcgagaaggtccatttctccatctccaagtggacggatggcaaacaggagaagcccaaatactctgtttacagagtggagtttgtaatgggagataggatgggtaaggctgctagagataaccttaagaatcacattttcaggatttgtgcaagtgagtatgaacctgaattgtgttcagtttgcatagcttttagatatttcttcaacgctaacttggttctctctgcagctgtccgcacagaatccgatgaataaagctctggtgccatagtggcatagtccttgctacagatgatttgaagtgttgttgcaagtttccggaacatgctatttagctggcttgattttatagtcaatgctgaataataaatactttttacgacaattgtctttttcgttgctaattgcactcgccctacctgaatcagtcatgtgaacatcatggaatgcttcagttttgtacaaactaaatttgttgtgctgtccgacagattctatgtctggtccttaaaaataaaggaataatgaatgtagtgtttttgaaggccc

SEQ ID NO: 113605 - DNA, 995 bp, Zea Mays
tccactgccccgccccaccacgtctggcgctaggcaaaccacgcacgcacctgacgggctcgcatcgcacccgccacccccaccgcacgcaccctctcgtcctctctgcgccgacccggctcttctcccccaacacaatcctccttccccgatccagtctcgcggtcgcggccacgctgagggacagcgagaagagacagacacagatcgcgcgcggagatgtcgtcggactcgtcgtcgtgggcgcgcgccctggtgcagatctcgccctacaccttctccgcaatcggtatcgccgtctccatcggcgtctccgtcctcggcgcggcatggggtatcttcatcacggggagcagcctcatcggggccgccatcaaggcgcccaggatcacttctaagaacctcatcagtgtcatcttctgtgaggctgtcgcaatttatggcgtaattgtggcaatcatcctccagacaaagcttgaaagtgtgccaacatctcaaatgtatgatccggagtctcttcgagctggctatgcaatctttgcatctggccttatcgttggctttgctaatcttgtttgcggggtatgcgtggggataattggaagcagctgcgcactgtctgatgctcagaactcatcactcttcgtaaagattttggtgattgagatcttcggcagcgctctgggactgttcggtgtcattgtgggcatcattatgtcatctcaagcgacatggccagcaaaagcttgattttcaccatttgtagctctgtaaattattcagatggagtgtatcgaaatgtgcatgtggtctaactgcattttcatgttccttttatgtggcgtcttttttggcagaacacgaaatgcggcgcgcgtaccgccaccgattgtagagttgctattcttactgccggagtactccatgtgtgttggatatcttgttggcatattaaataaatgcttggacaaaataaaatgaatttttttgccatc

SEQ ID NO: 113606 - DNA, 920 bp, Zea Mays
aagagccgggagcagggtttttggctgggagacccgaccaagagaggaaggtcagccagccaaacgccaccgccgccgtgctcgcgccgcacgcaactctcagctctctgacgcctcctcctccgtcgattccgacgagagagacgcaaaccaacgaggtaggaaggagcgcgaagatgggagcgggggacggtgaggtcgctgcgagcaaagacaaggccagcggcggcggcgccgagcggacgtcgctggacggcgtgcgggataagaacgtgatgcagcttaagaagcttaatacggcgctattccctgtccgctacaatgaaaaatactaccaggacgccatcgcctccaaggatttctccaaactagggacaaagctgctgaatcatgtgttcgatctctcagcaaagcaaaacatctccgagatatacttgcatgttcagaccaacaacgatgatgcaattgctttctacaagaagtttgggttcgagataacacagacaatacataactactacatgaacataacgccaccggattgctacgttcttatgaaattcattggccaggctgctacaaagaaatgagaagcagcccgcgcagctttgagagaccactgccactcaagttatggtggagatagttgggatccggtcacagtttgtgctgtgctttcatttttgtgatcttgaacgctgtagactcctgagtagcctttgctatcatttacattgggagtcatcttgcttcagggcatggattcgtgcctgaacaatttcttgagttgctgcttttgtgggacagctgtgatcttgtaggtctgtatgcccaatcgggcttgtatcttgatggatcacgatgtcaggatgttctgcatgctcattttggttgaggtgtgacgattcagttattcatgc

SEQ ID NO: 113607 - DNA, 1097 bp, Zea Mays
aagagccgggagcagggtttttggctgggagacccgaccaagagaggaaggtcagccagccaaacgccaccgccgccgtgctcgcgccgcacgcaactctcagctctctgacgcctcctcctccgtcgattccgacgagagagacgcaaaccaacgaggtaggaaggagcgcgaagatgggagcgggggacggtgaggtcgctgcgagcaaagacaaggccagcggcggcggcgccgagcggacgtcgctggacggcgtgcgggataagaacgtgatgcagcttaagaagcttaatacggcgctattccctgtccgctacaatgaaaaatactaccaggacgccatcgcctccaaggatttctccaaactagcatactttagcgatatttgtgttggtgcgatagcttgtcgcctggagaagaaggaaggaggagcagtccgagtttatatcatgaccttgggtgtactggcaccgtatcggggtcttggtattgggacaaagctgctgaatcatgtgttcgatctctcagcaaagcaaaacatctccgagatatacttgcatgttcagaccaacaacgatgatgcaattgctttctacaagaagtttgggttcgagataacacagacaatacataactactacatgaacataacgccaccggattgctacgttcttatgaaattcattggccaggctgctacaaagaaatgagaagcagcccgcgcagctttgagagaccactgccactcaagttatggtggagatagttgggatccggtcacagtttgtgctgtgctttcatttttgtgatcttgaacgctgtagactcctgagtagcctttgctatcatttacattgggagtcatcttgcttcagggcatggattcgtgcctgaacaatttcttgagttgctgcttttgtgggacagctgtgatcttgtaggtctgtatgcccaatcgggcttgtatcttgatggatcacgatgtcaggatgttctgcatgctcattttggttgaggtgtgacgattcagttattcatgcctaccattcttgtgcgtagacatgataagataatccccgagcttgaaatactgc

SEQ ID NO: 113608 - DNA, 465 bp, Zea Mays
atgtgcgatgttagagtgactgacagcccagtgtcttctcagctttctccaatcgtatgccaagttgtgggtgcaccattatcagaggaactgaatacatgcagtgcagtggaaggaagtgatccgagcaaggagaagaacagtcttgctggacagaaggatggcggcggcctcttggaagtttacataaaatgggagtctggcaacctgatcaaagggttgaagctattgtgcaactcgtgcctttcagatctgaggaagcttatagaggctcatttcaaagaagtgggcagcaaacagcagcagcagcagttcatcttccttctccttggggtatgtcattcggctctatccatgtcatgctttcacccaagtgctctgtgctacgtgcttctcatcacaatggcgctcatctatgaccatgtactatcttggggaaatggaacccatgtaacaatagactaa

SEQ ID NO: 113609 - DNA, 3349 bp, Zea Mays
ggcgcatccggccgtccgtccttccggagccccacgcgataggcggcaggagcggccgagcgggacacgcgttgcagttcaacaccgcagtggcattctcgctactgagactgagaggcagcctccctccctcgtgggcgttctaccgcgacgggggtcgctctataaagagcggacgcgcccccgctgctctgctcatcgtcctccgctccagcagctgccacagagacatcagagagcggtcctccttgtgagtctgagctgaagaggaggaggaggaggaggagaagcagcagcgcagccggaggagggagagcgaagatgcgccgcgtcgcgctgttgctcgtcgccgccgtgtgcgcgctggcggcgccggctgccgcggtcgtcactgacggtgagagctctcggacctaagctttgtcatataccgttccgttatgctgttttcttcactctagtccagtcgtagatgctgctactctgctagggtactgctcctagagtggacaccccagtttacagcttccaattccagctgcccggaatagctcagctctgtgagccagccgtatcaaagcaaaactcccgcttttgtccatacgcacggctccgctgtatacgttcgtccatcgtatcactgacaccatgcataaaatgattcgttttagactaaacctatatttattaatcaacttatatgtctacattcattgtccttaatttgaacgtagatggaaaaaaaagagggatagaaagaactatattttttggaacggatggaatgttcttttacgtagtaaaagaaatacatataaaaaagataaaacgttactgaagttagaacggatgaaggacggaggatacggtggcccctgaattaattaccagccgatcgagcgaacacagaactgtgcttttctcgtcgtcatcatacatacattcatgcacgtagttaatggcctggttagatccgaaacttcccaaagggtcgtcatcactcgtctcgacaaaatgaatagtgctgtgtgtcgctgtcatgcatatgggtggtgggtcgatctgatgatcatcatgccatgcaaatgcatcaacgctcaaggctttgattagtatatatagaagaggaccaatggagcatgcaagcaaatatatactgtactgtaggcacctgtcgcttggccccacggtcacgtacacctcgcatggctagcatgtatatatatatactgggctactggctggcacccgcctcctaactgattttttatatcaaaccactctaacatctaaataaaaattcttaattattcagttactaaccagcgcatgctggtctggtcgacataatacattactgggggtgcttggttgaggattgagttagttcattatcttctcactcctcatttttttggtttgggtaataaaatgagttaatccatcaccacattattccttatatttagttatttagtactaatatatggaatgtagtcattccactaaatttgaggaatgagcacatgattcatcaattcattttggatcgaatgattcgtcaaacaaacacatcatacaaggattttgcccattttccgccgccaaagcatcgtcttcagttatagtactaatgataaagctgactcggcaaagtacgattagtattggccggtggtgctgtgaaaaaaagtaggggatgcgtgtttgatttggtcgtgttcagatgcgtcggacggaccccacgcatatgtgtgatgtggtggtagatagagcagctgtgaatgcgtctgacgatcagcgcgaggccggtgagcctgagccccccaccgacagagcagcagaaccaacagactgcaacatctggtgctgcgctgccatgcaacgtgcaccctgccagtgtcagctcaaaagactgcaacatctgttgctcccaccggcccaccaccagacccatcacgatacatacaactgacacgaaatgcaatgcaaatggtgcaggtcttctcccgaacggcaacttcgaggatggcccgcccaagtcggcgctggtgaacggcacggtggtgtcgggcgcccacgccatcccgcggtgggagacgtccggcttcgtggagtacatcgagtcggggcacaagcagggggacatgctgctggtggtgccgcagggcgcgcacgcggtgcggctgggcaacgaggcgtcgatccggcagcgcctggccgtggcgcgcggcgcctactacgccatcacgttcagcgcggcgcggacgtgcgcgcaggcggagcggcagcggctgaacgtgtcggtgagccccgagtggggcgtgctgccgatgcagaccatctacggcagcaacggctgggactcgtacgcctgggcattcaaggcgaagatggacgcggtgacgctggtcatccacaacccgggcgtggaggaggacccggcctgcggcccgctcatcgacggcgtcgccatccgtgcgctgtacccgcccgcgctcgccaggcgggcggggggaaacaacctgctcaagaacggcgggttcgaggagggcccctacttcctgcccggcgcgtcctggggcgtgctcgtcccgcccaacatcgaggacgaccactcgccgctccccgcctggatgatcgtctcgtccaaggccgtcaagtacgtggacgccgcgcacttcgccgtgccccagggcgcgcgcgccgtcgagctggtgggcggccgggagagcgcgctcgtgcaggaggtccgcaccgtgcctgggtggacctaccgcctcgccttcgccgtgggagactcgggcgacggctgcgcgggctccatggccgccgaggcctacgcggcgcgcgccacggtcaaggtgccctaccagtccaggggcaccggaggatacaagcgcgccgtgctggacttcacggccatcgccaaccgcacccgcgtcgtcttccagagcaccttctaccacatgaagcccgacggcacgctctgcggcccgctcgtcgacgacgcctcgctcgtcggcctgcgcaagaagaagcccgcgcgccgcctcatgcagctcctgtaagcgctgcttccacgtgcactacgcccggacggaccgcgcaagcgatggtgtaatacggctggtatgtgttttttggtttggtgtgtgcgtgcgtggtatacgcgtgccgtgcgcgccctgtggctgtggctgcagtggcgtcgcgttgggtgttttcttgttgtgacgaagaaaaaagggtatgggttggggtggtccgctggccggcgcaccggggttttaatcaacttatattaacctgatgaaggtgaaggtgaaggtgacacgggattaatggc

SEQ ID NO: 113610 - DNA, 1193 bp, Zea Mays
ggcgcatccggccgtccgtccttccggagccccacgcgataggcggcaggagcggccgagcgggacacgcgttgcagttcaacaccgcagtggcattctcgctactgagactgagaggcagcctccctccctcgtgggcgttctaccgcgacgggggtcgctctataaagagcggacgcgcccccgctgctctgctcatcgtcctccgctccagcagctgccacagagacatcagagagcggtcctccttgtgagtctgagctgaagaggaggaggaggaggaggagaagcagcagcgcagccggaggagggagagcgaagatgcgccgcgtcgcgctgttgctcgtcgccgccgtgtgcgcgctggcggcgccggctgccgcggtcgtcactgacggtcttctcccgaacggcaacatcgaggacgaccactcgccgctccccgcctggatgatcgtctcgtccaaggccgtcaagtacgtggacgccgcgcacttcgccgtgccccagggcgcgcgcgccgtcgagctggtgggcggccgggagagcgcgctcgtgcaggaggtccgcaccgtgcctgggtggacctaccgcctcgccttcgccgtgggagactcgggcgacggctgcgcgggctccatggccgccgaggcctacgcggcgcgcgccacggtcaaggtgccctaccagtccaggggcaccggaggatacaagcgcgccgtgctggacttcacggccatcgccaaccgcacccgcgtcgtcttccagagcaccttctaccacatgaagcccgacggcacgctctgcggcccgctcgtcgacgacgcctcgctcgtcggcctgcgcaagaagaagcccgcgcgccgcctcatgcagctcctgtaagcgctgcttccacgtgcactacgcccggacggaccgcgcaagcgatggtgtaatacggctggtatgtgttttttggtttggtgtgtgcgtgcgtggtatacgcgtgccgtgcgcgccctgtggctgtggctgcagtggcgtcgcgttgggtgttttcttgttgtgacgaagaaaaaagggtatgggttggggtggtccgctggccggcgcaccggggttttaatcaacttatattaacctgatgaaggtgaaggtgaaggtgacacgggattaatggcaaaaatgctcctagtactatttttgtaata

SEQ ID NO: 113611 - DNA, 1802 bp, Zea Mays
ggcgcatccggccgtccgtccttccggagccccacgcgataggcggcaggagcggccgagcgggacacgcgttgcagttcaacaccgcagtggcattctcgctactgagactgagaggcagcctccctccctcgtgggcgttctaccgcgacgggggtcgctctataaagagcggacgcgcccccgctgctctgctcatcgtcctccgctccagcagctgccacagagacatcagagagcggtcctccttgtgagtctgagctgaagaggaggaggaggaggaggagaagcagcagcgcagccggaggagggagagcgaagatgcgccgcgtcgcgctgttgctcgtcgccgccgtgtgcgcgctggcggcgccggctgccgcggtcgtcactgacggtcttctcccgaacggcaacttcgaggatggcccgcccaagtcggcgctggtgaacggcacggtggtgtcgggcgcccacgccatcccgcggtgggagacgtccggcttcgtggagtacatcgagtcggggcacaagcagggggacatgctgctggtggtgccgcagggcgcgcacgcggtgcggctgggcaacgaggcgtcgatccggcagcgcctggccgtggcgcgcggcgcctactacgccatcacgttcagcgcggcgcggacgtgcgcgcaggcggagcggcagcggctgaacgtgtcggtgagccccgagtggggcgtgctgccgatgcagaccatctacggcagcaacggctgggactcgtacgcctgggcattcaaggcgaagatggacgcggtgacgctggtcatccacaacccgggcgtggaggaggacccggcctgcggcccgctcatcgacggcgtcgccatccgtgcgctgtacccgcccgcgctcgccaggcgggcggggggaaacaacctgctcaagaacggcgggttcgaggagggcccctacttcctgcccggcgcgtcctggggcgtgctcgtcccgcccaacatcgaggacgaccactcgccgctccccgcctggatgatcgtctcgtccaaggccgtcaagtacgtggacgccgcgcacttcgccgtgccccagggcgcgcgcgccgtcgagctggtgggcggccgggagagcgcgctcgtgcaggaggtccgcaccgtgcctgggtggacctaccgcctcgccttcgccgtgggagactcgggcgacggctgcgcgggctccatggccgccgaggcctacgcggcgcgcgccacggtcaaggtgccctaccagtccaggggcaccggaggatacaagcgcgccgtgctggacttcacggccatcgccaaccgcacccgcgtcgtcttccagagcaccttctaccacatgaagcccgacggcacgctctgcggcccgctcgtcgacgacgcctcgctcgtcggcctgcgcaagaagaagcccgcgcgccgcctcatgcagctcctgtaagcgctgcttccacgtgcactacgcccggacggaccgcgcaagcgatggtgtaatacggctggtatgtgttttttggtttggtgtgtgcgtgcgtggtatacgcgtgccgtgcgcgccctgtggctgtggctgcagtggcgtcgcgttgggtgttttcttgttgtgacgaagaaaaaagggtatgggttggggtggtccgctggccggcgcaccggggttttaatcaacttatattaacctgatgaaggtgaaggtgaaggtgacacgggattaatggcaaaaatgctcctagtactatttttgtaataaaaaaaaaagattttgaaaaatgtaaa

SEQ ID NO: 113612 - DNA, 2210 bp, Zea Mays
ggcgcatccggccgtccgtccttccggagccccacgcgataggcggcaggagcggccgagcgggacacgcgttgcagttcaacaccgcagtggcattctcgctactgagactgagaggcagcctccctccctcgtgggcgttctaccgcgacgggggtcgctctataaagagcggacgcgcccccgctgctctgctcatcgtcctccgctccagcagctgccacagagacatcagagagcggtcctccttgtgagtctgagctgaagaggaggaggaggaggaggagaagcagcagcgcagccggaggagggagagcgaagatgcgccgcgtcgcgctgttgctcgtcgccgccgtgtgcgcgctggcggcgccggctgccgcggtcgtcactgacggtcttctcccgaacggcaacatcgaggacgaccactcgccgctccccgcctggatgatcgtctcgtccaaggccgtcaagtacgtggacgccgcgcacttcgccgtgccccagggcgcgcgcgccgtcgagctggtgggcggccgggagagcgcgctcgtgcaggaggtccgcaccgtgcctgggtggacctaccgcctcgccttcgccgtgggagactcgggcgacggctgcgcgggctccatggccgccgaggcctacgcggcgcgcgccacggtcaaggtgccctaccagtccaggggcaccggaggatacaagcgcgccgtgctggacttcacggccatcgccaaccgcacccgcgtcgtcttccagagcaccttctaccacatgaagcccgacggcacgctctgcggcccgctcgtcgacgacgcctcgctcgtcggcctgcgcaagaagaagcccgcgcgccgcctcatgcagctcctgtaagcgctgcttccacgtgcactacgcccggacggaccgcgcaagcgatggtgtaatacggctggtatgtgttttttggtttggtgtgtgcgtgcgtggtatacgcgtgccgtgcgcgccctgtggctgtggctgcagtggcgtcgcgttgggtgttttcttgttgtgacgaagaaaaaagggtatgggttggggtggtccgctggccggcgcaccggggttttaatcaacttatattaacctgatgaaggtgaaggtgaaggtgacacgggattaatggcaaaaatgctcctagtactatttttgtaatatctcgtgctcctgcttctcctcgctcagatctccacctccacgtcgcgcgtccagaccttgttgttctcgatcgtagtccagttccaggttgttgatgccgttccggtggaggaagttcttccaccaccgacgaagaagccaaccgctcatatatactcgaactggactctattgtaatccggacaggacgatcaagcatctcctagcgtcttacggctccttgtaggggcaggtttggtttggcgctctgagtccaggatcagttcagatttgatgtcttccatactcagaagccgccagcacttttttttttgcaatatgacactgaattagcctttcaagtttgtggatccgtttctttcttcctcatgcaattcgagaagctacatgcatggtgattcttctgacccagataaaagatctagaggatggggttctatggtgaaaaatatgaatggagaggtattggtggctggggctggggacacaactcgacatgcttcatcggccctacatgcatggcgatgtgccattgtggcctacaagagcattcattcttcatgcaattcagttaggtttatcgcaaatcatattagaaaaaaaaatggatgccatggtgtttcatattcgagacatgatgcaatcagagttttctttttttaatgcctcgttatgtaatagagactgtaataaggtatctgattaattgtttagctatccatggagcttatattttttttttaaaaaaaaagattttgaaaaatgtaaactggctaacacgctatggctgaagcgcatgtgttgttttaaattgttcgccgtacgtgctccatttcacttctcaacagcactcttctcttatttgtcccatgagccttgcctacgggatctgaatcctccgtcgtgcggccgtctcctcctttctccatcgtaacactgcttcgtggtcgtggcattatcctgacaccggcaaccgccatgcggccctctcccttctccagcaggacgccatcttc

SEQ ID NO: 113613 - DNA, 1510 bp, Zea Mays
gcccccgctgctctgctcatcgtcctccgctccagcagctgccacagagacatcagagagcggtcctccttgtgagtctgagctgaagaggaggaggaggaggaggagaagcagcagcgcagccggaggagggagagcgaagatgcgccgcgtcgcgctgttgctcgtcgccgccgtgtgcgcgctggcggcgccggctgccgcggtcgtcactgacggtcttctcccgaacggcaacttcgaggatggcccgcccaagtcggcgctggtgaacggcacggtggtgtcgggcgcccacgccatcccgcggtgggagacgtccggcttcgtggagtacatcgagtcggggcacaagcagggggacatgctgctggtggtgccgcagggcgcgcggcgcctactacgccatcacgttcagcgcggcgcggacgtgcgcgcaggcggagcggcagcggctgaacgtgtcggtgagccccgagtggggcgtgctgccgatgcagaccatctacggcagcaacggctgggactcgtacgcctgggcattcaaggcgaagatggacgcggtgacgctggtcatccacaacccgggcgtggaggaggacccggcctgcggcccgctcatcgacggcgtcgccatccgtgcgctgtacccgcccgcgctcgccaggcgggcggggggaaacaacctgctcaagaacggcgggttcgaggagggcccctacttcctgcccggcgcgtcctggggcgtgctcgtcccgcccaacatcgaggacgaccactcgccgctccccgcctggatgatcgtctcgtccaaggccgtcaagtacgtggacgccgcgcacttcgccgtgccccagggcgcgcgcgccgtcgagctggtgggcggccgggagagcgcgctcgtgcaggaggtccgcaccgtgcctgggtggacctaccgcctcgccttcgccgtgggagactcgggcgacggctgcgcgggctccatggccgccgaggcctacgcggcgcgcgccacggtcaaggtgccctaccagtccaggggcaccggaggatacaagcgcgccgtgctggacttcacggccatcgccaaccgcacccgcgtcgtcttccagagcaccttctaccacatgaagcccgacggcacgctctgcggcccgctcgtcgacgacgcctcgctcgtcggcctgcgcaagaagaagcccgcgcgccgcctcatgcagctcctgtaagcgctgcttccacgtgcactacgcccggacggaccgcgcaagcgatggtgtaatacggctggtatgtgttttttggtttggtgtgtgcgtgcgtggtatacgcgtgccgtgcgcgccctgtggctgtggctgcagtggcgtcgcgttgggtgttttcttgttgtgacgaagaaaaaagggtatgggttggggtggtccgctggccggcgcaccggggttttaatcaacttatattaacctgatgaaggtgaaggtgaaggtgacacgggattaatggc

SEQ ID NO: 113614 - DNA, 660 bp, Zea Mays
ttttttttttgcaatatgacactgaattagcctttcaagtttgtggatccgtttctttcttcctcatgcaattcgagaagctacatgcatggtgattcttctgacccagataaaagatctagaggatggggttctatggtgaaaaatatgaatggagaggtattggtggctggggctggggacacaactcgacatgcttcatcggccctacatgcatggcgatgtgccattgtggcctacaagagcattcattcttcatgcaattcagttaggtttatcgcaaatcatattagaaaaaaaaatggatgccatggtgtttcatattcgagacatgatgcaatcagagttttctttttttaatgcctcgttatgtaatagagactgtaataaggtatctgattaattgtttagctatccatggagcttatattttttttttaaaaaaaaagattttgaaaaatgtaaactggctaacacgctatggctgaagcgcatgtgttgttttaaattgttcgccgtacgtgctccatttcacttctcaacagcactcttctcttatttgtcccatgagccttgcctacgggatctgaatcctccgtcgtgcggccgtctcctcctttctccatcgtaacactgcttcgtggtcgtggcattatcctg

SEQ ID NO: 113615 - DNA, 108 bp, Zea Mays
gatgcgacagactttttataaatattaatagattcaatattgaaaataaaaatataaatttacacagtaaattatatatgttacttgtttacaatcaaagaaagaaga

SEQ ID NO: 113616 - DNA, 1043 bp, Zea Mays
ggttgctttatttcctctctgccgtctccgtccccgggtcaaatcgaatcgagcccatccatctccatttccgccgccgccgccgccgagagaccccaaccccacccatccaccaccatgtggcgccgcctccacaccctagcccccgccttgcgcagggctaccgccgccgccgccggggcccctgcggcgtccgcctcctctgcagcccgcgccgccccgctctcctcggcggccgccgctttccgccgcaccagcccgctcctctcaggggacaagccggcgagtgtggaggacgtcatgcccatcgccacggggctcgagcgggaggagctggaggccgagctcaaggggaagaagcggtttgacatggatcccctggtcggccccttcggtaccaaggaggaaccatctgtagttgagtcctactataacaagcggatagtcggctgccctggtggtgagggagaggatgaacacgatgttgtatggttctggttgaaaaaagatgagccgcatgagtgtccagtctgctcgcaatactttgtgcttaaggtcattggtgatggtggtgatccagatggtcatgacgatgaagatgatggacatcactaaggatgccttgtggttctgaaaataagaatttggtgaggcagatgaatccaatacacttctttttctagaaccagactgctccacggcatccttgtttatgaaaagacagttggccatcaagcaggtggtagttttcacctaggtattttgtccaaacaaaagctgtttgagatttgacccttgcgtttctttaagagcatcgtcgaataaaagatgactgcagtcagattgctttcttttgatacctcatattggcccatcgggtgtgatggacatgtaatattcagtaatggaacagccccatttctatgcttagcgtgctgggaattttgcaaaaggcctcctatatcattgacgagttttaagccagagtttgatgatccaacatgtttatgaccattgttttaatagtcatgctattctgtgac

SEQ ID NO: 113617 - DNA, 1183 bp, Zea Mays
gcagcagcagcaagccaagcgatccacaagctagctagcttttcacttgagcgggcctcgcctcgctcgtcttaggttgtactcgcacttgcagctagcgttccagtggtggtggtggtggtggtgctcgattgatatctcgctaggcgaccggcggcggcggcggagaccgacgacagcatgagctatgggggcagctcttctggcgggcgaggtgggcggcgtgtggagtacgggcggacgtacgtggtgaggcccaaggggaggcaccaggccaccattgtgtggctccatggcatcggcgacaatggcggcagctggtcccagctcctggattctcttccactgcccaatgtcaaatggatttgccctactgcaccaacgcggcctgtcgcggctttcggtggattcccttgcactgcatggttcgatgtggacgagacttcactggacggccacgctgacatcgaaggcatggacgcttcagccgcgcatgtggcgaacctgctgtcctccgagccatctgatgtgagccttgggataggagggttcagcatgggcgctgccgctgcgctccactccgccgcgtgctacgctcacggcagattcaccaacggtgtcgcctatccgatcaacctcagggtcgtcgtcggtttgagtggctggcttcctagctccaggaccctaaggagcaagatcgagagctcgcagctcgcgcttcgaaaagcttccggcttgccaatcctgctcagccatggaatggccgatgaggttgtcacctacaggaacggcgagaggtcagctgagattctacggagctcgggattccagtacacctacttcaaaccctacaacgggcttggtcactacactatccctgaagagatggacgacgtcagcaagtggctgaggtcaacgctgggactctgagcggcctatctcgtggctaatctcaaagtcaaatacgttggcatacatagagaaagagagagagaggtattgacaatatgcagagggtttgataggctatgtgatttgtgagttgactgtcatggcttggtaggctgtaactccacgcgcttaatttctctcactgatacatatacataccatgttagtttaccggtaatgtaccctgttactaccactaaagaggatgcctgtaatgcagtatttgtattgc

SEQ ID NO: 113618 - DNA, 394 bp, Zea Mays
ggtttctctgtcaaatgaaggcaatcaagcatgttcatgacaatctgtttgaactgataaataaacaagaataaagacagctcccccacacaaatgtttttgaactgatcgagcatctagcatagtataggcatgatcacgtgtaccttcaaaaaaggaacctacttgttacccccacgatactacataattttccttgtgcaagaatctagcataatctgctacttgcatccctatctagcttacccgtacttaagcatcatcgatacaacaacccatggcaatctgctactccaaggtttagacagactatcaagcatacagagacatggcagtgccagacttgaagtgaaacaatgatggataggttatattcatagaaattagtgtctgc

SEQ ID NO: 113619 - DNA, 348 bp, Zea Mays
atgggggtggacgcgggcgacgagaggcgcagatccgccaacggtgccggggccaaggtggacggggggcggaggctgggtggttccatgcgcgagtgcggggagggtgcggatttagcagaggggagggcatgcacggggaggcgggggcacgctagctgtggacgcgagggaggaggcgtgcgcagcgagattagcggcgggcggcggggggagggcggagccgtggtgagggcggtggacgccctccttaccctcttaaggaatagtagagatacctgctcaaataatcctttaggtaggaaagtcaagatgttgtactttgtagtcgacacagaatttccctga

SEQ ID NO: 113620 - DNA, 279 bp, Zea Mays
atgaggaatagaagaagaaatagaggtagtagatacaccaggcaagccaagggaatgaaggaagaaaggctaggccaggaggtggcaggtgaggtgaagcaaaaagaggcctctagtggccagccggcgccggcccgctccctctcaagatacgacggctgggggcgcagcgacgaggaccctagcgcacatgataaccatctagtgctccccttcttgttccgcgagcgcgagcttcaacatgatgggccgagtgtagtggtcagaccggcggaggag

SEQ ID NO: 113621 - DNA, 2554 bp, Zea Mays
tctctcagcttctcgttgcgcaacctccccggtttcccagtcccgctcaccgccgccatcgccggcgcccatggcggcctcaccaggggcagacgaaccgctggagagctcaacagtggagcatcctgaggcggtccagccgccttcactgccgattgttgaggcggaaccgcctccgcctcttataggggcggcggctgcacatgaagcgatctctccgaagaagtcctcttccccttcgccgcatccggcgaacttggcggtcgaagtttctccagaggtggaggcctcttcctcgtctccgtccccgtcgtcttctccctctccatatccccaaatcatggaggtgttgccgggtgcgccgcaaccactgtctcctccacgtgcttctccgtctgttgcggcgcgtgcttcgacggacctctccattacagaggcgatgtcaatggcgtcccaggaagcagctcgcccacccccgtcccccgagtctacggacgcgcacttgcacaccgcgtccgcgctgccgacgtcgctgatggagattgggcctggagtgttggtgccacagcagcagccgcgaccaccatctccggaaatggcccctccactatgtgattattcagagtccgcacagccatcgccgctgtgtcatccggatggatgcacaggcgcctcgccagacgcaccgatggacgaggtaatgacaggaacgtcaggaaaagcagctgggccgtcgccaggtgaaaactcggagttagcacagtcacagctgccgcatcttccagctgaaaacacatatgtctgttcaaatgcagcgggcaagatatcagcagtgacttcagaagaaggtactcagcctgcgatggcgtcaattgatggtgaggggccattagagattggggcgcagagatcattgcaggagctagaggagacaacaacatccttcaagatggaagctgagccttgttcgccggagatggctcctccagggtttgaagattgtaagtctcaatggttgccactgtcacatcctaatcctctggttgaatccacacacactgtggtacaagtgactactaccaatgccatgggaacgactccagatgcagcaactgggtcactgtcttcacctcgcctacttccactgttgaagagagatacagaggggcaaacacttccaagatcatgctctccaacaacagaagctgcaccatgttcaccagatatgccacctccaggctttgagaattgtaagtcatcgtggctaccactaccaactcttcaacccatagctgaaaccacgcatgtgttgcacgacgtggctcccaccaagtcaatggtagtgggacttatggaaaaggcatgctcagtgctggcattggagcggacagatgtgaagatagactcggagcagagcctattgccgccattggagagtgaaactgagagttcattgcaagggccactgccaaggtcaccttcttccatgatgaaagccattccctgttcaccagatactgcacctccagggtttgaaaatttaaagttcacacagttacagcctccctgtccacctctggtgcagactgcacatgttttgcaaaattcagccaataatgaggccatgcctgtgatatcaaaggaagctcctcagccattgcctgcattggatgcaacggatttagacattgatgccaaacctgtcctggcaccaccatcagagagtaaaccagggcaattgtcaccggaacctccccttctgctacctcatgtagcacagcatacaacgtgttcgccagggatgacacttttagggtctgagaatatcgagtcctcgcagctgctgccacgagctctggttcttcctcttgatcagacttcagacatcttggctgatgcagggaccaagaagacagtcacaatggaagaagtgtgtcatccgctgcctgtagcaggagtggcggaagaagccaataggtctgttcttctaccagtaacggaaaatggctgtgagggccaatcaccacacctagagctacagacttcttcccctgcagtgaatgctgcagctacatcactggagatagctcccggaagttttgagaattcagagtcctctcagttgatctctccttgtctagctcagacaatagaccccactactcatgcatcaggtattatgcctactattgttaagtcagagaaaacgaatctgccactatcttcattacaggctacatgcacagacatggaaagtgcaatcctgtgtcagtcgccatcgaagagtgaagagagatcactgccacaggcagagcaacacccgtcttctccatctgttaaggacactacttgttcaccagaggttgcacccccaggttatgaaaattttgactctttggatcagctgccaccatcaccacctctttgctcaaaatttggtcagtatttttcatctttctgcagacttacttttctttgtttttacttagtaattttgtggtcatctatctggttcatggcttataagttaaatgtaatcagaacaaacctttga

SEQ ID NO: 113622 - DNA, 889 bp, Zea Mays
gtaacttgcacagaaattggtcaaatggtatgcggatcttgtcgtcagcttgttgcatatcctacgggtgctgttcatgttcagtgttttggttgcttgacaataaatcttgtactggaaggaacgcaatgttcggccacggatattgatggaacagagtgtctcacctgcggcacaagaggaggttcactagagagctaggtcaggctttaacaacggctggtagtggaacctagatgatatcgctcgtagtaactccagacgctgccatggaaaactcgcaagtcatccggcatgatcctgtagctgtaacctcaaatggcctgtggtctgtggaagtgtggagtggcaccttcagatgcagcctgtagtttagggatgaaaaaggcggatgcagtatggccaggatcaactgctaagcgaaaagattatatccagccgtagccttatcatagggaagataaactgcttaagctcggctgtaactggagcaggttaatcatggttgacggtacggtggtctcagatgatcctcaagttaagtatttgttggggacgagcagagtgcttcagtgcttgggtttgtctacgaaccatggaacaacccacttgtatctttagcgtcacagcacaatcacaagcgctgttgtggcccttcgagggcaacaggaggtaaaaaagtactttatgaaggtaggaatatttggtagcatctcctctctttttttgacaaaagggaaattcattcatttgtcatgagcacaacaaactccattctaagttttgaagccaattggatgttacaacgttgagattgtgctaaagcttgacaagaataaagacaatctcctgtaattgatgccctgccttgcctgttttgttaaactgt

SEQ ID NO: 113623 - DNA, 781 bp, Zea Mays
atcggaaagatttccactgggccgtctagataacaagcggccccaccacaccgctgcagtcgccgtgctcgcgcatggagcttggaggcggagggcgaggcggcggcgaccgggtccggcggcagttgcagtcggtggggcggctggcagcgtatctcggcggcggtttcctcctcctctccgccacctcttccgtcgccgtccgcgccctccgcgccatctccgacgccaaccagaggaagttcgcgaagccgtgcggtgcctgcgaggggaagggcagctactcgtgcaggctctgcaggggcagcgccaccatcgagtggtctccgatgcacgacccggtgttcgtgaatccgtgcctctgccctacctgcgatgggactcgggtgcagcgctgcttgaactgcctgggaaatggttacgcttgaagaagcgatgtcagttttcattatcgatgatagatggttgttggggagttggtaaggaaacaattggaaatttactgatgaattcgttgccttgtgtgattataattgctgtgagtctatgatttttgggtctgtttatgtcgttctgtgactatgaattgtgggcatgatgctaaatttacaaatctctcgttgaagagtcacagttggaactttagccattagtacagggaaagtaaagctgttctttcttgctgttgcttagtgtacctgacggattgttaaaactgaatagtttttgttgggaatttctgtgaagggaagagagtgtggaatcaactcaagctgaaagg

SEQ ID NO: 113624 - DNA, 1274 bp, Zea Mays
atcggaaagatttccactgggccgtctagataacaagcggccccaccacaccgctgcagtcgccgtgctcgcgcatggagcttggaggcggagggcgaggcggcggcgaccgggtccggcggcagttgcagtcggtggggcggctggcagcgtatctcggcggcggtttcctcctcctctccgccacctcttccgtcgccgtccgcgccctccgcgccatctccgacgccaaccaggaagttcgcgaagccgtgcggtgcctgcgaggggaagggcagctactcgtgcaggctctgcaggggcagcgccaccatcgagtggtctccgatgcacgacccggtgttcgtgaatccgtgcctctgccctacctgcgatgggactcgggtgcagcgctgcttgaactgcctgggaaatggttacgcttgaagaagcgatgtcagttttcattatcgatgatagatggttgttggggagttgggaagagagtgtggaatcaactcaagctgaaaggtttctgttgggattttgtgtcaaggcaaaagattgccgtttcaactcaactcaaaatgagagataacgggtgaaatggaagtgatatgcttccatgtatccccttatgtgcaagagtccagaagtacaatttctatttgtcaggggaagctgtactcctatagatggttgttatgaagctcatcgtgggccatgcgtacatgccaagatcatggtgtcaagccgttggatgatttctcctatatgttagtttacgaaatagttgattgcatctttgtagtatgtatcttcttggctgtgtttattctaaccacataacaatggtttgttttgcttcaactgaaaccgaagacctgtcgggaaatgagagatgcaggtcaattaatccgattctgatgtctgtatccttaatgacctctcatgttgaaggaaaacgaaagatgcggggctgtacaactattaacactgacagcaacattatgtcttgttttcagacttcttacaagttgtacaggcaagtattcgtcgtcgttgtgcaagaatagtctgaagggtgatgtctagtgcccacagagagaatttaatagagccattccatctgaaagatgtccagatatgtggcgggatgccctgtgaatgatgtcagtgttctttcatctgacgaacatcacttgcatttatgttttggccctttttttctgagggtggatttgtttacgcaacacaaacaaaaaaaaaatataccattgtgtgcactcgcaatc

SEQ ID NO: 113625 - DNA, 1276 bp, Zea Mays
atcggaaagatttccactgggccgtctagataacaagcggccccaccacaccgctgcagtcgccgtgctcgcgcatggagcttggaggcggagggcgaggcggcggcgaccgggtccggcggcagttgcagtcggtggggcggctggcagcgtatctcggcggcggtttcctcctcctctccgccacctcttccgtcgccgtccgcgccctccgcgccatctccgacgccaaccagaggaagttcgcgaagccgtgcggtgcctgcgaggggaagggcagctactcgtgcaggctctgcaggggcagcgccaccatcgagtggtctccgatgcacgacccggtgttcgtgaatccgtgcctctgccctacctgcgatgggactcgggtgcagcgctgcttgaactgcctgggaaatggttacgcttgaagaagcgatgtcagttttcattatcgatgatagatggttgttggggagttgggaagagagtgtggaatcaactcaagctgaaaggtttctgttgggattttgtgtcaaggcaaaagattgccgtttcaactcaactcaaaatgagagataacgggtgaaatggaagtgatatgcttccatgtatccccttatgtgcaagagtccagaagtacaatttctatttgtcaggggaagctgtactcctatagatggttgttatgaagctcatcgtgggccatgcgtacatgccaagatcatggtgtcaagccgttggatgatttctcctatatgttagtttacgaaatagttgattgcatctttgtagtatgtatcttcttggctgtgtttattctaaccacataacaatggtttgttttgcttcaactgaaaccgaagacctgtcgggaaatgagagatgcaggtcaattaatccgattctgatgtctgtatccttaatgacctctcatgttgaaggaaaacgaaagatgcggggctgtacaactattaacactgacagcaacattatgtcttgttttcagacttcttacaagttgtacaggcaagtattcgtcgtcgttgtgcaagaatagtctgaagggtgatgtctagtgcccacagagagaatttaatagagccattccatctgaaagatgtccagatatgtggcgggatgccctgtgaatgatgtcagtgttctttcatctgacgaacatcacttgcatttatgttttggccctttttttctgagggtggatttgtttacgcaacacaaacaaaaaaaaaatataccattgtgtgcactcgcaatc

SEQ ID NO: 113626 - DNA, 788 bp, Zea Mays
cctgtccgtccccctcttccccccaccccatgtcaacggccaccgcgccgtctccgtccccgtccccttctccctcgtctggaactcgccctctgctccggatcggcgcggcccgtcgtttcgccatggcatttccgccatgggcggctctgctctttgcgggggttctggtggtggtgttggcggcggcgggagcggaagcgggaggagggagcgtctgcttcgaccggatgttcagcttcggagactcgctcacggataccggcaacttcctgctctccgtgcccgatgacttcccggaccccgcgcggaaccttccctacggccagaccttcttcggccgcccctccggccgttactccgacggccgcaacctgctcgacttcttcgcggaggcatttgggctgccgtatgtgccaccatacctaggcggcggggacttccagaatggtgcaaactttgcggtcggcggggcaactgccctcaatggctcgttcttccgtgaacgcggcgtggagcctacatggacgcctcactcccttgatgagcagatgcaatggttcaagaagcttctcacatccattgcaccgttggagacaggtaagtgacttcctgagttatctgtttggtcacagttcctttttctgcaaggtgattgatgaaatggaatcattacttgttaacagatttagtaataatgtcagtgaaacatctgattggtgactttggcattatgctaataaatatgacgaagtagttgcaggcatgctgaaaaacatgctgcctaa

SEQ ID NO: 113627 - DNA, 1809 bp, Zea Mays
cctgtccgtccccctcttccccccaccccatgtcaacggccaccgcgccgtctccgtccccgtccccttctccctcgtctggaactcgccctctgctccggatcggcgcggcccgtcgtttcgccatggcatttccgccatgggcggctctgctctttgcgggggttctggtggtggtgttggcggcggcgggagcggaagcgggaggagggagcgtctgcttcgaccggatgttcagcttcggagactcgctcacggataccggcaacttcctgctctccgtgcccgatgacttcccggaccccgcgcggaaccttccctacggccagaccttcttcggccgcccctccggccgttactccgacggccgcaacctgctcgacttcttcgcggaggcatttgggctgccgtatgtgccaccatacctaggcggcggggacttccagaatggtgcaaactttgcggtcggcggggcaactgccctcaatggctcgttcttccgtgaacgcggcgtggagcctacatggacgcctcactcccttgatgagcagatgcaatggttcaagaagcttctcacatccattgcaccgttggagacagagcaaaacaaaataatttccaagtcacttttctttgtgggagaggtcggtggaaatgattacaaccatttaatcgttagggataaatctgttgatgagctacatgaagttgttcctaatgttgttggtgccataagctcggccatcacggatcttataaatcttggagcaaagaagttagttgttccagggaacttcccaatagggtgcgtcccattatatcttgcaatctttcagagccaaaaagaggattactatgaggaacaaacaggctgcattaagtggctcaatgattttgctgagtaccataataagatgcttcaggaggagttggagaaactcaggaatcttcaccctgatgtgaccatcatttatgctgattactatggtgctgcattgaacatattccgtgccccactccagtttggtttcacagtcccattgaatgcgtgttgtggaagtgatgccccatacaactgttccccttcaatattgtgcgggcgtcctggatctacagtgtgtcctgacccatcaaaatacatctcatgggacggcttacacttcactgaggcgagttacaaagttgtcattcaaggagtacttggggggtatgccaagcctcccctttcagaaacctgcaagggtgcggaattcaaagtttctcagcttcaccaatgtacagataatccaacaaacactgtgtcatacgatgctttgagctcttttatttgatctgctcgtaaaagaagtgcatttagagttacagtgggcagcatagatgatgttgcaggaccgaacatcttggacactttctcaaagccgagaagagatccatcgatgtagggtcattcagttctacaatctacaatccacttggctgctgggaggaggagaaaaaatgggaggggagtttgtagtgcagaaatttgcgattgcttagtgcactactttgctctgctatgtttttcttagcagcttactgctgcaggctgtagaagggacaacgaaagttgacagtctctgcaggtggtcatactactatataggaacctagatcttttaaatcagctcctgagggaaatgtatgcagtacttgatatggtctcaattgccttttaacggatacaagcatatatacattgtagcttcattgattcaaattgtctcgcttgatttataatgtaaaagtattgttcgaaataaaaaaaaa

SEQ ID NO: 113628 - DNA, 1793 bp, Zea Mays
cagaaaccttgctagcagatcatttgccctagctagctctgtccccaaagactagcttttgtcgtggcgccatggcggattggcaagaccaagccaagcccatgatgcaaaccaagttctctagctgtcgtggcgtctccttcgaactcaatgcgtctccgggcagcccgttcgccctccaagccgtcgattattatccgacccagccgccgccggacgccccgaccccgacgatcgccggccggtgggtctggctgccgcagacgtttagccgtgcctcctccaggatctttccttccacttttgacaggaccctgagccgcgcgagcagccacttctgcgacctcgatgaagaggacgcggacgatgaacccgtcgtcaacggtgccgacgtggagatggctatcgccacgtcagctgtggctgtcggcgatgacgtgccgggaaagaaggcgaacgctccagcgccggcgaagccgccggcatcgtccgcgcgctcgaggctcggtgtcatactgctggaccagggcctgttcaccgtctacaagcgcctcttcgtcctgtgcgtcgcgctgaacgcggtgggcctcgtgctcgccgcgacggggcactttccttacgccagggcgcatgcagccgtcttcgccatgtacaacatactggcgctcacggtgtgccgctccgaggcggtgctccgggtcgtgttctggctcgccgtcgcgctcttcggccggccgtgggtgccagtcgtagtgaagaccggagtgaccgcgatcctgcagtcgctaggtggcgtgcacagtggctgcggcgtgtcgtcgctggcgtggctggtgtacgcgctggtacaggcgctccagcaccgggacgtgacgccacgagaggtcgtcggcgtggcgtcggccatactcggcctgctcgcgctctcgtgcatggccgcgttcccgctggtgcgccacctgcaccacaacgtgttcgagcgcacgcaccggttcgccggctggacggcgctcgcgctgctgtgggccttcgtcgtgctctctgccggctatgacccagcgaccgcctcctacgaccggctcaccggttccgtcctcgtgaagcggcaggagctctggctcactgccgccatcactttcttcaccttcctgccatggctcaccgtgcggcgcgtgccggtcacggtcgccgcgcggtctaaccacgcttccgtcataaacttccagggcggcgtcaaaggtgggctgctcggccgcatcagccgctccccgctctccgagtggcacgccttcggcatcatctccgacaatgggcacacgcacgccatgctcgccggggcggtgggcgacttcacccgggctctcatatcggaccctccaacgcgcctctgggtgcgcggcgtccacttcgccggcctgccctacctcctcaacatgtaccggcgagcgaccatggtcgcgacaggctccgggatatgcgtgttcatgtccttcctgatgcagcctggcccggccgagctatcgttggtgtgggtcgccaagggcatcgacgcgaactatggcgaggagatgaagtcggcggcgtacagcagtgagaggctccgcgggcgggtgatcgtgcacgacacggcgttgttggggcggcccaacgtggcggcgctagccgtggacgcggcgcggcgttggggctcggaggtggtggtagtgaccagcaacccggaagggagcagggacgtcgtcgcggggtgtaacaaggccggcatcccggcattcgggcctatctgggattcttga

SEQ ID NO: 113629 - DNA, 1102 bp, Zea Mays
agtctgcatcaccaactattccactagtaggtctaaattagtagccaagatgacgtcagcagcatcgttccccagcagcctcttccccttcccgaccagagcaagcacgccaccgcttccgtcgtcgtcctcccgaccgtctcactcccgcccccacctccgcatccgatctccgaaacctaataatccaacggtcgcgcccgcgtcctctcggatggaggtggcccagccccaggcgagcaacgcccagggaggggcggagccggccatgaagctactgttcgtggagatgggcgtcggctacgatcagcacggccaagatatcaccgccgccgccgtgcgcgcctgcaaggacgccatcacctccaactccatccccgccttccggggcgggtccattccaggagtgaacacggaccagatgaagctgcagatcaagctcggagtgcctaggtcgacgcagcacttgctggatgctgagagagtcaaggccgtcttcccctatggcaagataatcagctttgaggtcgttgacggtggcatgatctgttcaagcggcgtgtgcctggaagcaatgggggataagaacgatgactgctacatagtcaacgctgcagtgtatgtcggctactgatgtactgtagtacctggaatggaacagtagagattggttatggttcctccgttatagaaaaaaaaaactgctacctccgtcctaaaataaaatagttgatattttttcttcatagaagccaaatattgtaaactttgactaaaaattactccctccaattttttttatttggcgttttgtagttcagttttgcactatttggcgttaaataaaaaaaggatgtaggtagtataaaatactaatatttataactggatagatctttgaacttatttttgtaataaacttatttattaaagatataaatattgctgatactttctacaaatatagtcaaaggtagttaaaaaaaattgtcgacacgaatattctaacaataataactattttagaacaaacggagtatcacgggatgtttttttgtactgcaacaagccaataagcaagaagttgctatcaacattccca

SEQ ID NO: 113630 - DNA, 1247 bp, Zea Mays
agccgtcggctcggctcgtttcgtctcttctggtgcgacgacctgattcactactccgctacgccgcattcggatccggccctgagcctttcccgatcccgcccgcttccctgcaccgctcggcacgatccgcccccgctccccgctcccggctccacgaccggtccgccgtcgagctcccggcgcttctgcggccggcgccatggcgaccggcggcggcaacgagcagccgccagcggaggccgagccgctggagctcgtgctgttccaggtcgccgagtgctacgtctacctgataccaccgaggaaaacgtctgcctcctacagggcggatgagtggaacgtcaacaaatgggcatgggaaggggcgcttaaggttgtcagcaagggagaggaatgcatcattaaactggaagataaaaaaacaggggagctttatgctagggcatttctcagagagggtgaaccacatccggtggaacctgtaattgacagtagcagatattttgtactacgtgttgaagagaatatagatgggcgtcagcgccatgctttcataggtttaggcttccgggaaagacctgaagcatatgacttccaagctgccctacatgatcatatgaaatatttaaacaagaagaaggcggctgaagagatgattcagcattatgagaagcaatcttcagtggattacagcctcaaagaaggggagacattggttcttcagcttaaaaatgaaacaggcaccaagacaaaatcgacattttttgagcaaggcctaaacaagctctccgttaacgaaaagacaagcgccaaggaggcccccgtctcccttaaactcccaccaccaccaccttcgcctgtctcaccgacggattctggagtcgctgcctcgcctttcaaagcagaatttccttcccaagagcaaccacctgctgaacccgtcagcagaaccagcgctctcccctccaaaggcgaacctgctccagagctaccggctgctgcagagaagatgaaggagcaagaatccgtggatgaagacttcggggacttccaggctgccgggtgatatcatgtatcttgtacatacatcatgttaccgagactttttttctttctttctttctatttttggttttcaatcagctgtggcttctgccggcactctgttcctgtatagagagcttccatctcataacctacatacaaatacatggacaaacgttgtacccttttcttcgagtttc

SEQ ID NO: 113631 - DNA, 1340 bp, Zea Mays
agccgtcggctcggctcgtttcgtctcttctggtgcgacgacctgattcactactccgctacgccgcattcggatccggccctgagcctttcccgatcccgcccgcttccctgcaccgctcggcacgatccgcccccgctccccgctcccggctccacgaccggtccgccgtcgagctcccggcgcttctgcggccggcgccatggcgaccggcggcggcaacgagcagccgccagcggaggccgagccgctggagctcgtgctgttccaggtcgccgagtgctacgtctacctgataccaccgaggaaaacgtctgcctcctacagggcggatgagtggaacgtcaacaaatgggcatgggaaggggcgcttaaggttgtcagcaagggagaggaatgcatcattaaactggaagataaaaaaacaggggagctttatgctagggcatttctcagagagggtgaaccacatccggtggaacctgtaattgacagtagcagatattttgtactacgtgttgaagagaatatagatgggcgtcagcgccatgctttcataggtttaggcttccgggaaagacctgaagcatatgacttccaagctgccctacatgatcatatgaaatatttaaacaagaagaaggcggctgaagagatgattcagcattatgagaagcaatcttcagtggattacagcctcaaagaaggggagacattggttcttcagcttaaaaataaggaaacaggcaccaagacaaaatcgacattttttgagcaaggcctaaacaagctctccgttaacgaaaagacaagcgccaaggaggcccccgtctcccttaaactcccaccaccaccaccttcgcctgtctcaccgacggattctggagtcgctgcctcgcctttcaaagcagaatttccttcccaagagcaaccacctgctgaacccgtcagcagaaccagcgctctcccctccaaaggcgaacctgctccagagctaccggctgctgcagagaagatgaaggagcaagaatccgtggatgaagacttcggggacttccaggctgccgggtgatatcatgtatcttgtacatacatcatgttaccgagactttttttctttctttctttctatttttggttttcaatcagctgtggcttctgccggcactctgttcctgtatagagagcttccatctcataacctacatacaaatacatggacaaacgttgtacccttttcttcgagtttccatctcataagtcaacctacgagggaggaggaagaatgaaagcaagaggagctacctcctccatcctttgggggtgtttggtccctgatt

SEQ ID NO: 113632 - DNA, 1104 bp, Zea Mays
cgacctgattcactactccgctacgccgcattcggatccggccctgagcctttcccgatcccgcccgcttccctgcaccgctcggcacgatccgcccccgctccccgctcccggctccacgaccggtcgccgagtgctacgtctacctgataccaccgaggaaaacgtctgcctcctacagggcggatgagtggaacgtcaacaaatgggcatgggaaggggcgcttaaggttgtcagcaagggagaggaatgcatcattaaactggaagataaaaaaacaggggagctttatgctagggcatttctcagagagggtgaaccacatccggtggaacctgtaattgacagtagcagatattttgtactacgtgttgaagagaatatagatgggcgtcagcgccatgctttcataggtttaggcttccgggaaagacctgaagcatatgacttccaagctgccctacatgatcatatgaaatatttaaacaagaagaaggcggctgaagagatgattcagcattatgagaagcaatcttcagtggattacagcctcaaagaaggggagacattggttcttcagcttaaaaataaggaaacaggcaccaagacaaaatcgacattttttgagcaaggcctaaacaagctctccgttaacgaaaagacaagcgccaaggaggcccccgtctcccttaaactcccaccaccaccaccttcgcctgtctcaccgacggattctggagtcgctgcctcgcctttcaaagcagaatttccttcccaagagcaaccacctgctgaacccgtcagcagaaccagcgctctcccctccaaaggcgaacctgctccagagctaccggctgctgcagagaagatgaaggagcaagaatccgtggatgaagacttcggggacttccaggctgccgggtgatatcatgtatcttgtacatacatcatgttaccgagactttttttctttctttctttctatttttggttttcaatcagctgtggcttctgccggcactctgttcctgtatagagagcttccatctcataacctacatacaaatacatggacaaacgttgtacccttttcttcgagtttc

SEQ ID NO: 113633 - DNA, 816 bp, Zea Mays
ttttcgataaggaatccaattcatttcctgcgatcatcatttttgtgattatccttccaatatcttctttacatgatgcactggttttcctctatgattgtttttctcttacattagcaaagatatttaaacaagaagaaggcggctgaagagatgattcagcattatgagaagcaatcttcagtggattacagcctcaaagaaggggagacattggttcttcagcttaaaaataaggaaacaggcaccaagacaaaatcgacattttttgagcaaggcctaaacaagctctccgttaacgaaaagacaagcgccaaggaggcccccgtctcccttaaactcccaccaccaccaccttcgcctgtctcaccgacggattctggagtcgctgcctcgcctttcaaagcagaatttccttcccaagagcaaccacctgctgaacccgtcagcagaaccagcgctctcccctccaaaggcgaacctgctccagagctaccggctgctgcagagaagatgaaggagcaagaatccgtggatgaagacttcggggacttccaggctgccgggtgatatcatgtatcttgtacatacatcatgttaccgagactttttttctttctttctttctatttttggttttcaatcagctgtggcttctgccggcactctgttcctgtatagagagcttccatctcataacctacatacaaatacatggacaaacgttgtacccttttcttcgagtttccatctcataagtcaacctacgagggaggaggaagaatgaaagcaagaggagctacctcctccatcctt

SEQ ID NO: 113634 - DNA, 606 bp, Zea Mays
tgtgcaggcatccctctcattcaatttttatagctacatttgtctttatgtaatgtttcctgagtgtttgactttgcttttattctgcgcagaaggaaacaggcaccaagacaaaatcgacattttttgagcaaggcctaaacaagctctccgttaacgaaaagacaagcgccaaggaggcccccgtctcccttaaactcccaccaccaccaccttcgcctgtctcaccgacggattctggagtcgctgcctcgcctttcaaagcagaatttccttcccaagagcaaccacctgctgaacccgtcagcagaaccagcgctctcccctccaaaggcgaacctgctccagagctaccggctgctgcagagaagatgaaggagcaagaatccgtggatgaagacttcggggacttccaggctgccgggtgatatcatgtatcttgtacatacatcatgttaccgagactttttttctttctttctttctatttttggttttcaatcagctgtggcttctgccggcactctgttcctgtatagagagcttccatctcataacctacatacaaatacatggacaaacgttgtacccttttcttcgagtttc

SEQ ID NO: 113635 - DNA, 139 bp, Zea Mays
cactgaatcacgtccatcgacaggtatgcgtaattttgtattgtccatcctatccaaggaaaacaaaatcgacggttttcggaaaccggtgatttgttttttaaaaaataaatttcgaacaaaatttttaaaaaactaa

SEQ ID NO: 113636 - DNA, 3471 bp, Zea Mays
ggggcgatggcgctcaacatgaagaccctgacgcaggcgctggcgaaggcgtcggctgtcatcgagaagacggtgtccacgacggtgcaggaggtgacgggcccgcgcccgctgcaggactacgagctgctggaccaggccgggtccggcgggccgggactcgcgtggcggatctacacggcgcgaccgcgggacggcgccccctcggcgccctaccccgtcgtctccgtctgggtgctcgacaagcgcgccctcgccgaggcacgggcgcgggcggggctgtcgaaggcggccgaggacgccttcctcgacctcgtccgcgccgacgcggcgcggctcgtgcgcctgcgccacccgggcgtgctccacgttgtgcaggcgcttgacgagaccaaggccgccatggccatggccactgagcccgtcttcgcctccgtagctaacgcgctcgggtgccttgacaacgtcggcaaggtgcccaaggagctcaagggcatggaaatgggactacttgagattaaacatggactgctacaagttgcagagacgttagattttcttcataacaatgctcatcttgcccatcgagctatatcgcctgagacggtctttataacttctaacggatcttggaagcttggtgggtttggttttgctctttcagttgatcaagccacaggtggtttgacttcatcacagctattccattattcggactatgatgtcgaggatacagctttgcctcttcaaccgtcgttgaactatactgcaccagaattggttcgaagtggagattctaaagttggctctgcttgtgacatgtttagctttggatgtctagcttaccatctggttgctcgtagaccacttctggactgccataacaatgttaaaatgtacatgaatgccttgacatatttaacaagtgaagccttttctaatattccttctgatttggtatcggatttgcaaaggatgatatcgatggatgcagtatcgcgtcctagtgctgtggcctttacaggttcttctttcttccgggatgatacgaggttgcgcgctcttcgtttccttgaccatttgcttgagagagataatatgcagaagacagagtttttgaaggcattatcagatatgtggaaggattttgattcccgagttcttcgatataaagttcttcctcctctttgtgctgagttacgcaacatggttatgcagccaatgattttgcctatggttctaacaatagcagaatctcaggataaaggggattttgaacttgcaacactgcctgcgcttgttccagtgtttacttcagcatcaggtgaaactctacttttgcttgtgaagcatgcagatctcatcattaacaaggccacacaggaacatttgatatcacatattcttccaatgctggttcgggcttatgatgacaatgatccccggttacaggaagaagttctgcgtcgaacagtatcactgtctcgtcaacttgacaccaagctagtcaaacaggctgtgcttcctcgtgtacatggattagctctaaagacgacagttgccgcggtgcgcgtgaatgcgttgcgctgtttaggagatcttgtgccatccctggacaaagaaggtatattgggtatcttggagacggttcggcgttgcacagctgttgaccatactgcgccaactcttatgtgcacacttggtgttgctaatgcaatctataaacaatgcggtgtggagtttgctgcggaatatgtgattcctctcatcttcccattactcacagcacatcaactgaatgtacaacaatttgccaagtatatgctatttgtcaaggacattacaagcaagatcgaagagaagcgtggtgtgactgttacagataatgggaacacagaggtaaaagcatcaccttcattggcaaacgggatccattctgaacctatgccaggacaaataccagctgcaaagagcagccctccatgggatgaagactggggtccttctaagaaaaccggtgttccatctctctcagttgattctagtgcacagacaaagcaaccctcagtacacccttttgacttcagtactcaaacaaagcaatccacaccactcccctttgatttgagcacccgagcaaagcagccatcattagtttctcatgctacagcagctacaatcccacctgcgcaaccacaaccagtacaatctcttgtgcccagttcaggacctcaaacttctggctcatgtgcccctgttgacattgagtggcctcctcgaagaagctcgtcatccgacttcaatgcatccttgtctattagcaaggagaatgaatctggaaggctatctagcgacggacttgacgatattgatccttttgctgattggcccccaaaacctagcaatgttactagcattacagcaaccgagcatcgtccaagcataaatcaaaatatttctggatttagctcaggtaacatagggtttggtggcagcgggaattctatagggcaagcgaaaagcaaccaaatgagctggtcaaacacgcctaatctgatgggcatgaactcaactggcagctatttgaatcagggcagtgcagctctaggttttggaaatccaattggaggattgagcactggcctctccaatccaagcagttccagtacaggcctgagcatgatgcaaccaaaatctgattttggatcactgtccatgtctgccaataatgccgcaaatggcccacccagacttgcccctcctccatctacttcagttggaagagggcgtggtagaaatcaaggacaatcagcactctcccgagcatcaaggcctcctcattcgaactcgtcatcaggacaacaacctatcctggatttactttagtaagagaggcttgcctctattcttggcgatgacgattgtcaatgtgtacatcttcaaacctttgtaaggtgagcatcatactgttcttttggacatgcatgtggtgaaagcatatatatatattttgttcatttcgaagctggctggccttggtttatagtctgaaggagttctacttcggggaatctggaccttgcagaggttaccttctctcatgcgtagggttttgatttgggcattgaggctatcttcatattggtgacagaagaaatgtcgttgtgtatgtttctgtctaaaatcggctgtagcttgtagagttgatgaatatagttgacatgcttatctggactgtgaagttttgaatgtttacataatgtttcatgtgccttatatgtggtccctgcccattttctccccgctccccaacatcatgtaattcattagttaaggctcgtgttgtgtatacttagtctgtcgagtttaaggccaatcggcaattctgcttctatacagttgtttggttgctggtaggatcaccactgttatgttatgataccccacaactgtgtgaagtcgatcttcatg

SEQ ID NO: 113637 - DNA, 3124 bp, Zea Mays
ctcctcctccctgagggctgaggatatccttcaatacatccacctcacgaggaatccgcactcgcgtttgctccgcaatttattgctcagggttcttgctgggtggtggtggcggcgggtggtgcaagcagtactcgttcacaagagcaagctgtttttgtgtgcgtggttttatgcctgcttgcttggcgaggggaagaggaggcggcggagtactgggagttgaagggtgcaggtaccggcattgctgaggcggcgtggggagatccggcgatgtcggaggccgaccggatacgccaccgcacggcggcactggtgctgcacgacgatgaggtaagagacaaaccggacgccaaggcgaacgtcttcgcggatctcggctcgccggtgtcgccgctgcgggcgcgggcgagcgtggcgacgtcctcgtcctcgtcctccgggtcggccaagtcgccggcgccgtcgaatgctgggatggcgggcgggaggagccactccggcgagctggtgggcgagtgcaatccgccgcggctgatggcgcacaggcggtccggatctggacagttaatattctctggcggcagcagccgggggagcggcggcggcggcggggaccgtgggagcacggcgagctcgccgatactgaatgcgctcccctccgggaacatctgcccttccggccgtgtcccggcaacggccgctccccctccgccgcgctcccgcccggacgtgctcggatccggcaccggccactatggccacggaagcatcatgcgcggcgccggcatggcccccgccaggagcagcattgactcctcttcgttcctcggacactcctcgaggtcgccggcaagctttccggcaagcagtgggagcctccaggaggtgacccgcttggggaacgagtggtacaaaaagggtaagtacggggaggcactgcggcactacgagcgcgccgtggcgctgtgtcccgagagcgccgcatgccgcggcaaccgcgcggccgcgctcataggactcggtcgccttgccgacgcgcttcgtgaatgcgaggaggctgtccgactcgacccggccagcggccgcggccacagccgcgtcgcaggcatttgcctccgattggggatgattgacaaggcgcggaggcacttcacccaggcgggtcatcttcagcagtcagaccccaccgactggcagaagctgcaggaggtggaggtgcatctgggaagatgcacagatgcaaggaaaattggggattggaagagcacgctgagggaggctgatgctgccattgctgctggtgctgactcctctcagttgcttcttgccttgaggtcagaagcacttctccaccttcacaagctggaggaggctgagtcgactcttgcgagctttctgaaattggacagtgcattgccctcatcattgacagcagcagaactctcgggcatgcttgctgagtcatacgtacatattgttcgagcgcagattgacatggcattggggaggtttgatgctgctgttgctgcagctgagaaggctagagatcttgatcccgggaatgcagaaatcgggatggttttgaataacgtgagactagttgcaaaagccagagagcaaggaaatgatctcttcaaagctgccaagttttcagatgcatccatggcttatggtgaagggctcaagtatgatccctcaaattcagtgctccactgcaatcgagctgcttgttggtcaaagctagaaaagtgggaaaaggctgttgatgactgcaatgaggcactaagaatacaaccaagctatacaaaagctctcttaaggcgagctgcatcatatgctaagcttgagcgttgggtggattgtgtgcgggactatgaggcgcttcggaaggagcttcccagtgacaaggaggttgctgaggcattgttccatgctcaaatttccttgaaggcgactcgtggtgaggatgtatcaaatatgaagtttggaggagaggtagagatagtttccagtgtagagcaactccgtgctgccataagttcacctggggtatctgttgtctacttcatgtcggcaatgaatcagcagtgcacacaaattacaccttcagtcaacactctatgcactgaatgcccctcggtgaattttctcaaggttaacatcgacagcagcccaatggtggcaaaggcagagaacgtgcggatagtcccgacgttcaagatatacaaaggaggggtgaaggtgaaggagatgatctgcccgagcttgcatgttctgcgctactccgtgcggcactattctgtatccagttcttgagaagctttaggtaccggtaccccaatttcccatttttcactaatgcatagagctccccgtcaaacttgcaaacaccactagcagcctccagaacattttcaccaccagcataactactcccctcccctattgagcatgagcataacgggctaagactgtctggtggaagagccccccctcaattccccacctctcctgtcaatttcgccttttcaccgttcatataccaacccattcaattcaatatctttgttcatgttccgggctctctccacctcaatttgtactttgaatactccatttggattcacctcatcatagtccataggccagtaccctgcttctcaaggaaaagggaaatgtttgtaatgtcgtgtagggtttagcggtagcgtctatccattaggggagggggacggcgggagcctggggggttgtagtttttcgttacatgtacataccttataggaaaaaaacatgagataaatccattggaagatttgttccctggagaaaagagaaatggtggcatcggattgagatgagattttggcggttggggtcaggtaacagagctactagctgttttgagttcctattagtctttatctacctatatctatctttagagggagagagagagagagaggtgttaagttaactgatgatgcagacatggtttggtgtccattgaagacgatgatgtcatgtccttttgctgcttctgttggttttatggcgctgatgataccatatatatgctaccatttccatgaataaaaaaaaaacattgcaacattcgttc

SEQ ID NO: 113638 - DNA, 837 bp, Zea Mays
atgtccaccaggctccaccaccatcttctccaactgatgtgctcgctgctaatctccggtaagcctgctcttgcgcgtcatcatcatctgcttccgaaccacttgctcttttcaaccaacattcgatcccgtgttacctgtgtagcggaactggtaagcgggaacaccggcgacgacgacatggcggtgctcatccagctcaaggccttcctgcgggtgcacaaccagataaaccgggacgcgtacgacagatggtcggaggcctcgccatcgccgtgcggcagctggcagggagtcgggtgcgacgcggacggccgcgtgagctccctcgacctctccagctccagcatatcggtccctctcttcggcaatgcgaacgcgactcggtcccagatccgcagcaggagttcctccttcctggccgccatctccctccacttgcgcgcgctctccccagcccccgcgtccgctccccctcggcgtgccgtggtgaggaacccgcactccgtgagcctggccgcgagctcctcccccgcgcccggtggcgccggtgcccgcaagcgcaccgcggcggactcagcgaggaggttgaccgccgccatctccaccagcgggtccgccgccaggatggaccgcacccgcgccgcgcagccgccgcacatcatgccgctcacgtcgagcaacgcggtggtggcactggcggccccctccccggccgccgcgtcgagcacggacgatgggtcagtcgtggcgcggggccggtccgcgggtgcgccgcgggtggggagacggaggggagcggtaggcaggcgaaggctagggtttggattggcgtga

SEQ ID NO: 113639 - DNA, 1350 bp, Zea Mays
ccttagtcacaactccaactcgtctcggtctcctcccccgaggcctcgattatccaaaaactaaccaaaatacggaatctttcccgtgtatcccaactctcacccgatctcctcgataggcttttgtctccaaggccgcgctttctaacaagattcctcccctcctctctccgataacgctagcctccgccgccgccggcgacgaatccggcgttttgagtttctgttgccagtgcagccatgtccatgttcaacaggatcttcgggaagcccaaggagcaggccaactccagtgccttggccacactcgacaagttaaatgagactcttgatatgctggagaagaaagagaaggtgctggacaaaaaagcagccgctgagcttgagagagccaaggagttctccaaagctaagaataaaagagcggctatccaatccttgaagaggaaaaaactttatgaacaacaaattgagcaactcggaaattttcagttgagaattcatgatcagatgatcatgttagaagcagctaaagctacaacagagactgttgatgcgttgagaactggagctgcagctatgaaagcaatgcaaaaagcaacaaacattgatgatgtcgacaagaccatggatgaaattaatgaacagactgaaaatatgaaacaaattcaagatgctttgtcaactcctcttggagcttctgctgattttgacgaggatgaactggaagcggaacttgaagaactggaaggagcagagttggaatctcagcttctggagcctgttgcagctcttcctgtgcatccagtgcatgtcccaggcaacaagcaaccagctcgccctgctccacagaaagctacagctgaagatgatgagcttgctgcactgcaagctgaaatggcactgtgatcaggtttccactgaagaggtgaaatgtgtatatgaattgcgttatgctgaaagctgagtcaggctttattgtatttgccatgtgtgtataatcttggtggatatttggcaaccgtcaaccgaagcagcgaaaggccgctacagccggtatttgtttcagtgattgggctctgttttctttccacagacaatttagttaatgtcgcccggttaggtctatgctaactattcaggtcaccaacgtgcattgtttgtcacagtatttttcagttacccatattgtttggagccatgtaagagtgttggaacgtttaaagcctcagggttcatatttgatgtgacggagggagtattacataaagtcagttgttcggatttgcagctgtaatctgtagagacaaaacactgtaagcagtagaagctgatatggattaaagtcaa

SEQ ID NO: 113640 - DNA, 1360 bp, Zea Mays
ccttagtcacaactccaactcgtctcggtctcctcccccgaggcctcgattatccaaaaactaaccaaaatacggaatctttcccgtgtatcccaactctcacccgatctcctcgataggcttttgtctccaaggccgcgctttctaacaagattcctcccctcctctctccgataacgctagcctccgccgccgccggcgacgaatccgcaggcgttttgagtttctgttgccagtgcagccatgtccatgttcaacaggatcttcgggaagcccaaggagcaggccaactccagtgccttggccacactcgacaagttaaatgagactcttgatatgctggagaagaaagagaaggtgctggacaaaaaagcagccgctgagcttgagagagccaaggagttctccaaagctaagaataaaagagcggctatccaatccttgaagaggaaaaaactttatgaacaacaaattgagcaactcggaaattttcagttgagaattcatgatcagatgatcatgttagaagcagctaaagctacaacagagactgttgatgcgttgagaactggagctgcagctatgaaagcaatgcaaaaagcaacaaacattgatgatgtcgacaagaccatggatgaaattaatgaacagactgaaaatatgaaacaaattcaagatgctttgtcaactcctcttggagcttctgctgattttgacgaggatgaactggaagcggaacttgaagaactggaaggagcagagttggaatctcagcttctggagcctgttgcagctcttcctgtgcatccagtgcatgtcccaggcaacaagcaaccagctcgccctgctccacagaaagctacagctgaagatgatgagcttgctgcactgcaagctgaaatggcactgtgatcaggtttccactgaagaggtgaaatgtgtatatgaattgcgttatgctgaaagctgagtcaggctttattgtatttgccatgtgtgtataatcttggtggatatttggcaaccgtcaaccgaagcagcgaaaggccgctacagccggtatttgtttcagtgattgggctctgttttctttccacagacaatttagttaatgtcgcccggttaggtctatgctaactattcaggtcaccaacgtgcattgtttgtcacagtatttttcagttacccatattgtttggagccatgtaagagtgttggaacgtttaaagcctcagggttcatatttgatgtgacggagggagtattacataaagtcagttgttcggatttgcagctgtaatctgtagagacaaaacactgtaagcagtagaagctgatatggattaaagtcaagcgaata

SEQ ID NO: 113641 - DNA, 1544 bp, Zea Mays
caactccaactcgtctcggtctcctcccccgaggcctcgattatccaaaaactaaccaaaatacggaatctttcccgtgtatcccaactctcacccgatctcctcgataggcttttgtctccaaggccgcgctttctaacaagattcctcccctcctctctccgataacgctagcctccgccgccgccggcgacgaatccggtaagcctccttgcttctgctagatacacggctgccagattggtgcgccccgcgattagggaaagggtcgattgcgatcagccgttcctctgccttaggtcatcgtagttgattagtcggcggtcactgctcggattgggcacccactgcgcataggtgggggctccaccgtggaaaagctatccttttcctcttcagttatttttgggcgttttgagtttctgttgccagtgcagccatgtccatgttcaacaggatcttcgggaagcccaaggagcaggccaactccagtgccttggccacactcgacaagttaaatgagactcttgatatgctggagaagaaagagaaggtgctggacaaaaaagcagccgctgagcttgagagagccaaggagttctccaaagctaagaataaaagagcggctatccaatccttgaagaggaaaaaactttatgaacaacaaattgagcaactcggaaattttcagttgagaattcatgatcagatgatcatgttagaagcagctaaagctacaacagagactgttgatgcgttgagaactggagctgcagctatgaaagcaatgcaaaaagcaacaaacattgatgatgtcgacaagaccatggatgaaattaatgaacagactgaaaatatgaaacaaattcaagatgctttgtcaactcctcttggagcttctgctgattttgacgaggatgaactggaagcggaacttgaagaactggaaggagcagagttggaatctcagcttctggagcctgttgcagctcttcctgtgcatccagtgcatgtcccaggcaacaagcaaccagctcgccctgctccacagaaagctacagctgaagatgatgagcttgctgcactgcaagctgaaatggcactgtgatcaggtttccactgaagaggtgaaatgtgtatatgaattgcgttatgctgaaagctgagtcaggctttattgtatttgccatgtgtgtataatcttggtggatatttggcaaccgtcaaccgaagcagcgaaaggccgctacagccggtatttgtttcagtgattgggctctgttttctttccacagacaatttagttaatgtcgcccggttaggtctatgctaactattcaggtcaccaacgtgcattgtttgtcacagtatttttcagttacccatattgtttggagccatgtaagagtgttggaacgtttaaagcctcagggttcatatttgatgtgacggagggagtattacataaagtcagttgttcggatttgcagctgtaatctgtagagacaaaacactgtaagcagtagaagctgatatggattaaa

SEQ ID NO: 113642 - DNA, 679 bp, Zea Mays
cctggcatcatgtctatatttgtgtctgccatcgtcgtcaagttccttttgtggttgcctcgcctgcgtgtgtgtgggagtgagaatagagctatggttcaagataaaaatgaagttcgaaagcaacgctcgtcagggaccccatcgtcgacaactttggttcttcgtcgccggatccgtgtttcggatagcagcaaccttgctgtcatcgtgttcgctccaactctgcctctacgtgctcgtcttcgatcaccgctgcaattttagaagtttgagtgaagaagtggaactcacagggcgcttgccaggagctcgacagaaggcctgaacaagaatcgtcaacgttggcttggaattctagttgaatcggtacgttaattgactacctgatatggaggaccaaagctgagtcgaccacaagagaatggaaagtgtgagcttctccgagagataatgctgatgaacgaactggaagatggacaaactgaacgagtgccaagccaaaggatggtcgtcaagtgatcgacgtctaacaacactaacttagtgttattcaggcaagccctggtgcatttgccacctccttgctgttttaaaatcttttatcaccttgtttgatgcattaggtgataggagttgtgtgctaaacaattgatgcatttctttcctttgaaaattg

SEQ ID NO: 113643 - DNA, 80 bp, Zea Mays
cggaggcgatcgcacgaccttgcatcggcgtccgcgcggtgggggaggcgtcgaggtgaagctgcgcgaccttccatcgg

SEQ ID NO: 113644 - DNA, 2038 bp, Zea Mays
atgactatttagtcattgattattttgatctttttaggtatggcaatgtcacttatgttgatgaaaggcaccggcacagatatgaggtgaaccctgatatggttccagagttcgaaaaagctgggcttcagtttgttggcaaagatgatactggaaggaggatggagatgattgaaatacccaaccaccgatattttgttggcgcacaattccatcctgagttcaagtcaagaccttcaaaaccttctcccctatttgtgggactaattgcagctgcatctgggcagttggatagggtgctgcaagaccgctgcaatggtcatgttggttcagctaaacatgttctgagcaatggctcatatacatccgcagtacaccaaaatgggaacccaaagaagctcaccaatggtctctcaaacggaacatactatgccaatggcaatggtgtgcatgcttagaccatcagatggatggatcaaggattttgcaactctttacttcaattatgcggttcctaatgcatcagttttgtccgttcgaggaagaaaaagttcttgcgctcgatgcagactgtctgctgggaatagtgctcgttcggtggtttttagttaaagaactaagctggatctctttggaaggcacgagactggtttctgtgttcgtctctaccctattgtgtaagctaaaggagcagatttgggacggaagagtttacaagttgtatatcctcaaagaaaagctgaatatttttattaacttaaattaggtcttcagtgaggtcgagagctgatgcttaaaagtgggcagcagtgcaagtgcaagagagagtatttcgaaatcaggcaactctgtattttgattttggacattttttttgtttcttgtgcgcaaataagttgatgcactgttgcatgatcatatatcagttttgactttagaatccatcttgagcgcttgcttctcataattcctgcgacttgcattgtggcaatctaaaacctatttaaaccgtgataaataagctagtttatttttaactaagctgtgatataaattaaaaagaacgaaaggggagggagtgtctgatacgcaaaatcatcctatatcacaacaatttcgagttttttttgccgagttgatcgaaattccttgcggtgcaaaaatacacgagcataaaactttgccatcaagaatctatctatgaaaaccgaaagctcaatccgtgaccgtgcaacggctcagggttcccactctgagagaagcttgtcaatcagctccaccagcttccctgtctcctccggctggcgcatcgcctgctccagcgcccacgcttcctcgatcctggcgtcctgcagcatcgcgtcccgcaccgcctcccgcagctcccgcgtggcctgcaacccgtccgttgccatctccctgagcgcagccagcgcgcccctggggtcctcaaggcggcagagcccctcgacggcgtcagcgtaggtggcggcgtcgggccggcgcggggagtccgggcggcagagccagcgcagcacggaggaggcgtcgcgcgcgcggcgcagggagaggaggctgccgagcagcggcgacgccagcaggagcggcgagggccgggccgggtgatggcgcagcgcggtgaggagcgcgaaggcagcggagagtgtcggaagcgaggcaaggtgcgcggcgagggaatcgagggggaggccgtcctgggagcccgggaggaggagcgccgcggagaggaggcggccggcggcggggacgtggcccgcgtagaggaggcgcgggaggagcgcggagatcgcgtccaggtcggacggggagaggggttgaggtgggggcttggattgcggcagcgcggtagcgcagatgccgcgaaggacgccggcgagcggcggcgcgaggcggatgggcaagcggggcagcatcgtcttctgggctcggctcactcaggaacgattctgagtcttttttttctttctgcaggagggcgcgccgccgtcaaatggacgagcgatatctcagatcgagc

SEQ ID NO: 113645 - DNA, 552 bp, Zea Mays
atgactctcgctggacagatgtgcggtggtcagtgcctgatccagacttctcctcaccgcatcgtcgcggtcttccttcccatgcctcgaaagcatcgcggcgcgcgcgacgagggaggagctcggtggcgcctcggttcgggcgatacaggggcgagggctatgcgcctgtgggggagggaacacgcagcggggcatcaggaggcgggcgtggtgggcggggggcatagaggtaggagagcgggacgggggcacggacgccgatctgggggatgggggcacgatattgccgcgcgggagggcgagcttgacgcggggacgctaagattgccgcgggggagggagattgccgcgggggagggtgagcttgccgcgggggacgccaagattgccgcgggggacgccgagattgccgctggggagggcgagcgccgagattgccgtgggggagggcgagggggagcgtttgccgagggcgcgctgctgcgatgtcaggcgaaggcgtggtggatgcccccgctacgtacatatggtgcagcagagataccttaa

SEQ ID NO: 113646 - DNA, 81 bp, Zea Mays
gttgttttatgtattatttgctctctacaacacaaaaagttgaaaaaattaccgaatttgtttccgaatccataccaaagt

SEQ ID NO: 113647 - DNA, 1496 bp, Zea Mays
ggaattctttccatgggtaggtgctgcaggtatatagtgcaaaaacaacgtaacaaagagaacgaaacaaatgaaactgcccatagcacttgtttggaagcatagtggaacagatgccaccagccacaagcctacaaatgaaaataatacgacctcaaatggaaatggacagacggttcaccttgaataaaggatcacccgggaattgttttcgatgcaagaattccaccacggatagtacatttcccaacaagaatggggtaaagtttcacatgagcaccagtcggctacatagaaatagcagtaacgcgtccttcatttttatggaattacaaactacacatctgctaacaaactatagggaatatatacagcaacgaccaatacaattgccaaataactttccgactatatatgtacaccggaaattgggcatagctatgtaatctggaacgacggtggaacagctataatagtggtataagtctgcttcacctatggttcaagaactaggacccccctgaggactggtaatgtaaaccagttcgttgcggtggagcggctgaaatatttcgcctcaccttatgattcttaggcgctaaaacccttgtggatagaactccaggggttggaaggaatgctggtgcaagcctgagcagcgaccttcgacactgcttcaggaaggatgccagcgttgcagatgtttgcgaaggaccgcatgtgcttcatcccatactgcgccaacgacccacattgcgcctcaaaaaggcttaccgtggacttgagacagctccaatcatcgaccagaggctcaccagctgcacggacggctttcagaacccttggaccgtcctcagagccaaagagaaggcttccaatgagctcaacactgctgtcaacatgagacctgtgggccatcacttcaagcaactccttccgagcttcatttttctcaggtgagctgtctgccaatttccggtactgtgggagataaagaagccaatcagttggtttgttcgtcgaaatggatgcataaattgttggaaagaaattaaagaggtaaatagatttttctgagaacaatcaagatgactagctttctcatgatctacaaaccttctgccagaagtagacaaggtcagcgtcgcgctgattaacagcctttgagaacgatggcaacgagttgtcttctataaacgtgttgtcatcgttagcagggtttgtgccaatgtacgaaaacagatgcttaacattcaactccaatgaaccatattgcatcacatgggagccatagctgaatgtatcctgaaccgctgtcctatccttgacctgatcaaccaataagttacatttattaggtatagtgaagcgtggctgcaagttaatgcttaataaattcaagtttgaaacaacttaccaagttgtattgctgcttgagagattcagttcgcagattgtggaaatcactgtcagcattgagaaatttcaaatataag

SEQ ID NO: 113648 - DNA, 1022 bp, Zea Mays
ggccgataaacttaggcgtatagtgctggatgctccatccactggacatacacttaagcttctgtcagtttctgattggattgaaatgttccttactttgagcattaaggacacatgaggtgtagctattgggcctctaacttggttatcatggttttgggccgtgggtagagcaggcaatgcaagtgcagtctggcacaatcctggtggtttggcattgagttatgttttcttttacttgataaaacaatcttgttccatcacttagtcaatagctcaatatgtccaccagttctgatgatccatgtctgcgcagtgtttcttttcacagtttgcgcttgcgaacatccgaaccccgttttcatcttgaattcaacttatgatgtatatcggacagttccaccacattctggcgccgccttcgtctgatcctggaggcaattggagccgctgcaagtcggatcctggtggatgcagcgcaacacagatcgcaaccctccaaggactgagaagtggaatgttgacatctctgagacagtctgaaagcaaaccgaaggcaggggtgttcatcaactcctgcttcgcgcattgctagagtgagctacaggacacatggttcgcaccaaattctccatccatatataacaagaaaattgcagaggtggtaggtgattggtactttgaaagaggagctgacgtggagattgactgcgcctatccctgtgattcacagtcttgtcgcaaccttataccaattgataaggttagttgcttccgtgaaaagaggttaactgttttggcaaaataattctactggttagtaactcttctgcctaaaatggaactgacaaaaaattcatcatttgacataggaactgaggatgtattaggagttcggcagacgattatactcaattatcatcataataaaaaacactcttctaattgttgatgatgttatgttacttgcatcagatagcaaaccaccctattgtacaatctgttggtggaaacatgtttgt

SEQ ID NO: 113649 - DNA, 1055 bp, Zea Mays
ggccgataaacttaggcgtatagtgctggatgctccatccactggacatacacttaagcttctgtcagtttctgattggattgaaatgttccttactttgagcattaaggacacatgaggtgtagctattgggcctctaacttggttatcatggttttgggccgtgggtagagcaggcaatgcaagtgcagtctggcacaatcctggtggtttggcattgagttatgttttcttttacttgataaaacaatcttgttccatcacttagtcaatagctcaatatgtccaccagttctgatgatccatgtctgcgcagtgtttcttttcacagtttgcgcttgcgaacatccgaaccccgttttcatcttgaattcaacttatgatgtatatcggacagttccaccacattctggcgccgccttcgtctgatcctggaggcaattggagccgctgcaagtcggatcctggtggatgcagcgcaacacagatcgcaaccctccaaggactgagaagtggaatgttgacatctctgagacagtctgaaagcaaaccgaaggcaggggtgttcatcaactcctgcttcgcgcattgctagagtgagctacaggacacatggttcgcaccaaattctccatccatatataacaagaggtggtaggtgattggtactttgaaagaggagctgacgtggagattgactgcgcctatccctgtgattcacagtcttgtcgcaaccttataccaattgataaggaactgaggatgtattaggagttcggcagacgattatactcaattatcatcataataaaaaacactcttctaattgttgatgatgttatgttacttgcatcagatagcaaaccaccctattgtacaatctgttggtggaaacatgtttgtgttgtgtgttccaggttgtctgtttcttggtagccttttttggctgaattggtgatatacacaaaatctatttacttgttagactatactttgtattgcacccctgatatccaggccattgcttgtgttttctatgattcgttttaactgaa

SEQ ID NO: 113650 - DNA, 1065 bp, Zea Mays
ggccgataaacttaggcgtatagtgctggatgctccatccactggacatacacttaagcttctgtcagtttctgattggattgaaatgttccttactttgagcattaaggacacatgaggtgtagctattgggcctctaacttggttatcatggttttgggccgtgggtagagcaggcaatgcaagtgcagtctggcacaatcctggtggtttggcattgagttatgttttcttttacttgataaaacaatcttgttccatcacttagtcaatagctcaatatgtccaccagttctgatgatccatgtctgcgcagtgtttcttttcacagtttgcgcttgcgaacatccgaaccccgttttcatcttgaattcaacttatgatgtatatcggacagttccaccacattctggcgccgccttcgtctgatcctggaggcaattggagccgctgcaagtcggatcctggtggatgcagcgcaacacagatcgcaaccctccaaggactgagaagtggaatgttgacatctctgagacagtctgaaagcaaaccgaaggcaggggtgttcatcaactcctgcttcgcgcattgctagagtgagctacaggacacatggttcgcaccaaattctccatccatatataacaagaaaattgcagaggtggtaggtgattggtactttgaaagaggagctgacgtggagattgactgcgcctatccctgtgattcacagtcttgtcgcaaccttataccaattgataaggaactgaggatgtattaggagttcggcagacgattatactcaattatcatcataataaaaaacactcttctaattgttgatgatgttatgttacttgcatcagatagcaaaccaccctattgtacaatctgttggtggaaacatgtttgtgttgtgtgttccaggttgtctgtttcttggtagccttttttggctgaattggtgatatacacaaaatctatttacttgttagactatactttgtattgcacccctgatatccaggccattgcttgtgttttctatgattcgttttaactgaa

SEQ ID NO: 113651 - DNA, 948 bp, Zea Mays
ggccgataaacttaggcgtatagtgctggatgctccatccactggacatacacttaagcttctgtcagtttctgattggattgaaatgttccttactttgagcattaaggcaatgcaagtgcagtctggcacaatcctggtggtttggcattgagttatgttttcttttacttgataaaacaatcttgttccatcacttagtcaatagctcaatatgtccaccagttctgatgatccatgtctgcgcagtgtttcttttcacagtttgcgcttgcgaacatccgaaccccgttttcatcttgaattcaacttatgatgtatatcggacagttccaccacattctggcgccgccttcgtctgatcctggaggcaattggagccgctgcaagtcggatcctggtggatgcagcgcaacacagatcgcaaccctccaaggactgagaagtggaatgttgacatctctgagacagtctgaaagcaaaccgaaggcaggggtgttcatcaactcctgcttcgcgcattgctagagtgagctacaggacacatggttcgcaccaaattctccatccatatataacaagaaaattgcagaggtggtaggtgattggtactttgaaagaggagctgacgtggagattgactgcgcctatccctgtgattcacagtcttgtcgcaaccttataccaattgataaggctgaccatcctagattaaacttcaaagaccggtaccctgagccatacagagattctcatccgactgcccccgttgctgtgcatggatgtcaggtgtcattactgtaatgtagtggtgaaataggtagattaaaacaatgaaatttatatgtggctaggatcataaatgaattgcaaaattttttctcagaacagtataacacatatttgtacataagttgttgtgttattatatgtttccgttgcaacgca

SEQ ID NO: 113652 - DNA, 194 bp, Zea Mays
catctttccaacgatcttttcgctttcactttgtcagcagtttctatacggttaactctttcccttttctttgtctactctctaggttatgctccggctaaaaatgacttttttgaaagggtatgcatctttattgtccaaaatcttccttcgtcacaattagagtaaaagttagcagggaagatttaagtcag

SEQ ID NO: 113653 - DNA, 394 bp, Zea Mays
atttggttctgcttctccgtgagttgtatcatattgtgccaaatagttggattttatataatgctgactgcttaattttgtttgtttgtttgaacttgtagaggttgcagagttttatttatggtaagtaacatcttttgttcactcagtagctgcattgcacatcatgccaatcatacttttacaattcaaaagcagaaatataaatgaaatatagattacagatatactgatgcaacattcaagggggaagtctgtacttattttctgttctacaagaagaggtgcacaagaagcagcgcagtgcctttcacgaactggagaatctcttggctattcgaatctatttataaagtcgatgcagcagtatgaacatctaaaggaggccgccgtc

SEQ ID NO: 113654 - DNA, 108 bp, Zea Mays
gggattgaaaagagaaattagttcatattacacttcaatacaccttataccacttcaatccactctaatccaagattacccaaacaagctctcaccaagctacaggtc

SEQ ID NO: 113655 - DNA, 212 bp, Zea Mays
cctctcggctcaccggatctcccagcgccgcgcccagcttctttctccctcagctcccgtggttctctctccatctccctccgttctctgttgcgtgcccagcagaactcccctgcgcgcccggattctctccttccctactcgaatttggtcaggcccgtgcagctccctggcgccctgcttcctctgttctctccctggacgcgcacagc

SEQ ID NO: 113656 - DNA, 966 bp, Zea Mays
ttacaaactcaaataactccgccgtgcgcccgcctatctacaatcttttaccgtgctgccgcagaggtatcgtcctcaccatccccgtaggaagccgaagtacagccagaagcgtcgtcacaactcacaagcactgatcatggccgactacgatcaggagcaagagatggaggtggaggcgctgcaggccatcctcatggacgacatcaaggagatcgacccaagtgagagtgggatcgctaccaccgcccggtgcttccagatcctactctctcctcaggatgatgattttgacgagtcagcttatgtcccagttcaactggccctgatttttgcgcacactgagaagtaccctgatgaacctccggtactgaatgtcaaaagtgtacgagggattaaaccacatgatcttgcatccctaaaggaaaagcttcagcgagaggcaacagagaatcttggcatggctatggtctacactcttgtttcatcagccaaagagtggctaagtgagaaatatggtcagaatggtggtgatgaggaacctgaagaatctgaagcggaaaaagaggaggttattataccgcatggtgaagctgttactgtggagagctttctggcttggagagaacgctttgaagctgagttggccttacagcgtgctaaacttatgccagattcagctcttacagccacaaaggaaaagaaactcacgggacggcagtattttgaaagtggaaggcatgcagtgaaaggagcaagcacagttgctgatgaagatgaagaagaggaggaagacattgatttcgatgatgattttgaagacgacgaagaggacatgcttgagcattatttagctgaacaatcagggaagtcaacagcttaaccttcttggccaaagaaactctatcaagggggctgtggttctcattaatatatatatgctgaaggagttagaagaccaagctg

SEQ ID NO: 113657 - DNA, 1189 bp, Zea Mays
ttacaaactcaaataactccgccgtgcgcccgcctatctacaatcttttaccgtgctgccgcagaggtatcgtcctcaccatccccgtaggaagccgaagtacagccagaagcgtcgtcacaactcacaagcactgatcatggccgactacgatcaggagcaagagatggaggtggaggcgctgcaggccatcctcatggacgacatcaaggagatcgacccaagtgagagtgggatcgctaccaccgcccggtgcttccagatcctactctctcctcaggatgatgattttgacgagtcagcttatgtcccagttcaactggccctgatttttgcgcacactgagaagtaccctgatgaacctccggtactgaatgtcaaaagtgtacgagggattaaaccacatgatcttgcatccctaaaggaaaagcttcagcgagaggcaacagagaatcttggcatggctatggtctacactcttgtttcatcagccaaagagtggctaagtgagaaatatggtcagaatggtggtgatgaggaacctgaagaatctgaagcggaaaaagaggaggttattataccgcatggtgaagctgttactgtggagagctttctggcttggagagaacgctttgaagctgagttggccttacagcgtgctaaacttatgccagattcagctcttacagccacaaaggaaaagaaactcacgggacggcagtattttgaaagtggaaggcatgcagtgaaaggagcaagcacagttgctgatgaagatgaagaagaggaggaagacattgatttcgatgatgattttgaagacgacgaagaggacatgcttgagcattatttagctgaacaatcagggaagtcaacagcttaaccttcttggccaaagaaagtaccttttcaggcacaactttaccttaggaagccaaatgtggctatatattgcaagtgtagagcccactattttgtgatgcctgttatcatttttgtacctgagtggatgctttcaagctctatcaagggggctgtggttctcattaatatatatatgctgaaggagttagaagaccaagctgtaatttactgtattttttatcggctactacatgtgtgttttgcctttgccatgtggagcatgttgcatggctgggacaaaacaacgacgataataacaaagtcc

SEQ ID NO: 113658 - DNA, 2785 bp, Zea Mays
gagcgcaacgcgaaaagccgaaaacccaaatcgagtttcctgccggcctgtccaatttctgtctaactcccagtcccagacccagacccagagaagatcagaagaagggggaagacagctcgtgcttcgacaggcgtcagccctagcgcagcttcccggcgacggcgatgagcctgggagctgaggtgatcgagctctccagcgacgaagacgaggagcctgtgcccagcactaccgctctcatccaccacgccccctcctcccctcccgacgtcaagccgcacctgctcgccgacgtcgatgtgaagccgctgcttcttctcccgccgccgctccaccccccgggctacggcgcgctcgtgcccgtgaagaccgaggagcccgtgcccgtggccaccgtctcgtcaccgcccagggcgctcccgccgccgcgcctctgccgccagttctggaagtccggcgactacgtcgtcgcgcgccgcaaccccgatgtggccggccccggtgggcggaaccggttgcggataaaccccaagtttctgcactccaatgcgacttcccacaagtgggcttttggcgccattgccgagctccttgacaatgcaatcgatgaggtgaacaatggggcaacatttgtccgtgttaataaatttaaaaacccacgagatgggaacccctcattgttggttcaagatgatggaggggggatggatcctgaggcactgagacgttgcatgagcttcggattttcagataaacagtctgatgctttcattgggcaatatggcaatggtttcaagactagtacgatgcggcttggagcagatgtgattgtttttacacaaaaccaaaataactgggtgccaactagaagtatcggccttctttcttacacatttttgatggaaacaggttgcgatgatgtgctggtgccaacggtagactatcagtatgatctaacaacaacttcatatgttcagatgttgcgtcatgatcagaagctcttctcttctaatttggcaatccttctcaaatggtcccctttttctactgaagctgagttgcttaaacaatttgatgatatgggagatcatggaacaaagataattgtattcaacctctggttcaatgatgatggggatatggagcttgatttcaactctgacaaaaaggatatcctcattactggggcccacaagaaggtgaaaacaaacagtttggacaagattgctgcacagaactacgtctcaactcggcttcgctattctcttagagcatatgcatctatcttgtatcttcatgtacctgatactttcagaattatcctgcggggatgtgatgtggaaccacataatgtagttaatgatttgatgtatcgggagtgcgtgttgtataaaccacaaattgctggacttacagagtcatcggtaatcacaaccattgggtttgttaaaggtgcaccagatatagatgtacaagggtttaatgtatatcacaaaaaccgtctaatattgcccttctggaaagttgcaaacaactcatacgggaaaggacgaggagttgttggcattctggaggccaactttatcaaacctacccatgacaagcaggattttgagaagtcagtcctttatcaaagacttgagttccgcttgaaagaaatgacttacgaatactgggaccttcattgccatcgtgttggatatgacaacaaaaaattacctaaagcaacccgtgctattaatcgtgccaatcatatgaacggtggcagttccccaacaagtgctccacctcggttgcttgcagttgatattccaacaagcagctctagtatacctagattatcagcctctgcagcaagagaaaagatcagtagtctcgattctcttcccaagagcacagtgattggattgaagaggaagtttaatcctttcggtgctgtggcggccagtgctgatcaggatggactacatcatatggataaaatagatgtttctcaacgaagacggtttaatgaatacaaaactttgaccctggagaatgacaagttgcgaaatgaatgcttacaatacgagggatcagagaaacaacttgtcctgaaggaacaaaagctccgatctgaaattgctgaggtggaaaagaagtatcaggaattgttgggagagctcagatcattggatgtgaagaaagagaaacaatgaactctccacttcagcgcctgttgtacaattaattgctcttttttctttcctgacctgtgaagatgatgactggattacttcccgagacgtgcagggaactggtcccttggacaaatgttatctaccgattaccattcgcttggtagtttcgttggatagctgtagaggtgtaatttcgtttcactaatcttcctagggtcctgtgatggtggaagaaagtgagcatgtagtctgttgtaaaattatgcaacttgtatctgaatgtacagcagcggtttcaatgttaatggccctctgtttccagcagcacatctcggtcccgtgtcaaaagaggtggattttgatccggcactctggagtctggactctggagtggatacttagaattagacttcatatgttgtgcagtatgtaaaattacttttcgtactcgtgacagtcttaaactggtggttgtgttgtatttgagacgaggggggttagtcaagcctttgttcactccaacagtacattgtaactgtacatgagtgatggtgggtatcagctgtttggttgctgcattaatttattttccaaacctctta

SEQ ID NO: 113659 - DNA, 2782 bp, Zea Mays
gagcgcaacgcgaaaagccgaaaacccaaatcgagtttcctgccggcctgtccaatttctgtctaactcccagtcccagacccagacccagagaagatcagaagaagggggaagacagctcgtgcttcgacaggcgtcagccctagcgcagcttcccggcgacggcgatgagcctgggagctgaggtgatcgagctctccagcgacgaagacgaggagcctgtgcccagcactaccgctctcatccaccacgccccctcctcccctcccgacgtcaagccgcacctgctcgccgacgtcgatgtgaagccgctgcttcttctcccgccgccgctccaccccccgggctacggcgcgctcgtgcccgtgaagaccgaggagcccgtgcccgtggccaccgtctcgtcaccgcccagggcgctcccgccgccgcgcctctgccgccagttctggaagtccggcgactacgtcgtcgcgcgccgcaaccccgatgtggccggccccggtgggcggaaccggttgcggataaaccccaagtttctgcactccaatgcgacttcccacaagtgggcttttggcgccattgccgagctccttgacaatgcaatcgatgaggtgaacaatggggcaacatttgtccgtgttaataaatttaaaaacccacgagatgggaacccctcattgttggttcaagatgatggaggggggatggatcctgaggcactgagacgttgcatgagcttcggattttcagataaacagtctgatgctttcattgggcaatatggcaatggtttcaagactagtacgatgcggcttggagcagatgtgattgtttttacacaaaaccaaaataactgggtgccaactagaagtatcggccttctttcttacacatttttgatggaaacaggttgcgatgatgtgctggtgccaacggtagactatcagtatgatctaacaacaacttcatatgttcagatgttgcgtcatgatcagaagctcttctcttctaatttggcaatccttctcaaatggtcccctttttctactgaagctgagttgcttaaacaatttgatgatatgggagatcatggaacaaagataattgtattcaacctctggttcaatgatgatggggatatggagcttgatttcaactctgacaaaaaggatatcctcattactggggcccacaagaaggtgaaaacaaacagtttggacaagattgctgcacagaactacgtctcaactcggcttcgctattctcttagagcatatgcatctatcttgtatcttcatgtacctgatactttcagaattatcctgcggggatgtgatgtggaaccacataatgtagttaatgatttgatgtatcgggagtgcgtgttgtataaaccacaaattgctggacttacagagtcatcggtaatcacaaccattgggtttgttaaaggtgcaccagatatagatgtacaagggtttaatgtatatcacaaaaaccgtctaatattgcccttctggaaagttgcaaacaactcatacgggaaaggacgaggagttgttggcattctggaggccaactttatcaaacctacccatgacaagcaggattttgagaagtcagtcctttatcaaagacttgagttccgcttgaaagaaatgacttacgaatactgggaccttcattgccatcgtgttggatatgacaacaaaaaattacctaaagcaacccgtgctattaatcgtgccaatcatatgaacggtggcagttccccaacaagtgctccacctcggttgcttgcagttgatattccaacaagcagctctagtatacctagattatcagcctctgcagcaagagaaaagatcagtagtctcgattctcttcccaagagcatgattggattgaagaggaagtttaatcctttcggtgctgtggcggccagtgctgatcaggatggactacatcatatggataaaatagatgtttctcaacgaagacggtttaatgaatacaaaactttgaccctggagaatgacaagttgcgaaatgaatgcttacaatacgagggatcagagaaacaacttgtcctgaaggaacaaaagctccgatctgaaattgctgaggtggaaaagaagtatcaggaattgttgggagagctcagatcattggatgtgaagaaagagaaacaatgaactctccacttcagcgcctgttgtacaattaattgctcttttttctttcctgacctgtgaagatgatgactggattacttcccgagacgtgcagggaactggtcccttggacaaatgttatctaccgattaccattcgcttggtagtttcgttggatagctgtagaggtgtaatttcgtttcactaatcttcctagggtcctgtgatggtggaagaaagtgagcatgtagtctgttgtaaaattatgcaacttgtatctgaatgtacagcagcggtttcaatgttaatggccctctgtttccagcagcacatctcggtcccgtgtcaaaagaggtggattttgatccggcactctggagtctggactctggagtggatacttagaattagacttcatatgttgtgcagtatgtaaaattacttttcgtactcgtgacagtcttaaactggtggttgtgttgtatttgagacgaggggggttagtcaagcctttgttcactccaacagtacattgtaactgtacatgagtgatggtgggtatcagctgtttggttgctgcattaatttattttccaaacctctta

SEQ ID NO: 113660 - DNA, 1086 bp, Zea Mays
gatatgtatggagatggactctccatcagaattgcacagtccagtttgaattttaaatatgaagagttaagaaaagcaacaaattattttgatccatcaaacaaacttggtcaaggaagttatggggctgtatacaaggctgttcttatggatggaaaagaagtagctgtcaagagactattcctaaatacaaggcagtgggctgatcagtttttcaatgaagtcgacctaataagtcaagttcgtcataagaatctagttaagttacttggctgcagcatgaatggtccagagagtttgcttgtttatgaatactacttcaacaagagccttgatctcttcttgtttggtacaagtcatagaggaaatttaacctgggatctcagggtcgatatcattcaaggcattgccgaggggctctcttatctccacgaggagtcagaaatacggattattcaccgagatatcaaagccagtaatattctattggatgataaattgaaacctaaaataaccgactttggccttgcaagagcttttggagaagacgttactcatcttaccactggtgttgctggaacattaggctacatggctcctgaatacatagtgcatgggcatttgacagagaaagccgatgtcttcagctatggtgttcttgttctcgagattgtaacggggaaaagatgtagcaactcaaatggttcacacggaggacaggttttgttaacaaaggtatggaaacagtacaaggacaacagagtcgagatgattgttgatcgaagcatctatgaagactctatcagggatgagatcatgcatatactgcagattggactgctatgtacacaagcaaatcctgatgacaggcctacaatggggaaggtggtggagctgctgagaaaccacaggaatgctttggagattgtcttgagtgaccctccatttctgaacgtcgatgctgttgaggacatcaaagaaggggaacattcacggttactgtcctcaaattctgctccgtcactgtcaggctcgtcccgatcttacttaagtgggagataatcttggttatttttccctagttct

SEQ ID NO: 113661 - DNA, 2620 bp, Zea Mays
aatattattagtggggcaaaaagacacaaatccgaaaccctcgcatcggcctgtacctagccgccgtcgccacagagccctcatctcgtccgtcctcggcggcctccgcggagcagccgtcgctggagcctggagaccaaagatccggccagatctgatgtcaggagggactggctcatccgggcgcgcggccccgcggtacgccccggatgacccgacgctgcccaagccgtggcgcggcctcgtcgacggcaccaccggctacctctactactggaacccggagacgaacgtcacgcagtacgagcggcctgtgccccccgagagccagctcctcccgcctccgcctccgttgccacccccgcctccacggagccgcgaccgccgcgacaggtccagatcccgatcccgcaccccaccccggcgcgaccacagggaccgcgaccgtgaccgtgacaggcgccacgacgagcacgcgtcctccaagacggcgtcttcccaccaccatccggctccggtagccgtcgccgacgatccttccaccgaggcataccgccgccgccatgagatcaccgtcacgggggataatgtgccgactccaataacttcatttgaggctggtggcttcccgtcagaaattctgaaggagatacaacgtgctggattcgcaagcccaacacctatccaagcccagtcatggccaattgctatgcaaaatcaagatgtagtagctattgcaaagactggatcaggcaaaactcttgggtatctacttcctgggtttatgcatatcaagcgcctgcagaacagcactaggaatggcccaacagtgctagttttggccccaacaagggaacttgcaacacagattctggatgaagctgtgaaatttggaagatcttcaagaatttcttgcacgtgcttatatggtggtgctcctaaaggtcctcagttgagagatttagatagaggggttgatgttgttgttgcaacacctggaaggttaaatgacatcttggagatgcgaaaggtaagtcttaagcaagtgtcatatcttgttctggatgaggctgatcgcatgctggacatgggctttgagccacaaatacggaagatagtgaaagagatacctcaccgtcggcaaacccttatgtacaccgctacatggcccaaggaagtccgaaggattgcagatgatcttcttgttcatcctgtacaggtgacaattggaagtgttgattcacttgttgctaatagttctattactcagcatgtagagatcataacaccctcagaaaaacaacggcgcctggagcagatattacgatcccaggattcaggttcaaagatattaatattttgtaccaccaagaggatgtgtgaccaacttgcaaggacactcaccaggcagtttggagcttcggccattcatggtgacaagtcccaaagtgaaagggagaaggttctgaatcagtttcgatctgggcggtctcccattttagtggcaactgatgttgctgcgcgaggtttggacatcaaagatatcagggtagtgatcaactatgacttccccactggtgttgaagactacgttcacaggattggcaggacaggaagggctggtgccactggtgttgcatatacatttttttgtgatcaggattcaaaatatgctgctgacctaatcaaaattctggaaggggcaaaccaacgagtgccccgtgatttagaggatatggcttctcgtggcggtggacgaggtaggaagaggaaccattgggcatcccgccctgacaggggtggttcacgttctgaactggattcaaggtacagcagcagagatggactagcatcttctgggaaatcagagagtggtcgcggcagtcgtggaagggatgataatggtagccgtggcaggtacgaccctggtgaaaccgatgggcgatctcgtaggtctactagaggccgcagtagaagccgtagcaaaagtgacagtagaagccgtagcccaagtcccaagaagtcacgtcgtcatgaaggtagacgtagcaggactaagagcaggagcaggagcaggagccgtagaaatcatggcgctagccacagcaagagtcgcagccctgtcgctagccgtaggtatgaaaagactgcttcaggatctgctcggcctaactcggggcatgcagagcacaaaagccctccaagatctcactctagggatgaccatgtgaaccactctgaccacaaggatgatccgcgtgcaaatgcagctgtgcagaatggtaataactgacggagagtggcctgcatcttctgtgacaaccaagacttatctgttatgcaaaatgcagtcattcccatctgcaagtcctgaatacggaaatgcatttgtgtgccattaaatatctcgtagaacatgtgatactgatgcctctgccatcgatgaaccaaaactgttgatgcatgtcatgtcatgttgttaaacttaatgacattgttgtgttctggtgttttacagccagttctgtaagtgatttatgataaaatatattgtcaggtctggaagtggtagtttatgataactagcaaagttatgttgctacggtttctatttataaag

SEQ ID NO: 113662 - DNA, 2914 bp, Zea Mays
aatattattagtggggcaaaaagacacaaatccgaaaccctcgcatcggcctgtacctagccgccgtcgccacagagccctcatctcgtccgtcctcggcggcctccgcggagcagccgtcgctggagcctggagaccaaagatccggccagatctgatgtcaggagggactggctcatccgggcgcgcggccccgcggtacgccccggatgacccgacgctgcccaagccgtggcgcggcctcgtcgacggcaccaccggctacctctactactggaacccggagacgaacgtcacgcagtacgagcggcctgtgccccccgagagccagctcctcccgcctccgcctccgttgccacccccgcctccacggagccgcgaccgccgcgacaggtccagatcccgatcccgcaccccaccccggcgcgaccacagggaccgcgaccgtgaccgtgacaggcgccacgacgagcacgcgtcctccaagacggcgtcttcccaccaccatccggctccggtagccgtcgccgacgatccttccaccgaggcataccgccgccgccatgagatcaccgtcacgggggataatgtgccgactccaataacttcatttgaggctggtggcttcccgtcagaaattctgaaggagatacaacgtgctggattcgcaagcccaacacctatccaagcccagtcatggccaattgctatgcaaaatcaagatgtagtagctattgcaaagactggatcaggcaaaactcttgggtatctacttcctgggtttatgcatatcaagcgcctgcagaacagcactaggaatggcccaacagtgctagttttggccccaacaagggaacttgcaacacagattctggatgaagctgtgaaatttggaagatcttcaagaatttcttgcacgtgcttatatggtggtgctcctaaaggtcctcagttgagagatttagatagaggggttgatgttgttgttgcaacacctggaaggttaaatgacatcttggagatgcgaaaggtaagtcttaagcaagtgtcatatcttgttctggatgaggctgatcgcatgctggacatgggctttgagccacaaatacggaagatagtgaaagagatacctcaccgtcggcaaacccttatgtacaccgctacatggcccaaggaagtccgaaggattgcagatgatcttcttgttcatcctgtacaggtgacaattggaagtgttgattcacttgttgctaatagttctattactcagcatgtagagatcataacaccctcagaaaaacaacggcgcctggagcagatattacgatcccaggattcaggttcaaagatattaatattttgtaccaccaagaggatgtgtgaccaacttgcaaggacactcaccaggcagtttggagcttcggccattcatggtgacaagtcccaaagtgaaagggagaaggttctgaatcagtttcgatctgggcggtctcccattttagtggcaactgatgttgctgcgcgaggtttggacatcaaagatatcagggtagtgatcaactatgacttccccactggtgttgaagactacgttcacaggattggcaggacaggaagggctggtgccactggtgttgcatatacatttttttgtgatcaggattcaaaatatgctgctgacctaatcaaaattctggaaggggcaaaccaacgagtgccccgtgatttagaggatatggcttctcgtggcggtggacgaggtaggaagaggaaccattgggcatcccgccctgacaggggtggttcacgttctgaactggattcaaggtacagcagcagagatggactagcatcttctgggaaatcagagagtggtcgcggcagtcgtggaagggatgataatggtagccgtggcaggtacgaccctggtgaaaccgatgggcgatctcgtaggtctactagaggccgcagtagaagccgtagcaaaagtgacagtagaagccgtagcccaagtcccaagaagtcacgtcgtcatgaaggtagacgtagcaggactaagagcaggagcaggagcaggagccgtagaaatcatggcgctagccacagcaagagtcgcagccctgtcgctagccgtaggtatgaaaagactgcttcaggatctgctcggcctaactcggggcatgcagagcacaaaagccctccaagatctcactctagggatgaccatgtgaaccactctgaccacaaggatgaccacaaggatgaccacatggaagatgggaagatggaaagggttgatcttgatcgctcgcccagcccacacgatgacaagtctgctccatatagtcctgtgtacaatggcaaagccagtggctcaatgagccccaacggtcagccagaggcaggtgccaaatttgttgaaccttctgggaaacctgagcctgcatctccagtgcgctgcagcaaaggcagagatgatgatgaggaaggtatcatagacgaggatggagagattggtgaggatgatccgcgtgcaaatgcagctgtgcagaatggtaataactgacggagagtggcctgcatcttctgtgacaaccaagacttatctgttatgcaaaatgcagtcattcccatctgcaagtcctgaatacggaaatgcatttgtgtgccattaaatatctcgtagaacatgtgatactgatgcctctgccatcgatgaaccaaaactgttgatgcatgtcatgtcatgttgttaaacttaatgacattgttgtgttctggtgttttacagccagttctgtaagtgatttatgataaaatatattgtcaggtctggaagtggtagtttatgataactagcaaagttatgttgctacggtttctatttataaagtatagaatataaaatacaaag

SEQ ID NO: 113663 - DNA, 151 bp, Zea Mays
accgatgatcacgggtcacgagcaatggcggctccgccgtgaacctttcgcttcggtgagcaattggggacgccatgatgaccgcgccacccagtttcggccatgggcgcattcctaagaacgcggtgaagctcccagacccgcagttggg

SEQ ID NO: 113664 - DNA, 2650 bp, Zea Mays
atcctatcttcagtctcctcaccgcgcgctctctaccgcttgtccgtttcttcctcttccgaggtagcaacgtggtgagtgaggcagccgctgctgtgctgcactgctgctgcggaggcccaagccgaccggcggagagcacccgtccttgggcggcggagggtggaaggtggatgctctaagcccccgcctctctctgccgccttatacccccgcgttttatccttcttctagcttcttcattcacctgttccagaataaggccgggcttgcggatgccggggtgcggagtagcggggagaggtgatgtgggggtatcgtcggccgcgcgccgcactccgccacaagggaagagccgcccctgcctctggatgactatcgctcgcggttacgggaggcaacatgagctcaaatattgcacatcgccacaaagcaaatctctgttactagaagcaagatttggtcgacatgttactaggagcactgcttatctgctccaaaattcccggagcactgcaatgacaagactacagaagtctgggaagtttctgcaacctgtcttggactcctcaagaaattatttgactagtacattctacaatgcaagcttgaagaggagagttctgtcgagggttgagtgctttgtgtcttcagatccaataaacaatggttggttgaaaccaaggaggtcagagaacttcactagtttggagagcgcatgtgttcagccagaatacaaactaccagtcaggacacgtgctgactgtaaagcagagcagtatgaaataacaggctcacctttgagcccttctgatgttcctgctgatgccgttatgattggagatacaaacgagatttctccctggtggcaggagtttccaaagcgctggacggtcgttctcctctgcttctttgcgtttcttctttgcaatatggaccgtgtcaatatgagcattgcaatccttccaatgtcgtcagagttcagctggaatccagcaaccgttggtctaatccaatcatctttcttttggggttaccttctcacacagattcttggaggtatttgggctgacaggtttggtggtaaggtagtactaggatttggggttgtatggtggtcatttgctacagttcttacaccccttgctgccaagattggtcttccatgcttactcaccatgcgtgccttcatggggataggcgagggtgttgccatgcctgctatgaacaacatcctttccaaatggatcccagtctcagagagaagcagatctcttgccttggtgtacagtggaatgtaccttggatcagtcaccggcctgtctttgtcacctctgttgattagcagatttggctggccttctgtcttttatgcatttggatctcttggaaccgtttggtttgcactgtggcaaagcaaagcacacagctctccagatgatgatccggagctaagtaaagctgaaaagaggcatatactgggtggcagtgccttaaaggagcctgtcacttccataccatggaggctaattctatcaaaggctccagtgtgggctctcataatatcacatttttgccataactggggaacattcattcttctaacatggatgcccacatactacaatcaggttttgaagttcaatctaactgagtcggggcttctctgtgtcttgccatggctgacaatggctgtttttgcgaatattggtggatggattgctgatactctagttcagagaggggtctctgtaacaaacgttcgtaagatcatgcaatcgattggtttccttggaccagccttgttcttgacactgctgagcaaagttcggactccagccatggctgtgttatgtatggcatgcagtcagggtagcgatgctttttcacagtctggcctgtattcaaatcaccaagacataggaccacgttatgcgggggtacttctcggactgtcaaacactgctggcgttctggcaggagtttttggtactgctgccactggctacattcttcagaaaggttcttgggatagtgtgtttaaggtgtctgttgtgttgtacatagtaggaacggtggtttggaatgtcttttcaactggagagaaaattctcgaataagctgtggacattcctatatgccactatacggaactgtgtgattttgatgatgtcattttggcaaacaaaataaattttagaagagatacatctggaagaaaactccattttatgcaagaggtgtacctgaatctgatgtttgggctatcggaagaaccagatcaaattagggtactgtgtgaggtcaagaaggtacacttggaacttgggaaaattcttgtacacaaagcaaccgcaccaagggcacgtcagatttttgcagttgtttcttgagaagtccaggcttctgtcaagatcaccaatccacatctttttgttttaaaatgattgacagttaaatcgtgtatcaccttgcctttgcttaaggcgctacaggtactgccaaactaatgtatgtgcttttcttatcgaaaaacctaaatgtatgtgcttcagatatcttgaacatctctgctgtttgcgtcattgctactattgtttcgtgtaagctgcataatgatactaaatgatgatggtgtcatttttgtttt

SEQ ID NO: 113665 - DNA, 2728 bp, Zea Mays
ctcctcaccgcgcgctctctaccgcttgtccgtttcttcctcttccgaggtagcaacgtggtgagtgaggcagccgctgctgtgctgcactgctgctgcggaggcccaagccgaccggcggagagcacccgtccttgggcggcggagggtggaagaataaggccgggcttgcggatgccggggtgcggagtagcggggagaggtgatgtgggggtatcgtcggccgcgcgccgcactccgccacaagggaagagccgcccctgcctctggatgactatcgctcgcggttacgggaggcaacatgagctcaaatattgcacatcgccacaaagcaaatctctgttactagaagcaagatttggtcgacatgttactaggagcactgcttatctgctccaaaattcccggagcactgcaatgacaagactacagaagtctgggaagtttctgcaacctgtcttggactcctcaagaaattatttgactagtacattctacaatgcaagcttgaagaggagagttctgtcgagggttgagtgctttgtgtcttcagatccaataaacaatggttggttgaaaccaaggaggtcagagaacttcactagtttggagagcgcatgtgttcagccagaatacaaactaccagtcaggacacgtgctgactgtaaagcagagcagtatgaaataacaggctcacctttgagcccttctgatgttcctgctgatgccgttatgattggagatacaaacgagatttctccctggtggcaggagtttccaaagcgctggacggtcgttctcctctgcttctttgcgtttcttctttgcaatatggaccgtgtcaatatgagcattgcaatccttccaatgtcgtcagagttcagctggaatccagcaaccgttggtctaatccaatcatctttcttttggggttaccttctcacacagattcttggaggtatttgggctgacaggtttggtggtaaggtagtactaggatttggggttgtatggtggtcatttgctacagttcttacaccccttgctgccaagattggtcttccatgcttactcaccatgcgtgccttcatggggataggcgagggtgttgccatgcctgctatgaacaacatcctttccaaatggatcccagtctcagagagaagcagatctcttgccttggtgtacagtggaatgtaccttggatcagtcaccggcctgtctttgtcacctctgttgattagcagatttggctggccttctgtcttttatgcatttggatctcttggaaccgtttggtttgcactgtggcaaagcaaagcacacagctctccagatgatgatccggagctaagtaaagctgaaaagaggcatatactgggtggcagtgccttaaaggagcctgtcacttccataccatggaggctaattctatcaaaggctccagtgtgggctctcataatatcacatttttgccataactggggaacattcattcttctaacatggatgcccacatactacaatcaggttgctaccatgttatgctgtgaaacgtttgactttccccattatttaaattatataatgatagcatatcatgccattggttgtgctccccaaatccttttatccaggttttgaagttcaatctaactgagtcggggcttctctgtgtcttgccatggctgacaatggctgtttttgcgaatattggtggatggattgctgatactctagttcagagaggggtctctgtaacaaacgttcgtaagatcatgcaatcgattggtttccttggaccagccttgttcttgacactgctgagcaaagttcggactccagccatggctgtgttatgtatggcatgcagtcagggtagcgatgctttttcacagtctggcctgtattcaaatcaccaagacataggaccacgttatgcgggggtacttctcggactgtcaaacactgctggcgttctggcaggagtttttggtactgctgccactggctacattcttcagaaaggttcttgggatagtgtgtttaaggtgtctgttgtgttgtacatagtaggaacggtggtttggaatgtcttttcaactggagagaaaattctcgaataagctgtggacattcctatatgccactatacggaactgtgtgattttgatgatgtcattttggcaaacaaaataaattttagaagagatacatctggaagaaaactccattttatgcaagaggtgtacctgaatctgatgtttgggctatcggaagaaccagatcaaattagggtactgtgtgaggtcaagaaggtacacttggaacttgggaaaattcttgtacacaaagcaaccgcaccaagggcacgtcagatttttgcagttgtttcttgagaagtccaggcttctgtcaagatcaccaatccacatctttttgttttaaaatgattgacagttaaatcgtgtatcaccttgcctttgcttaaggcgctacaggtactgccaaactaatgtatgtgcttttcttatcgaaaaacctaaatgtatgtgcttcagatatcttgaacatctctgctgtttgcgtcattgctactattgtttcgtgtaagctgcataatgatactaaatgatgatggtgtcatttttgttttacttctattgacagacaaaaatatcctcacatgaaaattagattgcatcattggtcacaaaaacaaaaagaa

SEQ ID NO: 113666 - DNA, 2623 bp, Zea Mays
ctcctcaccgcgcgctctctaccgcttgtccgtttcttcctcttccgaggtagcaacgtggtgagtgaggcagccgctgctgtgctgcactgctgctgcggaggcccaagccgaccggcggagagcacccgtccttgggcggcggagggtggaagaataaggccgggcttgcggatgccggggtgcggagtagcggggagaggtgatgtgggggtatcgtcggccgcgcgccgcactccgccacaagggaagagccgcccctgcctctggatgactatcgctcgcggttacgggaggcaacatgagctcaaatattgcacatcgccacaaagcaaatctctgttactagaagcaagatttggtcgacatgttactaggagcactgcttatctgctccaaaattcccggagcactgcaatgacaagactacagaagtctgggaagtttctgcaacctgtcttggactcctcaagaaattatttgactagtacattctacaatgcaagcttgaagaggagagttctgtcgagggttgagtgctttgtgtcttcagatccaataaacaatggttggttgaaaccaaggaggtcagagaacttcactagtttggagagcgcatgtgttcagccagaatacaaactaccagtcaggacacgtgctgactgtaaagcagagcagtatgaaataacaggctcacctttgagcccttctgatgttcctgctgatgccgttatgattggagatacaaacgagatttctccctggtggcaggagtttccaaagcgctggacggtcgttctcctctgcttctttgcgtttcttctttgcaatatggaccgtgtcaatatgagcattgcaatccttccaatgtcgtcagagttcagctggaatccagcaaccgttggtctaatccaatcatctttcttttggggttaccttctcacacagattcttggaggtatttgggctgacaggtttggtggtaaggtagtactaggatttggggttgtatggtggtcatttgctacagttcttacaccccttgctgccaagattggtcttccatgcttactcaccatgcgtgccttcatggggataggcgagggtgttgccatgcctgctatgaacaacatcctttccaaatggatcccagtctcagagagaagcagatctcttgccttggtgtacagtggaatgtaccttggatcagtcaccggcctgtctttgtcacctctgttgattagcagatttggctggccttctgtcttttatgcatttggatctcttggaaccgtttggtttgcactgtggcaaagcaaagcacacagctctccagatgatgatccggagctaagtaaagctgaaaagaggcatatactgggtggcagtgccttaaaggagcctgtcacttccataccatggaggctaattctatcaaaggctccagtgtgggctctcataatatcacatttttgccataactggggaacattcattcttctaacatggatgcccacatactacaatcaggttttgaagttcaatctaactgagtcggggcttctctgtgtcttgccatggctgacaatggctgtttttgcgaatattggtggatggattgctgatactctagttcagagaggggtctctgtaacaaacgttcgtaagatcatgcaatcgattggtttccttggaccagccttgttcttgacactgctgagcaaagttcggactccagccatggctgtgttatgtatggcatgcagtcagggtagcgatgctttttcacagtctggcctgtattcaaatcaccaagacataggaccacgttatgcgggggtacttctcggactgtcaaacactgctggcgttctggcaggagtttttggtactgctgccactggctacattcttcagaaaggttcttgggatagtgtgtttaaggtgtctgttgtgttgtacatagtaggaacggtggtttggaatgtcttttcaactggagagaaaattctcgaataagctgtggacattcctatatgccactatacggaactgtgtgattttgatgatgtcattttggcaaacaaaataaattttagaagagatacatctggaagaaaactccattttatgcaagaggtgtacctgaatctgatgtttgggctatcggaagaaccagatcaaattagggtactgtgtgaggtcaagaaggtacacttggaacttgggaaaattcttgtacacaaagcaaccgcaccaagggcacgtcagatttttgcagttgtttcttgagaagtccaggcttctgtcaagatcaccaatccacatctttttgttttaaaatgattgacagttaaatcgtgtatcaccttgcctttgcttaaggcgctacaggtactgccaaactaatgtatgtgcttttcttatcgaaaaacctaaatgtatgtgcttcagatatcttgaacatctctgctgtttgcgtcattgctactattgtttcgtgtaagctgcataatgatactaaatgatgatggtgtcatttttgttttacttctattgacagacaaaaatatcctcacatgaaaattagattgcatcattggtcacaaaaacaaaaagaata

SEQ ID NO: 113667 - DNA, 1409 bp, Zea Mays
acccattctctgttcgtcttcgtcgatccgaaacgaaaaccagtaaccaccctccaccaccgcgtgctccgtgctcattccccatctgccatctcggctcctcccaacccaaacgacaaaaccctagcctcctcttccgtgtgatgggatgccgtctaaaccctacccccactccctgacctcctctacttcctccgccgccgtggcccccgcgacctggatgtccgcatctgcatggacggcgcccgagtcctgatcgccgctagtgccaccgccgtctgctgcctcgcctgcgctgtctggatcttccgctcctcttcctcctcgttccccgcatcctcaaataagcaccaaccccctcccgccaacttctgcggctgcgcttcctgcggctgccgtgacgccaagtccgccaacggcgagatggccgtgggcggggagaacaagaagaaggcgccggagcctgctccgccggaggcgccctccatgatggagcagctcgtgcccgagatcaccacccacgcgctcagctacctcgactacaccagcctctgccgtctctccatgaccaactccgccatgcgccgcgcagccgacgacgatggcgcctggaaggcactgtatcacaaggattttacggtggagcagggtactataaatcctcctaatggatggaaggcatactatgcggctacaaaagccattattaaccttaatgcagagttctacaatattatcagggaagggtccttaccagcaatgagccgtttttggcttaatgcggactatgtcaagtgtattcatgcgactggggagttctgcactggatacaacgcagtgatggagagttggggcatgctgttgaactggggccaagacggaggaggggggcagggcattgccttgcagataagggacgtccgtgtgcgtgtgctcggtgaggtggcatgggtgaacatgaaggcgaacgtgctgttccatgtgaccaacgtctacgagctctgtaacggcaggtggtatatggtccatcaccacagctcgctcatggctgaccctcctccgcacaatatgtttgcttgatgtgctattcttgagcggagattagattatcggacgaagatttcctacctcctccccacaacccttttattcgttgtggatctgctgtttgttggtattgctctggatctccgttccgcagttttgtacagatgtgttttaggtggtaaggcttattataaattggtggcgccctggttgccgcggctgacttgatttatctggcctgcttccagacggtgcgagttgatgagtaaaatcctcatcttctagaacggtcgaagctcaatggtgtttgttctactgactggactgagtcatggtctggtagctgatgatgattccgaatc

SEQ ID NO: 113668 - DNA, 3314 bp, Zea Mays
ccgagctcccccacattgaccgcctccgtaccagcgacagcctttccttcaatcatccactgccaactcaattttcttgtggaggccgggcccccatcacccgattcatccctgccactttgcatttcaggtttcagctcacctctcgcgttccttctttctccctcccgctcaccgccagcgccaccatgcccaccgagccacccattgctctcgccgcactaaactctccgccgtagccatcgcccttttggcagaaccatgtgtaattacaactgaagacgctagtatgagccaagaactacaggggaggtcggcggacccgatggcggccgatcacgcgctgccattggcgtcatcagcgccgtcctggccggtctcgacgcacccctccgccgcttccgccgccgccgccgcggtctactacttcggcctttctttcgctctagcgcaggggagagcttccggcgggttcgatcttggtggcgcgaggcggcgggggtgccggtggtcgcgggccatggagctggcgctgcaggagaaggtagccgcgcttgagcgccaggtcgcggagctccgctgtcggcgggccgaggacgccagggccaacgagaaggtggcgggaattttcgcgtcccacgaacagcggtggttcgccgagcgcaagtccctgcgccggcaggtgcacgccgtcgtcgccgctgcgcgcgcgcgcgaggccaagcgcgaggaggagaccgcggagctcaggcgccagctggaggagcagcgggacacagtggcgctcaaggacagggccctggagcaggaggtgcagaggcggcaaggcgcggaggagcgactacgagccgcggagaaggcggaggaggagctgcgggagcgcgccggcaaggaggcgatggagcacgccgcggaggtgcggaagcacaaggcggcgttcgtggagctcgtgtccgcgcagcggcagctggaggcggacctggcccgcgccgcgcgcctcgcggacacggcggaggccgagctccgggccgcgctggagcgccgcgacgaggcggcctccacggccgccgacctctccgccgaggccgcacgcctgcggcgggacgccgaccacaaggacaagatcctctcggcgatgctgcgcaagtccaagatcgacatggaggacagggagatgctggtgcgggaggtcaagatgtgcaaggccagacggaagcaggcggagctggaggccgaccggtggcgcaagatgtgggagtcccgtggccaccgccggggctcctccagatcgtcggcgcggggcgtggccgacctgccggccgggagctcagacaagctgctggccaccgacgccgccgtggcgtgcgccaccaatgaaactaagatattgttcgtggaccacgcggagggcgacgccaagaaggaccaccggaagacgccggcgaaggaactgaacgccattgaatgcgtcgaccgctatgctagccatgtcgtcgacgacaagcccgctgtggaggaataccaaggcctgcaggagtggttccagatggagacggagaagtacacggctctgatacaacaccggcacacggcggagatcgaggcgttcacggagcagctccggctcaaggacgagaagttggaggcgttccggtggcgcgcggtgagcatggacgtcgaggcggcgcgtctccggagccggatccacgagctggagggccgtctagcgcggcacgagaagcacagcgccgcgctggaggccctgctccaggacagggaaagcgagaacagagcactcgaggagcagctggagacgctccaagcgcaggcgcttggtgtggagatctgcacgccggcccgtggcagtggccaagacgacgggctcgacgaccagtgcatcgcgtgttcgcccgtggatgccgtccagagaacaatgtcatccggaagctcgcggcaccaagagggcgccgaggtcagcaagtatgagacgaagctggacgagctagtcaccctctccccagaagatcacaaggaggatgcaacagaggcgcttgtagtctcggtcggggatctcgcgtgcgccgtcgccgcggcagcaacgtccgtggaacacgagcgaagacatgatgccccggcgagccggcagtctttcaggtctgagatcgaggaggaggaggaggtgtacaccgagccgggcaatgcacacacgacaggtagctcccaagaggcgacgtctgagctcgcgctcgtggtcgtgccgcctgggcacaagagctctgcttggaagacggacatccacgccctagccgtgtcgtacaagatcaagaggctgaagcagcagctgcttgtgctggagaggctggccaacgaatgcaaggatgaggaagccgcggcgacgaagccgtcagggagtgaagccagctgcagcggcggcggcggcagcaggcagcagccgaggtcgaggtaccacacgatgatgtcgttcctcagcaagcacgtcaggcggtaccagtccctcgacgacaagatcgacgacctctgcgctagaatggtacggggagcggatgcgaatactatccattccaccatggaaagcattcccggatgatgcgttgatgtgtctgtcactctgtctcatctcatgccatgcaggaggagagcaagaggagcgcggggcggggcgcgggagaggagagccagagccagagcgcggcgctgggccagttcctggaggagacgttccagctgcagcgattcatggtggccacggggcagaagctgctggagacgcagtccaggatcgcggctggcctcgcgcgcgatcgctgctgctgtggcgacggagaagacggcgtggatatgaagaggctcatggaggtggctggggcgctgctgagggacgtgcagcgagggctggaggtgcggatcgcgcggatcatcggcgacctcgagggcacgctcaccttccacggcatcctccgaagcacgcgctgatatatatacacacacgcacaggcacacacacccgacgctgtcctccagacacagcctaaacgttctaacgccaatgttagtagtattaatcagatactgtactagtaccactttttggacttcatgctctaagagatggcttaggctgcgttcgtttgttcaggattgggggcaggaacggttccaggtgatcaaagcctatacaaattacataagtattcctggttggattgattctaggtcacaattccggaacaaacgaacacacccttaacaaatatagtttacacaaaggggcaaaacatcccatcatcgacttt

SEQ ID NO: 113669 - DNA, 1235 bp, Zea Mays
atgaaagcggacgctccggcgacgccgtgcaggaagccggcgccccttccgccgccgcccgcgctgctcgccgtgcgtgcgcgctcgcggtcgcgggtggccgacctgggcttcggcgcggcgttcccgggcggcccgccggacacgccgccgcgccgctcgcccgtcaccgtgccgttcctctgggaggaggcgcccgggaagcccaaggcgccgccgccgcccaccgccgcggctccggccgccaccaacgccggccccgttcccgaaggcggcggcggcggcggcgacgacgaacagcacgacgaccaggcgcgccccgtccccgtgccgctgaagctgcccccgcggctgcagcaggtggcgtcgttcgcggcggcggacaccccgctgcttccgtccccgaaggccgtgctccagggcccctactactacggctgcgccggcgacggcagcaggaggccgccgccgaggtggttccgcagcggcggcgccttccggaggacgccgagcgccggcgtgggactcttctctcggacctggagcaagcccgcgccggctccggcgccggcaagcggcaagagcagacacggcgacgaccacgagcgcgacgcggcggggcccgacgccccgtggtgctcgccggcgtcgtcctcctcctcgtcgtctgtgtccacctgcttcggcggcgacgagcacggtcgcgggaagccctgcgccgacgggcgcgaggtctcctcggaggaggacggcggctcgcctccgagggggtcggtgaggatcacgaggcttaggaggaaccggagcctccccagcgtcaccacgtctaacctctgggcaagcatccgtaggagtttcgagcagattactccgtggagctacaagttcggtcggtcacgaccgccaggtgccaacgctactgaataaatgaataaattatcggaagcaccaaatcgcaatgcaacctgtggtgcgtggacgtggaggctctgcaacccatgtagcgaaaaaagtctctaatgtatgctaccttcgactttggagtaacctacgcacgggaccccatccatcgtaccacacgttctttctgtataagatttttgttcagttcgctctctatctatatagattgagtgaatttaaattttaaataagtcaaatatctacttaatttttctaattctaatccattccatgtataataaaaataatcgaacaatggctaaatgtgatac

SEQ ID NO: 113670 - DNA, 550 bp, Zea Mays
ctcctccgcaccttcttcttccccttcttcccagtacatcgttgagctcttccaccgtactccaccattgttttgtttctccccatccccatcttcgtcgtcagcaccacccaagcattctccgcgcttgctctgctccaggtggcgctgcggggatgagcggcgcgacggtggaggaggtgcagatccaggaggctctcctcttctctgaaaccatcaagggtctcaagacactgaggtcgcagctgtactccgcggcagagtacttcgagcttgcctacacgcagcaagacgaaaagcaggcgtacggtgacgaacaacctcaaggagtatgccgtgaaggccctcgtcaacaccgtcgaccacctgggctccatatctttcaaggtgtccagcctaatcgatcagaggttcagtgaggccaccgatgccgatctccggatctcctgcatccaccagagaactcaggccagccaagcctgtgtcgacagagagggcatttcgcagcagtccttggtgatcactgccccaaagtatcacaagagataca

SEQ ID NO: 113671 - DNA, 546 bp, Zea Mays
ctcctccgcaccttcttcttccccttcttcccagtacatcgttgagctcttccaccgtactccaccattgttttgtttctccccatccccatcttcgtcgtcagcaccacccaagcattctccgcgcttgctctgctccaggtggcgctgcggggatgagcggcgcgacggtggaggaggtgcagatccaggaggctctcctcttctctgaaaccatcaagggtctcaagacactgaggtcgcagctgtactccgcggcagagtacttcgagcttgcctacacgcagcaagacgaaaagcaggcggtgacgaacaacctcaaggagtatgccgtgaaggccctcgtcaacaccgtcgaccacctgggctccatatctttcaaggtgtccagcctaatcgatcagaggttcagtgaggccaccgatgccgatctccggatctcctgcatccaccagagaactcaggccagccaagcctgtgtcgacagagagggcatttcgcagcagtccttggtgatcactgccccaaagtatcacaagagataca

SEQ ID NO: 113672 - DNA, 655 bp, Zea Mays
ctcctccgcaccttcttcttccccttcttcccagtacatcgttgagctcttccaccgtactccaccattgttttgtttctccccatccccatcttcgtcgtcagcaccacccaagcattctccgcgcttgctctgctccaggtggcgctgcggggatgagcggcgcgacggtggaggaggtgcagatccaggaggctctcctcttctctgaaaccatcaaggtcaccctcatccttcaaaccacatcattcgtgtccctcctcctcctccatcctcgcgcgcgtttcgttttcacacgtactgctgctgctgcttctccaatcgtcgtagggtctcaagacactgaggtcgcagctgtactccgcggcagagtacttcgagcttgcctacacgcagcaagacgaaaagcaggcggtgacgaacaacctcaaggagtatgccgtgaaggccctcgtcaacaccgtcgaccacctgggctccatatctttcaaggtgtccagcctaatcgatcagaggttcagtgaggccaccgatgccgatctccggatctcctgcatccaccagagaactcaggccagccaagcctgtgtcgacagagagggcatttcgcagcagtccttggtgatcactgccccaaagtatcacaagagataca

SEQ ID NO: 113673 - DNA, 776 bp, Zea Mays
attgcgcgcagctcaaggccagtcaatgcccagtgccatgcccaacttcagggagatgaacaaggtggtcgtcacaggcagggcgtctcagatgcatcaagtattcagcgctgaaacaagagctaaagagaagaagcagccttcactcagaaagttgcaatccatcgctcgcctaccttcgcagcgtgcacgttcagcgtcgccagcacagcgtgcgcatcccatggcaccagctaagaacgctacacccaccaacagagataagcgatcggaatcaccagttccttcgacagctccagctccactgacaaggtccgcgtcgctctcaaagaaggcatccttgctcaagacatcaagcgtcagggctcaggccgccgtctcacagcccaagaaactggcaccaatgaggacgcaggtcgacaggagcgacgattccaaggacggtgagcgtacccctaagaagagcaagaagttcctcaagtccatcctcagcaggcgcaagtccagaaaagatgagccgctgccgagttactttgacgactactgagccacaggatttttttttcttctccctccgttggacggcaccgcgcgcggtctctgcgtactcctacttcagtttgtttcactttcatccaagtgttatgttctcaatataaatatcgtcttcgtatagaaaatagcttaaagtttacatgaatgcagtgggaagtttcagcaagatgtcatcaccccacttgcctgtttctataagagatgctcagatcaagagtaaa

SEQ ID NO: 113674 - DNA, 553 bp, Zea Mays
aggatcggcttcgtggggatgccgccggtgggctgcgtgccgtcgcagcgcacgctcgggggcggcctcgccaccagggcctgcgagcccaagcgaaacgaggcggcgctgctgtacaacgccagggcccaggagatgatcgccgccttcaacaacaacaactccgacgtgctggtcgtcttcctcgacatctaccgcatcctggacgacctcatggagcgcggggaggagtacggcttctccgagaccaccaggggatgctgcggcaccggcaccatcgaggtcacgggcctctgtgactcccgcttcgtctccgtctgcgatgatgtctcgcaacacgtcttcttcgacagctaccacccaacagagagagcctacaggatcatcgtcaacgacatctttctaaactacggacacgtgctcttctcatgactatatatcacgtactcgctgtctctgtctctggtagctggcccaatcgacccaacagcaaccaaattaaatgagcccatcctccaaataccgcagcccattgttacacttatttcctatc

SEQ ID NO: 113675 - DNA, 1573 bp, Zea Mays
acggaacagcctcggcctcaggacgcagaaattcgtgtgcggtgccgctttgcctcttatccctcccaactccagcgccgctaggggtcaaatcgaaaaatggcgttgctgagcccgcgcgtgccgcggctgccgccctccaccttcacctccgctgccggtgcccggtgctttggccccgccgcgaggtgccaggcgacggcggcgggcggcgtggcggccgcggggcccccgtcgtcggagctggaggccatccggtggggcagcgccaagctgcagggcgctcgcgacgagatggaggatgaggtcttgctccgcccgggctccctcctcgatggcttctccttcgccgccgtcttggatggacacgccggcttctccgccgtccagttcctcagggatgagctgtacaaggagtgcgcagctgcgttggacggcggcgcggtgctcagcactaagaatctcgacgctatcacggcctccatccagcgtgccttcgccgctgtcgacgccaagctctccacctggctcgagcaaacggacaaggacgactctggtgctacggccactgtcatgtttctcaggagcgatgtgcttgttgtctcgcacattggggactcttgcttggtgatatcacgtggtggaagatctgaagctttgactggctctcatcgaccatatgggaacaacaaaacgtcccttgaagaggtcaagaggatcagagcagcaggtggatggattgttgatgggcgcatatgtggagacatatctgtatctcgtgcttttggggacataagatttaagacacaaaagaatgaaatgctggtgaaaggagttaaacaaggaaggtggactgataagttcatctcacgaatacaatttaaagatgatatagtaatctcgtcacctgatgtatctctggtagagcttggaccagacgtggaatttgttctgttggcaactgatggtctttgggactacataaaaagctctgaagctgtagcttttgtcagagatcaactccgtcagcatggtgatgtccagttggcctgcgaggcacttggtcagaaagctctggatcaacggtcccaagacaatattagcatagtcatagctgacttggggaggacaaactggaaggcgttgcccgatgaaaggccgaacttgttcttggaactaagtcaagcagtcgcgactgtaggggttgtctcaataggaatttgggtctcgtcgttccttgggttacagtagaactagctactccgtccggatgtgtatattacctactgagtttacatctttctgctagcagtagcagctgcaaaatatatgtatattcgtatatagtgtgtgaattgatagggtaatctgtttgggtaatactgagtgaacgtgtgaagtactgatgaagatcgtgtagttgagctcctggtgagtcatgagtcatgacagctgagtggcttttgagtaatcctcatgtcaaaaaaaaccaagcaaaagaagaagaagaaaaagatcttctcatcagttgctaattgctacaaagccataaacaaatgaaggagtattgaat

SEQ ID NO: 113676 - DNA, 1077 bp, Zea Mays
cctcaaaccaacgaagaagaacaagccttccactcagctagcatccagagcaagcgatcgagcgagctctctcggcttgctagctagctccattatatataacatcgatcgcttgatagtttttggcagctagaggaagaagagagagcagctagtacactagtacagctagcagagcaaaaccagcaaaggcgcgcgatcaggccagaagagaataatggagaagatgaacgtggttgcgagcaggaagcagggcggcgactggatctgccggtcgtgccagtacgtgaacttctgcaagcgcgacgcgtgccagcgctgcggcgaggcgaggctgggcgtggagcggacggactacggcgcgctgggcggcgactgggacgtgaagcccggcgactggtactgctaccgctgcggcgtgaacaactacgcctcccgcgccggctgcttcaagtgcggcgccgccaagaacgagtctccgccggccgccgtcgcccagggctggggctacaccgccgccggccaggccggaatgaagcccggcgactggatctgcccaagactgggctgcaacgtgcagaactacgccaaccgaaccgagtgcttccggtgcagcatgcccaaatcatactacggttgatgggggcaactgcacgcgcgtacactgatcgatgagaaaaaaaaacagaaggaaaaaacaataatatatagtaataataagtattattgtacgagatcgaagagctagagacagcacaattaactgcattttcctttccttttttttttcttttgaatgatccaatataaccctcgacaacactcagctggagtacgtggtggaggtagggttagtcgtttggaagagcagcagccgaagctaaaaaggatatttaggagcaagaatgtgaaacgaaaaaagaaaaggaataaaagagggtgactgatgccaacaatcagtatctcgcttctctatcttcttcttttttccaatatgtaaaagccgaggtcgtttaagaaaggaaaaatgcgagttcccttcgcctgcatgcatgcatgcatgcatgctttgttgtc

SEQ ID NO: 113677 - DNA, 1645 bp, Zea Mays
atcggctctcgagtcgtcggtcgtcgccgtgtcggtgtcgctcgccatatccccttttccccctcccttcgtctcccgactcctgcgatccgccccacctgaaccctactccacgtcgcctcgcctcgccggtaatcgacttccttctcttggcccttatgcaatcggttcgtactccatgctcggattctccatctgatccctatataccaactgcgccgattgtattgtcttaggttgggttgtggctgagccgatctgacccgatcgggtgggtccttgcgccgccgctgcgtgggctcatctcggtcccccgcctgctcggctcgatcggccggggacggcggcggcggcggctagatctgcgatggagggcaacaaggacgacgcggccaagtgcctgcgcatcggcaagggcgcgctcgaagccggggaccgcgcgcgcgccatcaaatttatgtccaaggcaaagcgcctcgacccctcgctgcccatcgatgacctgctcacctcccttctcaacgcgcaagacgactccccggcttcctcatcatcatcgccgcctccaccaccgcaaactgccgcagcaggggcatcggaggcagctgagactgatgggctgagagagaggaagcacaagggcaagaagagggaggaggaggaggaggcgactcctgctgccagggagtacaccgcggagcagctcgaggttgtgcgccaggtcaagaagcacaccagggactactaccagatcctcggcctggaaaaggactgcagtgtcgaggacgtgcgcaaggcctaccggaagctctcgctcaaggtgcaccccgacaagaacaaggcccctggcgcagaggacgccttcaaggccgtctccaaggccttccagtgcctgagtgatgcggagagccgcaagcgctacgaccttgttggctcggatgagccagtaacacaccacaggagggcctccactgcccgtgcatacaatgggttctatgaggatgactttgacccagatgagatattcagaaacttcttctttggcggtatggcgcctgcaaccaccaggcagtttggacagtttggaactttccattttaggactggtgggatgcatgcccatgcccatgcccaacaaaactctggtggctcaactgtcaggatgcttattcagctgttgcctgtcctactgctgctgttgctcaacttccttccatcctctgagcctgtctactcgctgtcccgttcatacccttatgagcataagttccaaaccccacgtggagttgcatactatgtcaagatgtctaatttcgaggaacagtatccataccaaagcactgagcgagcgacgctggagcggcatgttgagagggattattactccataatcacacagaattgcagggttgagctgcagcgtcgccaatgggggctgtcataccagacaccacattgtgatatgcttaaaaattttgaggctgcagcaaagtaataactcatccaattctgtaaggtatggttcaactttctctgaacatggtttagcagtaataatgtatttctgtgccatgtcgaagattttctctagagtttgccgttcggctgccctatatctaacggctgcagcagctgtggaataata

SEQ ID NO: 113678 - DNA, 1812 bp, Zea Mays
gtcggtcgtcgccgtgtcggtgtcgctcgccatatccccttttccccctcccttcgtctcccgactcctgcgatccgccccacctgaaccctactccacgtcgcctcgcctcgccggttgggttgtggctgagccgatctgacccgatcgggtgggtccttgcgccgccgctgcgtgggctcatctcggtcccccgcctgctcggctcgatcggccggggacggcggcggcggcggctagatctgcgatggagggcaacaaggacgacgcggccaagtgcctgcgcatcggcaagggcgcgctcgaagccggggaccgcgcgcgcgccatcaaatttatgtccaaggcaaagcgcctcgacccctcgctgcccatcgatgacctgctcacctcccttctcaacgcgcaagacgactccccggcttcctcatcatcatcgccgcctccaccaccgcaaactgccgcagcaggggcatcggaggcagctgagactgatgggctgagagagaggaagcacaagggcaagaagagggaggaggaggaggaggcgactcctgctgccagggagtacaccgcggagcagctcgaggttgtgcgccaggtcaagaagcacaccagggactactaccagatcctcggcctggaaaaggactgcagtgtcgaggacgtgcgcaaggcctaccggaagctctcgctcaaggtgcaccccgacaagaacaaggcccctggcgcagaggacgccttcaaggccgtctccaaggccttccagtgcctgagtgatgcggagagccgcaagcgctacgaccttgttggctcggatgagccagtaacacaccacaggagggcctccactgcccgtgcatacaatgggttctatgaggatgactttgacccagatgagatattcagaaacttcttctttggcggtatggcgcctgcaaccaccaggcagtttggacagtttggaactttccattttaggactggtgggatgcatgcccatgcccatgcccaacaaaactctggtggctcaactgtcaggatgcttattcagctgttgcctgtcctactgctgctgttgctcaacttccttccatcctctgagcctgtctactcgctgtcccgttcatacccttatgagcataagttccaaaccccacgtggagttgcatactatgtcaagatgtctaatttcgaggaacagtatccataccaaagcactgagcgagcgacgctggagcggcatgttgagagggattattactccataatcacacagaattgcagggttgagctgcagcgtcgccaatgggggctgtcataccagacaccacattgtgatatgcttaaaaattttgaggctgcagcaaagtaataactcatccaattctgtaaggttgacaggcggagagagactgctggccactcatgtaaaggcgctgccttagccgccagcttcaagtttgaggggacattttagtttggcttagtagtaaattttgtggaataagtgcctttgataactatacaccactgtccagatgctccctcttagtagtggcaaggagtgcgttaagtagttacttcaaaaagatatgcaagcttcataggggttgatcacatgcaaaccagtgtatgtatatgaagtatatctatctcattcttttaacttttttgaagtgaagactgtagttaaaacagaaatgcaactataacacaaatgtgatattcattttatattagctcgtgtgctgagatgtccaaagatgctaaaatacgatcatcggacatcattccgttggtattggatct

SEQ ID NO: 113679 - DNA, 2160 bp, Zea Mays
agcaagctcatcagcattcgactgctccagctagctgcagtgcagagccataccaaagcctgcttgtgttgtgttgtgttctcttctgctcctcgctcgcacgaataatcagttcaaaccaatggacgggaagaaggtgcaggagagggcggcatggggagccagcgacggcggcggcaacctggtgcaggacgccgtcgactacaggggctgtcgggcggacaagtcgagcacgggcggctgggtggcggcggcgctcgccctggggatcgagctgtgcgagcgcctcgccaccatgggcatcgccgtcaacctggtcacgtacctcacggataccatgcacctgcccagcgccgcagctgccaacgtggtcaccgacttcatgggcacctccttcctcctctgcctcctcggtgggttcctcgccgactccttcctcggacggtacctcaccatcgccatcttcgccctcatccaagccatcggcacggggctcctggcagtgtccacggaggtgcggcagctgcggccgccgccgtgcggacccggcgcggctgggccgtgcgagcaggccacggggttccagatgggcgtgctgtacgtgtgcctctacctcatcgcgctgggcaccggcggactcaagtccagcgtctcgggcttcggcaccgaccagttcgacgagcgcgacgcgcgcgagcgcgccgccatgggcctcttcttcaaccgcttcttcttcttcatcagcgtcggcacgctcctcgccgtcaccgtcctcgtctacgtccaggaccacgtcggccggagctgggcctacggcatctgcgccgccgccatgctcgccgccatcgccgtcttcctgtctggcaccaggcggtaccgctacaggcgcagctccgggagccccatcgtgcacatcctccaggtcctcgtcgctgccgcccggaagcggaacatcgccaagcacccgctcgccgtctccgcgctctacgaggaccgccccgagcacgcgcgcatcccccacaccgcccagttcccgtgcctcgacagggcggcggtgatggcaggggacgacgacaacgaggtggggcacgacgggcggccgacgccgaacccgtggaagctgtgctccgtgtcccgcgtcgaggaggttaagatggtggcccgcctgatgccggtgtgggcgacgaccatcctgttctggaccatctacgcgcagatgatcaccttctccgtggagcaggccaccaccatggaccgccgcatgggcggcttcgagatcccagccgcctcgctcaccgtcttcttcgtcggcgctatcatgctcaccctcgccttctacgaccgcgtcttcgtcccgctctgccggagcctcatgaccggccggcaggggctcacgaacctggagaagatcggcatcggcctggtcctctccatcgtcggcatggccgccgcggccatatccgagaagaagcgcctcgccgtcgccgccacaagtggcgtagcagggcatgggtcgctgcccatcagcgtgttcatgctgacgccgcagttcctgctggtgggcgcaggcgaggcgttcatctacacggggcagctggacttcttcatcacgaggtcgcccaagagcatgaagaccatgagcacgggcctcttcctcaccacgctctcgctcggcttcttcctcagcagcgcgctcgtctcgctcgtcaagagctgcacccggtggctcggcgacacaatcaaccacagccgcctcgactacttctactggctgctggccgtgctcagcgttgtcaacctcgtcgcctaccttgtctgcgccatgtgggccacggcaccgaccagcagccaggcggagcagccgcagcccgcgatggtcgccgacgagaaatgctagcaagatatatcagccaccgaacgatcgacctctgttgcaccgatcacttgttaattatgaagggcacaaaatatatattacttgatacgcctaccagtttagaggattttatagttctgatgagtggatgcagtgtcgatgtcatttttcctacatgtcaaaaccaagttcacctctatttattgaaaaataagaaaaatgtttaaatgtaagaggccggtctagcactctagatagtgtggtgtctgagactgagggcttgt

SEQ ID NO: 113680 - DNA, 91 bp, Zea Mays
ttttttatggttatatatgaatatatgttatgcctatgttgttcctctgtaaaatttcacgattttttgaggctatttatgtattattaac

SEQ ID NO: 113681 - DNA, 2347 bp, Zea Mays
cgagtaaatcctctctcctcctcccgactctcaattgcttcaaggcttcatgcttcatgctttgtcggccccggcccgcccccctatggctcagccaactgctggagtggtagtggttgcttcctctctcttctcacgtcaccatgatcgataagcctagctagaatataggtggctggcagtggcagtggcagcgctatcctatatagtgccccccggccggtgtgatcgcctcgggagctagccttggaagaagaagcagagagcagagacgccgttgcgtagagggaggaggagtgcttcttcgttcgtcgttgcccaaagcagcagcagtcacttggaattggaccagagcggcgccgagcgctgccggccggccggccgacctctgtttgtagcggcggcagcaccagctctcaactgctcaagcaaaccaattaaagcagccagcagtctgtcacactcacacacacaggcggaaccgaaccggccaatgtattcttcgtcgccggcctgggagaagcgcgtgagcagccaagagcaggagccactcttttgcaattgcagctgcggcaggaggtttcacaggccggcggtcatctgcaggacgccgcactgatggcgacggcggtctcctgtccctactcctcgtctcgcgccggcgcccctgcactgctgctcgtcgcgcttcttcttgccgccgccagctggacgaccaccgccgcggcgaagaacgacacgcagaggttccggcccggcgacgagctccggcggtaccggagggtgcaggcgctgctcaagaggctcaacaagccggcgctgcggagcatccagagccccgacggcgacctcatcgactgcgtgccggcgcacctgcagccggccttcgaccacccgaggctgcgaggccagaggccactggtggcgggcccgccgccggcgaggcccaaggggaatcgcctccgcgacccgataaggaatgacaccgcggaggccgccggcgtccagcagctgtgggcggcgtccggggagtcgtgcccggaggggtccgtgcccatcaggcgtgtcacggagtcggacgtgctccgcgccagctccgtcaggcggttcgggagggcgcccgcgggcagggtgcggcgcgactccgtctccggcggccacgagcacgcggtggggtacgtggccggcgacgagtactacggcgcgaaggcgagcatcaacgtgtgggcgccgcaggtgagcacggcgtcggagttcagcctgtcgcagatctgggtcatcgccggctccttcggcaacgacctcaacaccatcgaggccggctggcaggtcagcccggagctgtacggggacaacgcgccgaggttcttcacctactggacgacggacgcttaccagaccaccggatgctacaacctcctctgctccggcttcatccagaccaacagccgcatcgccatgggcgccgccatctcgcccacctccgcctacaacgccggccagttcgacatcagcctgctcgtctggaaggacccgaaccacggcaactggtggctggagttcggctccggcgagctggtggggtactggccgtcgctgctgttcagccacctggcgtcgcacgcgagcatggtgcagttcggcggcgaggtggtgaacacgcgcgcgtcggggtcgcacacggccacgcagatgggcagcggacacttcgccggggaaggcttcggccgggcctcctacttccggaacctggaggtggtggactgggacaacagcctggtgccgctcgccgccggcttccacgtcaccgccgaccaccccagctgctacgacatccagggcggcgtcaacgccgtctgggggaactacttctactacggcgggccgggcaggaacgtcaggtgcacctagctagtagcagctatagctcttcgtcatctcgtctcggcccgttaacctgatgtgatgatgccgctagctaggattttctcttcttccatatattgcccacaaaaaggttaattaatttctcaaatgcgagagtcacggatcatgtagttttcttttctttttgatttcctattttcttggtggtctctgaacgaaacaaaagggtgaagggttaagctcagttcaaacgtagtccagttcatcaggtcgtagcgacgatgatggtcgtcgagttgtaacgtacgtaaaagccccctgaacaatatgtagccacaaggcacaatctagcagtatatacacgcattgttttactcctttccagttcaccttgttgcttgcctctgactcaaagtctccgctgatcgatgatcatgaagaaaaaacaaacaaaaaagaa

SEQ ID NO: 113682 - DNA, 2255 bp, Zea Mays
tgcttcatgctttgtcggccccggcccgcccccctatggctcagccaactgctggagtggtagtggttgcttcctctctcttctcacgtcaccatgatcgataagcctagctagaatataggtggctggcagtggcagtggcagcgctatcctatatagtgccccccggccggtgtgatcgcctcgggagctagccttggaagaagaagcagagagcagagacgccgttgcgtagagggaggaggagtgcttcttcgttcgtcgttgcccaaagcagcagcagtcacttggaattggaccagagcggcgccgagcgctgccggccggccggccgacctctgtttgtagcggcggcagcaccagctctcaactgctcaagcaaaccaattaaagcagccagcagtctgtcacactcacacacacaggcggaaccgaaccggccaatgtattcttcgtcgccggcctgggagaagcgcgtgagcagccaagagcaggagccactcttttgcaattgcagctgcggcaggaggtttcacaggccggcggtcatctgcaggacgccgcactgatggcgacggcggtctcctgtccctactcctcgtctcgcgccggcgcccctgcactgctgctcgtcgcgcttcttcttgccgccgccagctggacgaccaccgccgcggcgaagaacgacacgcagaggttccggcccggcgacgagctccggcggtaccggagggtgcaggcgctgctcaagaggctcaacaagccggcgctgcggagcatccagagccccgacggcgacctcatcgactgcgtgccggcgcacctgcagccggccttcgaccacccgaggctgcgaggccagaggccactggtggcgggcccgccgccggcgaggcccaaggggaatcgcctccgcgacccgataaggaatgacaccgcggaggccgccggcgtccagcagctgtgggcggcgtccggggagtcgtgcccggaggggtccgtgcccatcaggcgtgtcacggagtcggacgtgctccgcgccagctccgtcaggcggttcgggagggcgcccgcgggcagggtgcggcgcgactccgtctccggcggccacgagcacgcggtggggtacgtggccggcgacgagtactacggcgcgaaggcgagcatcaacgtgtgggcgccgcaggtgagcacggcgtcggagttcagcctgtcgcagatctgggtcatcgccggctccttcggcaacgacctcaacaccatcgaggccggctggcaggtcagcccggagctgtacggggacaacgcgccgaggttcttcacctactggacgacggacgcttaccagaccaccggatgctacaacctcctctgctccggcttcatccagaccaacagccgcatcgccatgggcgccgccatctcgcccacctccgcctacaacgccggccagttcgacatcagcctgctcgtctggaaggacccgaaccacggcaactggtggctggagttcggctccggcgagctggtggggtactggccgtcgctgctgttcagccacctggcgtcgcacgcgagcatggtgcagttcggcggcgaggtggtgaacacgcgcgcgtcggggtcgcacacggccacgcagatgggcagcggacacttcgccggggaaggcttcggccgggcctcctacttccggaacctggaggtggtggactgggacaacagcctggtgccgctcgccgccggcttccacgtcaccgccgaccaccccagctgctacgacatccagggcggcgtcaacgccgtctgggggaactacttctactacggcgggccgggcaggaacgtcaggtgcacctagctagtagcagctatagctcttcgtcatctcgtctcggcccgttaacctgatgtgatgatgccgctagctaggattttctcttcttccatatattgcccacaaaaaggttaattaatttctcaaatgcgagagtcacggatcatgtagttttcttttctttttgatttcctattttcttggtggtctctgaacgaaacaaaagggtgaagggttaagctcagttcaaacgtagtccagttcatcaggtcgtagcgacgatgatggtcgtcgagttgtaacgtacgtaaaagccccctgaacaatatgtagccacaaggcacaatctagcagtatatacacgcattgttttactcctttccaaaaaaacaaacaaaaaagaagaagaagaagagaa

SEQ ID NO: 113683 - DNA, 2181 bp, Zea Mays
gctcagccaactgctggagtggtagtggttgcttcctctctcttctcacgtcaccatgatcgataagcctagctagaatataggtggctggcagtggcagtggcagcgctatcctatatagtgccccccggccggtgtgatcgcctcgggagctagccttggaagaagaagcagagagcagagacgccgttgcgtagagggaggaggagtgcttcttcgttcgtcgttgcccaaagcagcagcagtcacttggaattggaccagagcggcgccgagcgctgccggccggccggccgacctctgtttgtagcggcggcagcaccagctctcaactgctcaagcaaaccaattaaagcagccagcagtctgtcacactcacacacacaggcggaaccgaaccggccaatgtattcttcgtcgccggcctgggagaagcgcgtgagcagccaagagcaggagccactcttttgcaattgcagctgcggcaggaggtttcacaggccggcggtcatctgcaggacgccgcactgatggcgacggcggtctcctgtccctactcctcgtctcgcgccggcgcccctgcactgctgctcgtcgcgcttcttcttgccgccgccagctggacgaccaccgccgcggcgaagaacgacacgcagaggttccggcccggcgacgagctccggcggtaccggagggtgcaggcgctgctcaagaggctcaacaagccggcgctgcggagcatccaggcacagccccgacggcgacctcatcgactgcgtgccggcgcacctgcagccggccttcgaccacccgaggctgcgaggccagaggccactggtggcgggcccgccgccggcgaggcccaaggggaatcgcctccgcgacccgataaggaatgacaccgcggaggccgccggcgtccagcagctgtgggcggcgtccggggagtcgtgcccggaggggtccgtgcccatcaggcgtgtcacggagtcggacgtgctccgcgccagctccgtcaggcggttcgggagggcgcccgcgggcagggtgcggcgcgactccgtctccggcggccacgagcacgcggtggggtacgtggccggcgacgagtactacggcgcgaaggcgagcatcaacgtgtgggcgccgcaggtgagcacggcgtcggagttcagcctgtcgcagatctgggtcatcgccggctccttcggcaacgacctcaacaccatcgaggccggctggcaggtcagcccggagctgtacggggacaacgcgccgaggttcttcacctactggacgacggacgcttaccagaccaccggatgctacaacctcctctgctccggcttcatccagaccaacagccgcatcgccatgggcgccgccatctcgcccacctccgcctacaacgccggccagttcgacatcagcctgctcgtctggaaggacccgaaccacggcaactggtggctggagttcggctccggcgagctggtggggtactggccgtcgctgctgttcagccacctggcgtcgcacgcgagcatggtgcagttcggcggcgaggtggtgaacacgcgcgcgtcggggtcgcacacggccacgcagatgggcagcggacacttcgccggggaaggcttcggccgggcctcctacttccggaacctggaggtggtggactgggacaacagcctggtgccgctcgccgccggcttccacgtcaccgccgaccaccccagctgctacgacatccagggcggcgtcaacgccgtctgggggaactacttctactacggcgggccgggcaggaacgtcaggtgcacctagctagtagcagctatagctcttcgtcatctcgtctcggcccgttaacctgatgtgatgatgccgctagctaggattttctcttcttccatatattgcccacaaaaaggttaattaatttctcaaatgcgagagtcacggatcatgtagttttcttttctttttgatttcctattttcttggtggtctctgaacgaaacaaaagggtgaagggttaagctcagttcaaacgtagtccagttcatcaggtcgtagcgacgatgatggtcgtcgagttgtaacgtacgtaaaagccccctgaacaatatgtagccacaaggcacaatctagcagtatatacacgcattgttttactcc

SEQ ID NO: 113684 - DNA, 270 bp, Zea Mays
tgggaatctaataatgctctggcttacaaaaaattattactgactggaatatcagctttattttggtccatctggcttgcgtttaatcataaaccaataccatcaattgtgtaggttattttcagggttactcactggttcagattctggagacttctacagaaggagaaaaagcaccaacaaattctcgatgcctgtcgagctttggaggtggtggcgattgaagtttttgcaatgcatggatggcgctcgaatgcaagaattaaagat

SEQ ID NO: 113685 - DNA, 1810 bp, Zea Mays
cgcaaaaggaggccgcgcagcgcattatataaaaacccatgtcccaggagttaggagtagccccaacagacgaccactgtatgcttgtggaaatgggcagcagagcagctttcgtggtcgcgtttctcctgagggctatatatgcaggcacgcagatactcaccaaggctgccttcgatgaaggcatgaacacgtcggtctttgttttctacaggcatctgactggtatcctcttcttggtgcctattgcttttgtgcttgagaggaaaactgcccctccactgtcattcagagtctctctgaaattgtttttccatgcactatacgggatctctggagcaataaacatatacggcctcggtctcagctattcttcagcaacatcatcgtctgcgatatttaacctcctgccagctgtggctttctttctggctgttcttttggggatggagacactgaacttgaagcggttccacgggatcgcaaaggctgcaggcgtgttgttcagcactgctggcgtgactgtgctggcgttctaccaaggccccgcattcagatcgttcatccaccacaccgctttctcccatcacaacgtccacgctggggtcgttaccgccgctcatcctaaaagcgtctggatactggggattttcctgacgaccttgtcgactgcatcgtgggctctctggacggttcttcaggggccaatgctggaagcgtacccatccaagctgctcaacacgaccctccagatgatcttcgcgacggtccagtgcttcttcatcgccctagcggccgagagggacttgtcgaggtggaagctggcgctggacatacgcctttacgctgtgatctactctggaatacttgtctcgggagtcgcttactacatgcaagtatgggtgatcgagaagagcgggcctgtcttcttggccatgacgatgccgataaccttgcttgtcaccatcattctgtccctgtttctcggagagccggttaccctgggaagcatcttgggtggactgatcatggtcggtggtctgtacagtgtgctctgggccaagaggtctgagcaggtgcatgccagcaagcagcaaatggcggcgcctactcctcctccagcagaggcgacacaagtgtaggccgagcttagcttgtttgtggttgcacacccccgttgttgatgctggtagtttgcacgtattttgcagacacaagtttgtacgtattttgcagtgactgagatcgagagaactgtgaagttctgattttagataatggaaacctgaatgagcacatgcatcaggcccctaaggactcccctaacagctgctaaaccacgcctagcacttgtcttttgattacagctgacattctcctcctaatcctaagacttgtgcagttgtgcttcatgttgacgacgccaattcggtcacaaagttctctgaacttctcacgcctaagtgacttcgtcgtcaggatgtcagcgaattgttagaaatctgctcccttcgtccacacactcactcacgtgtgtggaatttttgcctgttcgtttggctttaatctgtaccggtttctactgtttctataatattttgtctctataggttacagttgtatctatatgcacttttggatgaacttttggaagtggtggcgatggaagtctttgcaaaccatggatgacgctcaaatacaagaattgagtatggctagtattagtcatagtcttgtaattttgttcctttgagttagtatcactatttaggcaacagttcttaattgtaataatcgacttgtattggct

SEQ ID NO: 113686 - DNA, 1050 bp, Zea Mays
atgggcagcagagcagctttcgtggtcgcgtttctcctgagggctatatatgcaggcacgcagatactcaccaaggctgccttcgatgaaggcatgaacacgtcggtctttgttttctacaggcatctgactggtatcctcttcttggtgcctattgcttttgtgcttgagaggaaaactgcccctccactgtcattcagagtctctctgaaattgtttttccatgcactatacgggatctctggagcaataaacatatacggcctcggtctcagctattcttcagcaacatcatcgtctgcgatatttaacctcctgccagctgtggctttctttctggctgttcttttggggatggagacactgaacttgaagcggttccacgggatcgcaaaggctgcaggcgtgttgttcagcactgctggcgtgactgtgctggcgttctaccaaggccccgcattcagatcgttcatccaccacaccgctttctcccatcacaacgtccacgctggggtcgttaccgccgctcatcctaaaagcgtctggatactggggattttcctgacgaccttgtcgactgcatcgtgggctctctggacggttcttcaggggccaatgctggaagcgtacccatccaagctgctcaacacgaccctccagatgatcttcgcgacggtccagtgcttcttcatcgccctagcggccgagagggacttgtcgaggtggaagctggcgctggacatacgcctttacgctgtgatctactctggaatacttgtctcgggagtcgcttactacatgcaagtatgggtgatcgagaagagcgggcctgtcttcttggccatgacgatgccgataaccttgcttgtcaccatcattctgtccctgtttctcggagagccggttaccctgggaagcatcttgggtggactgatcatggtcggtggtctgtacagtgtgctctgggccaagaggtctgagcaggtgcatgccagcaagcagcaaatggcggcgcctactcctcctccagcagaggcgacacaagtgtag

SEQ ID NO: 113687 - DNA, 524 bp, Zea Mays
tcggttacacggtcttgatcgtagcagatgatcatgcatggtgtttacttacttaacctacacacacagcaactgtttgtcaggggccaatgctggaagcgtacccatccaagctgctcaacacgaccctccagatgatcttcgcgacggtccagtgcttcttcatcgccctagcggccgagagggacttgtcgaggtggaagctggcgctggacatacgcctttacgctgtgatctactctggaatacttgtctcgggagtcgcttactacatgcaagtatgggtgatcgagaagagcgggcctgtcttcttggccatgacgatgccgataaccttgcttgtcaccatcattctgtccctgtttctcggagagccggttaccctgggaagcatcttgggtggactgatcatggtcggtggtctgtacagtgtgctctgggccaagaggtctgagcaggtgcatgccagcaagcagcaaatggcggcgcctactcctcctccagcagaggcgacacaagtgtag

SEQ ID NO: 113688 - DNA, 104 bp, Zea Mays
gacgaatcagagcagccaggtgaccaaccgtggtggctgacacctaggacacacacttgcgcgaggacgtggtggagtggaccgtgttaccgacgtagtcgagg

SEQ ID NO: 113689 - DNA, 1948 bp, Zea Mays
ctctgtctcccattcgatcttgctcggagctagctagagagaccagcaagcagatcgaccactgctgccggttgctgctttttttccccccggacggaccttttatttagttacaaagctatagttttttcttattcagctccacttttattaattaaaaagatgcgcagtctgttacctctggcgtaagtctcaagcatcgaactgcctagctgctgtccccctagctgagagctgagctgctgagatagcgagcgccacccgtcgcttttcatttataatcgcccgccagcaggccgtctcatcatcattgttgccatccgcggcgccggcggctctgcatgcgcgcgccctgcggaaactgatccatgatctgatcccacggcaccagcagcaacggccgaccgccgggccggccggccggcgcgcacgcacggtgggcgcgcgcgcggtgccaaataaagagcttagagccgccggccgggatctatggggcgcgaggcggcagccacgaggccgcccaagctgcggaggggcctgtggtcgccggaggaggacgagaagctgtacaatcacatcatccgatatggcgtcggctgctggagctcagtcccaaagctcgctggcttggagagatgcggcaagagctgcaggctgagatggatcaactacctgcggcctgacctcaagaggggcagcttctcccagcaggaggaggatctcatcgtcagcctccacaagatactaggcaacaggtggtcccagatcgcgtcgcagctgccggggaggacggacaacgagatcaaaaacttctggaactcgtgcatcaagaagaagctccggcagcagggcatcgaccccgccacccacaagccgctcaacgacgacgacaacgctgctgctgctgctgctgcggacaacgacgccgccgtggcgccgcaccaccatcgtcgtcatcaggacgaccactgcggcgccgccaatattgataataataataataacaacaacaacaacaacaatcggcagctcccctcagccgacgaccactgcttcgccatgagcagcgacgaccctctcgcgccacactccccgaccgtcagcttcgacccactgtccgtcaccaacgtccccacggcaatgcagcagggctcctacggctcgttccgctccgacaacgaccacctctgcgactacggcggcggcggcgtcgacgtggtctcggacgccgccacggcgtacagcgccccctacacaggcggcggcggcggcggcggagacagctccagcaacagcaacggcaacggcacctgggcctgcagcggcggcgagccgatgccgccgcacgtggccatgttcggccgcgatgctgcccaggcggcggcgtaccatcagttcgtcgacccggccaagtacagcccctggcagcagcacccggcggcgaggctccatgatcacaacgtcggcggcgctgctgcgggcttcccgatacggtccatgtcgcgggacctgccgggttcctgcttcgacctcgcccgcagcgcgctggaggacgagttcagcgtcgacttcctctgacgtacgactacgccgacgcgcgacgtacggccaggaggtcgttggtgcatgtcgtcgtccaacactcactcgatcgacagacacacacacagatacacttttcattcactactactgctactattacctcagtcctcacagagatcacctaaaaaaacaagacacactctccttgtgtctgcaggcatattcgttcgttattccccacttcttttcatgtggtccggtcatactttatttggacccatcgatcaagttggttaattaacacgttttggtggtatgttatactgtgtttataataagggttttatctgtattattatgtatacacctcaattatattcatgggaaccaatttttttgattg

SEQ ID NO: 113690 - DNA, 543 bp, Zea Mays
atggaaaaccaaggcaagcacagtgcacagcatgtaccgggccgggaccgggcgggccaagaagctagacgaaaaggaagggagatcgaggaggctggcgcaagcctactaggagcggcgagcaacaagtgtcatcgggtcgggatcggaaacggcgggtcgaaggaccgtagccagtcggagtccggcaggttgagcggcggcagcgagtggcttcctctggtggagctccccgcgcggacgtcctgcatggtgaggagcgcggccacggtgttgcggaagatgccctgctccgcctccgcgacggcgagcgccgcggcggcggcctggccccgatcgcgcgcctccgggaacacggcctccatcaaggactcgcactcccgcaccagatgcgacaccgtctccgtcttgaagaagggctgctgcagcaccgactccatcacggcaagccgcagcatcgcgccggtgcgcttgtcgtacttcttgaggatcttggccagacctgcaggctttcaattcaactccgtacagctagctagctag

SEQ ID NO: 113691 - DNA, 1659 bp, Zea Mays
atcgagtcccgtccgctccatatggaagaaggcggccgccatgaccatgacgcgggcgaccgcatcagcagcctacccgacgacctcctcttctcaatcctcctccgcatcggatccattcgcgccgccgcgcgcaccagcgtgctctcccgccgctggcgccacgtctgggcccgcctgcccgagctccgcctcggcacatgcgacgagcagccgggggcgacgttcctggacttcgtcgacgccgtcctcgacgcctgctccgccccggccgtccaccgccttgaggtggccatgtactgccatggccttcgagtccatgcgtgccgcctcgtcccgtggctacgcttcgcctcgcagcgccgggtgggggatatccatatccaagtgccatcccagaagaaattcttcttgtctaagcccatcaaagaggagctcgagcttcccgtgtgcgatggagcgacgagaatcaccctctcgctcgagcgacgatggagcctccgcctctgtccggcgggctcgttcatgtcgctgaccgacctgcacataagctgcgccaccatggcaggcagcgagcttggcaaccttgtgtccgagcagtgcccgctcctgaggaatctgtaccttttcgtcaggctggctgctgcttccaacgtgtccatacactccaactcgcttcagtccctctcattcaacgtccaaaacacccagaagctagaagtcatggcccctaagcttgaagtgctggccgtatgtgatgccactaaggcacatatctctgccccaaagctctccgtggtaagttgggacaatgacactggctacaaccctctgtgccaccactttgccaatgctgcccgtcacctccgcctgctacacttgggctcaaagtgtgtatccgcttccctgatgcgtcaattcgatgaagttgatgtgctgaagctgaagctgaacctcctcaatattaagggaacagaggcatacacaaatttattgaatgaaacggctgcactacccaagtgtgaggaattaaagttacgagtgtcattaagggcttcccaacacaactttgcatcaatcatgtttcatatcttaaggagctgcaacaatacaaggaggatttcgataaagatcgattctagcatggtgtatctttgcccatcctcttgcttttgtctcgggccgcagattttcaaggctgatggcattattctcgagtcccttgaagaggtgaaaattacttttattagacattgctatggacaagtgcagttcgtggaggagtttgccaggtgccatgcaccaagcctgaaaaagttagtcgtcaactcaccaaccaaagggctacaagagatggtcggcggattgtttgatccggatgtcactgtcaaatgcaatgttatctagcgccagaggggtgtgtctttgaaaaagataaatctatatttgaaatttaccataaaccagctccaccagggaattcaggatctactagtgaactatttagatacacaatagctttaaatccataaaatataataggttttggttggaatgccttgttttgctattgaggtgaatatttgtcaccggctagttcatttttgaactacacgtcgacaaataaaaatgacaaagggagtgtatctttttttttcc

SEQ ID NO: 113692 - DNA, 924 bp, Zea Mays
atggccgccgatcgccgcttcaagatctttgcagccgccgatggcttcggccagccactcaaggacgccgtcgtcgcttatctccgcgcccaccccgccgtcgccgaggtcgttgacctcggcgtcgacaagtactacgccgccgccgcagccgtcgcccgacacgtctcctctcccgactcggagcctgacgcccccgaggtccgcggcgtcgtagtctgcggcaccggcgccggcgtctgcatcttcgccaacaagtacccgcgcgtctacgccacccactgtgcttcccccgccgacgccgtcaacacacgctccatcaacgcctgcaacgtcctcgctctctccggaatcgccacgcagcccgacgccgcggccgccatagccgattcctggctcgccacgcccttccgcgccccttgccccgcctccggcgacgcgccctggccggaggacatccaggggttcttcgacaccgcgccagacgagatggccgccatcccggaggcggaggatgccccggactcggtctgcgccatctgctgcctcaggaacgggatggagttcgagccggtggggattatgcccggcggcgagatgcggatcgtgcgggagagccccacctcggcgtacgtccgcttcaaggctggcagtgtggagccagcgcaccatcacacctttggccacgacctggtggtcatcaagggcaagaagaaggtttggaacctcaccaagaaggaaagctacgacctggtggacggagattttctcttcacacctgccggggatgtgcacagggtcaagtactttgaggacacagagttcttcatccgttgggatggccactgggacatctttctcgacgaggatctcgacactgcacgcagtgccattgacgcggagcttgcagctgccagcaagtga

SEQ ID NO: 113693 - DNA, 1623 bp, Zea Mays
atgactcctagggtctggaaacaaaccacggagctgtgaccgctccgtgtccgaggagagcggcggcggcgcaaggagtcttcctctccgacgccggcaacgtcgacaccgctggcaaacttctctccgattgtccctgctccagtaagagtaggcgaggacgagcctcccccatcttgggtgttggtgcctgacccattttctcaagttttgctatggatatgagcaatagagatcaccttaggaggagggaggatgatgatgatgacctcttccttttgattctcccttccctacatctcttgggctatcttggacgtagtaaaaagaaattgaggcatacatcaacgctgaccggggaggaaaaggttcgagagctgcttgaaggccatatcaagaactgcagggtatcatttagaatggaaccttacattttcaaatccttggcgaactatcttagaatggaaggattggttaaagatacaagaatcaaagttgaggaaaaacttggcttcttcctatacatgattagccacaatgcgacatttgaagatctccaagtcttttttggtcatagcaatgatacatttcaccgtgttatcaaacatttcttcgacattgttatccctggccttagcatgcggttcctaaagcctccttccaatcaagttcatcctaaaattcatggattgttgctgatccaccaatatgggaaaacatcataaaatcatttcctagggccaagaaatttcaaaagaagtctttccctctctttgatgctcttggggaactatatgatgggcacattgctcaagggacctggaacataacatctacacaactaccacaagaatggaacacaatttcaaatgaagaagaacaagtgaacaccacaagaatggatgaggaaggcattattcaacaacaaccacaagaagaggattcaagattggaacaagatgaagatcctataattgaaaggactgaacagaggtctactgcaatgagaaggtctactgcatcaacaatcaatcaagataaggaagcaaagaggatgaagaaggattctttggaaggacttgttgggagatatctagatctgaaatcaaaacaagttgaggatgaggttacacaaatggtgaaaggaaaagaatctgctcaaggtaatgacttctccatcatgagatgcatttctgttcttagatctatgaatgtgacagcagatgagaagataaaagcagctgaggtgttcgacataccaaacaacagagagacatttatcagttttagtgttgatgaaccagaaactgccctcctatggttaagacggaagattgataagctctaagacaggaaatattggtcatatggagacagttctgcacagcgttttgagtgccagtatgagctatatatatgttgcatttctccatgtttgggctcagcatgtaatagaaccgaaggaaggttgttgcgagacttgtatggcatgcttaaatttctggataaaatctagcatatactaagtctattacatgcttaaatttttgaaaaaatatgtatcgagaattggatggaatgcttaaatttctagataaatgacatgttctatgtttaaatttc

SEQ ID NO: 113694 - DNA, 1612 bp, Zea Mays
atgactcctagggtctggaaacaaaccacggagctgtgaccgctccgtgtccgaggagagcggcggcggcgcaaggagtcttcctctccgacgccggcaacgtcgacaccgctggcaaacttctctccgattgtccctgctccagtaagagtaggcgaggacgagcctcccccatcttgggtgttggtgcctgacccattttctcaagttttgctatggatatgagcaatagagatcaccttaggaggagggaggatgatgatgatgacctcttccttttgattctcccttccctacatctcttgggctatcttggacgtagtaaaaagaaattgaggcatacatcaacgctgaccggggaggaaaaggttcgagagctgcttgaaggccatatcaagaactgcagggtatcatttagaatggaaccttacattttcaaatccttggcgaactatcttagaatggaaggattggttaaagatacaagaatcaaagttgaggaaaaacttggcttcttcctatacatgattagccacaatgcgacatttgaagatctccaagtcttttttggtcatagcaatgatacatttcaccgtgttatcaaacatttcttcgacattgttatccctggccttagcatgcggttcctaaagcctccttccaatcaagttcatcctaaaattcatggattgttgctgatccaccaatatgggaaaacatcataaaaggccaagaaatttcaaaagaagtctttccctctctttgatgctcttggggaactatatgatgggcacattgctcaagggacctggaacataacatctacacaactaccacaagaatggaacacaatttcaaatgaagaagaacaagtgaacaccacaagaatggatgaggaaggcattattcaacaacaaccacaagaagaggattcaagattggaacaagatgaagatcctataattgaaaggactgaacagaggtctactgcaatgagaaggtctactgcatcaacaatcaatcaagataaggaagcaaagaggatgaagaaggattctttggaaggacttgttgggagatatctagatctgaaatcaaaacaagttgaggatgaggttacacaaatggtgaaaggaaaagaatctgctcaaggtaatgacttctccatcatgagatgcatttctgttcttagatctatgaatgtgacagcagatgagaagataaaagcagctgaggtgttcgacataccaaacaacagagagacatttatcagttttagtgttgatgaaccagaaactgccctcctatggttaagacggaagattgataagctctaagacaggaaatattggtcatatggagacagttctgcacagcgttttgagtgccagtatgagctatatatatgttgcatttctccatgtttgggctcagcatgtaatagaaccgaaggaaggttgttgcgagacttgtatggcatgcttaaatttctggataaaatctagcatatactaagtctattacatgcttaaatttttgaaaaaatatgtatcgagaattggatggaatgcttaaatttctagataaatgacatgttctatgtttaaatttc

SEQ ID NO: 113695 - DNA, 1692 bp, Zea Mays
aaagccgctcggttcgctcacctgcctgtgttgcctagttgccttgcgacttgcgagtgggcggcggagtgcccgagtcggtgcggccgtgcaggagcgtttgctgtctccgtttccgtcccgttccctttcgtggactgttttggaaggcgttgcgatgagacgctgctgcggcggcggcgaggagtgcatccctcggcgatgagcagaatcaccacgggatcttaatctcccttgcctcgtttgcggagagcctgcgctgtcggcggcggcgcacccccctccccttcccccggtgcttccgtctgctggctggactcagttcttccaactcggcccttaacaagagaacgacgaccatgccgatgcgtggcgtcgatttcaagtggtatgatgggttcttcctctccatgctcgccactagcgtaattatcgtttccattaattggaagaggtatcgcctgtgtgcccacccgctccacatttggatagtggtggactacaccactgtcttcatcttccgcctcctaatgtttgttgataatggtctcgctgcaggaatgggattagatctcggatggcaacagagatatgctcgtttttgtggaagaataattgtcctctcagttcttgtgctacttctctacccctttctctgggtttggactgtgattggaacattgtggtttagcactgcaagaggctgcttgccagaggaaggacaaaagtggggcttcttgatatggctgcttttcagttactgtgggctcgcctgtattgcttgtgtagctattgggaagtggttacaccgaagacacgcacttcaacagagagcacaacaaggaattccagtctctgaacatggggttttagttgatatgatccgtgttcctgactgggcatttgaggctgttggcctggaaatgagagtgggtcaagatactgcatatcatcctggtctttatttaactgatgctcagagagaagcagttgaggcactgattcaagagcttccaaaattcaggctgaaagctgttccaacggactgcagtgaatgccccatctgccttgaagaatttcatgttggcaatgaggtccgtgggctcccatgcgcgcacaatttccatgtggagtgcatcgaccagtggcttcggctgaatgtcaagtgcccacggtgccggtgctccgtcttccccaacctggacctgagtgcgttgaacaatcttcggtcgaccagcgagccggaccatccatccgccagcgccagcaatgtaacgacggcaactgcagcgacgagatacgtgaggtcgcagccggcaggtcaaagctatttggtgcggttgcaggggctgctgctccgccctgtccggcacgatagcgtggagagtgacggtgagccggcggtgggcaacagtcgcttggttggcaccgaagagctgcctagcatacttgtagacgatggccatcagctgccagatcgctgactgatttgatgacctgatggatccagcatacttgtcagcataatttaggatacttgtcagcttttcttttacagttttcttttgcaaatgaaatgcgagttttgttgaaagaattttttttaactgaacactgaaataagcaaataaaattatttagctcaaaggaaataaaattacattacttaaagaaatcacacaatacatacaa

SEQ ID NO: 113696 - DNA, 1965 bp, Zea Mays
caggtgccgatagctgatcctccctgccgcgcacgcgcgtcaatggcgccgccagtcgccggcgtcgtgcgtcttgccgcggcctcccgcgtattagttctgtccctctacctgctcgcccgcctcctcttgcgcccctacgacacctccgctactctccacccaccctgcctctcctctttctcctcttccccggatcccaacacgcccgtctccgccgctatctcgtcgctggccgtgtgggacggtgtccacttcgcccgccccgctgagtgcggctacgagtacgagcagtccttcgccttcctcccactcctccccgcctccctcgtgctcctcgcacgattgttgttcgcgccgctagtaccgatactagggtacagggccgtgctcgtgctctccggctatgtcctcaacaacgtcgcattcgttgctgctgcggcctacttctacagattgtctgtgctgattttgaaggaccagaaagctgcttaccgagcatctgttctgttttgtttcaaccctgcttctgtgttctactcatcattgtattcagaaagtctttatgcacttttttctcttgggggcatcttctacgtgttttccggtgctaatactgttgcagtgataatgctcgctctgtctggttcagctaggtcaaatggagcacttaatgctggctatttctgttttcaggccttgctacaagcatatgatgctactgtacaaaagaaaaggcccttgttggcaattcatgcccttgtggctggagctttgcgctccattttcatatttctacctttctttgctttccaagcatatggatatttgaacatatgtgtacatgggagctcagacgaattgaggccatggtgcaaagcaaaagttcccttattgtatggcttcatccaaagccactactggggagttggtttcttgaggtacttccaagtgaagcagctgccgaactttctcttggcttcaccagtgctttctctcgcggtttattctattgtccattacgcaaaactgcttcaccggtgttttcaaagaactagcgtccacaagcagattatcactgctctagagaaaaggccagttgtgtcgtatagaagatctgatgacgcgacaattttgagtgaacctcctgctggactcaccaagaaagcacaagggagctctaaggctaaacagagaaaaccagttgctaccgagatagctcctgcgacattccatgacagtaccacgccagctaaccaaaacatcgaagaggatcaggacacgtgctccatactactactcccattcgttctgcatctggccttcatggcattcacagccttgttcgtgatgcacgtccaggtgtccacacggttcctatccgctagccccccggtttactgggctgccgcgcacgttctggcttctccgagccgcgccaacagacgatggggctacctgatctgtgtctatttcatcgcgtacattcttctaggtagcctgctcttctccaacttctaccctttcacgtaacgtaagaacggcggagtggggggtgtccccggatgcgttatccagtagcgagcactgccgcagtggattattgctcatctgtttatcaggtggattttctcgaccagctttgcctgaaggtttccctaggtttgctaggtgcttcctttggttcagtaattgagcgttggctactcgaatcgcttggaatctggtgggctgattgtatccttacgtatgtacgtatacatatatttttttttcctttcatttggttatgatgtggccacgagcttaattacatatgtatccttagaatcagaagttggagagcagaagacataataacatcagtcccaactcggaagcagcaaagcgaggtagatatcacaaactcgttcttctcagagcaacatgtatgcaaacagcttggggggggtcgatcttctccaa

SEQ ID NO: 113697 - DNA, 2978 bp, Zea Mays
cgacgcccgactgcggctgcggctgcgctgccagagagaagagaaggggcgataaaaatcctgtccgtatcaccctcccttctccagtcccagtcccagtggtgccagtggagtagcggccgctgcgcagtacagtgcagtgcagtgcagggggtcgccggcgtctcccgccgtccgcttcgatcaccgtcggacgcggaggaggaggagaagcgccaagacgaggacaggcgggttgcggcgtcattcgcggaacgatggcggcctgccgcgccggcggttaggcccctccgctccgctccgctcctccgagattgttgccctcttgttcctgtgaccgagataaattcaatagaattttctcctaagctatttaaaggacaactatggctacaattcaagatataggactctctgcggctatcaacataatgggtgctgtactgttcctagttgcatttgctttccttcgactgcagccaatcaatgatagggtttacttcccaaaatggtacctcaaaggtgcaagagagagtccaagtcatgggggtacatttgtccggaagtttgtcaatttggacatgcgttcatacttgaaatttttaagttgggtgcctgctgctctcaaaatgcctgaggatgagttgattagccatgccggtctggattcagctgtgtatctgaggatttacttggtcggacttaaaatatttgctccaatctcagttctagctttcattgttcttgtccctgttaattggaccaatgatactctgcaattctcgaagttagagcacagcaatgttgataagctttcaatatcaaacataccagttggatcaaaaaggtttatagcccacttggcaatggcgtatgttttcacattttggacctgctatgtactgttacgtgagtatgaagtagttgcaaagatgagactgcgatttctttcatcagagaaacgcagaccagatcagttcacggtccttgtgcggaatataccgcctgatccagatgaatcaattagtgagcttgtggaacatttctttcttgtgaatcatcctggtcactatctgacacatcaggtggtttacaatgcaaataaacttgctaaattggtgaaagagaaagcaaagatgcataattggcttgactactatcagctgagatttgaaaggaatgcatctaaaaggcctactactaagactggttttcttggttgttttggtacgaaggtggatgccattgaatactacacatcagaaattgagaggatagaaaatgaagaagcagaagagcgtgaaaaaattgtaaaggatcccaaatccattgtaccagcagcatttgtttccttccgatcacgttggggtgcagcagtttgtgctcagacacagcaaaccagtaacccaactgtttggttgacagaatgggctccagaacctcgtgatgtgtactgggataatttgtctattccatttgtctcccttacagttcgaaggctgataattgcagtggcattcttcttcctgaacttcttttatgtgttcccaatagcatttgttcagtctcttgcaaatcttgaagggattgagaaggcagcgccgtttctgaagcctctgattgaagagcatactattaaatcattcatccaaggtttccttccgggaattgctctgaagatcttccttatattgctcccaagcatattaatgtttatgtctaaggttgaaggattgacctcaatatcttcactggagagaagatctgcatcaaagtattatattttcatattcttcaatgtgtttctggcaagcattattgcaggatctgctttagagcagctaaaaagctatattcatcagtcagcaaatgaaataccaaggacgattggtgaagcaattccaatgaaggcaaccttttttataacatatacaatggttgatggttgggctggggtagctggtgagatattgagattgaagccactagtgatcttccacctgaaaaactttttcttggtcaagactgagaaagacagggaagaggcaatggaccctggaagtattggttttgactcaagcgaacctcaaattcagctgtatttcttacttggtcttgtctatgcggcagtgacaccatttttgctcccttttgtattgatattctttgggtttgcgtacgttgtataccgccaccagataataaatgtgtataatcaagaatacgagagtgcagcagcattttggccaagtgttcatggacgcataatcacagcgttgattgtatcacagctgcttctccttgggttacttagcacaaaaggcgctggccagtcaacacctgtgctccttgttcttcctgtagtgaccttctatttccacaagtactgcaacaaccgctacaaaccgacttttgtgaaatgcccattgcaggaggcgatgaagaaggataccctggaacgtgccagagagccaggatttgacctcaaaggatacctaatgaatgcctacatccacccggtgttcaaaggtgatggggacgacgacaagttctcagtcgcagatgaaccagaagccgagcaagtcctggtggcaaccaagcggcagtccaggcggaacacccccgtgcccagtaaatacaatgggtcggaatcaccttcgcttcctgaaattgtaaatgaccaacggctataaagatgtctacagttttcctatgtatactaggtatatgcccgtgcgttgccacggaagttaaaaaatagtataaaacatgtataccgaacaccatgttctagacaatgctagtgaaactgaaataaaaatagctacataattgcttaaatagttatacagctcgtagcacaaacaaaacaaagttgggcataacgttaagtgacacttttcctgtatcagacttggactatgtcccggctaatgcttgtagcctttgaatattatcgggacccattgatcactaca

SEQ ID NO: 113698 - DNA, 787 bp, Zea Mays
ctaccactgtagccgttttaggggctacagtccgcccctatccccttcaccggcttcctcctcctcctcctcttccctctcgattccttctctctcccgctaaatggatgggcacgctactgcgccagatttctccccagccggttccttcggccacgcgaccgcgcgctcggaaaactccacggacagcgaaggaggtgaaccaaggacgacgtatctgtcgccggagaaggtaagcatcgatccgccgtgtcctacgattcgtttgtcttgctccaggcggcgagcagcagtgggggtcgtcctcgcggatccgccttcaagcttcgcggatcccacccaaaattaaaatcctctcggaaatcagagacgcgaatccctcgccccaagccccgaaacctccgagttctctcgccaatttgatccgcctcaccgtcgccgcccgtccgccggtcggccttgactgctccgtcgcacgtggcggttcgcagcgcggaatctaccttgtgctgacagatccggggaaaccctcgttcctggtcgttccggctcgaatcttctgcggactggcaatgtaagcgttctccattggagggcgacgatctacggggcggttgttggcggggttgcgggaatggagcacgtgttcggagggaagtttaagcctgggaagaagatcgggagcggatctttcggcgagctctatctaggttagcatctcgccgggttcttcattgaatctctcacgcgtctctgcggattcctacgcgccgctgttttgttttgc

SEQ ID NO: 113699 - DNA, 1197 bp, Zea Mays
ctaccactgtagccgttttaggggctacagtccgcccctatccccttcaccggcttcctcctcctcctcctcttccctctcgattccttctctctcccgctaaatggatgggcacgctactgcgccagatttctccccagccggttccttcggccacgcgaccgcgcgctcggaaaactccacggacagcgaaggaggtgaaccaaggacgacgtatctgtcgccggagaaggtaagcatcgatccgccgtgtcctacgattcgtttgtcttgctccaggcggcgagcagcagtgggggtcgtcctcgcggatccgccttcaagcttcgcggatcccacccaaaattaaaatcctctcggaaatcagagacgcgaatccctcgccccaagccccgaaacctccgagttctctcgccaatttgatccgcctcaccgtcgccgcccgtccgccggtcggccttgactgctccgtcgcacgtggcggttcgcagcgcggaatctaccttgtgctgacagatccggggaaaccctcgttcctggtcgttccggctcgaatcttctgcggactggcaatgtaagcgttctccattggagggcgacgatctacggggcggttgttggcggggttgcgggaatggagcacgtgttcggagggaagtttaagcctgggaagaagatcgggagcggatctttcggcgagctctatctaggcgtcaacatacagagcagcgaacaatatcagattattgcaaaaatgtggtacatctttcttcagctggatgtcatcactcacgaatgggttacccatgctagatggagccactgctgccgttccacttgaacagaagttttcagcaagtacaggagatggatctgcagcaccttcccagccacttcaaaacaaccgcagcgttcctatgcaattttttggcttcaatttgctcttccagtccctgtatactcgtaatgttctgcatgtaattgctttaaaaaagactggcatggtcccgagctatatttttagctgagtaataacaagattttaaaaccttttcttggttgtccatgcgaattgacctgtgcatccagttctaattccaatcatggttctgttacctttcattagtgataactgtataacagtatctatttttataaagaaagtaacaaggcatattttcagaacatatgaagaaa

SEQ ID NO: 113700 - DNA, 589 bp, Zea Mays
ttctccccagccggttccttcggccacgcgaccgcgcgctcggaaaactccacggacagcgaaggaggtgaaccaaggacgacgtatctgtcgccggagaaggcgtcaacatacagagcagcgaacaatatcagattattgcaaaaatgtggtacatctttcttcagctggatgtcatcactcacgaatgggttacccatgctagatggagccactgctgccgttccacttgaacagaagttttcagcaagtacaggagatggatctgcagcaccttcccagccacttcaaaacaaccgcagcgttcctatgcaattttttggcttcaatttgctcttccagtccctgtatactcgtaatgttctgcatgtaattgctttaaaaaagactggcatggtcccgagctatatttttagctgagtaataacaagattttaaaaccttttcttggttgtccatgcgaattgacctgtgcatccagttctaattccaatcatggttctgttacctttcattagtgataactgtataacagtatctatttttataaagaaagtaacaaggcatattttcagaacatatgaagaaa

SEQ ID NO: 113701 - DNA, 1152 bp, Zea Mays
atggaggcggggccgtcgagttcggcggcgatgagcgcggcgaggcggaggcgggacgcgctggcgcagacgctggcatcgcggaggctgccggagggtatggcggaagctggggagctggtgcccggagccctcgcccccgaggtcatgcccttcctgcgcgccgccgacgagatcgagccgtacaacccgcgcgtcgcattcctatgtcgcaaatatgctttcaagaaagttcaaacactggacccatcatcaactcaacgaggtgttcgacagttcaaaacttacatgtcaattaagctggaccaggatgacacacaagttctaggcaatgatgcaaatgagattcaacagttttataagaagtactgtgctagtatgagtcatatttcaaaaaagagaaactttgaggagatggctagatattaccaagtggtgtatgctctttatgaagtgctacaggatgtaacaaataaaaacattgatgatcaggtgttgcggtgtgcagacatggttgaggaaaatggtcgtcatttcaagaactacaagtacaacattattcccctcaattttcctggttcttccgaggaaattatggaacttccggagataagaggtgccattgatgcaataagtgacatagatggccttccaatgccagacatgtcttctatccaaaggcatgaggataaatctatccaagatctaattgaatatctttcactagcatttggatttcagaaatcaaatgtagaaaatcaaagagaaaatatggttttgcttctcgcaaatattagtacaagaactgctgcccaggaagggcatcctttggttgatacagtgaatgaattgtggaaaaaaatatttggaaattataagtcatggtgttgctatttgcatattacttcaagtatcataatcagtcatgatattacagaacataagaagcaacagctgaagcttcttcacattggcttgtatcttcttatctggggtgaggcttctaatgttcggtttatgcctgaatgcttgtgctacatattccaccatgtaagtatctctcatttaagaaacaacattttgagcttccttctgatttactcagataaacttttgggctttaattatttctctagaatggcttatctgttg

SEQ ID NO: 113702 - DNA, 116 bp, Zea Mays
tttttgttttacattaagtcattcaaattatattttaagacattcactaacattcaagtattcttaatcatgtgtaatttgatttaagacactttgatgataatttaagatattac

SEQ ID NO: 113703 - DNA, 718 bp, Zea Mays
aattattggttagagttatggcgtcagaccctagagtcaaaaggatttagaattagcaggaccaaaaccgagtatatgagatgtgactttggtactacaattagtgaggatggagatgtaagtttgggaggtccggtagtaccaaagaaggacaccttccgttatttgggatcgatgctacaaagagatggtgatattgatgaagatgttagccatagaatcaaagcgggtggatgaaatggcgtcaagcatcaggagtcctatgcgacaagagagtgccacagaagttgaaagacaagttctacatgatagcgattaggcctgctatgttatatggggctgagtgttggcctactaagaggcgacatatccaacaactaagtgtcgcagacatgcgtatgttcgttggatatgtgggcacacaagactggaccgagtgagaaacgatgacatacgcgatcggctaggagtagcgccaattgaagaaaagcttattcaacaccggttgagatggtttgggcatgtccaccggagacccccagaggcaccgatgcatagaggcatcataagatgtggcaataatgtgaagagaggcagaggtcggccaaaattgacatgggaggaggcaatcaaaagggacttgaaggaatggaatatcccaatggagttgtgtttggatagaagtgcttggaaagaagctatccacgtgcctgaaccg

SEQ ID NO: 113704 - DNA, 393 bp, Zea Mays
atggcaagaaagcccaagaccaattttgttgaagtacgcacatttctgcacatatttagaagttttaatcgaatgtggatgttttttatacttgctttccagaatgtcatggagcgctcagattcacgagtgttggttctcctgatgtggtggattcagcctagattgtatgttggacgtgggatgcacggagatattttgtcaatccttaagtatgtcttcttttgggctgttctgctcatctccaagcttgcattcagtttctatgttgagatatcaccattgattgatccaacaaagttcattcttgaccaacaagttgggaactatgaatggcatcaaatcttccctttctttcatgcaataatgtctatgcttcagttctttttgtaa

SEQ ID NO: 113705 - DNA, 311 bp, Zea Mays
gcgggttgggccttcttgttcgcttgggtcttgtcttgttagccgaggaattgatttactaaggaatgccgagaaaccctaagactgcgtgtctcctctttgctagatctgtgactcccccgccatcgatgccaagtttgccccgttgccggcgtcacccctcccctcgacggtgaagctcatagcttccctccaccgccggtgtcgcttctcccccgccgaccaagccgtgcctgtcgccggcgtcgcccctcccccactagtgaaactcgcggtctctccaccgcacgcgcctcgtgtagttgtggctg

SEQ ID NO: 113706 - DNA, 108 bp, Zea Mays
taggtttgttattttggcacatcagtacatgggtggtgaaaagttagtgtgccttaattatcctttagaactttggctggacatgcaactttagatagccataaccgc

SEQ ID NO: 113707 - DNA, 1704 bp, Zea Mays
atcctgccgtcttgtaaaaaaatccccgccgccggagacgcgcaagctagggctagcaaccgttcttgctgacagagtacccacaggtcctgcaccagcggcggcatgggaaagaagattcgcaacaccgatggcacctcgacgccggccaggcccatgaatcaggccgtgtcgctccgcgaggagacctccgggaggacgcgcgtagacgatgcctccctgctgagggtcaagcatttgcagaggctagcggcgtgggcgggcccggaggccggggtgcgcccgatcggcgcgctgctggggcgccgcctcgccgcgagcgccgaggccgccggagtacccctcaacgccgccactttcctttgccagaggtgtgagacaatcttaaagccaggcttcaactgcactgtccgcataaggaacaagagaaataaagcaaaacgtcggaagaaatcaaactgttgtcagaacagtgtttcctatgcatgccatttctgtggagatcagaacctaatattgggtagtgggaagggtgttgttcagagcctgttactgtcaagagggcatgctaccatgaactcatcccatataattgtgagaggaaacggtagcaacacaagagcacatgataagaaagaagtgcttgagctttctcaagcagcaattttgcaagtggaatcgtcatctctgttgaggcagtcgactactgaaagtgacgagcatggcgaaaggttaaattgtaatcttgatgaacagatgcgtgaaactagccatatttttcctgagaaggttaggatatgtgaagctactttgcaagcagaacttgcacctggttcatcatttgtcacgcctcagaaaatgaaaccaccggtggtgactgttgcaaaagattcagcaggactactcaagacaggaagtggcatgatttctggctcagccattgacgccctctcaggctccagcaagtctgcctcgaatggctctagaaataatgtgaaatatgcagcaagagattcttctcaggtttctggcagctcaaggaagcgggcaaggaagggttggacaacgctgaaacagatggctgagaaggatgagctcgagaggaaggagaagatggggaattttgtaatcccgttcttcatgcagtaagtgggatgctaaaatatttgccggcattgtgatcgtttggtcattagtttatctattgagaaggacagtgtttttttttgccggctagattttgcagtattaaagatacgaggttaacaaagtttggttgaattaacaacatgtgattaaaggggaacacgtccaaggcgagccatcagccatagcaacattatatcctgttgcggtgcgattgcctacgttcagccggaactttgtaatccagctgcaaaatctaatagctcgctctacgcccaaaattacattgtcggcaacaaattctagacgaaccatgataacattgacgatgaacctaaaaacgcagaagcattttgagtcttcctcatcaatgagtagtaaactaagcaaaagaaaaatcacttccttgtcaaggagcttaggagttgtttggaagcaaagtatttttttgggttttcagataaaagtatgatattagagcatatcatgttattcttcgtcaggaggtgtttgactatattgtaaaaactcagttgtgaatatcattgtttaatagtt

SEQ ID NO: 113708 - DNA, 2100 bp, Zea Mays
acatcctgtttccatccctacgtagaagcaaaaggtttctttgcatcctgattggttgttcttgtcactgttttcaagtcgtccgattaatcacgattaatcgtccaagtcggtttggaccaatcgcgattaatcgcccaagtcggtcagccagaacgaccaataagtcgtccgacttgaaaacaatggcttgtgtcctgtaactagtcagctgtgagacaaacatgtgtttgcatgtacctcatttagtttatgataagcaaagtaaaatgaaaatgatgtattacaataccatgtgtgcatgtctgcacatactcattaatttactatcagtaaagtaaaattaaaatgttgtgatgacataagggtgttccttttccatttagtatggcctgctgataaaatttctatcttattcaaccattactcttggaattcagatatatacgtataatttagttgtatcaaataactaagaatccttccatgagctagaaggaagcttgaatttaaaataataaagtatcccagatgggatgcaatacaatattagtgtccaggccaaagtgatctgggaattccaaagggtagtgaaaatcatctgtacattctggtagaatatgttgtgcttgtttcacatcgtagtcatgctattctgtctggtttctactagtattttgtaacttctgtctactcacagcccttatttcagcctacagaaatatctcagtacacagatctgtaacaagatgtttccaatattgcaggtgtgagacaatcttaaagccaggcttcaactgcactgtccgcataaggaacaagagaaataaagcaaaacgtcggaagaaatcaaactgttgtcagaacagtgtttcctatgcatgccatttctgtggagatcagaacctaatattgggtagtgggaagggtgttgttcagagcctgttactgtcaagagggcatgctaccatgaactcatcccatataattgtgagaggaaacggtagcaacacaagagcacatgataagaaagaagtgcttgagctttctcaagcagcaattttgcaagtggaatcgtcatctctgttgaggcagtcgactactgaaagtgacgagcatggcgaaaggttaaattgtaatcttgatgaacagatgcgtgaaactagccatatttttcctgagaaggttaggatatgtgaagctactttgcaagcagaacttgcacctggttcatcatttgtcacgcctcagaaaatgaaaccaccggtggtgactgttgcaaaagattcagcaggactactcaagacaggaagtggcatgatttctggctcagccattgacgccctctcaggctccagcaagtctgcctcgaatggctctagaaataatgtgaaatatgcagcaagagattcttctcaggtttctggcagctcaaggaagcgggcaaggaagggttggacaacgctgaaacagatggctgagaaggatgagctcgagaggaaggagaagatggggaattttgtaatcccgttcttcatgcagtaagtgggatgctaaaatatttgccggcattgtgatcgtttggtcattagtttatctattgagaaggacagtgtttttttttgccggctagattttgcagtattaaagatacgaggttaacaaagtttggttgaattaacaacatgtgattaaaggggaacacgtccaaggcgagccatcagccatagcaacattatatcctgttgcggtgcgattgcctacgttcagccggaactttgtaatccagctgcaaaatctaatagctcgctctacgcccaaaattacattgtcggcaacaaattctagacgaaccatgataacattgacgatgaacctaaaaacgcagaagcattttgagtcttcctcatcaatgagtagtaaactaagcaaaagaaaaatcacttccttgtcaaggagcttaggagttgtttggaagcaaagtatttttttgggttttcagataaaagtatgatattagagcatatcatgttattcttcgtcaggaggtgtttgactatattgtaaaaactcagttgtgaatatcattgtttaatagtt

SEQ ID NO: 113709 - DNA, 1746 bp, Zea Mays
cgcagcgcatccgcccccaaaatttgaaatcacgactgggagggatcccgaacgacggtccaaaattttccctacccaaccccctctatccatcctgtcccgttccgctccgccgccgccgtcgaccgcacgagatgccgccggccgaggacgccccaccgcagaccccccctcccgcgcgctggacggcggccgggtcgcgggtgctgctgcagtctccgcctccagcgttcccgctcggatccaatgacgaccagcaagaacgcgcccgcgcccgcgcggcggcgcgtgccgcctccgtccgccgccgatccctcgccgcctccattgcgccctccaaggacccgcgccacgacctcctcaaccgcgagcaggtcatggacctcttccataactgtatcaagctcgcatcggagaacaaaattaaccagaagaacacgtgggagctaggcctaatcgatcatctcagcgagatcatccaagcgggggtggacgaggacgaggagaccaactttcagaaggcaagctgcacactggaggcgggggtcaagatatattcacttcgtgtggattcagtgcactccgaggcttacaaggtgcttggtgggataaaccgtgccggaaggggtgaagaggctgatttggaggaaggcagcaatgttgaacctgcacaggatgaagcaatcaataaaaaggatgctgataggaggatttcacctgcttcaacgttggagtcgtcatttgaggctctcaatgtaaagaaatttgatgttgctttcacggtggatcctctataccatcaaactaccgctcagtttgatgaaggtggggcaaagggccttttgttgtataaccttggagtttatggtagctgccgtgtgctgttcgattcatttgaagctccagacaaatgcatcttaagtgatatgcaaactgagcaggctgagacaattgacctttcatttgctaaagagcaaattgaggaaatggtcactcaaatgcgtctatgtaatgatatttctccaaccctgagggatattgttgctcaatttgatgaagaaaaccaaaggccatcacataggttatctcctggtcaaatgccagtaatggaagatcagatggatgatggtaatgaagcagacgataacgatagcatgctacctgattctggaacttgggattttggtgattgtcatgaccatgaggatacatatgatcaaaactgtaatccaatggattccatctcaacaaactttcaagaggaattcaatgaatacactgttgagattcctcagggtactattgtaaacgatagagttgacaaaattgcatctcttgtgttacttggcatggcctcatcaaaagcaaatgcttgggcaggacctgagcactggaaatatcggaaagctaaagatttggaggctgctccaacttcatcaggtgattcagaaataacaaataagataaagaaaagaaccaaggataaacctgacattggtttcacaaaagcattggacaatgagcttccaaatatcttcgcggctcccaaaaatccaaagacattactgtttcctgcaaacagggctatttgcagcaataaacttccagaagattgccattaccggcctgaaagccttgttaaattatttcttctcccagatgttttgtgtcttgctaagagaagaaaatcacttggtaagttttgcaaaattagatttaagtaaagaaatttggttgttaatttta

SEQ ID NO: 113710 - DNA, 2371 bp, Zea Mays
cgcagcgcatccgcccccaaaatttgaaatcacgactgggagggatcccgaacgacggtccaaaattttccctacccaaccccctctatccatcctgtcccgttccgctccgccgccgccgtcgaccgcacgagatgccgccggccgaggacgccccaccgcagaccccccctcccgcgcgctggacggcggccgggtcgcgggtgctgctgcagtctccgcctccagcgttcccgctcggatccaatgacgaccagcaagaacgcgcccgcgcccgcgcggcggcgcgtgccgcctccgtccgccgccgatccctcgccgcctccattgcgccctccaaggacccgcgccacgacctcctcaaccgcgagcaggtcatggacctcttccataactgtatcaagctcgcatcggagaacaaaattaaccagaagaacacgtgggagctaggcctaatcgatcatctcagcgagatcatccaagcgggggtggacgaggacgaggagaccaactttcagaaggcaagctgcacactggaggcgggggtcaagatatattcacttcgtgtggattcagtgcactccgaggcttacaaggtgcttggtgggataaaccgtgccggaaggggtgaagaggctgatttggaggaaggcagcaatgttgaacctgcacaggatgaagcaatcaataaaaaggatgctgataggaggatttcacctgcttcaacgttggagtcgtcatttgaggctctcaatgtaaagaaatttgatgttgctttcacggtggatcctctataccatcaaactaccgctcagtttgatgaaggtggggcaaagggccttttgttgtataaccttggagtttatggtagctgccgtgtgctgttcgattcatttgaagctccagacaaatgcatcttaagtgatatgcaaactgagcaggctgagacaattgacctttcatttgctaaagagcaaattgaggaaatggtcactcaaatgcgtctatgtaatgatatttctccaaccctgagggatattgttgctcaatttgatgaagaaaaccaaaggccatcacataggttatctcctggtcaaatgccagtaatggaagatcagatggatgatggtaatgaagcagacgataacgatagcatgctacctgattctggaacttgggattttggtgattgtcatgaccatgaggatacatatgatcaaaactgtaatccaatggattccatctcaacaaactttcaagaggaattcaatgaatacactgttgagattcctcagggtactattgtaaacgatagagttgacaaaattgcatctcttgtgttacttggcatggcctcatcaaaagcaaatgcttgggcaggacctgagcactggaaatatcggaaagctaaagatttggaggctgctccaacttcatcaggtgattcagaaataacaaataagataaagaaaagaaccaaggataaacctgacattggtttcacaaaagcattggacaatgagcttccaaatatcttcgcggctcccaaaaatccaaagacattactgtttcctgcaaacagggctatttgcagcaataaacttccagaagattgccattaccggcctgaaagccttgttaaattatttcttctcccagatgttttgtgtcttgctaagagaagaaaatcacttgatgctccagtggataataatgatgactttatcccatctgaaccttgggaagatgacaacttttgcaatgaccacattgatgaaggacatgtgtgtagtgatgtagaagagccagtaaatcttatcaataaaccgagacaggtcaacaagattgatatacagtatgacaaggtatcaaaacaagtggatgttcatgctttaaaagaagtgctttggaatcacatccatgcatctgctgagactggtcaggaaagagaggaacctggaccaccgctgcgcctatctcaggtgttacatgaccttccaagcagcagcccagatgctgtagcaactgatatttcgccacacctgtatttcatctgccttctgcatctggcaaatgagcacaacttgaagctctgtgatcgccccatgttggatgaaatagacatatacatgccgccgacttcaccgcttgtgaagtgaaccatgctgtaccggagatgctagtcttttttattttgtttattgttgaccggcctaaaccaacgccatgattattgggtagtgatctctgattgttgctaaggtgcccgtcgtgacatgctcagctcactgatgtaacttgaaaaatgaaacttcatatattttttaaagtagtgatgctcggaacgatactgcattgacttatgcctttc

SEQ ID NO: 113711 - DNA, 774 bp, Zea Mays
caatgatctgtactttttgagaggcaatgatctattatttgtaataactgttggacctctttttttgtagtgtcttgctaagagaagaaaatcacttgatgctccagtggataataatgatgactttatcccatctgaaccttgggaagatgacaacttttgcaatgaccacattgatgaaggacatgtgtgtagtgatgtagaagagccagtaaatcttatcaataaaccgagacaggtcaacaagattgatatacagtatgacaaggtatcaaaacaagtggatgttcatgctttaaaagaagtgctttggaatcacatccatgcatctgctgagactggtcaggaaagagaggaacctggaccaccgctgcgcctatctcaggtgttacatgaccttccaagcagcagcccagatgctgtagcaactgatatttcgccacacctgtatttcatctgccttctgcatctggcaaatgagcacaacttgaagctctgtgatcgccccatgttggatgaaatagacatatacatgccgccgacttcaccgcttgtgaagtgaaccatgctgtaccggagatgctagtcttttttattttgtttattgttgaccggcctaaaccaacgccatgattattgggtagtgatctctgattgttgctaaggtgcccgtcgtgacatgctcagctcactgatgtaacttgaaaaatgaaacttcatatattttttaaagtagtgatgctcggaacgatactgcattgacttatgcctttc

SEQ ID NO: 113712 - DNA, 1212 bp, Zea Mays
aatttgtctcctcgagaccatctaagctgtcgtcgcagaatcgcacgtacgcgcgatcgagaagccaggaccaggacgacgatggcccggccgcgcctcctcctcaccttcctgctcgccgcggcggccgtgctgaccacggtgcccggcgtcgcgctcgccaagtcgaagctcgccaagaagagcgacgacgtcgtgaacgggcccctcctgaccgagaagatccaggcgaagaagacgctgatcgtggggccggacgaggagttcaagaccgtgcagtccgccatcgacgcggtgcccgccggaaacgccgagtgggtcatcgtccacctccgctctggcctgcacaggggcaaagttgtgataccggagaacaagcccttcatcttcgtgaggggcaacggcaaaggccggacctccatctcccacgagtccgcctcttccgacaacgccgagtccgccgcgttcaccgtgaactcggacaacgtcatcgtcttcggcgtcagcttcaggaacagcgcccgcgtcggcctggtgaacgacccggagatccgttccgtggcggcgatggtggccggcgacaaggtggccttctaccactgcgcgttctacagcccccaccacaccctgttcgacagcgccggccgccactactacgagagctgctacatccagggcaacatcgacttcatcttcggcagcggccagtccatcttccagtgccccgagatcttcgtgaggcctgaccggcggacggagatccgcggctccatcaccgcgcaggtgcggcaggaggaggacagcagcggcttcgtcttcctcaagggcaaggtgtacggcgtcggggaggtgtacctgggccgcgtcaccgcgcccgactcgcgcgtcatcttcgcagacacctacctctccaagaccatccacccggccggctggacaaccataggctacagcggcagcaccgacaaggtgacgctcgccgagttcaactgcactgggccgggcgctgacgtgacgaaccgcgtgccatggtcgcggaggttctctcccgacgacgcggccaagtacctcaccatcgacttcatcaacggcaaggactggctgccggcgtactactactgatccgacgatcgactactggatcgaacaagcatgcatacatgtatacacatcttgtaacgctgaattttgattcatggcacactgtactgg

SEQ ID NO: 113713 - DNA, 1179 bp, Zea Mays
gtcgtcgcagaatcgcacgtacgcgcgatcgagaagccaggaccaggacgacgatggcccggccgcgcctcctcctcaccttcctgctcgccgcggcggccgtgctgaccacggtgcccggcgtcgcgctcgccaagtcgaagctcgccaagaagagcgacgacgtcgtgaacgggcccctcctgaccgagaagatccaggcgaagaagacgctgatcgtggggccggacgaggagttcaagaccgtgcagtccgccatcgacgcggtgcccgccggaaacgccgagtgggtcatcgtccacctccgctctggcctgcacaggggcaaagttgtgataccggagaacaagcccttcatcttcgtgaggggcaacggcaaaggccggacctccatctcccacgagtccgcctcttccgacaacgccgagtccgccgcgttcaccgtgaactcggacaacgtcatcgtcttcggcgtcagcttcaggcgcccgcgtcggcctggtgaacgacccggagatccgttccgtggcggcgatggtggccggcgacaaggtggccttctaccactgcgcgttctacagcccccaccacaccctgttcgacagcgccggccgccactactacgagagctgctacatccagggcaacatcgacttcatcttcggcagcggccagtccatcttccagtgccccgagatcttcgtgaggcctgaccggcggacggagatccgcggctccatcaccgcgcaggtgcggcaggaggaggacagcagcggcttcgtcttcctcaagggcaaggtgtacggcgtcggggaggtgtacctgggccgcgtcaccgcgcccgactcgcgcgtcatcttcgcagacacctacctctccaagaccatccacccggccggctggacaaccataggctacagcggcagcaccgacaaggtgacgctcgccgagttcaactgcactgggccgggcgctgacgtgacgaaccgcgtgccatggtcgcggaggttctctcccgacgacgcggccaagtacctcaccatcgacttcatcaacggcaaggactggctgccggcgtactactactgatccgacgatcgactactggatcgaacaagcatgcatacatgtatacacatcttgtaacgctgaattttgattcatggcacactgtactgg

SEQ ID NO: 113714 - DNA, 1220 bp, Zea Mays
gtaccatattagacctgtcgcgggtaacaggccgcgtcctcttccgcgccgctgccttcggcctcgccgccgccggtgcgggttccctgcatgccatgtcgaattggatgcctccctcggagatctctcccttcagccggatagtgaagctgaagcccacgctcttggaatccgcgaacgtccttctggccgccctgctccgcgcgcacccgctctccagtgcgaacctgcgtgacgtccgcgcccgcgctgagctcgacctcgcgcgtgctgacatggagattggccatggcggcgacccagccgccgccgtggacctccgcctcctcctggcgctcctcgccacgcgcgacggtcgcgcgtacgacgcgttgcggctctacgcggaagcggcccgcgacgcgcctttcgacccccggccctgcgcccttgcggctaacctctccctcatgtgcgggcgagatgacgtatctgcggcggggatttccgcttacacccgcctcgtctccaccttgcaccagggatgggagtccgacgagaccagggagctcatccacgagctcgcggtcgcggcgacgctgggcggcgtgtacaagctccgcttcgctgatagtaggaacttcgtcatgcgcgtggccagcagagctgtggacaaggggctggtcgctgcgcagcaggacaaggcgctatctgcgaccgagaggcttcagttccgattgctacgcgtgttcctggacaccaaggtgcggcacgtcgtgaaggagaacctggccgtggccgacattggtgaggactgaggatgcatcttcgggttcattatgaggttgacatagctacaaaaactggcaatcttgtttttctgaagggcctcatagatcgagttactttggagaccatgttcgacacatcagctttatagttctagattgtaagcagagttataaaactagtagtttcgttaaccacataagctagttagttctttcataaggatgctaattcagatgctgctccaaaagaattgccagtaacagggtggtatgctcgaaggtgactgttcaagcagcttattagtgatgtgctcaaaggtgactaatattactaggcatatagctcttattcaataagccctatttttgctcagatgttaactgaagatgcaatttcatttcacacacttgtgtataagcctttataacctgggttttcgttggatgtca

SEQ ID NO: 113715 - DNA, 1377 bp, Zea Mays
ttcaaattcgttgtgatccctaacaggagctgttgggatggtcttagactatctccagcatattctttattttattctctattttaaactttgtactaatatattttcgtgttcggcgaagcacatattcttactctgatctccctccatccactgattcgctccgccctccgccatggcaggccgcgtcctcttccgcgccgctgccttcggcctcgccgccgccggtgcgggttccctgcatgccatgtcgaattggatgcctccctcggagatctctcccttcagccggatagtgaagctgaagcccacgctcttggaatccgcgaacgtccttctggccgccctgctccgcgcgcacccgctctccagtgcgaacctgcgtgacgtccgcgcccgcgctgagctcgacctcgcgcgtgctgacatggagattggccatggcggcgacccagccgccgccgtggacctccgcctcctcctggcgctcctcgccacgcgcgacggtcgcgcgtacgacgcgttgcggctctacgcggaagcggcccgcgacgcgcctttcgacccccggccctgcgcccttgcggctaacctctccctcatgtgcgggcgagatgacgtatctgcggcggggatttccgcttacacccgcctcgtctccaccttgcaccagggatgggagtccgacgagaccagggagctcatccacgagctcgcggtcgcggcgacgctgggcggcgtgtacaagctccgcttcgctgatagtaggaacttcgtcatgcgcgtggccagcagagctgtggacaaggggctggtcgctgcgcagcaggacaaggcgctatctgcgaccgagaggcttcagttccgattgctacgcgtgttcctggacaccaaggtgcggcacgtcgtgaaggagaacctggccgtggccgacattggtgaggactgaggatgcatcttcgggttcattatgaggttgacatagctacaaaaactggcaatcttgtttttctgaagggcctcatagatcgagttactttggagaccatgttcgacacatcagctttatagttctagattgtaagcagagttataaaactagtagtttcgttaaccacataagctagttagttctttcataaggatgctaattcagatgctgctccaaaagaattgccagtaacagggtggtatgctcgaaggtgactgttcaagcagcttattagtgatgtgctcaaaggtgactaatattactaggcatatagctcttattcaataagccctatttttgctcagatgttaactgaagatgcaatttcatttcacacacttgtgtataagcctttataacctgggttttcgttggatgtcatctca

SEQ ID NO: 113716 - DNA, 1214 bp, Zea Mays
gtcgtcttcatctctgtcgccgtcgcgggctatccatctccgctcagcacgacagcaccgtcctcaatcggcaacgcaagccgaagccgatacgactccagagtccagaccaagctcttggcctccgcttcttccggccatgtcgcgcttcttccacggcgccgccctcaccgccgccgccgcagttgcgggcctgtcctctgcattctcgcggagcctcacttcgtccctcccacttgcggcttctccctcttctccgtcgacgcccatcggccccgtcgcggcctccggtcacctagccctcgtccgcgcgcacccaggtcttcgcgagctcgacgccatgcttacaccgggctccttcctcgttgacgcgacccaggcgtttctcgcggtcgcactgggctgtctgcctaccatccccgaaacgttgcgcaagagccgggacttccacaccgcacttagctcgcgtgaaggccgcctcgaagacgcaaaaatggaggggcaggctgccgtggcccggaccatcatagcactcgtcgatgcgcgtgaaggccgcctcgaagacgcgcgcgacgccttcgtgcgcctggccgcggagcgcccattcgaaagcaccttgcgcctcttcgccgccgcgctctgccacgtgctgggccaccacgaggaggggggccagtggcttcacgattccgccgtgcccgacctctcccgcctcgaccacaagaatcagttcgcgcaggccgtccttgccgccacgatcggttccgcgccgcgcgccgtggtgggctcggaggagctggtcttggtcagcgcgcttggcctgctcgagaggtcgatgtggtccattttcacgcacggtgatctgccggcgaggcttcatgtgttggcgttcatggcattcctgcgggccgttgtggcgaggaagttacacagagatgatgccaccccaaactaactaggtgaattgtcttcagaactccattcaggttcaggtaaacgtgtctgaaaattccttggctaaggcggagtactaaagtgaagtggtgatcatttttcattagctgttatggaagttttgtgcagagatcctcaactaattgcatgttgtccaaatttgacttttatcttggcgctgccattatacagaggtaatggtttggcagccaaggtgtgaatagcaatgctaaagctgtatgaaatgaactgttagaaca

SEQ ID NO: 113717 - DNA, 298 bp, Zea Mays
gttttttaagatgtttagtcatgacaaacagaacattttgcaggtgaattgtcttcagaactccattcaggttcaggtaaacgtgtctgaaaattccttggctaaggcggagtactaaagtgaagtggtgatcatttttcattagctgttatggaagttttgtgcagagatcctcaactaattgcatgttgtccaaatttgacttttatcttggcgctgccattatacagaggtaatggtttggcagccaaggtgtgaatagcaatgctaaagctgtatgaaatgaactgttagaaca

SEQ ID NO: 113718 - DNA, 1557 bp, Zea Mays
ctaactcttctgtctcgtctctgtccgcgctgccggctatccatctccgctgagcacgacagcaccgtccccagtggcaactcaatcgaagccgatccagagtccagactaacctcttggcctccgcttgttccggccatgtcgcgcttcttccgcggcgccgccctcaccgctgccgcagcggttgcgggcctgtcctctgcattctcgcggagcctcatttcgcccctcccccttgcggcttctccctcttccccgtcgacgctcatcgcggcctccggtcacctagccctcgtacgcgcgcacccaggtcttcgcgagctcgacgccatgcttacaccggcctccttcctcgttgacgcgacccaggcgttcctcattgtcgcactgcgctgtccgcctatcttccccgaaacgatccgccggagcccggaaagcctcgccgagcagatcctgtccgcagaatcggagggccacaccgcgatggaggaggcagccttgaaggcccggaccatcatggcactcatggatgcgcgtgaaggccgcctcgacgacgcgctcgacgccatcgtgctcctcgccgcggagcgcccaggcgacaccaccttgcgcctctatgccgccgcgctctgctacgtgctaagccgccacgaggagggggggcagtggctacaagattccgccgtgcccgacctctcccgctacgagcacaagtttcatttcgtggaggccgtccttaacgccgcgatcggttccgcgccgcgcgccgtggtgggctcggaggagctggtcttggtcagcacgctctggctgctcgagatgtcgatgtggtccattttcacgcacggtaatctgcgggagaggcttctggtgttagcgatgatggcattcctgcggggcgtcgtggcgaggaagttacacagagatgatggtccagcaacgaagcagggatcttaggaggccaccccaaactaactaggtgaggtgaattgtctttagaactccattcacgtttaggtgaccgtgtctggaaattcattggttaagacggagtattgaagtcaagtggtgatcacttaatcattagctgttgttgaagtgttgtgcagaaatcctcaaccaaatgcatattgtccaaatttgacttttatcttggcgctgccgttatattccatagactggtacgaaagtaatgcattcatgccttcgctggtttcgcagccaaggtgcgaatagcaatgttaaaaagctgtatggattgttagaattacattcatatgcttggaggtgtcatgataatcttttactcttcaatttttctcgcagttactacctttatgctaaattaaagattcttttactatgtatctagaaaaattaaaataaactaatgaggtgtttgatttgatgaatcactctatccaaaaattaagtggtgcatcatagatccattcctcaaatttggtggaatgactttattccacatattagtactaaacaactaactatgaggaataaggtggtgatggattaactcactccattccacaaaccaaa

SEQ ID NO: 113719 - DNA, 1116 bp, Zea Mays
atggcctatggaaccgccacagacctagcgccacataacacgcagcgggagctcctcgacaacttcctcagcttccaggtcttctccttcctcccgtgggtgaccaagctcgtgttccgccgacgctgggagaagctcgtctcgctgcggcgtcggcaggaggagctcttcgtcccactgatacaggccaggcgggagtccggcggtgacggggacagctacgtcgactccctggtgaagctgaccattcccgaggacggcgggaggccgctgacggacggcgagatcgttgatcagcccttgacatttatcaccaagggacaaagcaagacagtcaaagatggatgcttctcaggcgatggggagctccacactagcatgctcaaccactatgctatcagcgtttgcaccattgacttcagtacccattttatggaggagctggcaggaacaagacctcaagccgaagcaggacattacatatcattttttctagctgtttttgttgtttttcttcctgtccatacatcatcaatttgctccggcccccagtattgctggttcctgtgctctttccaaagtttccttggtactttgagaaagatgttgaggtggacagtgaatgttgcttccaccaaatcaactgaattggtgaaacaacaagactatttggagtttgatgatcccgatgaggtagacgaagaggaagaagttgagtatgaggaagaggaagttgagtatgaagagctagatggcaagtatgaacaaactgaagtgtatgccaagttgatgctaaacatgacagggatgaggatggaaaagagagtcatggttaacttcttgctcttcctcctcatggatccgaagtttatgttgggggcatctcctctgatgtctcttatgatgatctcaaaaactctgccagtcttttggacaagtagtggaagtgactactcctaaatttctttgtgctagcttttgtttttgctttcttctaaattcagagttttttcttttcttttctgtaggtgcaaatgcatgtatgcttttgtcaatttcagaactaaagagctagcttcaaaagccatccagaagttgaacaataaagacctaaag

SEQ ID NO: 113720 - DNA, 2833 bp, Zea Mays
cttctccttcttagctgggagcctgggatggcggcgccgctgctcttctacgacctcggcctcatcgcgtcctcatcctccggtgatggacgcgatggcaactcctcctcctcccgcctccaactcttagccaccacggcgcgcgctctcgagcttggctacgccggcgtcgctctcgaccaccaccaccgcggcctcctcgccgactcccacgtctgccgcaccgacactttcgcgcccctctcctctctcccgctcccatcctctgccgctctccatcgtcgccgcctcgcctctcccgcctccgaggccttccgccagtacacccgcatcaccctctccctcgactccgctgcagccaccgcttcggcgctcgccccctccgccgcccgcctcctccgcacttacgacctcgtcgcagcccgccccctcacccaggccgcattcgatcacctctgtcagacacccctctcagcccaacaccttgacctcatttccatcgatttctcctcccacggtaagatgcccttccgcatcaagccacccatgctcaagctcgccctgcaaaaggggctgcatttcgagatcgcctactccccactcctttctactgacgtcaatgacaagaggaatctcattgctcaagtcaagctattggtggactggaccaaaggaaaaaatctcatcatctcaagcgctgctcatactgcttcccagatcagagggccctatgatgtcatcaacctatctgcttacttacttggcattcccattgaccgagcaaaagctgctatgtccacgagctgcaggtcacttgttttgaaggctatgaggaagaaacacttttacaaagaaacaattagagttgacaggttattaccaaatgaagagttgagttcaacaaaattcaagcttgctgattggatcggttggaattctgtatcatctgaaggagtagcaaatcagctggaaccttcttctaactttgatgaggttcctggttcacccgtatgtggtataatggaagggtcacacgaaaaaactcatagtcctgatctgtctgtcgtttccaaactgccagaacaacctagtcatcaagaacaattcccatcccagacccaagaagatacactacaagttgacagaactgtagttgtgacagactctgggcaatcatctatcttcccagcatctttcaattatcagaatgctatacttgagaaggctgaaaacaatgaagtttttgtgaatccttttgtgcagcctggtgcaggttgttctgctgacccagaaattatcgtcaagcatgttgaattcgtgcaggacacaatggaagtagatacaatagaatcatgcaggacaaaactcatgggtgacaatattgcttcgacctctgatactagtactaagctagcatgttcttctcttctccatggcagagagctttctggtactagtcttgaggatcaggggccaggtcactctagtgaaagcctagctaatgagaagtatgatatgaaatatcacactgattgcacctacggtgtgaacgataagaccctattggttcaagaaattctttctggtgccgatatttggcctgaggacaaggattcagatgggtctgctggaatgcaagttgataatgaggcttccagaggtacttcagaatcactggagtgtcccccatgtggggtagatgacaaggcaccatctgatctttcattttactcgagtcataaattatgcacggatgttgcaattctgcccaaagtagtggagggaaaagtagagcaaagtagggatgaaaacatagtacaaactgtggaaaatgaagcagaatctgttgacacaaaaacaagaacatctatttcagtggaacctatgtcccatggtcaggagatcagctcaactattcatacaagaaacactggtgcaagctgtgaaagtgatgagctgaaagaacagaattctaagaacacagatgcttctttggataaaagtgttgctaaaatgcatgaactactaaaatttccttatccaagtggtaaggttgagatgtccacaatcagaccagaaaagcggagacataaactaaggctgcaccatccagcttatcttcctttcttaggcttcctttggtccgcttgtttcaagaagaaaatatgcaaagttgcacgtaaaaggaagtcgtaagagttgtggtgtacagaggcaatttggcctcctgccagaggacaatagatctatggtgccctttgactttatcttgtcggttcgctaaggccactccaagtcgtcagggtgatacgcatttcctgagtgggctactgtagggattcacgtgaagctgtggccacaaataggagcagggagtgctgcggttgatgtaaggacactcccaaccagttgccaactgaaaacagcgtcctgggtcaatagcaggaaacttgtgcccaatagttgcttgaaacgaaacttgtgcccaatagttgcttgaaacaaaactgattcttgaggggactcagcctcgctgtcgactgcattattcaaaggcggtatgatatcatttcttcctccccccaccaaaaatcttgggagatgtcacttgtgattttggaagctcatcatatgagctagtgcgctggactggcagcttttttgcaagggatgctttttttgtgtttacttgcgaccgtcatagggtgggtgacatgatctttttgtttctccaaatctggatgtaaattctaactgactgcatgtgtccatccatgcatcacattactctgagtagggaatggagaggaatgctagaatatttttgcatgtt

SEQ ID NO: 113721 - DNA, 751 bp, Zea Mays
ctctttctatgcactgaagtgtcactggtttaatgtgtgggatgctttggtatcttgaaattgatgcaggttgcacgtaaaaggaagtcgtaagagttgtggtgtacagaggcaatttggcctcctgccagaggacaatagatctatggtgccctttgactttatcttgtcggttcgctaaggccactccaagtcgtcagggtgatacgcatttcctgagtgggctactgtagggattcacgtgaagctgtggccacaaataggagcagggagtgctgcggttgatgtaaggacactcccaaccagttgccaactgaaaacagcgtcctgggtcaatagcaggaaacttgtgcccaatagttgcttgaaacgaaacttgtgcccaatagttgcttgaaacaaaactgattcttgaggggactcagcctcgctgtcgactgcattattcaaaggcggtatgatatcatttcttcctccccccaccaaaaatcttgggagatgtcacttgtgattttggaagctcatcatatgagctagtgcgctggactggcagcttttttgcaagggatgctttttttgtgtttacttgcgaccgtcatagggtgggtgacatgatctttttgtttctccaaatctggatgtaaattctaactgactgcatgtgtccatccatgcatcacattactctgagtagggaatggagaggaatgctagaatatttttgcatgttgattcccttggtctttggtgt

SEQ ID NO: 113722 - DNA, 2993 bp, Zea Mays
ggactcccgcgtgattcccgagggtccctcgaagtcttcaatccagacgcccctgtttcagatcgagcaaccacctccccgtttctcctccctcctgcggccgcgtcccatcccagcctcctcgccgccggagatggcggcgatgctgacgtgggtcgggcgacacagagggccgccgagtggggcctcgtcctccagaccgacgagcacaccggccgcccccagggtgtcgtcgcccgtccctccggttccaaccgcaccagcgagagtggcaactccatcgacgagagggccgccgccgccggtgctggtagagctctcccccgggtgtcggaggagcttcgcgccgcgctctcagcgttccagcagaccttcgtcgtgtccgatgccacccgccctgaccaccccatcctctacgccagcgctggattcttcaacatgacgggctactcctccaatgaggtcgtcggaaggaactgccgcttccttcaaggttctgggaccgaccccgtagagatttccaagatcagacaggctctcgcagctgggtcaaattactgtggccgtatcctcaactacaagaaggatggtacaccattctggaacctcctaaccgttgcccccataaaggatgaggatggcagggtcctcaagttcattgggatgcaagtggaagtaagtaagtacacggaaggtaacaaagatactgctcttcgtccaaatggattgccagagtcactcatcaaatatgatgcaaggcagaaggatcatgctcgtagctcagtctcggagctcctacttgccctgaaggatccacggtcattgtcagaatcaagaaacaataccttaaaaaggaaatcacaggaatcagcaggttcagctctagttcccggcaagagaagctccgaaactggatcccgtcgtaactcacatagtggaatgagaaactctctacaaaaaatcagtgaggtgcctgaaggagggaataagaccaggaaatctggtttgcgttcttttatgggccttattggtatgggacatgggaatgtagagaagaacattctaaaaccaagggaagatcccctacttgatagcgatgatgagagaccagatagcttcgatgacgatttcaggaagaaagaaatgagaaagggcatagatttggctaccacacttgaacgtattgaaaagaattttgtcatcaccgacccgaggttaccagataatccaattatatttgcatcggatagctttttgcgtttgacagagtattgccgcgaagaaatattgggaagaaactgcaggtttcttcaaggacctgaaactgaccgtgggacagtaaagaagataagagatgccatagataaccaaacagaagttactgttcagctgataaattatacaaagagcggtaagaaattctggaacctctttcacttgcagcctatgcgtgatcagaagggtgatgttcaatacttcattggggttcaattggatggaactgagcgtgttcgagaggctgctgcaaaagatggtgccatactggttaagaaaactgcagacaatattgatgaggctgcaaaggagcttccggatgctaatttgagacctgaggatctatgggctaatcactcaaaaccagtcttgccaaagccacatatgaaggatactgcatcgtggagagccatccaaaaggttcttgagaacggtgaaagcattgatttgaaacatttcagaccagtaaggcctttaggatctggtgatactggcagtgtccacttggtggagttgcttggcacaggtgaatactttgccatgaaagctatggataaaagtgtcatgcttaaccgaaacaaggtccatagagctaccgctgaacgacaaatccttgatatgttggaccacccattccttccgacattgtatgcatcatttcagacaaagacacatatatgtcttattgttgactattgtgctggtggggaactctttatgctccttgataggcaacctatgaaggttctgaaggaggatgcggtcaggttctatgctgcagaagtggtcacagcacttgaatacctacattgccaaggtataatctacagagacttaaagccagagaacattttacttcatagagatgggcacatttcattgacagactttgatttgtcttgcttgacatcctgccgaccacaagtgtttcttccacacgatattgataagaagaaaaagaggaggaagagcaggagtaatcccatattttttgctgaaccaatgcgagcatcaaattcttttgttggtacagaggagtacattgcaccggagattattaccggagctggccatacgagtgctgtagattggtgggcgctaggaattcttctatatgagatgttatatggttatacaccgttcagagggaaaacaagacaaaggacatttgctaatattctgcacaaggatatcagatttcctgcgagcatacaggtgagcctggcggcaaggcagctgatataccggttgttacaccgagaccctgcaaataggctaggttcctatgagggcgctatggagatcaaacaacaccccttctttcgtggcataaactgggctctagttcgtgccgccacgcccccagagctggaggctcccctccaggatacattggaggccacactgcctcctcctgcagctgatggggctcacaccgatatgttctgatcatacattggtccatgatgctacatgttaatttgcttaaaggaagaaaaaatattagatgatgaagatgcatgactttggcatagatgagaacaataatgtatgttaaggactaattatcttgatccatctatgcatgctcacaattagaataagattggatgtgtatattgtttctgtggttgcaatatacgcacgagtctatgaaaggacctatggatagcttgaggggatgacagacactaggcatgttgattagtactccctcc

SEQ ID NO: 113723 - DNA, 764 bp, Zea Mays
gtgattttccctaacattttcatttcttgtctctatttgacatgtgtgatagtcatcatctgttttatcaatccttgtattgtatgcatgctgtaggagattattaccggagctggccatacgagtgctgtagattggtgggcgctaggaattcttctatatgagatgttatatggttatacaccgttcagagggaaaacaagacaaaggacatttgctaatattctgcacaaggatatcagatttcctgcgagcatacaggtgagcctggcggcaaggcagctgatataccggttgttacaccgagaccctgcaaataggctaggttcctatgagggcgctatggagatcaaacaacaccccttctttcgtggcataaactgggctctagttcgtgccgccacgcccccagagctggaggctcccctccaggatacattggaggccacactgcctcctcctgcagctgatggggctcacaccgatatgttctgatcatacattggtccatgatgctacatgttaatttgcttaaaggaagaaaaaatattagatgatgaagatgcatgactttggcatagatgagaacaataatgtatgttaaggactaattatcttgatccatctatgcatgctcacaattagaataagattggatgtgtatattgtttctgtggttgcaatatacgcacgagtctatgaaaggacctatggatagcttgaggggatgacagacactaggcatgttgattagtactccctcc

SEQ ID NO: 113724 - DNA, 1202 bp, Zea Mays
gccgttccccaacctctggcgtagtcttgttcatcttcgatctcctccatctcccttcatcctctctctcgctgtttgaggagaactgcctgcccctgctccctcttccgctcctccccgcgccccgctcgccatccccagacttcatttcaggccgggatggacgactacgcccgggagatgatggagctcaagacgctcgtcacccgcaccctcgagaagaagggcgtcctcgccaagattagggctgagctaagagcaagcgtgtttgaagccattgaagaggaggatcgggtggagaatgatgatggagggaaccctgctttgcttggtagctgtaatgaccgagctaagcaactgcatgcttcaccttcaggtaggttactaactgcacttgtatgcgaatacttggagtgggcgcaactaagtcacacaatgaaagtttacttgccagagtgtaacctgcccaaggacttctggaagaatgaactgaaagacttctctaacaaaagtggagctgaagggagcaggagtgctgaaagtggtccaatgcttttagatgttctcgaaggttatctgaaatatgagaatttgtctcaaacaaggatgggcggcaggaggatgatgagttcagaatctgatccatcactaaatgttgaacatcggagcatgaggagggcaccattatcgtcagctgggaacctgcctcctatggggaggccaatctcttcgtcgcagcaggcatcagatcgcagagggggatcttcagcttccaacacaaggaaagatgagtacaactggagatacgataccaccgatgatatatctgaagaggtgctacgggcatcgactgctctagaaagtgttcagctagaccgcaaatctcggaatctgccaacatcttggaggcattcaggggatggcgccgagtaacaacaaggctttggagctggttgcttgacttgaccctgtatcatgtaatttgtatgccaatcatttgcagtgatacgatgcttggattgctgctatcttagagaagtggtaaactggttatgcgtgtttgtcttgtaacgaacaaaacaactttagtgttagtttcatgttgcaattttcaaagctctcatgttggaactgcgtggactagtttcatcgtcataaagctcattttattcccgtagaacattatttaatcatcactcgct

SEQ ID NO: 113725 - DNA, 4023 bp, Zea Mays
tggttgtttctcctcacgctggctgacttgcaatccaccaggacgaccatgagcgacgatggtgaccgcacctgcccgctctgtgccgaggagatggacatcactgaccagcagctcaagccatgcaaatgcggttatgatatttgtgtttggtgctggcaccacatcatagacatggctgagaaggaggaaacagtgggccgctgccctgcatgccgcacatgctatgacaaggacaggatcgtcaagatggctgccacttgtgacaggacagtggcagagaaaaatgcagagaagaagcacaggacccaaaaggttaagccaaaggcagcaccttcagcagcagcaacatcaactgtagaatctaagaagcatctggctagtgtcagggttatccagagaaatctggtgtatataattgggctacctgcacatttatgcaatgagagcgtacttgagtgtagggagtactttggccaatatgggaaaattttgaaggtttcagtttcccgtccgactgggcctccctctcagcaggcatcagcaaacagcaatattagtgtctatattacttatgccaaagaagaagaggccatccggtgtattcaagctgtacacaattttgtcttggaagggaaagtgttaagggcatgttttggtactacgaagtattgccatgcatggctgcgaaacatgacatgtgggaatccagattgtctctatttgcatgatgtaggcagtcaggaggatagttttactaaagatgagatcatctcagcatatacaaggactagagtccctcagatggcatctggtgtttcgcaaagacgcacaggcactgtgttgcctcctccaggagatgatttctcttacagtgcggtggtttcagccaagcatacatttaagaatggaacacttaataccaccagtcagcccagactttcacctccaaacagtagttctgggaggtccacgcttccatcagctgcctcatgggggcagcgtgatttgaatgccaggacaacagctactggagcgacatcgtcacaatctcatacaaaaccaaaatcagaatcacaaagtaatccattttcaagttcttcagtattttcctgtacaaaaacaccctcttcatggaatgatgatacaagtacagcagcaaaaatatctgaaggacagcaactgtcagaaaaagagtctagaaccttgcagccgtataagcctggtatttcaaaggaaacacaagctttatcatcactggagtcatcactggacatagacttctcaacaataccttcagcttggaatgacgatgacattgtagtaccagatgtgatgccaaaaggaagtgatgaaaatcaagttgcaaataaaaatggtgagctaacccatccagcatccaagtcactggttttatctaagaaagacataaaaatgaacattaccagcaaaactccttcagattttgtatcaagtccagcaatatctaaatcagatgtaagtactagtgatggtgaccactcactcaccaatattactcctaaatgccttgcttcaaatgctgtagaatgccaatctagtcatactgctgtggagaaaatgttggaggatattggatccaaggacactgacatggagaagctatctgctcagatatcttcagtaacattaggtggcaacgacgagattcagagtatggcaggaaatcaacaaccagatgtaatgccatgcacatctgttgatgtgctcatggatcagaattttggcagagacctagctcatcccaatcctgacgagctcttattgccttctgaaaataaggatagtattgtttcttgtcaatatagttctgataagcgtcttgattggagtttggagatgcaaaattgtagcgttactcctttaaatgatagaatggactctgcactgctcactgacaaaattcatagtagacagctggatggttcagagcaatcatcatattcatcatttgttgaatttcctagtacagtggatacctcattgtggaatgatacagaaaataacgctgcattgacgattgacaatataacttcttcacagatgcagccagggttttcttcaactgataacacttatgccttgctaaatggaggtcaagatgggctaggtactgtatatacacatgataatgtttctgtatatacacatggcaatgtttctggacatcctggaatgggaagtcatcaccatagagcaatgggttcattaagaaacaatagtataggaagttttgacaagaccataagcgtaaataagtatgaaagaagaataatttctgatacgttgtcagagtttaatccatgggatgattcatattcgactgctaacaattttgctaggatgcttagggaatctaaaaataatgatgtccattgcattgcgccttcatggaaatcaggaaccgggatcaaagagtccagattttcatttgctagacaggataaccaaggaaacttgtttgattcatctctcagaaactgtggtactggtactgagcagaatttcagtttgctaccccagaattctcgaggaaatatttaccagaatggccttgcattccaatctctagagaatgaattttcaaacaataactctcctggtgtattagatatggcaactactggtacatcgatgtctaaaatatctgcccccccaggattttcggcaccaacaagagtaccccctcctggattttctactgcatttccatcccaggatagtttgaaccccactcctgtgtttccttctggaattttgtgccatggcgggtctatcccccctcctagattctcttcattttcttctggaatttcaactcaggaagtgtctaagcctcctactagaccgccttctccattttcttctagattttcatcacaggacggtcttgacccctcttctagattccctttttcttctggattttcatcacatgatgggtctaatcagtcgtatggctcaacgaacccagaaaatcttctccggggtactgttcagggtggcaacagtaatcattatcaatctcagtttggaaggcactcaagtgacatggagtttgatgatcctgctatattagccatgggcaaagggctgatgcctggaattggcgattcagggctggagatgaaaaatactcctgcttttcaagcacagttgcaaccagcaagtagtgatccaagatttcagttacatgtacagccaaatgtgcagtctcgtcaaaacatgagattcacagaccctatgcaagatggtttgaaccatatgaacgataattacctggcatccagatttttagctcagaaccagggtcctctatctccttatgtgcagattccgcaacaacccagaaactcgcaggttataaatggtcactgggacgggtggagtgatttgagacaagggaataacgctcctatgtcagacatgtccaggatattatatccaagtgaagtgaacaagttgcatatgctgggttcaaatgatgtccataacagagcctttggaatgtgatcgtctcctgggataatgtgcgactttgagctgacatgttcaacttggggcgttttgtgcaagtaactggttgcacaacacatagtatacctgaggtggttaatggtgttgtgctcatgagctggcacacgactatttattgctgttggagttgaccaaaatgaaccttagttttggtccatccatttggaattaccaggttcattctcgtctatgatttgtgaagcttgaatgaaaagaaagattacgtgcctgagaagaacaaggcagctgaagttgaaatagatagagatatgtctattatgggatgtggtgtgacttgcgagcgaaagagatgaagaagattaggtgggcttggcttgatggcagcttgttttttcttgtgtcttgtacatgatgatattggtcggtggttgtatatgacttgtgatcgacggtggctgcattaacctgtagtggttgcccttgctc

SEQ ID NO: 113726 - DNA, 4357 bp, Zea Mays
tggttgtttctcctcacgctggctgacttgcaatccaccaggacgaccatgagcgacgatggtgaccgcacctgcccgctctgtgccgaggagatggacatcactgaccagcagctcaagccatgcaaatgcggttatgatatttgtgtttggtgctggcaccacatcatagacatggctgagaaggaggaaacagtgggccgctgccctgcatgccgcacatgctatgacaaggacaggatcgtcaagatggctgccacttgtgacaggacagtggcagagaaaaatgcagagaagaagcacaggacccaaaaggttaagccaaaggcagcaccttcagcagcagcaacatcaactgtagaatctaagaagcatctggctagtgtcagggttatccagagaaatctggtgtatataattgggctacctgcacatttatgcaatgagagcgtacttgagtgtagggagtactttggccaatatgggaaaattttgaaggtttcagtttcccgtccgactgggcctccctctcagcaggcatcagcaaacagcaatattagtgtctatattacttatgccaaagaagaagaggccatccggtgtattcaagctgtacacaattttgtcttggaagggaaagtgttaagggcatgttttggtactacgaagtattgccatgcatggctgcgaaacatgacatgtgggaatccagattgtctctatttgcatgatgtaggcagtcaggaggatagttttactaaagatgagatcatctcagcatatacaaggactagagtccctcagatggcatctggtgtttcgcaaagacgcacaggcactgtgttgcctcctccaggagatgatttctcttacagtgcggtggtttcagccaagcatacatttaagaatggaacacttaataccaccagtcagcccagactttcacctccaaacagtagttctgggaggtccacgcttccatcagctgcctcatgggggcagcgtgatttgaatgccaggacaacagctactggagcgacatcgtcacaatctcatacaaaaccaaaatcagaatcacaaagtaatccattttcaagttcttcagtattttcctgtacaaaaacaccctcttcatggaatgatgatacaagtacagcagcaaaaatatctgaaggacagcaactgtcagaaaaagagtctagaaccttgcagccgtataagcctggtatttcaaaggaaacacaagctttatcatcactggagtcatcactggacatagacttctcaacaataccttcagcttggaatgacgatgacattgtagtaccagatgtgatgccaaaaggaagtgatgaaaatcaagttgcaaataaaaatggtgagctaacccatccagcatccaagtcactggttttatctaagaaagacataaaaatgaacattaccagcaaaactccttcagattttgtatcaagtccagcaatatctaaatcagatgtaagtactagtgatggtgaccactcactcaccaatattactcctaaatgccttgcttcaaatgctgtagaatgccaatctagtcatactgctgtggagaaaatgttggaggatattggatccaaggacactgacatggagaagctatctgctcagatatcttcagtaacattaggtggcaacgacgagattcagagtatggcaggaaatcaacaaccagatgtaatgccatgcacatctgttgatgtgctcatggatcagaattttggcagagacctagctcatcccaatcctgacgagctcttattgccttctgaaaataaggatagtattgtttcttgtcaatatagttctgataagcgtcttgattggagtttggagatgcaaaattgtagcgttactcctttaaatgatagaatggactctgcactgctcactgacaaaattcatagtagacagctggatggttcagagcaatcatcatattcatcatttgttgaatttcctagtacagtggatacctcattgtggaatgatacagaaaataacgctgcattgacgattgacaatataacttcttcacagatgcagccagggttttcttcaactgataacacttatgccttgctaaatggaggtcaagatgggctaggtactgtatatacacatgataatgtttctgtatatacacatggcaatgtttctggacatcctggaatgggaagtcatcaccatagagcaatgggttcattaagaaacaatagtataggaagttttgacaagaccataagcgtaaataagtatgaaagaagaataatttctgatacgttgtcagagtttaatccatgggatgattcatattcgactgctaacaattttgctaggatgcttagggaatctaaaaataatgatgtccattgcattgcgccttcatggaaatcaggaaccgggatcaaagagtccagattttcatttgctagacaggataaccaaggaaacttgtttgattcatctctcagaaactgtggtactggtactgagcagaatttcagtttgctaccccagaattctcgaggaaatatttaccagaatggccttgcattccaatctctagagaatgaattttcaaacaataactctcctggtgtattagatatggcaactactggtgagtgctattatacctttttacttctttgcctgactgagcagaatgataagtactgcaatttgaatgaatttactctgtgtgccacacttatttttcattgagcattggtaaagatattctgactcatgcaaatggattgttgatctattggtgcttattatgtattttttcccactgttaaatttattttttatgaagaatttgctttctcaggtacatcgatgtctaaaatatctgcccccccaggattttcggcaccaacaagagtaccccctcctggattttctactgcatttccatcccaggatagtttgaaccccactcctgtgtttccttctggaattttgtgccatggcgggtctatcccccctcctagattctcttcattttcttctggaatttcaactcaggaagtgtctaagcctcctactagaccgccttctccattttcttctagattttcatcacaggacggtcttgacccctcttctagattccctttttcttctggattttcatcacatgatgggtctaatcagtcgtatggctcaacgaacccagaaaatcttctccggggtactgttcagggtggcaacagtaatcattatcaatctcagtttggaaggcactcaagtgacatggagtttgatgatcctgctatattagccatgggcaaagggctgatgcctggaattggcgattcagggctggagatgaaaaatactcctgcttttcaagcacagttgcaaccagcaagtagtgatccaagatttcagttacatgtacagccaaatgtgcagtctcgtcaaaacatgagattcacagaccctatgcaagatggtttgaaccatatgaacgataattacctggcatccagatttttagctcagaaccagggtcctctatctccttatgtgcagattccgcaacaacccagaaactcgcaggttataaatggtcactgggacgggtggagtgatttgagacaagggaataacgctcctatgtcagacatgtccaggatattatatccaagtgaagtgaacaagttgcatatgctgggttcaaatgatgtccataacagagcctttggaatgtgatcgtctcctgggataatgtgcgactttgagctgacatgttcaacttggggcgttttgtgcaagtaactggttgcacaacacatagtatacctgaggtggttaatggtgttgtgctcatgagctggcacacgactatttattgctgttggagttgaccaaaatgaaccttagttttggtccatccatttggaattaccaggttcattctcgtctatgatttgtgaagcttgaatgaaaagaaagattacgtgcctgagaagaacaaggcagctgaagttgaaatagatagagatatgtctattatgggatgtggtgtgacttgcgagcgaaagagatgaagaagattaggtgggcttggcttgatggcagcttgttttttcttgtgtcttgtacatgatgatattggtcggtggttgtatatgacttgtgatcgacggtggctgcattaacctgtagtggttgcccttgctccttcctgcctgttttgtttgcagctcctcctgttttgcatagtttatgctgattaagggaattggtgaaagtctagtgttacccatggtataataatagggaactggtttctttgtta

SEQ ID NO: 113727 - DNA, 735 bp, Zea Mays
atggcggctgcgtcttcgtccagtctgcgctccgaggtggacgctcgcgtcgcggcgactgtcgagcgcctggatgcggtggaagcggcggcggcgactcgtgtgggagcgctcgagtccgcgaccgcagccttcgagtcctggaaaccgcacatggaggcttcaatcgacgacatcaagtattccgtggatctgctccgcggcgacctcgccaagctgcagccccgttctcctgcgccgccgccgcctcggccattcgtccatccagcgggtgttctcggccctctaccaccggttggagggcgtccatccgagtttaaagcccaaggtgcaggacaatcttcagttccgggggatcgtttgtcatcagtctatgcataccgcaaagccaagggtctctgctacaaatgtggttctccgtatgcccgaggccaccaatgtcctgagtctgtgcagttgcatcttgtggaagagctctggcatcagtttccagctccagcagatgatactcaatcagtttcttctaagtctgagtcccttcattgtctacatttgtatggcgctacagttgataaagtggcacatcccaagtccatcagatttgtgggcgaacttggtggtcattcagtgcttattctgttggattctggcagttctatttcatttgtgagctctgctatagcttatcagttaccaacaacaccgattttttgtgccaaacagtttttcggctaa

SEQ ID NO: 113728 - DNA, 1491 bp, Zea Mays
atgccatgttgtcagttgatgctcgatgcaattatgtctatgaatcatactgccaccagcacaccatcatggttgcgtcgtttgcatgcgaaaaaaggaatatctgtgccatccaacctacaaattgatgacttcatcaatggagatggatcccaaccttcactatgcttgcctgtaccaacttcttcctaccaccaccataaaaatcttcttgacatttccaaaaaccaacatcaaaaggctactgagaccgaacaatgtaaaccacctaacagtcagacacaacaaagcccaaggtttgaaaaacctcacatgccacaaccacagcccaaagccatgatttctaatgttttggggaccccttccattgatcccatggataccttgcccctcaaggcttttcgcaagaaaaagaaatccaccagcagcacattgtgcaacaaatccatcaataaagagatgcagaccaccttcatgatgtcaaacgttctagatgtcccctcatgtaattcgatagaaaccacaccttataatcccatatgcaagcagccaaaacccaataccaatgtcaccaatgctttagcaatcccctcctccactccaatgaataccatacagcctcgcaaaggtatgaaaatgaacacaaaaggaaaaaatcggtatgaaggcaagtggaatggtaatatttattacaccatcgtcgacaccagtattgataaatgcaagggcaccaaaaaatcaatttgtagcaatgacttcatggtctctagcaaaaatcctaagcagacctttgaacaacatgattccatcataaagggaaagcgaaggtttaatctcctctccaatctacaagaaaagtatgagaaggataaagaggtcaccttacagaaggaaaagagcacaaaagtcaagaataatcatgacactagggatacgacaagtgcagtcatagagaggccccaaagcattgatatcactaccattgacactagtatcaatggatggaaagccaccaaacacctcatccataggggacaagtttgggagattgttgatagaaaatccacaatacggcctctacacaagaaattgtctacgatgaggaagagaaaatggctacacacaaggaataatgctttttagaggtaaaggtgtcattaaaatattggatggtcaaattcaaactcaaaaaggactagatgttctcaaccagtactagaagacaatggtgacactactattcaaatacaaaccataaggaggaggaagatctcagacatcataacattaatttaaaggggaaaattaagccaatgattatgtaggaaatatattgttactttattattactgatgaattatgttgattcagttaccatcagattgtttcatcctttctattcgttaaagtcgtcattaaactaaaatagatattttaattcttgtggttgctggcaagataatgaaataatatgctttattaaaaaaata

SEQ ID NO: 113729 - DNA, 104 bp, Zea Mays
tttttttttcctcaaagtgtgaggtgatgcctctgcatgttctcaatgctgattattttagtttttctgtatcatattgtttggatccaaaataacaacattac

SEQ ID NO: 113730 - DNA, 1041 bp, Zea Mays
atggcggcggccaacgcccccatcgccatgcgcgaggcgctcacgctcacgagcctgggcatcgcgccgcagttcgtcaccttcacccacgtcaccatggagtcggagaagtacatctgcgtccgcgagacctccccgcagaacagcgtcgtcatcatcgacatggccatgcccatgcagccgctccgacggcccatcaccgccgactccgccctcatgaaccccaacaccaggatcctcgccctcaaagcccaaatacctggaacaacacaggatcacctccaaatattcaacatcgaggctaagactaaggtcaagtcccaccagatgccggagcaggttgtattctggaaatggatcactcccaaattgttgggtttagtgacacaaacatctgtttaccactggtcgattgaaggtgattctgagcccttgaagatgtttgataggacagctaatctggcaaacaatcagatcatcaactatcgatgtgacccagcggagaagtggcttgtacttattggaattgcacctggagccccagagaggccacaactggtgaagggaaatatgcaacttttttctgtcgatcaacagcgtagccaggcacttgaagcccacgcagcatcttttgcaacatttaaggttgttggtaatgagaatccatcaactcttatttgtttcgcctcaaagacaactaatgctggacagatcacttcaaagttgcatgttattgaactgggtgcacagccagggaaacctggtttttctaagaaacaagccgacctcttcttccccccagatttccaggatgattttcctgtagctatgcaggtttcacaaaagtatgggcttatctatgtaattactaagcttggccttttgtttgtatatgacttggaaactgccgcggcagtttacagaaatagaatcagtccagaccctatattcttgacggcggaatcttcctctactggtggattttatgccatcaacagaagagggcaggttttacatgccacagttaatgatgcaactgtt

SEQ ID NO: 113731 - DNA, 1694 bp, Zea Mays
ctgctcgcaaggctaacagtgccaaaacatggaaggaggtctgctttgcttgtgttgacgccgaggagttccgtcttgcacaaatttgtggtctcaatattattgttcaggttgatgacttggaagaagtcagtgagtactaccaaaatagaggatgcttcaatgaactcattgctctcatggagagtggtcttggacttgaacgtgcacacatgggcatcttcacagaattgggagttctatatgctagataccgctctgagaagcttatggaacacatcaaacttttctccacacgtctcaatattcctaagcttattcgagcttgtgatgaacagcagcactggaaagaacttacctacctgtacatacaatatgatgaatttgacaatgctgccaccactattatgaaccactctccagatgcatgggatcatatgcagttcaaggatgtttgtgttaaagttgcaaatgttgagctatactacaaggcagttcacttctatttgcaggagcatcctgatctcatcaatgatatgctgaatgtgcttgcacttcgtttagatcataccagagttgtagacataatgcgcaaggctggtcaattgcatcttgtgaaaccatatatggttgcagttcagagtaacaatgtctctgctgtgaatgaagccttgaacgaactttatgttgaagaggaagactacgagagactccgtgaatcagttgatatgcatgacaactttgaccaaataggtcttgcccagaagcttgagaagcatgaattgctggagatgaggaggattgctgcctacatttacaagaaggctggcaggtggaagcaatccattgctctatcaaagaaagataacatgtacaaggattgtatggagacatgctcacaatctggtgaccgtgaactgtcagaggacttgcttgtctatttcatcgagcagggtaagaaagaatgctttgcttcctgcctcttcatttgctacgacctgatccggccggatgtcgctcttgagcttgcatggatgaataacatggtggactttgccttcccgtacctgttgcagttcatccgtgaatacactagcaaggtggatgatttagtgaaggacaaaatcgagtcacagaatgaagaaagagccaaagagaaggaggagaaagatcttgtggctcagcagaacatgtatgcgcaactgcttcctcttgccctgcctgctccgccaatgcccggcatgggtggccctccacctccgatgggcggaatgggcatgcctccgatgggcgggatgggcatgccgccgatgggccctggtccgatgccagcattcgggatgccaccaatgggaagctactgagatgttttttttggcagagagcttagatgatgatttgatatgttcctgtgtaagcagaggcggaaacctcattggagttgtagatggttacattttggaattaatattctttatggtaccaggaaatttttggcgagtgaaatcttggccagagtcatcggataggacggggatgattaggttggttgagcatgagctggtgaaagctggtaccatttgtatagtgtgatgaaatctttgtagacattttgcttgtgtaataataatacttgttcgcacagcgaaggacaaacaaatgtatgctgacttgtgacgtcctgttcattgcaa

SEQ ID NO: 113732 - DNA, 2026 bp, Zea Mays
cagacagacaggcaggcaccgcgcgcgcttgtccgcgcggcgggaccgagcgcgagcgcgccggccttgcaattcattccagaatcaaccacgatgggcggccgaggtggcggggaggaggaggagggggtggtggacggcggccggcatcatctgcggcatgagcaaaggctgaacgtcttcggcggggaggaggacgacagggacgaggggtggcggcggtggtcggtgctggtggcgacggtgtggatccaggcgctgacggggaccaacttcgacttctcggcctactcgtcggcgctcaagtcgtcgctgggcgtctcgcaggaggcgctcaactgcctggccacggcgtcggacctgggcaaggcgctggggtggtcgtcgggcctggcgctgctccacatgccgctccacgccgtgctcatgctgtccgccgcgatggggctcgccgcctacgccgcgcagtactactgcctcgtgttcgccggcggcgctgatgcgggagcgtcgtcgtccgtggccgtcccctaccctctggtgttcttgttctgcttgatagcagggtgcagcatctgctggttcaacacagtctgctttgttctctgcatccgcagcttctctgcgagcagccgctccctagccctctccctctccataagcttcaacgggctcagcgctgccttctacactctctttgccaacgcgctctcccctttctccccagctgtctacctcctcctcaatgcaatcctccctctcgccgtctctgtccttgcactcccagcgatcctcctctgccacaaaaatgagggccacatccaaagtgcgcccgggcatgacggccgcgtcttcctcggcctctacatcctcgcattcatcaccggcatatatctggtggtctttggatctttcaccgcaaccagctctactgcgtgggtcatcctcacaggtgccatggtcctcctcgcccttcctctcatcatccctgcctgctccagttgctcagatggccctgaccctgcatatgatgacccacataagccactcctcatcagtcagatggagtccaatgccatgatgcaaaagccaaaggagaaccaggtgcaggtcaagggccgcctggcgacgctcggtgaagaacacagtgcaaagaagctcattcggtgtgtggacttctggctctactacacagcctacttctgtggagccactgttggcctggtatacagcaacaacttgggtcagattgctcagtcattgcaccagcagtcacagctcaccatgctccttgccgtctactcatcctgctccttcttcggccgtcttctctctgcactacctgacctccttcacaggaaggtgtcacttgctcgcacagggtggcttgctgctgcattggtccccatgccaatggcctttttccttatgtggaacaaacaagatggaagcaccctggtagcaggaacagcgctaattggcctaagctcagggttcatctttgctgcagcagtgtcagtgacctcggagctctttggaccaaatagcgttggggtgaatcacaacatccttatcaccaatatcccgcttggctcactcctctatgggcagattgctgccatggtatacgatgcaaatggccaaaagatgacagtagtggataaccgcactggcattgttgacaccatgactgtgtgcataggggtgaagtgctactcaaccaccttcgtcgtgtgggcttgcatcacatttctggggttagcatcaagcatagttctattcataagaacaaagccagcttatgccactgctgctagtcggtcaagttgtaagcaccttcaccaagtttccagttaaagtagttgacagagaaacttactgttgtaatcaccgctagcttgtataaaattttggttagttgatagttctagctgaaacgggttacaaaaaatatgtgaaaatgagtagcttgtacaaaaaggatcccattcatattacttcatctgagggttacagctggaggatg

SEQ ID NO: 113733 - DNA, 2778 bp, Zea Mays
agtttcacgatccctcctcatcaaccacacttccattctcttctcagttctcaccgtgcaggcgtagtgcgtagtgtgcagaggccaggacagaaaagagaggcagcgcagtatccatccaaccacgccgtcttccttccgccgcgagggcttccgctgcagcgcgatcgccgcattccaccctcttccttcctgggacagcagggctttggcactcgactcctccgccacagctccaaccaaagcaaagcggttttcaagcttgccagtgtcagtgcaatggtgactagcaaatcctcgtggagccaggttgtaaaaaataccaggccgacaaacctgtccgttgctgcaagaaacctccaaccacaggaccttggagccgtgatatttggttgcacaaacagtaccattcaagagtgtcactcacggcaactttttggcttgccaaaaacacatatttcatatgtacgaaacattaaggaaggactacctctcttcctcttcaattatgatgatcgaagattgtatggtatttacgaagcttcagggaatggaaaattctgtcctgaatcaaatgcatggtcacaagatagcaagggcaaaacaagctatcctgcccaggttgcaatgcgggtaaaggtgtggtgttttccgctagcagagaatcagttcagaaatgcaattatagccaattactaccagaaaattcccggtgtccctggccagaagcttcattttttcaagtttgaattggatcatgctcaaacacgtgttttgatggatatgtttactccttctccttctcccaacagtttctggacgccccctgctgcagcaccagctgacgagcatgcgaaagaattagtgttgtcacctggatgggcaccagagtgtgaagggaacaataacctcaaatcagaaaaggttgtcaagtcatatgcagacatagtgaagaagaacacatttgtggaagttgggacaagagatgtggatgtggaacatgcaggctcaggtgatgaatcttctggtggtttcgatgaactggattgtcagtacacaccaacagagagggaggactacgctctatcagatagggtggttcaagtgcaacaacagtaccctgataagcaggcagaagtgcttagctttgatcgggttttacaagggcgcatcacttttcctggtcagcagtggcattctgatttttatgccaatactacccaaactgaggataacgatgcatatagctgcgagtatgcccaagaggtcaaatatgcaattctggatggcagctctaatttgccagaaaccttagattctgaagttgataaactgtccctggggcattctgatttgctggtgcagttgttggactctgaatcatgcacagaagctaagctgattgatgcagtgaaacagttatctggacgaatagaggtgatggagaagaagcaggcttggtccaacaaagaagtcaaacatctacaagggatgaatgagaggttactgaaaagaattgttgaactaaagggaaccgttatgacattgaattctaaaatagatcctttaaccctagatgattcacttaaccagtttgtagaacaatgtttgggttcagaagatgtcatttatttagttggtggttttgatggcttctcatctttgccatcactagactctttttccccttcattggacatactaacaccccttaaaccaatggctgttggcaagtcatattcctcaactgttgcactagagggcaagatatttgttcttggtggtggtgatggtgcttgctggtttgatacagttgactgttatgaccgaagccgtgatgattggtccacatgcccatcgttgacttgtgacaaggggagccttgctggggttagtgtcaacgggagaatctatgcatttggtggtggagatggaaccaagtgtttctctgatgttgaaatgtttgatcctgtgcatggaaagtggataaagaatcaacctatgctggaaaagcgctttgctctagctggtgtagcactaaatggtgcgatttatgctgttggtggcttcaatggtgttcaatatttgagctgtgctgaaagacttgatcctcgggagcctaactggaaaatgctaccaaagatgagtgcaggaaggggctgtcatacacttacagttcttaatgagaagatattctcgattggtggatatgacactagggctaaagcaatggtgtctactgttgaggtgtatgagccaaggatgccatcgtgggtgatggttgaacccatgaactacaccagaggatatcattcttcagctgtgctcggtggctcaatattcacctttggtggggtgaaaggtgaagcagacacaatcttggatgtggtggaacactacaaggaagggtgtggctggatgacaacgggattgaagtcgattggcagaagatgctactgctcagcgattgttctctgactgtaactgccttaaaaccaagtgagaatgaggagactgataataggtaaaactaatatattaatattaggtaaaaactaagaaggctcttgcttagcctgaactgacaacactagacacgatggacctcgtagtttctgaatcggcgaactgtaaaacaaacattgagctgtttgtgttgtccgacactggatggtgggtggatgcatgcatgagtgaatcggtactgaactgatgtagagatgacacttccatggatgaatatccaagtatttgactctgtatgttgagctttttctc

SEQ ID NO: 113734 - DNA, 1175 bp, Zea Mays
gcggccctgctctgcgctgacttctctcccgtatctgtcgtaactcgtaacagatcgtcggcgcagtaaccatctcgtcgaatccgatggccctcggcgacagcgccaccacgccgccggtggccaagctctccatctccggcgcggccctcgcggcgctcctgcaccgctgcgcggccgcagccggcgactgcgacggcctcctcttcggccgcgcctcgcacctgcccgcgccgccggccgctctctccgactacgacgacgccgccgcggcggcggcccctcccgcccccgcgctctccatctccgtctccggccactgctccctctcccacccctcatccctctccgactccctcggccgcttccaaccccactcctcccccgcccccgcctccgcccccgcccccatcggcttcttctcctcccgccgccgcaccgcgctccgcccctccatgcgcgaggccgtcctcgctcactccctctccgcaaccctagcctccgcccacccgctcctcctcatcctcgtctccccctccgcctcccccaaccactccacccactcctacgactaccgcgccttcctcctccacggcggccgcctcgtcccggcctcgctcgccatcgtcaacgtcgggcccggattccgggaccagtaccacgccttcaccgccgagtcgcccatgccctggctgccgtcggctccggcgcctgggcacgctcacaccctcgtggagcagaaggcggtggatgaaatggtggacgggtttgggatcggaaggctgcaggagctcctcggcgctgctgcggggcaggcggccgagattgatgacatgtacgcagggatgctcagcaagctggagaagctcgccagggaggtggaaaagagcaatctccgtgtgctcgagcaggaaaagaggaacctgctgctgaggtataaatatgctggaatggagtaggaccgaagtgcttttggtcttagcgatgtgtgtatcatgactgagttttatcggtgtgtcatgcagatttcgtgatgatctgaatgttcatcagtagttccaagtcgcactcatgtttttgataatattattttgtcatgtgccgtgtatttgtgttgtgtgcttttgtcgggggtgtttgaattcactagagatgatagttagttggctaaaaat

SEQ ID NO: 113735 - DNA, 2839 bp, Zea Mays
ccatttcttgcctcccgtgccagccagtcactctcgtccgccgcagatcgagaagccaccaccaccaccaccaccaccgcatggccatggcagcccagcagcaccggcaccacaagcgccgccgcatcgccctctccccctccccgtccccgtccctcgcgcccatccccggcgcccccacgccgccgctcgactcgctggccgacgagctcctcttcctggtcctggaccgcgtggcccaggccgacccgcgggcgctcaagtccttcgcgctggcctcccgcgcctgccacgccgcggagtcacggcaccgccggacgctccgcccgctccgcgcggacctcctgcccgccgcgctggcgcggtacccgtccgcgacccgcctcgacctcaccctctgcgcgcgcgtccccgacgccgccctcgcctccgccgccgtctccggctcctccgccctccgcgccgtcgacctctcccgctcccgcgggttcggcgccgcgggcgtcgccgcgctcgccgccgcgtgcccggacctcgccgacctcgacctctccaatggggtccacctcggggacgccgcggcggccgaggtagcgcgggccagggcgctgcggaggctctcgctggtccgctggaagccgctcaccgacatgggcctcggatgcgtcgccgtcgggtgcacggagctgaaggacctctcgctcaagtggtgccttggactcacggatctggggatccagctcctcgccctcaagtgcaggaagctcaccagcctggatctctcctacaccatgatcacaaaggatagcttgccttctatcatgaagctacccaatcttcaagagctgacactggtggggtgtattggaatcgatgatggtgctcttgttagtcttgagagagaatgcagtaaatcactacaggtgcttgatatgtctcagtgtcagaatatcaccgatgtaggagtttcatccatcctgaagtcggtacccaatctattggaactggatctttcatactgctgtccttcttgtagccatgtttccagtggagcactccaactgattgggaagcactgttctcacttggaagagttggaccttactgacagtgatttggatgatgaaggattgaaagctcttgccagatgtagcgaactttcgagcctaaaaattggcatttgcttgaagataagtgatgaaggtcttagccacattggaaggtcttgcccaaaactccgcgagattgatttgtacaggtgtggagttattagcgatgatggaattattcaaattgcgcagggttgtccgatgctagagtctatcaacctatcatactgcacagaaataacagaccgttcactgatttcactctcaaaatgcgcaaagctgaatactttggagatccgtggctgccccagtgtttcatcgattgggctctcagaaatagcgatggggtgcaggctgctttccaagcttgatattaagaaatgcttcgggattaatgatgttggaatgctttacctttcccagttcgctcatagcctccgtcagataaacttgtcatactgttcagtcaccgatgttgggctcctttccctttctagcatatccggcctgcagaacatgaccatcgtccatttggcgggtataacacccaatggcttgacagcaactcttatggtttgcggtgggttgacgaaagtgaagcttcatgaagcattcagatccatgatgcctcctcatacgataaaaaatgttgaggcacgtggctgtgttttccagtggatcgataaaccgttcaaggttgaggtggagccttgtgatgtatggaagcaacagtcacaagatgtgcttgtgcgatgagaatacaggagacctcgagcgtagccgctatcgtggaaatcgtggcatgcatcgtatggatggatgagttgttgttggctggcaatggcatccagaagtgaagtctgatggggggagctccaaactcagcgttgtaatcagtgcgattcggcacaaagataccagcatttgagcagaggtgtatgtatgtcttgatgttgttttatactgctatagatgtgtagatcccattgtttggtgaggtgatcatttgcgaggaagttgactattagcatgtattaagataaaaaggaaagagatgagaaaatgtttttgaaatttagtacgatatgccttgcagtgcctgtatctgttgcattcatatttgtgatcagctggaatgaagtggcttgcattcatgttttatactgccgtgtttgggatgcaagaagagaatgaaggggcactggtgatctctgcctgcttggaatgaagtggatttgccggttgcatacgacacaggaggatgtagttcctggagtttgttgagtccgatttggatcagggttggacaggcacatgaaactcgatcgaagcatacagctgaagggtaaggggaagagagcgaggtcaggcgccttggggctggtagtatcgaaggaacgagacattcgatgattgtaagacaggattacaggagatgcacagcctcccttgcctctggatctgttactaagactttcaacttctgcttatatgtcgtaaaaaatattaataaaaaatctcgaattggattggttggggtgcgccaggctcagccagtagtgcaacggccgagcgacgctcgaggggcccagtggcaagccactgtagtggaccctcccccacaaaaaataaatttaatatcgaagtgaacacatggtccacatatcagatattaaactgataagaacagatactacacttgatcttagccaaaaggccgagaaaggtat

SEQ ID NO: 113736 - DNA, 2415 bp, Zea Mays
atgacggcggtggcgaacctgtcgtcgggggcgctggaggcgacggcgaagccgctggcggcggcgtgctacgacaacaacctggtgaactcgcagggcatgttcctgggcgaccagccgctgcgcttctcgctgccgctgctcctcgtgcaggtgtccgtcatcctagtcctctccgcggccgcccacgtcgtgctccgccgcctcggccagtcccgcttcgtcacccacatgctggtcggcatcttcctggggccctccgtgctgggccggaacgcctccttccgcgacctcctcttctccgagcggggcacctacatcctcgagagcgtctccctggtggcgctcatcctcttcctcttctccatgggcgtcaagaccgacctcagcctgctccgccgccccagcggccgcgccgttgccgtcggcatcacgggagccgtcgtcccgctcgccatcaccctgcccgtcttccacgcgctccagccctcgctgcccgaagacctgcggggctcctcgctcgtcaccgagctcgccgtccgcctctccctctcctccttccccgtcgtcgccgacgcgctctccgacctggacctcctcaacaccgacctcggccgcatcgcgctcacggcgtccctcatcacggacgtcacctcctggttcctccgcgcctgctccgccgcggtgttcctcgtctccgaggccatgtcgccggccttcacggccaggatcctcgcctcattcgtcgccttcgtgctcttcgtcggcttcgtcgcgcgccccgccggccgctacatcgcgtacaagcgcaccccgacgggggcgctcctgtccgagggctctttcgtcgtggtggtcatcgccgcgctgctgtcggcgctggtcacggacgccatcggcttcaagtacatgatcgggcccatgatgctggggctggcgctccccggcggcatgcccattggcgccacgatgacggagcgcctcgactccttcttcatcgcgctcttcctgcccgtctacatggcgctctccggctaccgcaccgacttcagcaaggcggaggaggcctcagagaggtggtgcgcgctggagctgttcgtggtgctctgcgtctccgggaagctcgtcggctgcgtcgccgcggggctcttcttcgccatgccgttccgtgacgccgccgtgctggcgctcatgctcaacatccggggcatcgtggaggtggcggccatcaacagctggggcgacagcatgaaggccaccgcggagcactactccacgctgaccctggccatggtgctcatcaccgccgtgtccacgccgctgatcaagctcctgtacgacccgtcggggcagttcgcgcgggcgaagcggcggtcgctggagcacgcgcgcatgagcgccgacctccgcgtgctcacctgcctctacagcgaggaccacgcggcgccgctgatcgacctgctggaggcgtcggggtcgtcccgcgactcgcccgtgtcgctcatcgtgctccacctcacggagctcgtgggccgcgccgcctccgtgctcaagccccaccggaagagcacgagcagcggcgggaacccgacgtcgtcggaccgcatcgtgaacgcgttccggtacctggagcagcaggcggcgccaggggcggtgacggtgagcccgtacgtggcgcaggcgcccttcagctcgatgcaccacgacgtgtgctcgctggcgcacagccggaaggccaacctcatcctgctccccttccacaagtcctcggacggcgcgcggagcacggccaacaacgccatccgctccatcaaccggagcgtgctgcagtacgcgccctgctctgtcgccatcctcgtggaccacggcctcgcgtccgggtcggcgtgcgccaccgccgccaacagcctgctccagcgggcagcgctctactttctgggaggcgccgacgaccgcgaggcgctggcgtacgcggcgcggatgccggagaccgggaccatgtcgctgacggtggtgcggttcaagctccggaactgggtcgggatgggcgggcgcgacgaggcgagggacgaggagctgctgcaggagttctggagcaggcacagggacaacgagcgggtggtgtacgtggagaagacggtggaggacgcggagggcacggcgtccgtggtgcgcgccatgagcgagaagttcgacctgctcatcgtgggtcggcgcggcggggaaggcgaaggtgacccggaggggtccacggcgctcaccagcgggctgtcggagtggagcgagttcccggagctgggcgtgctgggggacatgctcgcctccgcggagttcgcgtccaaggtctccatcctcgtcatccagcagcagccgcccaagaaaaccatcgccactggaagctccgtcaatgattaa

SEQ ID NO: 113737 - DNA, 1703 bp, Zea Mays
caccaaggaaacagagctactgaagtactaatggctccccttgcaaacgatgaagatcacaaaatttacggagagggttgtggtagccacttcctcgtggtggcgtacagcatccaaggccatgtcaaccctgcacgcacgctcgcccatcgccttgctcagaccagcggctgcacggccaccctctcggtcccgctctcctgccaccgccgcatgttcccctcttcttccgacgacgacggcgaggccaccaccatcatcagcgacgggctcatctcctacctccccttctccgacggcaaagacgacgggagctggcccgtggactcggaagaccgggcgcggcgccgtgacgcgaacttcagaaccctgtccgccgtcgtgagccgcctcgcgtccggcggcagccggccgccggtgacctgcgtggtgtgcaccctgagcatgccgatggtgcgcgaggtcgcccgcgcgcacggcctcccgctggccgtctactggatccagccagcgaccgttctcgccacgtactaccactacttccacgggcacgacgcgctcctccgcctcctcggcctcgacgacggcggcggccgcggccacggccagcatgaggtcactctcccgggcctgcaccgccctcttagggcccgtgacatgccgacctttctcagcgaggagaagtcgcaggacggcctgtccaagatggtcctccaatcactgcgcgagctgtttcagaagatggaccaggagcaggaggagaataagccggtggttctggtgaacacgttcggggagctggaagacgtcgcgctcagagcagtccacccatacatggacgtcttcgccgtcgggccggcggttcctgttcctggtgttcttggtggtagtcgtcatcagggcgagatgaacagtgcgagcgagctagcacagatccatctcgtcccgcacgacgacgagacgaagaaggcgtacatggagtggctcgacgcgcagccggagaagtccgtcgtgtacctctcgttcggaagcttgctggggtacacgaagcgacaggcagaggaggtcttacatgggctccaagccagcgggcgaccctacctgtgggtggtgcgcaaggagggccgtgccgaggaggtggacctctggctgacggaggtggaggaggagaagaaggacatcagcaaggggatggtggtggcgtggtgcgaccagcagcgggtgctggcgcacccgtccgtggggtgctttgtgacgcattgcgggtggaactcgacgctggaggccgtggtctgcggcgtgcccatggtggccgtgccgagctggtcggaccagccggtgaatgcgtggctggtggaggaggagtggggggtgggcgtcagggcggagcgggacggggaaggggtgctgacgaggggagagctcgcgcggtgcgtggagctgctgatgggtggcggtgacagggcggtgcaggtgagggcgaatgcgagtgggctgaaggagagagctcgacgggccgtggctgcagctgggccgttggaagcatgtctcgagagctttgttgaaaccatgcaaggtctaggccgatcaggaaaacagacatatgtttcttggtgccagattggcaaaatcagtatagagctgtagtatcgctgtaaataagggctaatgaggtaattgttgtcacgtgatgtagagataaa

SEQ ID NO: 113738 - DNA, 1642 bp, Zea Mays
aacggcacgcgctcgtctcctcaaaagcggaaggccaaaggcgcaaggtgactggcgaaacgcgttgttttcctcttttccccaaggcaaccaaaccatctcgattctcgactcgtggggaagtttcgctctcgccggcgtcgacggcctagggttcgaggaacgtccgtccgtccgtccggggaaggagcggtagggaggcggagatgatcgaggtggtgctcaacgaccgcctggggaagaaggtgcgggtcaagtgcaacgaggacgacaccatcggcgacctcaagaagctggtggcggcgcagacggggacgcgccccgagaagatccgcatccagaagtggtacaacatctacaaggaccacatcaccctcaaggactacgaggtccacgacggcatgggcctcgagctctactacaactgagccgccgcccctctctccctctcgtcaggtactagcagtagcagcgactggtttcctctacaactcgaattcctttcgattcagttcctgcgcgcctggccaccgggaactttaattgttcatatgatccaattcgagtatttgtagttatattcgttatattgatcgcatagtgctgaggctatttacgatcgtttatagggaaccgaacatatgacatgtggtgataaaatagaccagttattatgttatgattgatgcagaacattgtatagtcatgtttagcaagagaccagaaagagtgtatcctttcagcctacccagagaacttggttgttcaatcatgtgcctcactgaatattgttagatgcacaggatggatgtaattctgaaaacttgaatggttatcaagaagtacttcataagatgccagtatctgttgtagcaaaagaaatgtggctatgattgccagtatctgttggcctgattaatgacaatttctagtgtagttattttttttcactgcacaatgcaacatattatgcactggtagtttggaaaattatttacagcctggagcattgcatcaaatcgctggagattggaaaactacttataagttcaatacatgccgactatttgctttccaaatagttgccatgtgcgcattatcaacgactttgaacatttcagattcctggcaagtttgtttaagcttgaattcaagaaagctgcaacgaacgcgtagatctctatgctattagcatgacttgtgcacctttacccaggctaattcacatccacgtttctgtctatgatttccttgacatattccttctctgctaaatcgctgttcaattcccatgcaggttggtctgaattctgaagtcatgggtgcaattcgcttcgcggtgatctcttaagctcatcacatatataaaagcaacctcagtgggctatgtaagacatggcgtgccaaactatcagtgaccactgacagctttgcaatacgttgttgtatggtcaacctgcaaacttggtgtactgctactcgtactataaataacatagggttttaaccttggttgtggtaatggtcatcttttctcattcaattatgtgcacttgattctgctttaacccaggcttgttatggctatgtctagcaacgtcccctaaattttatgccctaagactgactgcaacgctccccc

SEQ ID NO: 113739 - DNA, 629 bp, Zea Mays
caggtttcttttcaatttcactccgtactttgtgaagtagagcatagcccaggcccttgaccagatgtgtatgctccaaatcaccttaaaaatatttgcttttctcaattgaaatcttgtgggcatccgccaacctgtgacacaaacattgcagagattaggattccagaaaacatagaaaaatacatgccagatcaatgaacatgtgatccattacctcaaatcactcccaggaggtgccactgcatgaaacgaaccaagttctgtaggttcataatcagggttttgatcttcacgccgctccttagcacgatcacgatacctgggtgtctctggttcttcttttttcttctcctcgctgaatggagaacaagagaaattggagctcacccaatcacttacaatggatagtagtatattgcagagacaaacataatggtggttattcgggcttttgcgaaggagtacagattcggtcttaatgtaccttgcttacaatagctatggcagcggaagatgggaaggagcgaggcaacagcggtggcgtcgacggcgccgcggcagggagcggagggaagccgggacggaggcgccggtcggggatttggaggaggcgggggactggcggt

SEQ ID NO: 113740 - DNA, 527 bp, Zea Mays
gggcagcagatttctcgagggactacgacggggtctatctctagatgtacaaccccgacgcccacttcttcctcttcctcatgtagtggaccgattgcagcctagatggcgcacttgggctgctcaagatcctaatctacaaggtttatgtagatgggagtaccaccgtgacttgggagctaacttggataatgatctcttagttctcaaggctgtaaattaccttttcctgcaccaagctgtgaagttgtttcctctcagatgaagcaaaaccaaaaaatatctttttaaattttagaaatcgcactgaagccatgagtgcttcatggaattcagtcatctgttggggtacaaatatgaactgtagttttcccccaatttttctctctttattttttcagtgcattaacattgatagtattggttttttttcctaggaaattatgtctaaatacaagctcataactaattctgtaactttgatattaagatgggtgttcgcctgatgatttttaaatggaaaagga

SEQ ID NO: 113741 - DNA, 2393 bp, Zea Mays
acatgtcgcccttcttcatcctcccaacactcaaggccacaaaccaaatgctgctaactactccagctagctagcaacaataatggcggcctgccgtccctccggcctcagcgtcttgtgcagcctctaccgtctctacatctgcatgctgttcatccatgtccctcgggctcactcgctgtccttcgacctcagcttctccaaaccccagagcccagacctctcctcccagaagataaacttcaacggcgacgcgtaccccactccagaaacgctcgagctgacgcgaaaccagcatgaccaaagcagcaccaacagcatcggccgggcgacgtacgcgcagccggtgccgctgtgggatggcgccaccggcgagacggccagcttcaccaccaccttcaccttccggatcaggccggactcgtggagcccgtaccccggcgacgggatggcgttcttcctcggccactacgggtcagatatccccgtccagagcggcggcggcatgctcggcctcgtcccgacccacaccaacggcaccggaaacggcaccgtcgtcgccgtcgagttcgacaccttccagaacccgacgaacgacgacatcagcagcaaccacgtgggcatcgacgtcgactccctcaactccacggcgtccacggacaccacctcgccgaccaagaacctcacgtccggttacctgatggcggccaccgtaaggtacgagaacgtcaccaggttgctcgccttggagctcaccgtcaacgacacgtcctactacgtcaacgcaactgtcgatctcaagggctacctaccggagcgtgtagccgtcggcttctccgcggcgactggaaatggcggcgagcagcaccaggtgctgtcatggtcattcacgtccactctgccggaaccaccggcaccggcaccggcaccgccgccgcatgcgacaccagacaacaaccagcctcccaagaagaagagatcagtcgggaccacgggcctgataatcgccgtgcttgtgcctctgctatctctcctggcgtgtgcggcaggcgtgctggcaaggcgaaaactcaggggaagaagaagaagaagaccgccaaacggtagcagcgacgacgacaacgattaccaagaacaggacaacggcagcagggcggagctcgagagaggagtggctgccaccggcccccggcggtacgcgtaccgcgacctggccgccgccaccgacaacttcgccgaggacggcaagctcggtcgcggtggcttcgggagcgtctacaggggcaaactcaccgtcgccggcgaagagcggcccgtggcgatcaaggtgttgtcgtcggagtcgtcggcgcagggcaggaaggagttcgaggcggaggtgaggatcatcagccggctcaagcatcgcaacctcgtgcagctcctgggctggtgcgacagccggcacggcctcctgctcgtctacgagctggtggcccagggcagcctcgacaggcatctccacggcagcgagcgcttcttggcgtggccggacaggcaccagatcatcctcggcctggggtcggcgctgcggtacctccaccaggagtgggagcagcgcgtggtgcacggcgacatcaagcccagcaacatcatgctggacgactcgctgggcgccaagctcggcgacttcggcctggcccggctcggagaccacggcgggcgctggcacaccaccaaggccgtgctcggcaccgcggggtacatcgacccggagttcgtcaacacgcgccacccgagcacccacgccgacgtgtacagcttcggcatcgtcctcctcgaggtcgtctccggccggtccccggtggtcctgctgcccggcgagccgcccttcgttctgctcaagtgggtgtggggcctgtacggacggaacgcggtcctcgacgcggcggacgagcagctgaggggcggcggcgacgacgacgagtgcatcgagagggcactcgtcgtcgggctctggtgcgcccaccctgagcagagcgagcggccgtccatcgcgcaggccatgcacgtcctgcagtcggcggacgccaggctgccggcgctcccgccgcagatgtacaagacggcgtcggacctcgccgtcaccggacgttcctacggcgttttgtccgtggaaagctacagcggcggtgactcctctacgacgactacgaccgccggctactccaaaacttcttcaggctcgtcgaccacggccttgctccgagattcaaaagagagaccttgattctgcaaaaataaaataaaaaatcctatgtgggagctgaactgtaaaaaaaatgtgttttcagttttgttaatttgggctgaagcctgaagctaacactttcagttttgaatcttccttcaca

SEQ ID NO: 113742 - DNA, 1755 bp, Zea Mays
catagagatagagatagacagctagcttcatcagtaggatgggcagcgacgaggaagcggcgctgctggtgccggcggtggaggagggttgccccgggtgcgtgatggagcggcggaaggcgagcagcaacggcaggatcccctacagggagctgttcttcgtcgccgccacctccctcgcctcagctttaccgatcacgtgcctcttccccttcttgtatttcatggtaagggacttccgcgtcgctgaaacagaggaagacatcggattctatgctggttttcttgctgcgtcgtacatggtgggcagaggcttctcttccatcttctggggcgtcatcgcagaccgcgttggacggaagcctgtcatcacgttttcgatactgtccgtggtcgtattcagcgcgctgtttggtctgagcacgacgtactggatggcgatcgccacgaggctcgtgctgggcgctctcaacggcctgctcgccccgataaaggcgtactgcgttgaagtttgccagacccagcaccaggcgcttggactctcgcttgtgaacacggcatgggctctgggtctcattgttggtccagctcttggaggctacctttcgcagccagctgagaaatatcctcacgtgttttccaaagactctgtatttggcagatttccataccttttgccctgtctaagtgtatcagcgtttgctacacttgtcctgataagctgtgagtggcttccggagactatacacaagcataaggttcccgaaatggacaccaaagcattcaaagccctgtcgtcaaaagagggctattgcgatccacctcgcaagaagaagagcttgctccagaacaggccttggatatcaaccctgctaccttactgctttttcagtcttcatgacacagcatatagtgagatactttccttatgggctgtgagcgaccggaagtatggcggccttagcttctcgactgaagatactggtcaggttcttgctatggcaggcgctagtcttctagtgtaccagcttgtcatttatcgctgggtccataggattcttgggacagtcaactcagcacgtattgcatctgctgtgtccatacttgttcttgcaacttatccctttatgacatacctgtcgggagtgaaactttccttggctctttgttctgcagccatgatgagaagtgctcttgcgatcactgtcaccacaggaatttcacttctacagaataatgctgtggtacgtatgaaatcaatgccaagaacaaagaggcaccgcaaatggtatatcgacaactgcaatgtcattcttcaagtcaattgctccagtaggtgcaggggctctattctcatgggcacaaaaacgtcaagatgttgctttcctgccaggtgatcaagtggtgttcatggtgctgaatttggtgcagcttctcgggctgatatccacctttgagccctttctagtgttacctgcactaccagagtagtagtagtgttaaggctacaggacattatgaaaataaatgtaccttggcacatagttacagttgatcgagtgcaagacagaaggaacatgattgtagccacttgttacactactaatgatgtctgattagcccaagattaaaaaagaagaatgttttattaattagcaaacttgatctattgtaatatcactgtgacacaaaacccatatttctaatcatatggtcgtggatgctcaaaatgtgcaataaagttgtgatattcac

SEQ ID NO: 113743 - DNA, 1745 bp, Zea Mays
catagagatagagatagacagctagcttcatcagtaggatgggcagcgacgaggaagcggcgctgctggtgccggcggtggaggagggttgccccgggtgcgtgatggagcggcggaaggcgagcagcaacggcaggatcccctacagggagctgttcttcgtcgccgccacctccctcgcctcagctttaccgatcacgtgcctcttccccttcttgtatttcatggtaagggacttccgcgtcgctgaaacagaggaagacatcggattctatgctggttttcttgctgcgtcgtacatggtgggcagaggcttctcttccatcttctggggcgtcatcgcagaccgcgttggacggaagcctgtcatcacgttttcgatactgtccgtggtcgtattcagcgcgctgtttggtctgagcacgacgtactggatggcgatcgccacgaggctcgtgctgggcgctctcaacggcctgctcgccccgataaaggcgtactgcgttgaagtttgccagacccagcaccaggcgcttggactctcgcttgtgaacacggcatgggctctgggtctcattgttggtccagctcttggaggctacctttcgcagccagctgagaaatatcctcacgtgttttccaaagactctgtatttggcagatttccataccttttgccctgtctaagtgtatcagcgtttgctacacttgtcctgataagctgtgagtggcttccggagactatacacaagcataaggttcccgaaatggacaccaaagcattcaaagccctgtcgtcaaaagagggctattgcgatccacctcgcaagaagaagagcttgctccagaacaggccttggatatcaaccctgctaccttactgctttttcagtcttcatgacacagcatatagtgagatactttccttatgggctgtgagcgaccggaagtatggcggccttagcttctcgactgaagatactggtcaggttcttgctatggcaggcgctagtcttctagtgtaccagcttgtcatttatcgctgggtccataggattcttgggacagtcaactcagcacgtattgcatctgctgtgtccatacttgttcttgcaacttatccctttatgacatacctgtcgggagtgaaactttccttggctctttgttctgcagccatgatgagaagtgctcttgcgatcactgtcaccacaggaatttcacttctacagaataatgctgtgtgccaagaacaaagaggcaccgcaaatggtatatcgacaactgcaatgtcattcttcaagtcaattgctccagtaggtgcaggggctctattctcatgggcacaaaaacgtcaagatgttgctttcctgccaggtgatcaagtggtgttcatggtgctgaatttggtgcagcttctcgggctgatatccacctttgagccctttctagtgttacctgcactaccagagtagtagtagtgttaaggctacaggacattatgaaaataaatgtaccttggcacatagttacagttgatcgagtgcaagacagaaggaacatgattgtagccacttgttacactactaatgatgtctgattagcccaagattaaaaaagaagaatgttttattaattagcaaacttgatctattgtaatatcactgtgacacaaaacccatatttctaatcatatggtcgtggatgctcaaaatgtgcaataaagttgtgatattcacatgtct

SEQ ID NO: 113744 - DNA, 1890 bp, Zea Mays
gctagcttcatcagtaggatgggcagcgacgaggaagcggcgctgctggtgccggcggtggaggagggttgccccgggtgcgtgatggagcggcggaaggcgagcagcaacggcaggatcccctacagggagctgttcttcgtcgccgccacctccctcgcctcagctttaccgatcacgtgcctcttccccttcttgtatttcatggtaagggacttccgcgtcgctgaaacagaggaagacatcggattctatgctggttttcttgctgcgtcgtacatggtgggcagaggcttctcttccatcttctggggcgtcatcgcagaccgcgttggacggaagcctgtcatcacgttttcgatactgtccgtggtcgtattcagcgcgctgtttggtctgagcacgacgtactggatggcgatcgccacgaggctcgtgctgggcgctctcaacggcctgctcgccccgataaaggtcagggtccggtgtttcagcaagaactcatctcgtctgctacattaactcgtgtgtttatttggaaaaagaagaagtttgcatgcatgctgaatctgatcgaattcagttgcgtctgtatgtatgtatgtatgtatgtatgtatatgtctacgaacaatttcaggcgtactgcgttgaagtttgccagacccagcaccaggcgcttggactctcgcttgtaataatctcatcaacgaccgagctcttcatcgtttaataaacaactcttccgtttttttttcaagatcagtctaactgctgagtgcatgtgcttcggccgcgtacgtaggtgaacacggcatgggctctgggtctcattgttggtccagctcttggaggctacctttcgcagccagctgagaaatatcctcacgtgttttccaaagactctgtatttggcagatttccataccttttgccctgtctaagtgtatcagcgtttgctacacttgtcctgataagctgtgagtggcttccggagactatacacaagcataaggttcccgaaatggacaccaaagcattcaaagccctgtcgtcaaaagagggctattgcgatccacctcgcaagaagaagagcttgctccagaacaggccttggatatcaaccctgctaccttactgctttttcagtcttcatgacacagcatatagtgagatactttccttatgggctgtgagcgaccggaagtatggcggccttagcttctcgactgaagatactggtcaggttcttgctatggcaggcgctagtcttctagtgtaccagcttgtcatttatcgctgggtccataggattcttgggacagtcaactcagcacgtattgcatctgctgtgtccatacttgttcttgcaacttatccctttatgacatacctgtcgggagtgaaactttccttggctctttgttctgcagccatgatgagaagtgctcttgcgatcactgtcaccacaggaatttcacttctacagaataatgctgtgtgccaagaacaaagaggcaccgcaaatggtatatcgacaactgcaatgtcattcttcaagtcaattgctccagtaggtgcaggggctctattctcatgggcacaaaaacgtcaagatgttgctttcctgccaggtgatcaagtggtgttcatggtgctgaatttggtgcagcttctcgggctgatatccacctttgagccctttctagtgttacctgcactaccagagtagtagtagtgttaaggctacaggacattatgaaaataaatgtaccttggcacatagttacagttgatcgagtgcaagacagaaggaacatgattgtagccacttgttacactactaatgatgtctgattagcccaagattaaaaaagaagaatgttttatt

SEQ ID NO: 113745 - DNA, 1876 bp, Zea Mays
atgggcagcgacgaggaagcggcgctgctggtgccggcggtggaggagggttgccccgggtgcgtgatggagcggcggaaggcgagcagcaacggcaggatcccctacagggagctgttcttcgtcgccgccacctccctcgcctcagctttaccgatcacgtgcctcttccccttcttgtatttcatggtaagggacttccgcgtcgctgaaacagaggaagacatcggattctatgctggttttcttgctgcgtcgtacatggtgggcagaggcttctcttccatcttctggggcgtcatcgcagaccgcgttggacggaagcctgtcatcacgttttcgatactgtccgtgtacggtcgtattcagcgcgctgtttggtctgagcacgacgtactggatggcgatcgccacgaggctcgtgctgggcgctctcaacggcctgctcgccccgataaaggtcagggtccggtgtttcagcaagaactcatctcgtctgctacattaactcgtgtgtttatttggaaaaagaagaagtttgcatgcatgctgaatctgatcgaattcagttgcgtctgtatgtatgtatgtatgtatgtatgtatatgtctacgaacaatttcaggcgtactgcgttgaagtttgccagacccagcaccaggcgcttggactctcgcttgtgaacacggcatgggctctgggtctcattgttggtccagctcttggaggctacctttcgcagccagctgagaaatatcctcacgtgttttccaaagactctgtatttggcagatttccataccttttgccctgtctaagtgtatcagcgtttgctacacttgtcctgataagctgtgagtggcttccggagactatacacaagcataaggttcccgaaatggacaccaaagcattcaaagccctgtcgtcaaaagagggctattgcgatccacctcgcaagaagaagagcttgctccagaacaggccttggatatcaaccctgctaccttactgctttttcagtcttcatgacacagcatatagtgagatactttccttatgggctgtgagcgaccggaagtatggcggccttagcttctcgactgaagatactggtcaggttcttgctatggcaggcgctagtcttctagtgtaccagcttgtcatttatcgctgggtccataggattcttgggacagtcaactcagcacgtattgcatctgctgtgtccatacttgttcttgcaacttatccctttatgacatacctgtcgggagtgaaactttccttggctctttgttctgcagccatgatgagaagtgctcttgcgatcactgtcaccacaggaatttcacttctacagaataatgctgtgtgccaagaacaaagaggcaccgcaaatggtatatcgacaactgcaatgtcattcttcaagtcaattgctccagtaggtgcaggggctctattctcatgggcacaaaaacgtcaagatgttgctttcctgccaggtgatcaagtggtgttcatggtgctgaatttggtgcagcttctcgggctgatatccacctttgagccctttctagtgttacctgcactaccagagtagtagtagtgttaaggctacaggacattatgaaaataaatgtaccttggcacatagttacagttgatcgagtgcaagacagaaggaacatgattgtagccacttgttacactactaatgatgtctgattagcccaagattaaaaaagaagaatgttttattaattagcaaacttgatctattgtaatatcactgtgacacaaaacccatatttctaatcatatggtcgtggatgctcaaaatgtgcaataaagttgtgatattcacatgtct

SEQ ID NO: 113746 - DNA, 1841 bp, Zea Mays
aacgcgaagctttctgccgaaacagtggggtttgggcgcttgtccacggccgccgccaacaacgagttcctgacctccgccgtctcttccccgctccctcgcgctcgcagtcgcagctccggccgccctattttgcggaattcggtagatttgtttccttcatgggtcgcaccatcaagaaggccaggaaagcgaaacccaagaagtctaagaagaaaactgaagcgtcttcatcgtccaatcatgcggttgcctctggtccggctaaggtctggcaaccgggtgtagatgcactggaagatggggaggagcttcagtttgatcctgaggcttataattatctccgaggttttggcattggctggtcttgcttgagttttgatgttgtgcgcgatcaacttagactcgtccgatcagagttccctcatacattatatggtgttgctgggacgcaggcggagaaagcttcattgaattatatcggtgttttcaagctttctaacataaatgggaaaaagcgggaacctataccagcttcagcagttgatggtgacactgatgtggatagtgacagcagcagtgatgaagaagatgaagaaattaacgaggatacaaagcccatcctacatctaaaaaaggtggctcatgcggggtgtgtaaatcggatacgctcaatgactcaaaagccacatatatgtgctacttggggagatactggtcatgttcaggtgtgggacttgagctccttccttaattctttagcagagtcaggggcatctgcacccaaagaagacgatataatccacaaacacttacccatgaaagtttttagtggccataaagatgagggatatgccattgattggagtccacttgttactggaagacttgtttctggtgactgcaataagtgcattcacctatgggaaccgacttcaaataactggaacgtagatgcaaacccatttgttggacacactgctagtgttgaagatctacagtggagtcccacggaagccgacatatttgcctcgtgttctgtggatggtacgatatcaatatgggatgtacgtacagggaagaaaccttctatttctgtcaaagctcataaagcagatgtgaatgttatctcatggaacaggcttgctagctgcatgatagcttctgggtgcgacgatggcagtttctcagttcatgatcttagatcaattcaggactcgttggtagcacattttgagtaccacaagaaagcaattacatccatcgagtggagcccacacgaagcatcatcattagctgtaacatctgaagaccaccagctcacaatctgggacctttcattggaacgggacaccgaggaggaggctgagttcagagcgaagatgaaagagcaggcaaacgcccctgacgatttgccgcctcagcttctctttgctcatcagggtcagagagacttgaaagaagtgcactggcacccacagataccgtcgatgatcatatcgacggcaatcgacggcttcaacgtgttgatgcctagcaacatcgatacaaccattcctggcagcacagatacagcaatgccgcctgctgagccataggttaggtgtttctggtagctcatgattccaggttcatgcggtggtgagtgtagttgccatttgtcatgtgtcgacagtgctatgctgtcgtgttggagcatgatgggaaaattttgattggctggcgttctatgataatatgattaggatttaatatgtgcatgctttttttagttttaccagcatctttgatggttgtgggccccatcatatgtcaaattatcaaccgatgttttcgttgca

SEQ ID NO: 113747 - DNA, 1104 bp, Zea Mays
atgacggctttaggtcgcctttcacgtttgcttagttctatcgtccaccgctctggaggccttgtgcgcgccttctccatgttggtcgaggtcgtcgatgttgccgatgtctccgatctatacgtgccacgtgacgcccattgctactacatcttcaagacctgtggcttatcgattcttgacaccgatttcattgaagaaaaccttggtgtgctgcctgagttggatttactggtattcagatcactgaacatgagtcgctctgagtctgaaatagataattgctacaaaccattcgtgaagctcttcaaggctcttgaggtgcatcgacttttgagggagaagtgcccggcacgtggacagggtgctgcagccaatgcaatcatggtgacgattgaagagaaaatctttgacttcatgaagtcatgcagtacaaatgctatgctaattagttattctggtgctcatggtgagaggacaaagaagcacattgtgggcagtgaagatagaggagatgaggcgctgatatctgaagttagtgatgtcactaaagatctcaaagcgtcgaatgtcccactgaaagttagaaattttatgggcaacaaggagctcagtgttgagggcaaaacaaccaccgcagaaggaaacgttgagattgttccaggagatgagctgacagctactctcttggacgctgtgaatactattcagcgcactactactggatatgatcagattcgttcagcaaagaaaaaagtgatgtcacacgtcaaacagatgaggatgtaccagattcggctttttaagctgctacaagagaaagttatgcacaaagatctggaaattgatcttgagggtccaaagaatgcctctgtgaagttaaaagctgtgaatgcttctgctattgttgacacacacagacatggaatggctcatgctatgcagcctgataatgtaaatcttgtggagcatctgcctgaaggcaatcaagagagcctctccaaagagccatatgacgtgaatgatgtagtagatctgtttcagtacaagtgttcagagtatttgactattgctgttgctgaatttgatgagcgggaaatttga

SEQ ID NO: 113748 - DNA, 1452 bp, Zea Mays
ctcgcgcgcgtgacaactagggagcccgccgccgcccaggtcttcgtcgaaccctttgccggcaacgagaacccgccacgccaggtgactaatctactaggccaatttgttaattccacttggtctccggtctaatccacgtttttgtcatctctttggagatgaaaatgtgatttagcagcattagcagctgtcatgatcgtcatgcaatatctattttggattgggtagcagcgaacaactcaacaacacttggacatttcaacatgaaatgatctccatgagaagaccaggacaatttagtttgaagatgctggatcatttctgtgatgattaagtctttgtcacttcaataagcgtcctgtatggtgttgcctgtagccctgtatggccgaagctactaaaggataaattctgacacgacaacaatgtggcgttggaacatagcaggtaattagggtttgataaagttaaagcaaccgagtcccaaacttttgatcttgattcgtgcaaacggggacgatgcaacacattttcaaggtattctggacctttatgaagcatgctctgggcaggtcatcaacaaagacaagtcttctgttcactaaaaatacgagaagtgagacgaagatggcggtcatgcaagctctaaatttaacacaagggactttcaacgacagatatctgggcttaccagttcgctttgggcagtccaggacaaaaacttcttagtacttaaatgataatgtgacaacgtattcaaggttggaaagaaaagctgctgtcaaaagccagtaaataagtgctgataaaggccgtagcacaaggaattccaacatatgctatgggatgctttgacttaaggaagacttgtctgctcaaatcagcaatgccatattcagatattggtggagtcaacaggacatgggaaacaaagtgcattgggtgaattgggctaaaatgaaaacgctaagggcttgttcgtttcacggttagtccatgtggattggttagtccatgtggattgggtggtattgagtcggtttaaatccataacaaatcaaaatccattccaatacacttcagtccacatgaaactggaataatcgaacaaggtctaaagagttgtgatggaatggagtttagagatatcgtagtatgttcttttataaacttagtcaaaactaaacaagttcaacttcaacttataatgaaattaaatagacgaataagtacattgctaatgctggtcttcagagagtgcgatggtttgtttcatatgattcactatgatgcttgtatcatatataattaattcatgttccgcattcagtgacagattattgggatgatgccacaaactcctaatttctgttacaccggatacttctgttcccatttgtttgctgaaagacagcttgccccggttgcaattaagttcattgctttaaa

SEQ ID NO: 113749 - DNA, 1430 bp, Zea Mays
ctcgcgcgcgtgacaactagggagcccgccgccgcccaggtcttcgtcgaaccctttgccggcaacgagaacccgccacgccaggtgactaatctactaggccaatttgttaattccacttggtctccggtctaatccacgtttttgtcatctctttggagatgaaaatgtgatttagcagcattagcagctgtcatgatcgtcatgcaatatctattttggattgggtagcagcgaacaactcaacaacacttggacatttcaacatgaaatgatctccatgagaagaatgtccgcctgacttcagtagaccaggacaatttagtttgaagatgctggatcatttctgtgatgattaagtctttgtcacttcaataagcgtcctgtatggtgttgcctgtagccctgtatggccgaagctactaaaggtaattagggtttgataaagttaaagcaaccgagtcccaaacttttgatcttgattcgtgcaaacggggacgatgcaacacattttcaaggtattctggacctttatgaagcatgctctgggcaggtcatcaacaaagacaagtcttctgttcactaaaaatacgagaagtgagacgaagatggcggtcatgcaagctctaaatttaacacaagggactttcaacgacagatatctgggcttaccagttcgctttgggcagtccaggacaaaaacttcttagtacttaaatgataatgtgacaacgtattcaaggttggaaagaaaagctgctgtcaaaagccagtaaataagtgctgataaaggccgtagcacaaggaattccaacatatgctatgggatgctttgacttaaggaagacttgtctgctcaaatcagcaatgccatattcagatattggtggagtcaacaggacatgggaaacaaagtgcattgggtgaattgggctaaaatgaaaacgctaagggcttgttcgtttcacggttagtccatgtggattggttagtccatgtggattgggtggtattgagtcggtttaaatccataacaaatcaaaatccattccaatacacttcagtccacatgaaactggaataatcgaacaaggtctaaagagttgtgatggaatggagtttagagatatcgtagtatgttcttttataaacttagtcaaaactaaacaagttcaacttcaacttataatgaaattaaatagacgaataagtacattgctaatgctggtcttcagagagtgcgatggtttgtttcatatgattcactatgatgcttgtatcatatataattaattcatgttccgcattcagtgacagattattgggatgatgccacaaactcctaatttctgttacaccggatacttctgttcccatttgtttgctgaaagacagcttgccccggttgcaattaagttcattgctttaaa

SEQ ID NO: 113750 - DNA, 2647 bp, Zea Mays
cttttgtcgtactcgtacctctgcaatccgcggcatccatggattggtttgcttgaccccgtcgccgcgtcggtcgtcggccaccatcgaagccacgcggcttcttccttctgcgtttctgcccctcctcgcacccgcactgcccgcccgttcgtccgtcgtcgtcttcgccgctccctcccggcctcccgggctggacgaaacgaaccctcgctcgccctccttataaccgaacggccgaacccagccaacccagccgtttctcttcgtacggcctctgccagccagtgtcctgctactagggaagcataccaactccccattcttctcttcgccgcagccaggaaggaaggatgtgcgggatcttcgcctacctcaactacaacgtctcgcgggagcgccgctacatcctcgaggtcctcttcaacggcctccgccgcctcgagtaccgcggctacgactccgccgggatcgcgctcgatgccgaccgccaggtcccctcccccgctcccgcttcctcttccgacgcgcggccgtacgccggggcgccgccgctcgtgttccgccaggagggcaagatcgagaacctcgtgcgatccgtctactccgaggttgatgagaaggatgtgaacctggatgctgcgttcagtgtgcatgctgggatcgcacataccaggtgggccacgcacggtgtgcctgctccaaggaacagccacccccaatcgtctggtgccggtgatgagttcttggttgtccacaatggcattatcaccaactatgaggtcttgaaagagacactaactaggcacggcttcacctttgagtctgatacagacacagaagtcatccctaagctagcaaagttcgtttttgataaatctcatgatgaacaaggtgatgtgacgtttagccaagttgttatggaagtcatgaggcagcttgaaggagcctacgcacttatctttaaaagcccgcactatcccaatgaattgattgcatgcaaacgaggcagccaactgatacttggtgtcaacgaattgagtggtcaacagaatgggaaatcatttcatgatgtcaaaaccttgacaacaaatggaaagcccaaagaattattcttctccagtgatctatgtgctattgtagagcatacgaagaactacttagctcttgaagataatgaaattgttcatattaagcattgcaggatggtagtgtttcgatcctcaagtttgaccctcacaaagagaagccagcatctgtgcaacgagcattgtctgttcttgagatggaagttgagcaaataaagaaaggaagttatgatcacttcatgcaaaaagaaatccatgaacagccacattcgttgaaaacaacaatgaggggtagattgaaggatggtggggttgttctaggtggactgaaggaatatctcaagacaattaggcgctgtagaagggtggtatttattggttgtggaacaagttacaatgctgccttagctgcaagaccttttgtggaagaactgactggtattcctgtgactatggaggttgcaagtgacttgctggacagacaaggtcccatctacagagaagacactgcagtttttgttagtcaatctggggagacagcagataccctccttgctctagattatgcactagaaaatggagctctctgtgttggcataacaaatactgttggaagcacgctgtctagaaaaacacactgtggggttcatatcaatgctggttgtgagattggtgttgccagtacaaaggcttatacaagtcaaatagtagccatggcgatgatggcgttggctattgggtccgatcagatatctactcaagctaggagggacagtatcatcagtggactgaacaacctttcaagcaatgtcagcgaagttctcaagctagatgctggaatgaaggagcttgcctcttcgctgatcgactcagagtcgctcctcgtgttcggaaggggttacaactacgccaccgcgctggagggcgccctgaaggtcaaggaggtggcgctgatgcacagcgagggcatgctcgctggcgagatgaagcacgggccgctggccctcgtggacgagaacctccccatcattgtcattgcgacccgcgacgcgtgcttcagcaagcagcagtcggtgatccaacagctcctctcgcgcagggggcgcctgatagtgatgtgctctaggggagatgccgcggctgtgtgccctagcggtgggtcgtgcagagtcattgaagttccacaggttgcagactgtctccagccagtgatcaacataattccattacagttgctcgcgtaccatctgactgttctccggggattcgacgtggaccaaccaaggaatctggcgaagagcgtgaccacgcagtagggagaggtagatgagatgtttgtattgtagttaattgtccttgctcttgaggtggctagtacgtagcataaatattatggtgcgttaaacttgttgttttgtgaacgaaatgtacctctctttttttaattatggtatattggtgtcaatagcaactcggtatccctgggaattctcatgtcagaaacttcagtttcttcatgggagcgtgcacgatcaggaacttcagaaagccaccttttc

SEQ ID NO: 113751 - DNA, 2554 bp, Zea Mays
atcgaagccacgcggcttcttccttctgcgtttctgcccctcctcgcacccgcactgcccgcccgttcgtccgtcgtcgtcttcgccgctccctcccggcctcccgggctggacgaaacgaaccctcgctcgccctccttataaccgaacggccgaacccagccaacccagccgtttctcttcgtacggcctctgccagccagtgtcctgctactagggaagcataccaactccccattcttctcttcgccgcagccaggaaggaaggatgtgcgggatcttcgcctacctcaactacaacgtctcgcgggagcgccgctacatcctcgaggtcctcttcaacggcctccgccgcctcgagtaccgcggctacgactccgccgggatcgcgctcgatgccgaccgccaggtcccctcccccgctcccgcttcctcttccgacgcgcggccgtacgccggggcgccgccgctcgtgttccgccaggagggcaagatcgagaacctcgtgcgatccgtctactccgaggttgatgagaaggatgtgaacctggatgctgcgttcagtgtgcatgctgggatcgcacataccaggtgggccacgcacggtgtgcctgctccaaggaacagccacccccaatcgtctggtgccggtgatgagttcttggttgtccacaatggcattatcaccaactatgaggtcttgaaagagacactaactaggcacggcttcacctttgagtctgatacagacacagaagtcatccctaagctagcaaagttcgtttttgataaatctcatgatgaacaaggtgatgtgacgtttagccaagttgttatggaagtcatgaggcagcttgaaggagcctacgcacttatctttaaaagcccgcactatcccaatgaattgattgcatgcaaacgaggcagccaactgatacttggtgtcaacgaattgagtggtcaacagaatgggaaatcatttcatgatgtcaaaaccttgacaacaaatggaaagcccaaagaattattcttctccagtgatctatgtgctattgtagagcatacgaagaactacttagctcttgaagataatgaaattgttcatattaaggatggtagtgtttcgatcctcaagtttgaccctcacaaagagaagccagcatctgtgcaacgagcattgtctgttcttgagatggaagttgagcaaataaagaaaggaagttatgatcacttcatgcaaaaagaaatccatgaacagccacattcgttgaaaacaacaatgaggggtagattgaaggatggtggggttgttctaggtggactgaaggaatatctcaagacaattaggcgctgtagaagggtggtatttattggttgtggaacaagttacaatgctgccttagctgcaagaccttttgtggaagaactgactggtattcctgtgactatggaggttgcaagtgacttgctggacagacaaggtcccatctacagagaagacactgcagtttttgttagtcaatctggggagacagcagataccctccttgctctagattatgcactagaaaatggagctctctgtgttggcataacaaatactgttggaagcacgctgtctagaaaaacacactgtggggttcatatcaatgctggttgtgagattggtgttgccagtacaaaggcttatacaagtcaaatagtagccatggcgatgatggcgttggctattgggtccgatcagatatctactcaagctaggagggacagtatcatcagtggactgaacaacctttcaagcaatgtcagcgaagttctcaagctagatgctggaatgaaggagcttgcctcttcgctgatcgactcagagtcgctcctcgtgttcggaaggggttacaactacgccaccgcgctggagggcgccctgaaggtcaaggaggtggcgctgatgcacagcgagggcatgctcgctggcgagatgaagcacgggccgctggccctcgtggacgagaacctccccatcattgtcattgcgacccgcgacgcgtgcttcagcaagcagcagtcggtgatccaacagctcctctcgcgcagggggcgcctgatagtgatgtgctctaggggagatgccgcggctgtgtgccctagcggtgggtcgtgcagagtcattgaagttccacaggttgcagactgtctccagccagtgatcaacataattccattacagttgctcgcgtaccatctgactgttctccggggattcgacgtggaccaaccaaggaatctggcgaagagcgtgaccacgcagtagggagaggtagatgagatgtttgtattgtagttaattgtccttgctcttgaggtggctagtacgtagcataaatattatggtgcgttaaacttgttgttttgtgaacgaaatgtacctctctttttttaattatggtatattggtgtcaatagcaactcggtatccctgggaattctcatgtcagaaacttcagtttcttcatgggagcgtgcacgatcaggaacttcagaaagccaccttttc

SEQ ID NO: 113752 - DNA, 2473 bp, Zea Mays
tttttgttttgttttgttttgttttgtttcgggggccgacttgtctctatcggacgggttttgggatcgcaatttgtgggggattattctgttacctgctgacagtgattttggctgattctattctacggttaccgcgtgacatttctctcatatcatatagcttaaccacaggctctgaaaattctggatctctgttctcatcaatatctctaattctagtttgtagctcttagcaaatcctggacgtagaattgggccatgcatatcaagtaggcttcttccatttatgccattcgtcagaaatcgtatacaagtttccatggcacttttggtggtactccgtcctgttcctgtactagtagtcctgaaatgctgaactatacgagtagctcagaagctaaatcttactccagcttccgtgattgtgtcccttttctcagaggttgatgagaaggatgtgaacctggatgctgcgttcagtgtgcatgctgggatcgcacataccaggtgggccacgcacggtgtgcctgctccaaggaacagccacccccaatcgtctggtgccggtgatgagttcttggttgtccacaatggcattatcaccaactatgaggtcttgaaagagacactaactaggcacggcttcacctttgagtctgatacagacacagaagtcatccctaagctagcaaagttcgtttttgataaatctcatgatgaacaaggtgatgtgacgtttagccaagttgttatggaagtcatgaggcagcttgaaggagcctacgcacttatctttaaaagcccgcactatcccaatgaattgattgcatgcaaacgaggcagccaactgatacttggtgtcaacgaattgagtggtcaacagaatgggaaatcatttcatgatgtcaaaaccttgacaacaaatggaaagcccaaagaattattcttctccagtgatctatgtgctattgtagagcatacgaagaactacttagctcttgaagataatgaaattgttcatattaaggatggtagtgtttcgatcctcaagtttgaccctcacaaagagaagccagcatctgtgcaacgagcattgtctgttcttgagatggaagttgagcaaataaagaaaggaagttatgatcacttcatgcaaaaagaaatccatgaacagccacattcgttgaaaacaacaatgaggggtagattgaaggatggtggggttgttctaggtggactgaaggaatatctcaagacaattaggcgctgtagaagggtggtatttattggttgtggaacaagttacaatgctgccttagctgcaagaccttttgtggaagaactgactggtattcctgtgactatggaggttgcaagtgacttgctggacagacaaggtcccatctacagagaagacactgcagtttttgttagtcaatctggggagacagcagataccctccttgctctagattatgcactagaaaatggagctctctgtgttggcataacaaatactgttggaagcacgctgtctagaaaaacacactgtggggttcatatcaatgctggttgtgagattggtgttgccagtacaaaggcttatacaagtcaaatagtagccatggcgatgatggcgttggctattgggtccgatcagatatctactcaagctaggagggacagtatcatcagtggactgaacaacctttcaagcaatgtcagcgaagttctcaagctagatgctggaatgaaggagcttgcctcttcgctgatcgactcagagtcgctcctcgtgttcggaaggggttacaactacgccaccgcgctggagggcgccctgaaggtcaaggaggtggcgctgatgcacagcgagggcatgctcgctggcgagatgaagcacgggccgctggccctcgtggacgagaacctccccatcattgtcattgcgacccgcgacgcgtgcttcagcaagcagcagtcggtgatccaacagctcctctcgcgcagggggcgcctgatagtgatgtgctctaggggagatgccgcggctgtgtgccctagcggtgggtcgtgcagagtcattgaagttccacaggttgcagactgtctccagccagtgatcaacataattccattacagttgctcgcgtaccatctgactgttctccggggattcgacgtggaccaaccaaggaatctggcgaagagcgtgaccacgcagtagggagaggtagatgagatgtttgtattgtagttaattgtccttgctcttgaggtggctagtacgtagcataaatattatggtgcgttaaacttgttgttttgtgaacgaaatgtacctctctttttttaattatggtatattggtgtcaatagcaactcggtatccctgggaattctcatgtcagaaacttcagtttcttcatgggagcgtgcacgatcaggaacttcagaaagccaccttttc

SEQ ID NO: 113753 - DNA, 5728 bp, Zea Mays
atggcctccgacgacggcgacaaggacatcctcctcctcgtccaccaggtcccactcgacatggaggatgtgccagcgccccgcctggcgcacctcctcgccccgctccaccgcgcgcctccaccgcccccgcctccccccttccgctcgccgcccccgccccaggccgccgcttccgccgagcaccgcctctcattccgcggctggctcggcatcccccgccactgggacgactgggtcgccaagctccggcccctccacgcccgcctctggcgccgcctcggcatccacgacgccgtccttgcctccaccctccgcttcaagcgcgacgcctccgccatcctccatctcgcctccttctggtcccctgccaccgccaccttcgccttcccctggggggaggccactgtcaccctccaggacgtcgccctcctcgccggcttccccgccctcggcgccccggccacggccccgctcccgccccagtggcgccccgacgaggccgccctcaatggcgtgcgcctcggcttcaaccgcagcgcctgcaagaaggcgcaccactccgcctgggtaaaacacttcctcaccgacgataacgcggacacagtcttcgagcacgccgccttcctcgcgctctggctcacgcgcttcgtcctcccgggtcatccggagtccaccatgcgccaggccgtcttccccatcgccgtccgcctcgcgcgcggggaccgcgttgccctcgcgcccgccgtccttgcctcgatctaccgggacctccgcgagatcaaggccttcctcatcgccacgggcgccgccgccaccaccggcaacgccgatatgatctcctccttatccgtctactcgccactctacattcttcagctctggatgtgggagcgcttccctgccctcaggccagcaaaggtgaacccactcgttgatggcgatccgcttgccgctcggtggcatgatctgagcaggaagctgaacccggcgcagatacgtgaggccctcagcacaggatgcaactttgtgtggcagccttatgtcagctccatggagcacactgggtgggttcacagcagtgatctagccgaggatgatgaactggcatcgctcgcacaatttttgcacccctgtgagctcgtagggatggattgcattgagcagtacctcccgcaccgtgttgccagacagtttggactggaccaagatgtgcctgcagatgttcaccgtgccaaccaggattgggcgattgcttggcagacctaccagctggaaggtaagaatgtggctttcttcatccctcactctgagcctgggatcacaacacggtatgcacagtggtggaggcagcaacttctgccttctggcattgatgctgctacagcaagtgctccagtagagtggaagacttccaagcgcaaggtgaaaaagacaccagcggccatggaagctgaagctgagaaggagcgtaagatgaagaaggcccgggtctctcctacttatactgataaaaagcgcaaacttgaagagttgtatgatgctaagttgtcggattggcttccaactgcaaggaatgagattagtgacaccactagtgatatggaatcggaggaggccttattgcctaatgttggaactacaaatgatgatattgtgctactcatgccaaggaagcagacaacgactgcacctgtaagggcattgatggataatgacatgatcctggctctaggagagagaggaaactttatggttgatgagcctccagacatccaaagtgaacctgaagctgttgtccctgcaacgctggatgaggaaatagttaaaattcctgaggttatttctcttgatattccagataagccagaagaaggagccactgcagtaatggaggagcagaaggaagctactagtgtatctgatagatctgaagaagctagtgctctggtcataggagaggtagaagaaaaggttgccatagagggagctatttgtgttacagggatgaatccatcgggaaacaactcagcaactgtaatggaggcagatgaaagaaatgcagttccaaaagaatttggaagggctgccaaggaagtaattgaagctgtgccccagagccaacatgaagttaatgcaggtgttataaacaattctcatgatgtggtggctttacctgaggaggcccatccagttcagcccacaaataattctggtggatgtcccgtggtatcttgcataatggaagacagtaaagttgctggagattcgggcaaaattgattatgaatatttttgtgattttgttgaggaacagagggagattccttgtgtacaagagatttctggagaaaacagtcgaatgggtgagaaagagagagaagaaacctcccatgaatctcctcaactagagattgtagaatgtgtgcaagacatcgttcttagggaaacagactatgatgttaatcaaaagatagtttatccagcagtggaggatgtagcaacttccgatagtatgagtacatctcttctgggtgttcctgaaccagaaaatgcagaactcaataaacatccttatctagcaattaaagatgaggaagatatacccatggaagctgcacgaggagaagtagcagaaatggaacaaattagtacttctgcaaagggaggtgccgaggagcatggggacttttctgaacttgatcacatgggccgagcagatgctaaattgcatttacacttaaattctgaagtgcctgagaaaattgatgaaatagagtgtaaagaagtcgctggcactatgagactaactgggagatattctgatcagaagcttggagatgtgcctgaagttgggtacacagaagatgaaaacattagggggctggtagtgaacacaagtgataggaaaccttcagaagtctctcaagtcgagcctgcaaaactggaacattctaaggatctggtgaaagaggaaacagacaaatccgaaaatattcctggattagaatgtataggattggaggaaactcgtggagatttgatggaagagtgtgcaaataccaagtctgataatgttcccgaattagaaaatacaggattaggaggaactcatgggccaatagaggatactgatggtagactgaaggaaattcatgatgtcaatgcagaactggataaacacaatgtgcatgagagcgatattgatagatccgaggacatcatgcaaatcgatccactaacacaggataaagctacgtggctggcgaaggaagaaactgaagataaaactacaaaagttcaagaagtaaagtatgaacaattaagaaatgagccaccgattcaagaggattccaaggaaaagccctgtgctgatagcaaggatctatcagagaatgttgtagttcagtccaaagaggtagataaattgaaacaagcaggagagggttgccaggcgttaatggagaaagacatggagaatgctagtggtgcttttgtactagaacagacagaagatggacacagaaaatcattgatagagacaagtataaataacgatagtgaaattactctagtcgagcagttggatggacaaagtgagagtcttacgaggacagaagattcaaatgactcaaccaatgaaaaggatgtggtagaagattcaaacgaatcaatcaatgctaagatgccatgtagttcagctactgtacagttaaaagaagataagatggaagtttttcatgaaggcaagatggaggagccatgtgctcaggatgctgaactgagtaatcagagggaaccatcatctgatgcaactgctatggagattgaggcagtggctctggaacaggacagcagaatcatatgcaaaaacatggaggcaacaacagtggaaggcagccacacactggatagtggactaagttccgatctagccaaggttaatgaaactcatgctgcacgggaaattaaaaaccaggaagttttggatgtggacatgaatatatgccttgatcaccttctctaattgctataaatttgttgagaccacagcttatcttgattatgatatttggttgtttgcagaaagtagcaatgagtgtttgtggtgaatatcaaattaactcaattggtatggaggatgtcaaatctaccaaaggatcacagaaccaagaatgtttggaccagaaagaagaccatataatggaggaaagagtggagtgtgaagtaagagaaggaagtggagtatcctatgaagaggcatgtgagctcggtggtggtagagtgaaagcctctggagttgcagtggatgttagtggtccagtgctaaacaaggaggcctgcaacacagaggaggcaagggaggataagaagcgtcatggagttgggcatgtgaatgagaagagggttttggaagaaactagtatgattgatactggtgaattgaaatctgattcgactgttatggagattagcatggctgggttaagacaaggaacactcaaccaatgtgcttcaagttcggagaaggaagaagcagtgcaggagaagcatgatcagggattggtagatgaaaacacaaacagaggttcagctgacaatgatgcacttgaatgtggtggagtgaatcctgatgtggccataacaatgtttcatgaaactattcttacaacagaagctgtcaatatagctgggtctaaaatttcgtctgagaaccagcaaaaggaagcaccctttgaagtacactctataacagaagtcgaaggttctgaatcaaatgaatcatcaagaaaggagcctgaaggagctcttgctcttccacaagagcctggcaacctggtaaaagttaaacaagaaagtttggagaatgaaaccgagatgtccatttttagggagaatgacaaagtttctggaaaagatcaggcatcagcagagtttataattgatccttcaaatacggatgaacggagggagaatgatattgggcggcccgatgaatcagcaaaaggctgtgaaaggttaacttctgattctataaacacagttcactccaaatttggcaagtctagtaatgaagaggataagagaacacagaacaccaggtctacggatccaaaagatataaaggaatcattgggtagaattcgtgccgaaccatcaaacagggtacacacaaccagtgttgggtattactctcagcatgcagctcatgatccgatttcatcttgtaaggagatcaaagtgcctttgcgagacggtgcaagggattctggaagggaccgtgcactggagttagtggttacaagtccacgagaagagactcctcgatggaggcaagaacagtacgcacttcagattttagaagacgttcaaaattcccgaattgctgagagatctaggatggagatggagatcagagtactgaaggcacaagtcagtagcatggagagacaagtgatgaacctggatcacttctctgaggtcaagtccagatctagtttgaaccaacaaatggtacatttgcacaaaccatacttctgaaactgtaatgggtttaaattttttgaaataaacacaaatccatgcaagttctctgtcccatcatcgactacctacctcctggaagtcggattgttttactcttaggtgagttccattttaaagtttaactctagcaaagaaaggtcctgcattctatcctaactcaaataatataagcgtcttgttta

SEQ ID NO: 113754 - DNA, 6469 bp, Zea Mays
atggcctccgacgacggcgacaaggacatcctcctcctcgtccaccaggtcccactcgacatggaggatgtgccagcgccccgcctggcgcacctcctcgccccgctccaccgcgcgcctccaccgcccccgcctccccccttccgctcgccgcccccgccccaggccgccgcttccgccgagcaccgcctctcattccgcggctggctcggcatcccccgccactgggacgactgggtcgccaagctccggcccctccacgcccgcctctggcgccgcctcggcatccacgacgccgtccttgcctccaccctccgcttcaagcgcgacgcctccgccatcctccatctcgcctccttctggtcccctgccaccgccaccttcgccttcccctggggggaggccactgtcaccctccaggacgtcgccctcctcgccggcttccccgccctcggcgccccggccacggccccgctcccgccccagtggcgccccgacgaggccgccctcaatggcgtgcgcctcggcttcaaccgcagcgcctgcaagaaggcgcaccactccgcctgggtaaaacacttcctcaccgacgataacgcggacacagtcttcgagcacgccgccttcctcgcgctctggctcacgcgcttcgtcctcccgggtcatccggagtccaccatgcgccaggccgtcttccccatcgccgtccgcctcgcgcgcggggaccgcgttgccctcgcgcccgccgtccttgcctcgatctaccgggacctccgcgagatcaaggccttcctcatcgccacgggcgccgccgccaccaccggcaacgccgatatgatctcctccttatccgtctactcgccactctacattcttcagctctggatgtgggagcgcttccctgccctcaggccagcaaaggtgaacccactcgttgatggcgatccgcttgccgctcggtggcatgatctgagcaggaagctgaacccggcgcagatacgtgaggccctcagcacaggatgcaactttgtgtggcagccttatgtcagctccatggagcacactgggtgggttcacagcagtgatctagccgaggatgatgaactggcatcgctcgcacaatttttgcacccctgtgagctcgtagggatggattgcattgagcagtacctcccgcaccgtgttgccagacagtttggactggaccaagatgtgcctgcagatgttcaccgtgccaaccaggattgggcgattgcttggcagacctaccagctggaaggtaagaatgtggctttcttcatccctcactctgagcctgggatcacaacacggtatgcacagtggtggaggcagcaacttctgccttctggcattgatgctgctacagcaagtgctccagtagagtggaagacttccaagcgcaaggtgaaaaagacaccagcggccatggaagctgaagctgagaaggagcgtaagatgaagaaggcccgggtctctcctacttatactgataaaaagcgcaaacttgaagagttgtatgatgctaagttgtcggattggcttccaactgcaaggaatgagattagtgacaccactagtgatatggaatcggaggaggccttattgcctaatgttggaactacaaatgatgatattgtgctactcatgccaaggaagcagacaacgactgcacctgtaagggcattgatggataatgacatgatcctggctctaggagagagaggaaactttatggttgatgagcctccagacatccaaagtgaacctgaagctgttgtccctgcaacgctggatgaggaaatagttaaaattcctgaggttatttctcttgatattccagataagccagaagaaggagccactgcagtaatggaggagcagaaggaagctactagtgtatctgatagatctgaagaagctagtgctctggtcataggagaggtagaagaaaaggttgccatagagggagctatttgtgttacagggatgaatccatcgggaaacaactcagcaactgtaatggaggcagatgaaagaaatgcagttccaaaagaatttggaagggctgccaaggaagtaattgaagctgtgccccagagccaacatgaagttaatgcaggtgttataaacaattctcatgatgtggtggctttacctgaggaggcccatccagttcagcccacaaataattctggtggatgtcccgtggtatcttgcataatggaagacagtaaagttgctggagattcgggcaaaattgattatgaatatttttgtgattttgttgaggaacagagggagattccttgtgtacaagagatttctggagaaaacagtcgaatgggtgagaaagagagagaagaaacctcccatgaatctcctcaactagagattgtagaatgtgtgcaagacatcgttcttagggaaacagactatgatgttaatcaaaagatagtttatccagcagtggaggatgtagcaacttccgatagtatgagtacatctcttctgggtgttcctgaaccagaaaatgcagaactcaataaacatccttatctagcaattaaagatgaggaagatatacccatggaagctgcacgaggagaagtagcagaaatggaacaaattagtacttctgcaaagggaggtgccgaggagcatggggacttttctgaacttgatcacatgggccgagcagatgctaaattgcatttacacttaaattctgaagtgcctgagaaaattgatgaaatagagtgtaaagaagtcgctggcactatgagactaactgggagatattctgatcagaagcttggagatgtgcctgaagttgggtacacagaagatgaaaacattagggggctggtagtgaacacaagtgataggaaaccttcagaagtctctcaagtcgagcctgcaaaactggaacattctaaggatctggtgaaagaggaaacagacaaatccgaaaatattcctggattagaatgtataggattggaggaaactcgtggagatttgatggaagagtgtgcaaataccaagtctgataatgttcccgaattagaaaatacaggattaggaggaactcatgggccaatagaggatactgatggtagactgaaggaaattcatgatgtcaatgcagaactggataaacacaatgtgcatgagagcgatattgatagatccgaggacatcatgcaaatcgatccactaacacaggataaagctacgtggctggcgaaggaagaaactgaagataaaactacaaaagttcaagaagtaaagtatgaacaattaagaaatgagccaccgattcaagaggattccaaggaaaagccctgtgctgatagcaaggatctatcagagaatgttgtagttcagtccaaagaggtagataaattgaaacaagcaggagagggttgccaggcgttaatggagaaagacatggagaatgctagtggtgcttttgtactagaacagacagaagatggacacagaaaatcattgatagagacaagtataaataacgatagtgaaattactctagtcgagcagttggatggacaaagtgagagtcttacgaggacagaagattcaaatgactcaaccaatgaaaaggatgtggtagaagattcaaacgaatcaatcaatgctaagatgccatgtagttcagctactgtacagttaaaagaagataagatggaagtttttcatgaaggcaagatggaggagccatgtgctcaggatgctgaactgagtaatcagagggaaccatcatctgatgcaactgctatggagattgaggcagtggctctggaacaggacagcagaatcatatgcaaaaacatggaggcaacaacagtggaaggcagccacacactggatagtggactaagttccgatctagccaaggttaatgaaactcatgctgcacgggaaattaaaaaccaggaagttttggatgtggacatgaaagtagcaatgagtgtttgtggtgaatatcaaattaactcaattggtatggaggatgtcaaatctaccaaaggatcacagaaccaagaatgtttggaccagaaagaagaccatataatggaggaaagagtggagtgtgaagtaagagaaggaagtggagtatcctatgaagaggcatgtgagctcggtggtggtagagtgaaagcctctggagttgcagtggatgttagtggtccagtgctaaacaaggaggcctgcaacacagaggagttgcaggcaagggaggataagaagcgtcatggagttgggcatgtgaatgagaagagggttttggaagaaactagtatgattgatactggtgaattgaaatctgattcgactgttatggagattagcatggctgggttaagacaaggaacactcaaccaatgtgcttcaagttcggagaaggaagaagcagtgcaggagaagcatgatcagggattggtagatgaaaacacaaacagaggttcagctgacaatgatgcacttgaatgtggtggagtgaatcctgatgtggccataacaatgtttcatgaaactattcttacaacagaagctgtcaatatagctgggtctaaaatttcgtctgagaaccagcaaaaggaagcaccctttgaagtacactctataacagaagtcgaaggttctgaatcaaatgaatcatcaagaaaggagcctgaaggagctcttgctcttccacaagagcctggcaacctggtaaaagttaaacaagaaagtttggagaatgaaaccgagatgtccatttttagggagaatgacaaagtttctggaaaagatcaggcatcagcagagtttataattgatccttcaaatacggatgaacggagggagaatgatattgggcggcccgatgaatcagcaaaaggctgtgaaaggttaacttctgattctataaacacagttcactccaaatttggcaagtctagtaatgaagaggataagagaacacagaacaccaggtctacggatccaaaagatataaaggaatcattgggtagaattcgtgccgaaccatcaaacagggtacacacaaccagtgttgggtattactctcagcatgcagctcatgatccgatttcatcttgtaaggagatcaaagtgcctttgcgagacggtgcaagggattctggaagggaccgtgcactggagttagtggttacaagtccacgagaagagactcctcgatggaggcaagaacagtacgcacttcagattttagaagacgttcaaaattcccgaattgctgagagatctaggatggagatggagatcagagtactgaaggcacaagtcagtagcatggagagacaagtgatgaacctggatcacttctctgaggtcaagtccagatctagtttgaaccaacaaatggtacatttgcacaaaccatacttctgaaactgtaatgggtttaaattttttgaaataaacacaaatccatgcaagttctctgtcccatcatcgactacctacctcctggaagtcggattgttttactcttaggttattccgaacctcctcccattatactgaatgattggatgcatgacggtgctagggcatgtctgggttatgcctgaatcctgatgacatgactaaactgcccaaggtgtcactagctcaaatcgatggtagttctgctgtctatcttttagattgacgataagctcggataatttggaacttctgtgcaccacatataaggaatcagttcatttcacagggaaatcggaaaaaaatatcagcattccaaaggggtctaggtcttggatggtcagccatttttattatgtacaaatgcagtagaagatgaggaacttcatagtatgtttatgaactcgcaactacttagaccgcatattagtgtgaagcgagtctcattttgtttctagaagtgaagttgaattccattagttgtcagcattcacctgttctataggagctgccgtccagactccaggacttgtgaaagaatataaggggtaagatcgtcaatgcacatggccatacaatggcagaagagcaatgaggacacaagattgaatttaaaatggggaactggcaacaaatcgaactactggccgtgtttttttatataaaaaactggctgttgagtgttgacggcaaacgggagaagcccaatgtttcgattggcagaacggcaaaattctggcctgctggctgatttcgacgcaccaaagccaacgttccttgcagtcttcctttcatgtagaaattctactctacctttttgaactaatctccttgtcctattttctttcttgaactctaaaaccatacattttagcctccaaattagggatggttcatgattttttattcagatgtaaaatttgtggtcttctttcttccattgtgaataaatatgatataaaagttgtcatgc

SEQ ID NO: 113755 - DNA, 975 bp, Zea Mays
caaatacctactcaggtttttaactaaaacaatggacaaccgttttcaaaaccacctcaaactaagataaaaaaggtaatttgagcaattttaagagtttagagagtaagggatctggttttaaagtttaaggaaaaaaaaaaaatcaaatttcaaggtcaacaggagtctttgctctttctattgatttccttccattcccaggctgggctcacgcttgactgctcgctttcggggagagaaagaagtggaggaatccaagtagtgggctagattctgcccagtccaaataagcaggcccaactagccagccttatgtgttttttttctttctttcttgccaagatttctttcattcaaaaaagaagtaaacggaaagtcttgtctcatccacctcctcacgccggcagggcagagcagagcaggtgcagcggatcgacatcgacccatggattcttcggccctcagcaatccgcgtctcatggcgctcattgaggaggagaaaaaaagggccatggcgaacgagctggtggcgaagctgacgtttgtctgctgggacaagtgcgtgacggggagcgtggggagcagcctgagcaggagcgagacctcgtgcctgtccaactgcgcgaaacgcttcgccgaggtgaagatgatggccctgcagcgcttcaccactaccggccgcggctgaagtcccaacggccaaccacgcgcgcaaacgcaggcatctctctctctctctctctctgcccctgcgtggacggagcaatgtgtgtgtgtggtgtgtcctctggagtgtgccattgttggtgagatggtagaaaactagaaagacatgtcaatgtatcctatgcattttttttgtttaagacggtgttagaattaagttgattctgagatgttgatgcaagaagtggctgcggctcttccgttcctgcagggattaaagaaaaagtcaaaaaaaatttaaaaaaa

SEQ ID NO: 113756 - DNA, 1558 bp, Zea Mays
atgacaagtaaattagagattgatgcacgcagtagtaattaagacaggcatcgtaatccccccttgtttttggtttagtagtaaatctgcctgctgctctaagtagtagttaaaaaaacagagaagcggggtgggctgcgtataaatagccggccggaaagggggaaacgggcaggcaaacaacaacacacactcgcgagtcgcgagcacagatcgaacaggcaggcggcctccgatctgtcgccattgtctcgttgtgttgtcccggaggagcagcagcaggagcaggagcgatcaggccaacgctttggactcctggacctaccccgatggcgccagcctcctctccgatgagacagtaatccagcgagcgcgagtgagagacaaccagcaaccatgaggccagacacggcggcctccgcctctccgactccgaagaagaaacccgacagtaaagccgcgctggacctcgcgtcgtggagcttcaacgtcaccacgtccgtcgggctcatcatggtcaacaaggctctaatggcgacgtacgggttcacgttcgccacgacgttaacggggctgcatttcgcgaccaccaccgtgatgaccctcgtgttccggtgggtcggcctcagccagccgtcgcagctgccgttaccggacctagccaagttcgtggtgttctccaacctgtccatcgtggggatgaacgtcagcctgatgtggaactccgtcggcttctaccaggtagccaagctctgcatgatcccggcgtcgtgcctcctggaggtggtcttggaccgcgtgcactactcccgggacaccaggctcagcatcgcggtcgtgctcgcaggagtggcggtgtgcaccgtcactgacgtgagcgtcaacgccagaggcctggtcgcggccgtcgtggctgtctggagcacggctctgcagcagtattatgttcatttcctccagcgcaagcactctctcaactcgttcagcctgctgggccacacggcgccggcgcaggcagggtcgctgctgctggcagggccgttcgttgactacctgctgacagggcaaagggtggaccacttcagcttctcgtctctcgctctgttgttcctcgcgctgtcgtgcttcatcgcgatcggggtcaacctgagccagttcatctgcatcggccgcttctccgccgtgtccttccaggtcctgggccacatgaagaccgtgctcgtcctctccctcggcttcctcttcttcggcaaggaaggcctcagcctccaggtcgtcctcgggatggccctcgccgtcctcgggatggtgtggtacgggaacgcgtccgctaaaccgggcggcaaggagcgccgcggcaaagacctgccggtgaccctcaaacaagacaaggacgacactgacaaataatcatttgttatagttacaggtatacgtgtaatcgtttaatcacatggtgcaattgtttgccaaaacattgaacaatttcccttggtatacgtgtttttgtgtgtgtttgccaaaacattgaacgatttggtttgtaaacgcgtacaag

SEQ ID NO: 113757 - DNA, 2273 bp, Zea Mays
aaaatagaaatcctttcaaaaaaaaaaaaaaaactggtttcccaaccagcgaaagggtggaggcggaagccacaaaccaaaccctcctgcgtcttccctcctgcttcgtgcttcttccactcccccttctcttctgcggcgccaagctcgagctcatcgccacggagctcgatcttgggttttggtctatccgcgacgaaggtgaattagttggagactgcgtgatgtctggtgcgaaagcgggtgtagacgtggaaacaagggacggcggtgccggtggctccttcagtgaggagaggctcgttgataagctcaacaagctcaacaacacagcggcgagcattcagacactttcacaatggtgcatttttcaccgcaagagggccagaagggttgtagacacatgggaaaagcagttcagtagtgcaacaaaggataagaaaatatcattcctgtttctatcaaatgatatcttgcaaaacagcaagcgcaaaggaggtgattatgtgcatgagttctggagggttctacccagatcattgaaacatgtctacgaaaatgggggagaagatggaaagaaactggtggctagactaataggaatttgggatgaacgcaaagttttcggaacccgtattgaaagtctgaaatacagcatttttggtgacaaccctcctatattcgataacaatgggaataaaaataattcaaaccctggctctaaccccttaaattccaaagttgcaaggaaggattccagtacagtactaaaaaaactgactgttggtggtatgcctgaaaagattgtgactgcataccaatctgtgcttgatcaacattttgatgaagacacagttttgaacaaatgtaagagtactgttagtgttctggaaaagataaagaaagatatagaagatgctagtaccaaaggtgatcagcctgcctcaacaatgatttctgacctcccagaacaggaaacaatcctgaagcagtgcattgcacaacttgaaagcgtatatgtggtgaggatattgctgataaatcaattaaaagaagctctcgtcgaacaggagtcaaagtcagaagttcttcgcagccagttgcaagtcgctcgttcagaggctgaacatgccattcaacttaggcaacgatttgatggtgccgttgtctcaaatggcacaggatctaattctagcctgctaatgattaccccaacagaacagacagctgctatgatacagggttctggagtaaggctgacgtctcctcagttgcaatcactgaatccagcaacctcgcttgcccctacagtcagtgcagtgggagatgagccgaagagaacggcagcagcaatggcagacaagctgacatctttgtcggcacctgtgcaggttctgagctccattttctcatcttttgttgccgagcatggcgcctcgctatcttccaagaacagtggaccggcttctggagaactctccggggaaccgccgggcttccagattgaaaagaggcctaggcttgagaaaaccgtgcaggccagtgacatgggtgctcctccctttcctgtgcaagtaccgcagctgcaacaacagactggagcagcgcccacacagctaccaacacagatcaaccaagcaccgggtccatttgcaccgccactgccgtctcttttgccaccgtttctgcaacagttcggccaaagtactggaggaatgatgggagtgggacctttcgggatgatgtccggctctatgccacctccgcctccattgcccaacattatgccggcaggttttccaggaccaagcggtccacctccacctccgcttccaccggcccagaaccaaccccaacagcagcagcagtctcctcaggcaccacagcaatcacccacatcagcaggattcttccagtcatcagcaggcatggggttcttcccaccagtgcaggtgcaacagtctccgtctgcccaacgacaatgactcaacggtggcatggcattcatcgggctataatggcagcactttgtgctaacttctgtacattaaccaataatcacctagcgtcgagcttatacgtggctgatcctgcaagagaggcgcaggaccgttgtcacggttagaaaaaaaaactgtagaataggcttttgtgatgactctcgttttggtcagagttgtttaactcttccttgttctgtgtagtagttagatgttgtgtctctgtcccccgtttgctttgatctcctgaggcaaaagaaagtggcactggaa

SEQ ID NO: 113758 - DNA, 1354 bp, Zea Mays
ggctgaaatctgtctatggtgtaataatcttttagctgtcttatgacattattgttaatccgttatctgattgccataacaggtcgctcgttcagaggctgaacatgccattcaacttaggcaacgatttgatggtgccgttgtctcaaatggcacaggatctaattctagcctgctaatgattaccccaacagaacagacagctgctatgatacagggttctggagtaaggctgacgtctcctcagttgcaatcactgaatccagcaacctcgcttgcccctacagtcagtgcagtgggagatgagccgaagagaacggcagcagcaatggcagacaagctgacatctttgtcggcacctgtgcaggttctgagctccattttctcatcttttgttgccgagcatggcgcctcgctatcttccaagaacagtggaccggcttctggagaactctccggggaaccgccgggcttccagattgaaaagaggcctaggcttgagaaaaccgtgcaggccagtgacatgggtgctcctccctttcctgtgcaagtaccgcagctgcaacaacagactggagcagcgcccacacagctaccaacacagatcaaccaagcaccgggtccatttgcaccgccactgccgtctcttttgccaccgtttctgcaacagttcggccaaagtactggaggaatgatgggagtgggacctttcgggatgatgtccggctctatgccacctccgcctccattgcccaacattatgccggcaggttttccaggaccaagcggtccacctccacctccgcttccaccggcccagaaccaaccccaacagcagcagcagtctcctcaggcaccacagcaatcacccacatcagcaggattcttccagtcatcagcaggcatggggttcttcccaccagtgcaggtgcaacagtctccgtctgcccaacgacaatgactcaacggtggcatggcattcatcgggctataatggcagcactttgtgctaacttctgtacattaaccaataatcacctagcgtcgagcttatacgtggctgatcctgcaagagaggcgcaggaccgttgtcacggttagaaaaaaaaactgtagaataggcttttgtgatgactctcgttttggtcagagttgtttaactcttccttgttctgtgtagtagttagatgttgtgtctctgtcccccgtttgctttgatctcctgaggcaaaagaaagtggcactggaattgttgcccactgaatcactgatcgtgctgtcattgacatgatgtaaactgcaaatacttgttctattgttgtttaaatttaattatttattatgattatttttt

SEQ ID NO: 113759 - DNA, 2151 bp, Zea Mays
aagaaggaaatttaaaatacttccgttccttgggccttcaccgttacttacgggcttatggcccaaacgattacattgtgcgagccaactaactattccagaacgatttacctgggaaaaaaaacgatccagaaggtcctgtaaaaaaataaaaaaaaacaattctagaaagaagaacttggctgggaggctgggactcacgcgtcctctcctcccctctccctttatgcaactcaaactgaatcggatcgatccgccactccacccggccatgctcctccctccgtcgccgcctccagtccagccatgacccgcgctgccccatggcaccccgcggccgcaccctcctcctcccgctcgccgcggccactgtcctcgtcgcctccaccatcttcctcttcgccgccgtcggcgcgcgctggcggccggccgacaccggcctccccgtcccgcccgacgccttccccacggccgtgaccattgctttacccaacgccaccacaggcaaagagctctcatttcttgacgagaacggccgcccggacgactcctcctccgcctcagcatccggcgccaccgccgtcagatgcgatccccgcgccgccgccgtcagggtcttcatgtacgacatgccgcccgagttccacttcggcctcctcggctggtccccgccgtcccctgcctccgtctggccagacgtcacggacggctccctgccgccgccgcgctaccctggggggctcaaccagcagcacagcgttgagtactggctcacgctcgacctcctctcctcctcctccttctccttatcgcccccctgcggccgccactccgcagtgcgtgtcaccgacccccgcgacgccgacctcgtcttcgtccccttcttcgcgtccctcagctacaaccgccactcccggcccttgccgcccgagaaggtcggcagggacaaggcactccaggagaagctggtggggtacctcacggcgcggccggaatggaggaggttcggcggagccgaccacgtcatcgtggcgcaccaccccaacagcttgctgcacgcccgggcggcgttgtcccccgcagtgttcgtgctgtcagacttcgggaggtacccaccgagggtggccagcttggagaaggatgtcattgcgccatacaagcacatggccaagacgttcgtcaatgactcggccgggttcgatgaccggccgaccctgttatacttccggggagcaatttacaggaaggagggaggaaccattcgacaggagctatattatatgctcaaagatgaaaaggatgtttacttctcctttgggagcgtccaagaccatggggccagcaaagctagccaaggaatgcactcatcaaaattttgcctaaacatcgccggggacaccccttcttccaaccgcatgtttgatgcgatagtgagccactgtgtccccgttatcatcagcgatgacatcgagctaccttacgaggacgtgctggattactcaaagttctccatctttgtccgctcgtccgatgctgtcgaaaagggtcacctgatgagactgctcagtggtgtaagcaagcaacgatggacagagatgtggagtaggctcagagaggtggacagacattttgaataccagtatccatcccagaaggatgatgcggtccagatgatctggcggtccttgtctagaaaggtgccgtcaattaagctgaaggttcatagatctggaaggttttcaagatctggtaggggaaaataaaataggaaggggcgcgtgtctatcttgtctctgttggccaatctaatgtaacacatttcactgacgcaggctgtcatgttttctcggctgtcatgttttctcagctgtacaaaatagatagaatgtaatattcaggttatctttaggaaagtttctaccttagaatctgttggtgcagttgaagcttatactgtcaaaagtcaaggggcttgttttgtaaggtatggtaaaatgtaatcatgaaagagaaacttagtttcgccgtttcggaacattgtggatggaaccatattttttttctgccatgtagaagattttattttgcctttatcttattcagtgtattgtattgccatcttactgctggcatatactggagccatcattt

SEQ ID NO: 113760 - DNA, 1623 bp, Zea Mays
gactattgaaggaagaggtcacatgtttaccaactcatctcagaaaacaagttgtacacattaaacattttgacagagcagtctgctccggtgcgagtatgaaacacatcagacattcttttcttctaactaaccaagacaatagagtttcttcactggtggagttagaatgtgtttcgtttgaggtcaaaataggatgagacgagagagacacactctgctcgattttttttggaccacaccggcgaggtcaaaataggatgagacgagagagacacactctgctcgatttttttggaccacaccggcactaaaaattgctctggtgttcacctcactcctgcataactctcatccaaacatcatagaaaatatgtccaccatcttccatccttccttgtatgtccaaccaaacacaccattaaaatacatagagtcgtgcctagacaccatcacaccattctgcaaggcagcaacagcaacatctttcggcttcattgaaatccacaagtcgagtagcatcagaatcacagcagcaccaaggcacctgccaggatatttgtgtaaacatacaacattaccaaggccaaaagttcagcatattatcctcctgtagctttaagccaagcacaagcttgctgctgatgcatagaagaaacacgaaaaacactaggctaggaggtgattcacctcttcattaaagaaaaacacatcttaactgaagagaaacacgagcaaacaaatcagccaccacgaaatcacattcatggtataaaactggtaaaacagaaggctacaaaatatacacttaacttttccaattcgtgaatgaccaacaaatggtttatggaataacaacaactgagctaaatggtggcaaacatcgagacctgctcatcccacaggcaccattgccaccatcggggcaacgtatttactctcaaaacaagatatgttcgagcaggcgagcagagcatatacaacacagtatgaaaagcgtgcatttcctggtcttaacaatcagctaaacatgtatggctattagctgacaaagtgaaaaaatgaagtgaatgttgggacgtgttcatcccacaggcacagcatataagccataggggcaactaaaaagtcccaaatatatggcatgtcatcaggttaaacttaaagcctaacggacacgttagaagccaacgtggttaaataagcaattatctgttccatcttaaggatcacaaaagctgcagcaagtgaataatcagtagagaaggaatattttagagatggaatatgtatgaaaacatcccaaccttaatgattagctaaaaacacaatatcagctcacagtaataataaggtagtacatgctagggacctgttcatccaaaaggcactatgcaattgccattgagccagaaataaagttccacactgcaccaaaacttacatctcgctaatccaaaatagagggtggggctcaatgccatattaatgccagacgcatgcagaatgaacactggaccaaagcttgtttatcatatcgtcctcatgatcacggaacgtggataatcatgtcaacttgttaaggaaggccgagttcctttaggggctgtttagatccataac

SEQ ID NO: 113761 - DNA, 1978 bp, Zea Mays
atagccctgctaataaaaagctattagctgctttttcgatgatatctaacggaaccattagttgattgatgccagtgtagcacctaatatgagcaaaagcagccaaataacatacattgtgcaaatacgcaatacatatggtgacaagtgcattctaaatgtttagccatgaggttaactaacaatgcaacagtatgaattaatttcaaataggcagaagattgcaacagattgtagaagctaaacttatcgagcaagggcaatgactattgatactgaaacagataatttaatgacagaagatgtttacatcagtaaaatatttatgcagcaccatattaatagcccttataacagagctgcacgcctgcacccgcaataacagagccacgtaaatcaagacaatgatgtgatatagaattagaccccactaagaaaacgattatgcacaaacagaagacagagccattcaacaaacaacagatatcttttttattaaaaaatacttctaatttttcgaaaagaacaaatgaaaggaaagcagagcatcgcgaattgtttgttgttttggggtgaacccgcgcggccatcatcgcgcgcgctccgaccgcgggcagtcgtcatcgctcgtcgccggcagcaaccgcgggtgccagcgccgcctctttccaacaaaccgcgccaccaacccaatgacccttggaggtcggcgggggcgacacggccaaggaggagccggctccggccgccgcggcgcagccggacggcgcgctcggataagatcaagtagtgttcgtgagggccgaaaccctagcttattcgcccttcacccgtggccttttatcacagcgacgaacacttgggcctcacaagtcaccagtttttccttccttctatggccgagcacaataggttctcaccatacaattgggcctcaacaacaacaacacaggcccagacaccataaaccagacctttcggccccacatgtcattctctgagcggcgccgatccgacaatcgtaaaaccctaactctcccaatccaagctataaaagcgttcccctcctgtctgtccgctctatacgccgccatcttcgcaagccaccgcaaccgaagcccgccttcgccgccgccgcctctgcgatccccgcaaggtcgcaaacatgtctaccgtgctccagcgcccgacccccggcacggtccagtgcttcggccgcaagaagacggctgtggccgtcgcctacaccaagccggggcgcgggctgatcaaggtgaacggcgtcccgattgagctcatcaggccggagatgctccgcctcaaggccttcgagcccatcctgctggcggggcgctccaggttcaaggacatcgacatgaggatccgcgtccgaggcggcgggaagacgtcgcagatctacgccattcgccaggccgtcgccaaggggctcgtcgcctactaccagaagtacgtcgacgaggccgccaagaaggaggtcaaggacatcttcacccggtacgaccgcacccttctcgtcgccgaccccaggcgctgcgagccgaagaagttcggtggtcgcggcgcccgcgccaggttccagaagtcctaccgttgagcgctcggctgcccgcgcttgccgtaccgatgcctgtgttgtcccaacttgccagttcgatgcctgtacccgtggcttaattttctatcatcggagctacttatgtggttctataactagatgctgttttaccttcaacttgtgctgttgtaccttcatatttggactttttaagccttgtgtcggacgcctttggcattgaaatatgagagattttgaagactatctctgaagttatgtggttctatatctagatgttgtttcagcttgttacttgtgttaatgaatttatgatatgtttgtcataaatttatgatatgtactggttgttgctattcagttttgcagcacgtatttttccta

SEQ ID NO: 113762 - DNA, 1761 bp, Zea Mays
attttaggactgagaaaatattattttaaaatattaaatttgtttgaataatttaaatatccacgttcatccgcttgcgcactgcacacgaatacacgatgcaggcttggagcgcccggactcggactcccgccgacaacggcctcggttgggcacggccatgaagcggacacgttgctaaactcagggcacagcccggcctgatccggcccggcgtcgttcactccaacaaggcccagaccaacctcactgatcctctctccctcctcgccgagacgacgagatccatcgccatcagagaatcctagcccacccagaccaggtgccccacggcggtgccggcgatggcaacccgctactggatcgtctctctccccgtgcagtctcccggcgccaccgcgacctcgctttggtcgcgcctgcaggatggcatctcccgccactccttcgacaccccgctgtaccggttcaacgtcccggacctccgcgtcggcaccctcgactccctcctcgcgctcagcgatgacctcgtcaagtcaaacgtgttcgtcgagggcgtttcgcacaagatccggaggcagatcgaagacctcgagcgcgccggaggcgtcgacagcggggccctcaccgtcgatggcgttcccgtcgacacctacctcaccaggttcgtgtgggatgagggcaagtaccccacaatgtcgtcgctcaaggagatcgtcggcagcatccagtcgcaggtcgccaagatcgaggatgacatgaaggtccgagcagcggaatataacaatgtaaggagccagcttactgcaatcaacagaaagcaaagtgggagcttagcagttcgtgatctttccaatctggtaaaaccagaggatatggtctgctcagagcatctagtaacacttcttgctattgttccaaagtactcccaaaaagactggttgtcaagctatgaatcactcgacacatttgtggtcatctaaacagctctatgaagacaatgagtacgcactctacaccataacactttttgctaaggttgttgacaactttaaggtccgtgctcgcgagaagggtttccaggttcgtgattttgagtatagtcctgaagcacaagaaagtagaaagcaggagatggagaagttactgctagagcaggaagttatgaggacctcgcttctgcaatggtgctatgccagctacagtgaggttttcagttcctggatgcacttctgcgccgtgcgcatatttgtagagagcattcttagatacggtctgccaccatcgttcctgtctgccgttcttgctccgtctacaaagggcgagaagaaagtgaggagcatcttagaggacctttgcggcaatgtccatagtatttattggaaaggcgaagatgacgtggcagttgctggtctgggaggtgaatcagaggtccatccttacgtctcattcaccataaactttgtttgagcattactggtgttacgccgtcaagtaaatcgaaacgatggaatggttctgtacattgctagtgttacggcaattctttgttgatctgtcagcttttatctgatcatgtaatttatatattggatatataagccgatcaataatgtagcttttgaggagactggaagtagatggatcacgatcaccatgtaatttgtaaaatggggctactgttactgtaataaaggcacatgtcaaatatcttcagctgcggtggcctcttgctgagctccctcggcctcctcggtacta

SEQ ID NO: 113763 - DNA, 1800 bp, Zea Mays
gcacacgaatacacgatgcaggcttggagcgcccggactcggactcccgccgacaacggcctcggttgggcacggccatgaagcggacacgttgctaaactcagggcacagcccggcctgatccgggagacgacgagatccatcgccatcagagaatcctagcccacccagaccaggtgccccacggcggtgccggcgatggcaacccgctactggatcgtctctctccccgtgcagtctcccggcgccaccgcgacctcgctttggtcgcgcctgcaggatggcatctcccgccactccttcgacaccccgctgtaccggttcaacgtcccggacctccgcgtcggcaccctcgactccctcctcgcgctcagcgatgacctcgtcaagtcaaacgtgttcgtcgagggcgtttcgcacaagatccggaggcagatcgaagacctcgagcgcgccggaggcgtcgacagcggggccctcaccgtcgatggcgttcccgtcgacacctacctcaccaggttcgtgtgggatgagggcaagtaccccacaatgtcgtcgctcaaggagatcgtcggcagcatccagtcgcaggtcgccaagatcgaggatgacatgaaggtccgagcagcggaatataacaatgtaaggagccagcttactgcaatcaacagaaagcaaagtgggagcttagcagttcgtgatctttccaatctggtaaaaccagaggatatggtctgctcagagcatctagtaacacttcttgctattgttccaaagtactcccaaaaagactggttgtcaagctatgaatcactcgacacatttgtggtacccaggtcatctaaacagctctatgaagacaatgagtacgcactctacaccataacactttttgctaaggttgttgacaactttaaggtccgtgctcgcgagaagggtttccaggttcgtgattttgagtatagtcctgaagcacaagaaagtagaaagcaggagatggagaagttactgctagagcaggaagttatgaggacctcgcttctgcaatggtgctatgccagctacagtgaggttttcagttcctggatgcacttctgcgccgtgcgcatatttgtagagagcattcttagatacggtctgccaccatcgttcctgtctgccgttcttgctccgtctacaaagggcgagaagaaagtgaggagcatcttagaggacctttgcggcaatgtccatagtatttattggaaaggcgaagatgacgtggcagttgctggtctgggaggtgaatcagaggtccatccttacgtctcattcaccataaactttgtttgagcattactggtgttacgccgtcaagtaaatcgaaacgatggaatggttctgtacattgctagtgttacggcaattctttgttgatctgtcagcttttatctgatcatgtaatttatatattggatatataagccgatcaataatgtagcttttgaggagactggaagtagatggatcacgatcaccatgtaatttgtaaaatggggctactgttactgtaataaaggcacatgtcaaatatcttcagctgcggtggcctcttgctgagctccctcggcctcctcggtactagtactgggcgcctcaaccaccaccgtcttccttacacggaacatggccaagtggatgtcaccgaagatgagtaggctgccggggtcgacggacgcggggaagcccgggttgagccggcgctcgttgatgtaggtgccgttggtgctgtccaggtccgtcaccagcaggctgccgccc

SEQ ID NO: 113764 - DNA, 2870 bp, Zea Mays
aaccgcgcccccacaccccgctcctctcgctcctcgctcccttttcaccttccccttcgcaggctccccctcccgtgccgtgctctctcaacaagggagaaggggaaaccaccaccaccaccacacttgataagaagggggccgcacgcgcctgcccgctcccgccgctacgccatggacgcctgggaggccaccaaggcggtgttcgaccgggtgcgggcgctggacccggacaacgcgtccaagatcatgggcctgctgctcatccaggacaacagcgacaaggagctcatccgcctcgccttcggccccgaccacctcctccacgccttcgtctccgccgcgcgcgccgacctcgccgccaagcccgcgtccccgccgtcgcccgtgctgggcccgctccaccagacctggggagcgccgccgcacccgagccctaccgctggctccgaccaccaacaccaggcccccttcgccgccgacctcgcgctcggctacgacttcgacggcgccggcgccggcgctgacgcgttcttccccgacgactacgactgctggtcaccggccggcgccgcccaccgccgcagcttctcgctcagcgacgccgaggccaccgccgccgccgccggaggcgctgcgtggaggccatgcatgtacttcgcgcgcgggttctgcaagaacggctcctcctgccgcttcctccacggctttccggaggacgatgacgccgccgcggagcgcgagatggtcgtcatgcgcgccaaagcccttgccgccgccgccgcgcgcccccagcagcagcagcagctcatggcgtccgcgtttcccttctcgccgtcgccgcccaagggcgtcaacctcaacttcctgctccaccagcaccagcagcagaacgagccgcaaagggcggcggcggcggcggccatgctgctccagggcggcgacgacatgcacagcaggttcccggtgcggtcgccccggatggaccgcggcgagctcatgtccagccccgccgcgcggcagatctacctcaccttcccggccgactccaccttcagcgaggaggacgtctccaactacttcagcatgtacgggccggtgcaggacgtgcgcatcccgtaccagcagaagcgcatgttcggcttcgtcaccttcgtctacgccgagacggtgaagatcatcctcagcaagggcaacccgcacttcgtttgcgacgctcgcgtgctcgtcaagccctacaaggagaagggcaaggtccccgacaggttcaggaagctgcagcacccgcaccacggcgacttcgccggctgcacgtcgcccaccggactgctggattccagggaccccttcgacctgcagcaaccgcagattggacctaggatgatgtacgggaacgttgctggccacgaagcattcctgaggaggaaactggaagagcagcagcaggcggccgagctgcagcaggccatcgagctggaggggcgccgcttcatggggctgcacctcctcgacctcaagagcaggggccaccaccacctcggctcctcccccgcggccatggccaccaccactctggggcaaggcgacgacggctgcaaaggccgcagcgccaacgggaatgacaatgccgtcgccttccatttggaggatgccaacatccaagatactcctaccaagatgaacagtaacagccttgcaatgagtggtgggcctgcagccggtgcaggaggcgagcacgaggagcagcagcaggatggggacggggatggcagtcccaagcaggcagtcaaccctgggaaagaggagaagacggaatctggtcctgtcacagccacgcccattgttgcctgtggattccaagaaagtggcgtggtggagcacatcttgcctgacagcccctttgcgtcccccagcaaggcctccactcaaaatgggagcatcatcagcaatgcggcttcatccctcttccccccgcctgcatccaccatggagctgcccccgtacagctcttgcttcttccaggcgcccaggttttctcctgggcatgaagccattgggctgtgaatacagaacaaggggagggggtctgctttcctctaatctgtgaggactatcggtgaccccgtcaagtggaggcaagagttaggaagctttgattaacaaatactaggtgtatgttcagagagagggacagcaacaacagcaaccaaaaaagagagagagagacagacaagtctaggttgttttagctctaggccctaagtatatgatgatagcagtcgtataaataacagtgttttagtaagtatctcctgccgggtatgaagactcaagaacaaaggtcagatctcgcgtatgctcgtttgtagcagtgtggatctgatacaggtaattgaaacctttagatggtggtagggctagtagtgagcagtagacgacaactagtcctggcagccagttgtagtgaggtgacatggctgcatacagacatccaaccaaaggaaacagagggtgtggtgtggaaagaaggggagagtggacaaaagccagacatggctggcgctgctgctgcataggcacaggcacaggcacagggaaaggtgatgagacgagaggggtggggtggtactctgctgggaccggcgcactcacgggtgcggagaatcagcttcgcctcacgagcgatgcagcagcggagacacagacacctctcgtctgcgtactgtttcgcccatgctcttgtcttgtacgcatgcagcagcgctccttgtcctttggctccatcgatgtattacctgctcttcttttcaactaggagtttagcggacaaagaaatgaaaaagtaattagcagtcatttatcttggtcaa

SEQ ID NO: 113765 - DNA, 2866 bp, Zea Mays
aaccgcgcccccacaccccgctcctctcgctcctcgctcccttttcaccttccccttcgcaggctccccctcccgtgccgtgctctctcaacaagggagaaggggaaaccaccaccaccaccacacttgataagaagggggccgcacgcgcctgcccgctcccgccgctacgccatggacgcctgggaggccaccaaggcggtgttcgaccgggtgcgggcgctggacccggacaacgcgtccaagatcatgggcctgctgctcatccaggacaacagcgacaaggagctcatccgcctcgccttcggccccgaccacctcctccacgccttcgtctccgccgcgcgcgccgacctcgccgccaagcccgcgtccccgccgtcgcccgtgctgggcccgctccaccagacctggggagcgccgccgcacccgagccctaccgctggctccgaccaccaacaccaggcccccttcgccgccgacctcgcgctcggctacgacttcgacggcgccggcgccggcgctgacgcgttcttccccgacgactacgactgctggtcaccggccggcgccgcccaccgccgcagcttctcgctcagcgacgccgaggccaccgccgccgccgccggaggcgctgcgtggaggccatgcatgtacttcgcgcgcgggttctgcaagaacggctcctcctgccgcttcctccacggctttccggaggacgatgacgccgccgcggagcgcgagatggtcgtcatgcgcgccaaagcccttgccgccgccgccgcgcgcccccagcagcagcagcagctcatggcgtccgcgtttcccttctcgccgtcgccgcccaagggcgtcaacctcaacttcctgctccaccagcaccagcagcagaacgagccgcaaagggcggcggcggcggcggccatgctgctccagggcggcgacgacatgcacagcaggttcccggtgcggtcgccccggatggaccgcggcgagctcatgtccagccccgccgcgcggcagatctacctcaccttcccggccgactccaccttcagcgaggaggacgtctccaactacttcagcatgtacgggccggtgcaggacgtgcgcatcccgtaccagcagaagcgcatgttcggcttcgtcaccttcgtctacgccgagacggtgaagatcatcctcagcaagggcaacccgcacttcgtttgcgacgctcgcgtgctcgtcaagccctacaaggagaagggcaaggtccccgacaggttcaggaagctgcagcacccgcaccacggcgacttcgccggctgcacgtcgcccaccggactgctggattccagggaccccttcgacctgcagcaaccgcagattggacctaggatgatgtacgggaacgttgctggccacgaagcattcctgaggaggaaactggaagagcagcagcaggcggccgagctgcagcaggccatcgagctggaggggcgccgcttcatggggctgcacctcctcgacctcaagagcaggggccaccaccacctcggctcctcccccgcggccatggccaccaccactctggggcaaggcgacgacggctgcaaaggccgcagcgccaacgggaatgacaatgccgtcgccttccatttggaggatgccaacatccaagatactcctaccaagatgaacagtaacagccttgcaatgagtggtgggcctgcagccggtgcaggaggcgagcacgaggagcagcagcaggatggggacggggatggcagtcccaagcaggcagtcaaccctgggaaagaggagaagacggaatctggtcctgtcacagccacgcccattgttgcctgtggattccaagaaagtggcgtggtggagcacatcttgcctgacagcccctttgcgtcccccagcaaggcctccactcaaaatgggagcatcatcagcaatgcggcttcatccctcttccccccgcctgcatccaccatggagctgcccccgtacagctcttgcttcttccaggcgcccaggttttctcctgggcatgaagccattgggctgtgaatacagaacaaggggagggggtctgctttcctctaatctggactatcggtgaccccgtcaagtggaggcaagagttaggaagctttgattaacaaatactaggtgtatgttcagagagagggacagcaacaacagcaaccaaaaaagagagagagagacagacaagtctaggttgttttagctctaggccctaagtatatgatgatagcagtcgtataaataacagtgttttagtaagtatctcctgccgggtatgaagactcaagaacaaaggtcagatctcgcgtatgctcgtttgtagcagtgtggatctgatacaggtaattgaaacctttagatggtggtagggctagtagtgagcagtagacgacaactagtcctggcagccagttgtagtgaggtgacatggctgcatacagacatccaaccaaaggaaacagagggtgtggtgtggaaagaaggggagagtggacaaaagccagacatggctggcgctgctgctgcataggcacaggcacaggcacagggaaaggtgatgagacgagaggggtggggtggtactctgctgggaccggcgcactcacgggtgcggagaatcagcttcgcctcacgagcgatgcagcagcggagacacagacacctctcgtctgcgtactgtttcgcccatgctcttgtcttgtacgcatgcagcagcgctccttgtcctttggctccatcgatgtattacctgctcttcttttcaactaggagtttagcggacaaagaaatgaaaaagtaattagcagtcatttatcttggtcaa

SEQ ID NO: 113766 - DNA, 3215 bp, Zea Mays
aaccgcgcccccacaccccgctcctctcgctcctcgctcccttttcaccttccccttcgcaggctccccctcccgtgccgtgctctctcaacaagggagaaggggaaaccaccaccaccaccacacttgataagaagggggccgcacgcgcctgcccgctcccgccgctacgccatggacgcctgggaggccaccaaggcggtgttcgaccgggtgcgggcgctggacccggacaacgcgtccaagatcatgggcctgctgctcatccaggacaacagcgacaaggagctcatccgcctcgccttcggccccgaccacctcctccacgccttcgtctccgccgcgcgcgccgacctcgccgccaagcccgcgtccccgccgtcgcccgtgctgggcccgctccaccagacctggggagcgccgccgcacccgagccctaccgctggctccgaccaccaacaccaggcccccttcgccgccgacctcgcgctcggctacgacttcgacggcgccggcgccggcgctgacgcgttcttccccgacgactacgactgctggtcaccggccggcgccgcccaccgccgcagcttctcgctcagcgacgccgaggccaccgccgccgccgccggaggcgctgcgtggaggccatgcatgtacttcgcgcgcgggttctgcaagaacggctcctcctgccgcttcctccacggctttccggaggacgatgacgccgccgcggagcgcgagatggtcgtcatgcgcgccaaagcccttgccgccgccgccgcgcgcccccagcagcagcagcagctcatggcgtccgcgtttcccttctcgccgtcgccgcccaagggcgtcaacctcaacttcctgctccaccagcaccagcagcagaacgagccgcaaagggcggcggcggcggcggccatgctgctccagggcggcgacgacatgcacagcaggttcccggtgcggtcgccccggatggaccgcggcgagctcatgtccagccccgccgcgcggcagatctacctcaccttcccggccgactccaccttcagcgaggaggacgtctccaactacttcagcatgtacgggccggtgcaggacgtgcgcatcccgtaccagcagaagcgcatgttcggcttcgtcaccttcgtctacgccgagacggtgaagatcatcctcagcaagggcaacccgcacttcgtttgcgacgctcgcgtgctcgtcaagccctacaaggagaagggcaaggtccccgacaggttcaggaagctgcagcacccgcaccacggcgacttcgccggctgcacgtcgcccaccggactgctggattccagggaccccttcgacctgcagcaaccgcagattggacctaggatgatgtacgggaacgttgctggccacgaagcattcctgaggaggaaactggaagagcagcagcaggcggccgagctgcagcaggccatcgagctggaggggcgccgcttcatggggctgcacctcctcgacctcaagagcaggggccaccaccacctcggctcctcccccgcggccatggccaccaccactctggggcaaggcgacgacggctgcaaaggccgcagcgccaacgggaatgacaatgccgtcgccttccatttggaggatgccaacatccaagcagatactcctaccaagatgaacagtaacagccttgcaatgagtggtgggcctgcagccggtgcaggaggcgagcacgaggagcagcagcaggatggggacggggatggcagtcccaagcaggcagtcaaccctgggaaagaggagaagacggaatctggtcctgtcacagccacgcccattgttgcctgtggattccaagaaagtggcgtggtggagcacatcttgcctgacagcccctttgcgtcccccagcaaggcctccactcaaaatgggagcatcatcagcaatgcggcttcatccctcttccccccgcctgcatccaccatggagctgcccccgtacagctcttgcttcttccaggcgcccaggttttctcctgggcatgaagccattgggctgtgaatacagaacaaggggagggggtctgctttcctctaatctgtgaggactatcggtgaccccgtcaagtggaggcaagagttaggaagctttgattaacaaatactaggtgtatgttcagagagagggacagcaacaacagcaaccaaaaaagagagagagagacagacaagtctaggttgttttagctctaggccctaagtatatgatgatagcagtcgtataaataacagtgttttagtaagtatctcctgccgggtatgaagactcaagaacaaaggtcagatctcgcgtatgctcgtttgtagcagtgtggatctgatacaggtaattgaaacctttagatggtggtagggctagtagtgagcagtagacgacaactagtcctggcagccagttgtagtgaggtgacatggctgcatacagacatccaaccaaaggaaacagagggtgtggtgtggaaagaaggggagagtggacaaaagccagacatggctggcgctgctgctgcataggcacaggcacaggcacagggaaaggtgatgagacgagaggggtggggtggtactctgctgggaccggcgcactcacgggtgcggagaatcagcttcgcctcacgagcgatgcagcagcggagacacagacacctctcgtctgcgtactgtttcgcccatgctcttgtcttgtacgcatgcagcagcgctccttgtcctttggctccatcgatgtattacctgctcttcttttcaactaggagtttagcggacaaagaaatgaaaaagtaattagcagtcatttatcttggtcaatggagtttatgttttggttggttcttactgctctcttgtttctaaactatactccctctattctttttttatttatcgtggtttagttaaaaataaactaccgggtaacaaatatttgaaaacggactaacttctagagttcgtacaaagttattttaagtttcactggaatgttaattactggtgaaaattggtaccgatctttgtgatagtaaagagtacaacttctaccaattcacctaagaaaatgaatttttttttgctctgttctgttctagttgggctaaaagttgctagattctttacgcttgtattagattttgtgcttaggatccaaatata

SEQ ID NO: 113767 - DNA, 2965 bp, Zea Mays
ccgatgagcacgcgaggtacccgagcgcgaggcccacgacgacggcgacaaacacaccgccgttgaacgacatgacggcgagcatgaacaggtagccgaggccggagttgaccccgaacatcgcggccacggccaggcgcgccggccagcgggcgcgagaagcggcgtccgcgagtcggagccggcggggtggcgggatggaggagggggctggcttggcgcctcctcccgcgacgagcttcacgcggacccgcagggcctcgaggtactggtagaaagcggcggccactgatttcctcagttctgcaagatggagaaaaaaattatcttgcctcttcgctggtgaatctgcagattgggatctgtgagctaccactgattcatccagaggtctaaaattgtggtgagttcatctcctaatttgcgcaagctcctgccgcccaccgccagctcctccgcttccacttcctcgtcctcgtcttccttctggaagaagtccctgaccgccatctcgcacctgggccgccgccgcgtcgactgcgcgttcgcgctgcacgtgcactccgtcgacggcctccccgccgcgctcgatgggtccgcggtctccgtccacttccgccggatgtccgtgtccgcctccacccgccccgtcgcggccgccctcggcgccgccgcgttcgaggaggcgctcacgctgcggtccccggtctacttctcccgcggcgccaaggccgtcgtcaagtacgagccccgcgcctttgctgtctccgtcgccgcctccactctcgacctcggtaagcacgacgtcgacctcacccgccttctcccgctctcgttcgacgatctcgaggacggcggcgactccggcttcgggaagtggagcaccagcttccggctgtccggccccgcccgcggcgcgcggcttaacgtaaccttctcttgctcgctcctcaaacacagcctgataagcatggagcagcacatgggcggggaagtggcggggctgcggcgcgggtcgatggcgcggccagtgtcagtgcaagcgccgacgcctttgcccgcgcggagcagggacgtgagggttctccacgaggtgctgcctagcttgaggtctgccaggccggtgccttcttctgttgctgacggggttcctgatgcgaggaaggaggagctggcagcaccggactgcacggaagaggggtctccggaggcaaagcactgcacatcggtagaggttaaaaagggggactcggtgcatccagatggcgattggggcacggtggagttcaatgttgtggagcatggagttgaggttgcttcagatgacccgcaaaggctcaaacatgtggaaaccagcaatgcggctggccaggaggaggattcagggttcaaaattgacgaagagggatcgttcaggcctttgcaagtaagtggtgatgtcgctgaagatcagactgttggagtgaaaactgaggtggccgtcagtgacgttgctgttcaaagggagaatatggaagacaaacaggatggaatagtcaaagctgcttcactgcctaccgctgctcttgaagcagagggtcagtttggagcagatgcggaactggaggacctggaaagtattttgaacgagctctcagttgctgagccagaggaatttgaatcaccagttgtagaagataagcattctcggcgattgagctgcacaggtgtgactgatagttacaagtctgccagtaggaagggcagatcacgcagcatggatgcttcaacagattctgttgctaatgagttcctggatatgcttggaatagagcatagcccagttgggcaaccctcagatagtgattccgagtcgccaagagaacggctttggaagcagtttgaaaaggaagccctagcatctggcaatgctattcttggcttggactttgacgatggaattgaaggacctatttgtgataatgttgtggaggattttgatctctctgcaatgatacatgaggctgagctcgagcttcagaatggaagccaacccattgataccaaatttcgagctaagtcgctggaagacgaagaaactgaggccttaatgcgtcaatttggtctaaacgagaagtccttccaatcttctccacctgaaagtagaagtggatttggtagccccattagcctcccacctgagcagtccctggagctaccgccattggctgaaggtttaggcccatttattcagaccaaagatggaggatttctgcgatcaatgaacccagccctgttcaaaaatgcaaagaacaaatgcagcttggttatgcaggcttcttctccgattgtactgccagcggagatgggatctgggattatggatatattgcatggtctggcatcaattggaattgagaagttatcaatgcaggcaaacaagcttatgcccttggaagatgttaatggtaaaatgatgcagcagattgcccgggaggctgctccagctctggagtctgctgaaagatatgatgcattggactatcatagcatcggtgctttggtagaagggtgtggaaatgctccctctggtaagaagacaggtaggtgtgctgatctttcatccttgggtggggagaatgcttcggaatatgtttcacttgaggaccttgcaccattagctatggaaaagattgaagccctgtccattgagggtttgaggatacaatctggcatgtcagaagaagatgcaccctccaatatcagtgcaaagcctattggggaattttcatctctgcaaggaaagtgtgcagagaatacttggtcccttggtttagagggaactgcaggtttgcagcttctggatgttaagcaaagcggagaagttgatggattaatgggcttgtccatcactctagatgaatggatgaggcttgattctggggtagtggacgaagaagaacagtacagtgaccggacatcgaaa

SEQ ID NO: 113768 - DNA, 1116 bp, Zea Mays
aagaccctataaaaccatcatcaaagtctattgtgccattcacatttcctcttgcctgaccttcttcctaagttccaagcttgaatagagtagttgttctggatgatgatttgattgtccagaaagacttgtcatctctctggaacctcgatatgggtggtaaagtgactggagcagtccagttctgtggagtgagattagggcagttgaaaccttatgtagcggaccagaatgccaatgctaattcttatgcagcgtccctccatttatccagtttgcatgatcaatcagtccaaaaggtcagtacaactccctgcaagtttacttgcctttgaagatgtggtatatcctttggaagattcatgggttcagtcaggcggccttggacatgattacggaattagccgtgtcgatatagaaaaagctgctgctctgcactacaatggtgtgatgaaatcttggcttgacttggggaaacatgattataaataagagctactggaggaagtacatgactaatggagagaagttcatgacggaatgaaatattcactaattcataggacatgaaactaaccaaacactcattttttgggcatgtgaacaacagaacaacagacttcacgggctatgtttatcatgaaaataaacagaatcgcacatgtgtatctatgatgccactgatacacctaggggtggtcttaattatttttagttcaaaaccgaataggaatagagattgattttaatctgatttaattcttaaaatttatagtataaaacctagatgtcattaccacctcgacgaggcagtgccccaatgctgccgtaagagtacgatgtctgaaggatgccagcacgaaacctgagttatgttgcagaataccaagatatgatgtggattatttcactgttcgttatggtttgatgatttttttttcattatgcaacttggagttgcaaaagtgcagttccttgctgttcgtttttagtatgaaatatttggtaatattctttttgctcatcagtcactatgcaatagcaatactgagggagtccaatgctgactgcggcggcacatcatgtacatgaaacaacaaatgatgcctgaatcag

SEQ ID NO: 113769 - DNA, 1725 bp, Zea Mays
agatcccctgttctggtcgaatccggcgcgttgacttcatctccctcgaggaccagcataaaacatcccctgccggtcgcagttcgccaccagcggccatcatccaacacactccagagtccagagttccctcccaccaaccccacggcgtaagcggcgccatgaactggaagaaatctcctcccgctgtctccgacggcgcccccgacgacgccgacgacggtcgcctccgcgagctcgggtacaagcaggagctcaagcgccacctctcggtgctgtccaacttctccatctccttcaccgtcatctccgtgctgacgggggtcacgacgctctacaacaccggcctggccttcggcgggcccgccaccatgacgctcggctggttcgtcgcgggcgccttcaccatggccgtcggcctctccatggccgagatctgctccgccttcccgacctccggcgggctctactactggagcgcgcgcctctccggcagacgctgggcgcccttcgcctcctggatcacaggatggttcaacattgtggcacagtgggcaggcaccgccagcatcgacttctccctggcacagctgatccaggtgatcgtccttctcagcacggggggcaacaatggcggcgggtacctggcatcgaagcacgttgttttcgccttccacgcggggatcctgctcagccacgccgccatcaacagcctctccatcacctggctgtctctgctcggccagttcgcggcgctctggagcatgctaggtgtccttgtcctgatgatcgctgtgccggttgtggctaccgagagagccagtgccaagtacgtcttcacccatttcaacacggacaacagcgctggaatccacagcaacctctacatcttcgttctggggctcctcatgagccaatacacgctctcagggtacgacgcgtcggcgcacatgaccgaggagacgaagaacgcaggcaggaacggcccggtcgggatcatcactgcgatcggcgtctcgctggtagtgggctgggggtacatactcggcatcacgttcgccgtgaaggacatccccgccctcctgagcaccggcaacgacgcgggagggtacgccatagctcaggtgttctacctcgccttcaagggccggtacgggaacggcgctggagggatcgtctgcctgcctgtgggtcgtcgccgtcgccgtgtacttctgcggcatgagctccatgactagcaactcgaggatgacttatgcgttctcgagagatggggcgatgccgttttcgtccgtctggcacaaagttaacgagcaagaggtgccggtaaacgccgtctggctctcggctttcgtctccctttgcatggcgttgccgtctctgggcagcctcgtcgcgttccaggctatggcgtccgtcgcgacgaccgcggtctacatcgcctacgcgctgccgatcctcttccgcgtgacgctggcgcgcagccgcttcgtgccggggcccttcagcctcggccgctacggcgtgctcgtgggctggaccgccgtcctctgggtcgccaccatcaccgtgctcttctcgctgccggtgtcgtacccggtgaccaaggacaccatcaactacaccccggtcgccgttgccgggctgttcgccctcatcttgtcgtcctggatcgtcgccgccaggcgctggttcacgggccccgtcaccaatttgggagggtag

SEQ ID NO: 113770 - DNA, 303 bp, Zea Mays
atggtttcactttcactttcaccgcgccgacttggaaggctgggcttgggcagcgagggtgcgccagaggtaccgcccgctcgccatgtccaccatcgtccagaaccctgctttcacggccgatccaacctgggaatgaaggggcaggggtgccctgggggatcccgagtcgtcggcgtcggcgtcgaactggtcgggctcagcgttgaggcccctgatgaggaagaagccggcaacggtggcggagaggaagatgaggatcacccgcagcgggcacatctcttctcttgctgcctcctctga

SEQ ID NO: 113771 - DNA, 1339 bp, Zea Mays
ggttctgggcctattcacggcattcagggggaaatgggtgagtcccaagctcttcctctcatcaacttcttcccgttccacgcagaccaaccagacattaagaattgagatcctgcaaccgcaacaatggcggccatggcgaacacctctcgtctccccaccccctgcagcctcccaaccatcagcatcggcgctaagagcaggaggctagctgtggcggccgtcagatgcggtcccggcggcagcaggagccaccggaggagccttggggtcttgctgtgtcgatcctcgtccacggccggagcccaagggagcacgaggatggaggactataacaccgccatgaagcggatgatgcgtaacccctacgagtaccatcacgatctcggcatgaactatgctgtcataagtgagagcttgattgttggctcacagcctcagaagcctgaagatatcgatcgcttgaaaaatgaagagcgagtagcatatattctttgcttacagcaggacaaggacattgaatattggggcattgacttccaatccattgtcaataggtgcaaagaacttggcattcagcacatcaggagaccggccgtggattttgatccagactcactgaggtcgcaactgccgaaagcagtttcggcgctagaatgggctacgtcgcagcgcaaagggcgggtttatgtccactgcaccgctgggcttgggagagcacctgcggttgcaatcgcttacatgttttggtttgagaacatggatcttaacacggcttatcagaagctaacctccataaggccctgtggacccagcaagagagccatccgcgccgcaacctatgatctagctaagaacgatccatccaaagagccttttgagaaccttccggagcacgcttttgagggcgttgcagactgggagaggaagttgattcatgaccgggtgcgtgctcttcacgaagcatgagcagaagaaactttctccacgcgtcaagaaggggggaactaagcttcctaatgaggcaatggctgtgcttcggcaccagatcattagatgtcgaaacgataaagtttgttctcaataaagcttatacgacgccatatttgttgctgggtagtttgtaatagtcactaataggaaggaaataaagagggccttgcatgagattccagctggtgtcttcacctttgtggtgactgcaaatgagatgcccatccattaatggcatggcgcattgtaggtatattgtgtaaataaacctgtggatcttcatttgaggaacatcacttctgtaaaagtttatttgaagatacggccagctttgcaaatctaccat

SEQ ID NO: 113772 - DNA, 1704 bp, Zea Mays
aaggggaaaaataacgaaggaagcgaagcggcaacttccgccttctcttcgccagttactccacttccaatcgccgtctcataaatccgggctgccacttccgcctccatcgccgccagccgccgccttctcttcgccagttactccacttgcccgcaggccgcaccgcaccgccaccgctttcatcggacgatccactgagcaagccacgccaggcaggggctcgtacagggcgagagaaacccgcgcgctcgcccctgtcctgccgcgggatcgcagttgccgtccgcttcatccccggacccggaggtaggcaccaggcaggcggcggcaatgctaccgggctcgccggtgaagcgcctgctgcggcgggcggccaaggggcggcgggagaaggccgagctggcggggctggccgcggcggccgccgcgctgctgctgctctgcgccgcctcgctccgctgctcggccaccgcgcgcgggaggctctgggccggtggggtctccatcgcggcggcggggagtggcggcgaggaggagtgcgacctgttcgacggggactgggtctgggctggcggcggcggcgggtacccgctctacgactcccgggactgcccgttcctcgacgtcggcttccgatgcgccgagaacggccgccccgaggcgtcctacaccaagtggcgctggcagccgtcgcgctgccatcttcccagactttcaacgtccgtgcagtgtttgttcaatcttgaaccagtatttgatgccaaaagcatgctggagaagctacgaaacaaaagagtggtttttgttggtgattcaattggaaggaaccaatgggagtctctactttgtatgctctctagcgctgttcataacaagagctctatctacgaagttaatgggagtcccatcacaaagcacatgggtttcttgattttcaattttagagactacaattgcacggtggaatactacagatccccttttatagtccttcaaggccgtgcaccagcaggagcacctgagattgtccggtacagtattcgagtggatgcaatggattggatgtccgaccggggtaaatggaaggatgctgatgtactgatcttcaacactgggcactggtggaacaatgagaaaacaatcagggggggtgcctactttcaagtaggcgatgaggtcaaaatgggcatgagtgttgctgaggcttacagaagatcgatagagacattgtccgattggcttcgcaaagaagtcaacacgagcaagacccatgtcatctaccgcacatatgctcctgtgcatttcagagatggtgactggaagactggtgggagctgccacttggaaactcttccagacgcgatgccagtgaagtccctggacgaatgggccgacttgctccaacccgtggacgaatttctagggagcgatcttggatccgagctggctggtgtagacctgcttcgcgtgacgggaatgacggcccagagaaaagacggccacctctcggtctacctgagcccctcaggacccgtgccccgctacagacaggactgcagccactggtgtcttcctggagtccccgatgcctggaacgagcttctctacgccctcgtcatgaggaggcataagaagatggccggcactaggacaccggacgctgaagagggagatgtcttcagcagtggatcatcatcgtga

SEQ ID NO: 113773 - DNA, 2630 bp, Zea Mays
gtcctccctttcccatcatcggattccaccgacgcacgcgcgcgccaccgcggctccccggcgctgcgcaatggacgccgtcgcgttcccgccgccgcccgcgccgttcctcgacgacgacctcgatttcggggacttcaccttcgcctccgcgccgcagccgcagccgcagccgcccaccgccgccttcgacgacgactggggcgactttgtggcaagcgggctcggatccgacgcgggcgcatctgccccgacggacgcgccagccgccgctccctcctcctcgccttgggagaagccgcggggcccgctgcccctctccctgttcggcgccgatgccgacgacgacggccaggaggaggaggaagggccggccgggccgccgccgatggacacggcgccccagtgcgctccgtccgtcccgtccaacgggtcgcgccccgcggatctgaaggacctcatcgctggcctctacggatatcagccgccccacaccgccgacgcggtcccgcaggtgaaggcggaggaggatgaccaagggtttggagacgatgattgggaattcacggcggcgacggggcaacctgctgctgatcaggatggaggcggaccagggcatgcggatggatttggtaagatcgaggatatatcgaagtcattgagcaccgaccaggaagactggtcatcgtttaccagtgccgatggcaaattgaaccatgttcgtctaacaaccgatggtcttgggaatcatgagtccactggagaatttgtgagggcctccacttattcaccagctaatagttcggccatactcaacctgtacaaaggaagcaaacgggttgatgatgttgtcattgcccaaggctctgcagaaagtgtccagagttcatctgatctgttttctaataatgaaatgatgacaaccattccagtagatcaacaagtgattgcattttgattgaattctaccaaagactgagagaagagtccttgacagcaatatcccggcacgtgaaggatcttaggggagcacagaagggatctacaatctctgatgaaaacaacaaagcgactgcaatgggaggggatattcaggaaatatatgacaaactaaaagattcttcattgcccgaaggctttttcacagaggaacagccttggaaggatatatatatcacagaactccttaattgtatcaaagaggaacatctgaaggattttgaacaagagtattgtttagcagaaaagatagaaggggcaacggaggacacagatattgcagttgaactttataagctcagtatttccaccctagatctattgaaactagcatccaaagaggaacagggtgattatgtcggtgcatggtacagtatgcttctgtcctgtgctcaagaattgaagcatggcgtggcactttggcaagagttttatcatgcaaatgtctgcgacagagtagtttctgaaggcggtcactactttattgctcttggggagatatatagagttgcacagattttatacttatccttgcagcgtttcaagccctgggttcttgcagatcctggaatgttgagtaaaatgttgtcttgtttggacagctgcacttatgcttggactagtggtctggaaacggctcttaagatggtcattgacagcagtcacatagattcatcccttgctaaagctctgatggagtccattaagaatattacaaaacttgaggtgcccaatctacaaaaaaatattcccaacaatgagatgcaatgtagactaactctcttgccaagtagtcttctgccaggattgaacttggtcatttggaatggtggtcactattttgttaaagtcgcaaatctgtgggcaaatcggatatctcctgatcctcctcttctgccaagcaaccccacctcttcaatgaacaatgcagcaacacacagccagtcatgctgaataacatgtcaaacatctgaggctgtgacctacactctgatggaagcatcaaatgcatgttgtgtaaaacatattcgtcaagttatcttttttatatacgtaaactgagcaagcaccgtgctgattgagggctgttcttggaagatagagatccaaggtgactgttcctttgcaggtcattcttttgtacaagttgtaatttacaacattctttccatagtgccggatgatgtcactaagtatagcaagtcgaaagggaatgacaagtttggaagtggacgtctggtataatgtgtagattatcaaagctgagaattggaatacggatcgtggaaactgtcactcttttgctaggttaatattatgggctttgctgtgttttgctagatcagttggtattcctcagctacgcattgtgatttgggactgtgtctcgataagttgctcagcccagcgttgactatttattgacttgaaacgaagatagatcttactccgttctttccacgctgatggacaatggcactagtatagcaagtcaaaaaagaatgttcagtttggaactgaacgtattgcataacgttgtaccaatttttttttaacatgatgcatttttatagattatcaacgcggaaaactagaaatacaaaacgtggaaatgaagcataggatgccag

SEQ ID NO: 113774 - DNA, 1929 bp, Zea Mays
gtcaatttaaccggcccggcccataatcccttgtaagagaggattttgctaggtttttgcccccaaccgcccaactgcgcgtgctcctgccgacctcccacccctccactcccctgcggttggcggctgtctcgccgaagcgacccagccggcgcagccgatatggcgaagggcgacgacgcgctggcgcggaagcgcaaccgtgtgcgccgcaagcgcctccgtagcagcgagaacgctgtttccgcgcgtgtcgcggcgatcatcgcctccaagcaccgccgcaagtcggggaagcgccgcgcctgcgagggcatgtgcttctcgctccccacgcccgacgacccgttcaacgagcgccatggcaggaagcacaagctcgatgacgagccggccgacgacacagccgccgacgccgctgaggacagcggcaaccccaagaagaagggcgcgaacaccaaaaagcagcagccggtggcaaagtatggcgccgaggcgaagtcgaaggcggttcgcgagagggagacgggtgcggaggtggtccgcggggacttcgaccggccgtccaagttcctggtggtctgtctcaacgctatccgggatgcggtggcgcccgaggaaggcggtggcagcatccacggcgccggcgactggggcgtggagctctggcggtgctgctccgcccaggcgccgtccgacgtgctcgacgctagcggcgcgtgcgccacggtggcgcagaccgcgtggctcgtctccaccgcctgcgacatcgtcgctaggaaagagaggcatgggatggtcgtgtcttgccccttcctgctgtacctcgtctcgtcgcaggataaggccgcgcaggtgcgatcgatatgcaaacccctgaagcctcttgggattcattcagtgagcttgcatcctggcgcatccattgaacaccagatctctggactgaaaacttgtgagccggagtttcttattgctacccccgagaggcttcttgaacttgtttcgttaaaggcgattgacatatcaggtgtatcaatgttggtcattgatggactgaaatgtttcgtagaccacaatgttagtgacaaaatattttctattagagacgccatatcaaacaatcttcagattactatcttcaccgatccatctgataaaaatattgcaacaatggctaaaaatctactccgtggaagaattacaaagctttctatcaatgattctgtttcttcacgaagtgcatttatagcccagcatgtacacttctgtccatcggaggagctgaaaacaacaaaggttaaggaaattcttgagcagatattgcaagatcatcctaaaaagacatcaaaggtgcttctagtagctgcaagcgataaaaaagcacggctcatgtcactgtcgctgaagctggaaaattgcacagtgattgatgactcatgtggcaactcctttacaatatgcagcagtgtggggctgatgaatgtcattgtgaaagaccgggagaacatgtcagtgacagatgtagaggcatttgaaaccgtgctggtggtggatctgcctccttcagtcgacgaatacattgagatcctcactggggctgctcttcatgtgattggaggcgaagtgcatagcatattctgtaacactgatgcttctgttgcaaaacctctggctcagcttcttgcagactgcggtcaggtggtgcctgaattcctcaaaagcctgaagtcttcatagcagagacttgtgtacgcaatcagagtagtcagatcacaccgtggcgattcagatcatatcggagcagtgtgtgttctacatgttattctcatttatcagcacagcattggtattcaggcctcgtccttggtatgtactattatgtcgtgcattgtgaaatgtgaatgccttgaggcccttttcctggga

SEQ ID NO: 113775 - DNA, 2023 bp, Zea Mays
gtcaatttaaccggcccggcccataatcccttgtaagagaggattttgctaggtttttgcccccaaccgcccaactgcgcgtgctcctgccgacctcccacccctccactcccctgcggttggcggctgtctcgccgaagcgacccagccggcgcagccgatatggcgaagggcgacgacgcgctggcgcggaagcgcaaccgtgtgcgccgcaagcgcctccgtagcagcgagaacgctgtttccgcgcgtgtcgcggcgatcatcgcctccaagcaccgccgcaagtcggggaagcgccgcgcctgcgagggcatgtgcttctcgctccccacgcccgacgacccgttcaacgagcgccatggcaggaagcacaagctcgatgacgagccggccgacgacacagccgccgacgccgctgaggacagcggcaaccccaagaagaagggcgcgaacaccaaaaagcagcagccggtggcaaagtatggcgccgaggcgaagtcgaaggcggttcgcgagagggagacgggtgcggaggtggtccgcggggacttcgaccggccgtccaagttcctggtggtctgtctcaacgctatccgggatgcggtggcgcccgaggaaggcggtggcagcatccacggcgccggcgactggggcgtggagctctggcggtgctgctccgcccaggcgccgtccgacgtgctcgacgctagcggcgcgtgcgccacggtggcgcagaccgcgtggctcgtctccaccgcctgcgacatcgtcgctaggaaagagaggcatgggatggtcgtgtcttgccccttcctgctgtacctcgtctcgtcgcaggataaggccgcgcaggtgcgatcgatatgcaaacccctgaagcctcttgggattcattcagtgagcttgcatcctggcgcatccattgaacaccagatctctgggtcattgatggactgaaatgtttcgtagaccacaatgttagtgacaaaatattttctattagagacgccatatcaaacaatcttcagattactatcttcaccgatccatctgataaaaatattgcaacaatggctaaaaatctactccgtggaagaattacaaagctttctatcaatgattctgtttcttcacgaagtgcatttatagcccagcatgtacacttctgtccatcggaggagctgaaaacaacaaaggttaaggaaattcttgagcagatattgcaagatcatcctaaaaagacatcaaaggtgcttctagtagctgcaagcgataaaaaagcacggctcatgtcactgtcgctgaagctggaaaattgcacagtgattgatgactcatgtggcaactcctttacaatatgcagcagtgtggggctgatgaatgtcattgtgaaagaccgggagaacatgtcagtgacagatgtagaggcatttgaaaccgtgctggtggtggatctgcctccttcagtcgacgaatacattgagatcctcactggggctgctcttcatgtgattggaggcgaagtgcatagcatattctgtaacactgatgcttctgttgcaaaacctctggctcagcttcttgcagactgcggtcaggtggtgcctgaattcctcaaaagcctgaagtcttcatagcagagacttgtgtacgcaatcagagtagtcagatcacaccgtggcgattcagatcatatcggagcagtgtgtgttctacatgttattctcatttatcagcacagcattggtattcaggcctcgtccttggtatgtactattatgtcgtgcattgtgaaatgtgaatgccttgaggcccttttcctgggagttgtttattgtcaattgtgtcaaaggaactgagtcagtcatccctttgctccctccccagcttcctttgtccaaaggcaagcagaaacagggacctccactgagagatcttggcaccttcaaagtgcatcaaccaaaatgtcaaagacacagcttcttttaatcaagttatttttcacatctttacagcacct

SEQ ID NO: 113776 - DNA, 841 bp, Zea Mays
agtagtgctccctccccatctcaacaatccgaagatctccgtaccgttgaccaacaccaaccggccggcgcacgctcctcctgcgcccaccatggccggcagcgacgccgaccgcgagaagagctgctgctgcagctgctgcacgccgctcatctccctgggcgtcgtcgtgctcatgtactgggccatcttccagccgcaccagatacgcgccagggtggactacgcggagctgtccagcctcagcgtctccaacgcttcatccggctcctccccctcccccgtcacggtgtcctaccacgtggccgtgaacctgagcctctacaaccccagcaagcgcgtcggcatctactacgacaccctggacgccgcgctccggtaccgcggcgccgtgctgagcccggccgccagcgcggcgtcccccgccgagttccaccagcgccggaaggccgggcgggcggtgcgcctcgtgttcgacggggagcgcgtcgccgttccaggcgacgccgggacgcagctggacggcgaggtgagggccaaggcggagctgggcctggagctcagcgtcgaagcgcgggtgaggtacgtgttcgggatcgtaaaggtacggcagaggccggcggtctggtgcgcgctcagcatcccggtcccgccggtgcccggcggcctgggcgttcttggctccggcgaccggtgccgggtcaagtaccggtgattgattgttgggttcagttggcttgttgttcgcagtaccagtaccattattcacttgttattaggctgggccttgtgattcatccagaacagcaaatgcattccattctgtttctttcttggaata

SEQ ID NO: 113777 - DNA, 294 bp, Zea Mays
ttcgatcccacttgggaattcatctgcggcggaaagttcggcctcgaccaccactacgtcaacccaatggcatcgccggaggagttgaggcagctcggtacccgccgcgcgctggtgaccatggcggaccagtgctggttcgtggagagggcaagggcgtactcagagggaatcaagaagtgcggctcggaggaggagctcgagctctacgagaccaagggtgaggcgcccgtcttcttcttgcctaaacacgacaacgaaaaagccgtgaaggagctcgccctcgtggccgaa

SEQ ID NO: 113778 - DNA, 1642 bp, Zea Mays
gccgcgctcgccatggccgctgccgtcgaggcgtccgccgtcactgtcgaccttgcttcctacctccacaggctccaaccgcgcctcctcaagttacttcgcagcaacgccttcaaggcgaagcccgcgcacatcaccctcatcggcgcctgcgcgaccatgggcgccgatgttgaagtcaccgcctccatctcgtgcctccgcgatgcaatcgctagcgatgactgggcaacgaggaaggctgcggcggaggcgcttgctgcattggccctagagcacacggatcttctcacgacctacaaatcctcttgcgtcaccttcttcaaggccagaaggtttgacaaggtcaaggttgtgcgagagtcgattaaccgaatgattgaggcgtggaaggagatcccgggtgctgaagaggacgagtgatcctccgctctgccaccagcgtcccagtcacaacgaagatcttctcttacatgtgaggggtatccccttcgtagttctaactgtacttggctaatttctactacttccgcatgtacagatctgctaatctttttcctataccttgtaagagggagtgcaagtgatgggcgatatccagctgcttcactgggctcaaactcagttccttcagcaacaaggaagagcatattatctgtaagcagatcatcttcgcctgatgtgtctaccagtgtcaccaaaacaaatagtccttcatccatcaggaacaagaaactgtcaccgccttcatatcacaaagtgcgccaagcaaataattgtgattacaaggtcaacattgttgtttctccggatgctaccccaatcaaagtggtgacagaggagaagctgctgaaaggacgcggtgtgagagacagactggagtctaggaggacgctcttcaaaggcagcgaggataggtcggccaagctggctgcccacaaagcagggtcacgagttgttctgtacgaaggtggtggtaatttggaatagattttagaagttgaaggtggatcagaaaggcatgcagttcacaaagatgagagcttgtcagaaataaggacacagctccttcagattaaaaatcagcaaagcagtttaatggagcaaatgataaccagaggatgacaagcctgctacaggagttggtcctaagttatacaataagcctgatttttttacagagtacacaaatgccaggtttttcctgtttgggctagcatcacaaatggaaacaaaaaattggactcagcccatcgtgaagatatgaaggaagagcactatcccattattctgttttttcggaagaagaccatgtttctagcatgaacatgccagcatggtgccatcaacaacttctctgttagctcacggtacaccatgctccagcctgccccttggttatcactaattcagtcatctgtggtgctgattgtgttcccaagatgcactgaaatagagcaagatcaaatgaggatgaagttactgtgtagagatttttgttccccctttgtagcagcatccatggatttttatttgcgcaaaattactctcttttactggttcattcaataattcaatttgttgcttggaaaccactgtataataaatacaaatgctatggtatgattttgtgaattctgat

SEQ ID NO: 113779 - DNA, 2396 bp, Zea Mays
atgcgtagcggcggctgcgcggtgcagcagaagctagcgggggacgcggccgccgtgatgcggcaggcggtgagcctggcgcgtcgccgggggcacgcgcaggtcacgccgctgcacgtcgccagcgccgtgctcttggacgccgggggcctcctccgcgccgcctgcctccggtcgcgggcgacttcccacccgctccagtgcaaggcgctggagctctgcttcaacgtcgccctcaaccgcctcgcgacggcggggggcccggccccgccgccggccatgttcgagttccacatccactccggccaccgcgagccggcgctgtccaacgcgctcgccgccgcgttcaagcgcgcgcaggggaaccagcgccggggcggcggctcggccgcggacggccagcaccagcagaacgtcgccgccaaggtggagctcgaccaactcgtcatctccatcctcgacgaccccagcgtcagccgcgtcatgcgcgaggccggcttctcgagcgccgaggtcaaggccaacgtcgagaaggccatctcgtcgtcggagcagtcctccaacacggcaagcagcagcagcgcttccccgagtaccattaccaaggagcccagagccaaggccgacgccgtccaagtcgtaggtgacgccgcgcgcgtgctcgactgcatggcgagcgggacgaaccggtgcgtggcggtcgtcggcgagagcgccgccgccgcggagggtgtggtcaaggcggtgatggacaaggtgagcaagggggagctgcggcgtcagcaccagcgcctcaagaacgcccagttcgtgcccttctcggccgcgtccttccagcgcacgccgagggaggaggtcgaggccagggccggcgacctgtgcgcgctcgtgcgcgagtgctgcgccgccggcaaaggcgtcgtgctcgtcctcgaggacctcggctacgcggcggaggcctggaccgccgcgctgtggacgagaagtgaccgcagcgcgcgtggcctccgccactactgccccgtcgagcacgcggtcatggagttgagcagcctcgtgcgcggcggcggaggccgcgacaaggacatgttctgggtgctggggttcgcggcctatgcgccctacacgagctgtaggtcggggcagccttctctggagaccgtcctgggactacgccccgtcgtcgtgccggacggcagcctcggcggcgaaagtgaggaaacacactgcggcgccggcacggtggtggcgccggcgagcgtcccctcgtggattcgccgttgccaaggtccagtagtcgtcactggatcggcgctcacgctgagcttctcatctccggcttcttcctcccactgtggctttacccatcatcatgacgacaccaacaagagctgcgtgccatggcatgatctcatggaccagcagcagcaaaagctgttgctgaaccgccggcacgatggtccactggccgagccatacgatcagctgtcgcccgcaaaccctaattcaggatcctctaataactcggtgtctagatctaactcatcggacggcgcgacgacggcttgccgccgccggccaaagttcaccgagctcagcgcggagaatctcaagatcctgtgccgcgcgctggagacgcgcgtaccgcgccacagagacatagctccgggtatcgccagcgccgtgctccagcgccgctccggcgtgacgaggacggcgcggccgaccccggcgacgtggctcctcttccgagggagggacaacgacggcaagatgtccatggctcgggagcttgccaggcttgtctttggctcgcacgacgacttcaccagcatcgccgcagcagcgtcaaagctcgcaccggatcactccggttccagcagccccggcaagcacagcctcaagaggcagaggtcgccgccggacaacgagcacggaggcttcatgcagacgttctacgaggcgatccgcgagaaccctcaccgtgtcgtcctgatcgatggcgtcgagcaccactcgaaactacaagccggcatcatgggttccatggagaacggaactgtgaggggttgcgatggtggtgtcgtcagcttggaggactccatcgtagtgtgctgtgaagcgttcgagtcgagatcgttgcctcgggtttcttcatccccgcggcctgtgaagcaaatgattacgagtgacgtcgacagcaaggtggaaggtgatgacgcagataaaggagtcgtgccacatttcagcttggatttgaatacctgcgccattgacgacggcgaaggggaggaagcgagtagttcttggtatgatgccatggagatccaaaatgatgtagacggcgttttcttcttctagtattattatctgagaaataattaaagttttgcttc

SEQ ID NO: 113780 - DNA, 1784 bp, Zea Mays
gcgggtgtgctctctgggctgcaaaattccggactgggctacggcccgtccgccgcacggccctttctgtccacggttcaccacttcaccgccccgcaacccgcagcgttctgtctccgacgactccgccgcccccgtcgtacgccaggtgcggaggcctttgctggtctcttcgccggcgacgaacacccaccagcagctgctgtagatgtgcacattcatctccctttactgggtccgcccctggagcatatcatttgactgccgtggccacaactgcgctagttttgctttgatcatccggccttaataatccagcagatatctggtatatagattaacatattcagtacctgagatcttccttcaactagcaaagggaattgggattccactccccagtcctcatcaacagagcgaagtagtgcaatattattcaggaaagatggttgccagctgccctagtttgaccggagagatcaaatatgaagtggctagcagttatttggttggtatggtgattagtgtatatgccaagcttttacagataggcaagaattgacagtagcaaattcttgactagctccgccacctacaggaaaatctagaagaataaaagaaagtcagagatggcgatgtttcttggttgctgtcattagctgccgcttgacacctcggcgacgaaaaaggagccgtccactcactgagccttttgtccccctggacatgcaggtgagtggcatgtaaccaacctgaatgacaggaggatcattgtggtggcaacgccaggaggcagttggatattcaagatcatgacatgaaagactttgggaaggggagagggcaatctccatggatcaaggtgtctgcacatgatccaagcgcacaactgctcaaagcacacaagagatcgtgttgtgtgttgtgtttttgggccgtaccaggaccagagcgggcccctatagctatagctatagcagcaatgagctgggtcgtactctctccacgacaacactgaaccgtccgtgtgcgttcctgttgccgtactgaaatccacagagaggatagctgggctctgatccgggatttatgtcaggcccattggggaggtcatgtgactcagcaggtcagtgcgtttccgctcaccagctaccattgcgagatcagtaggatgtgtcactctctctctgctgctcttttggattcttggcgaggtttcagattctctccagtacccacttgcattgcagctctgatggtcgccaggtaccaagagcacgcctctgcgtaatccactgtgctaataggcacctttgaattgatgcatgcatgatctatctgctgccagtttgctccatcggcaccagcagcaacagctcgtcacgtcacacatgactaggcatatgtattgcaacagccttgttcagttcaccgcagtgagatgtactgatcccccctcacagctgaaatcctgcacacagcaaggtccccaccccactcatcataaactcatgcggtgaaatgcaatgtactcccctcgaatttttgtttttttttctctctctcactccgtgccgaaatatagttatttatagccatcttttttcgtccacatttaaataaataagaatgaatttagacatacgtatcaacaacattcttagattttactaatgaatgtatgtttagtctaaaatgaataatattttaggacggacaaagtaggtatgtaagcacatagcaaaaagcttaataatctaaaaagacaacgccttataatttag

SEQ ID NO: 113781 - DNA, 1399 bp, Zea Mays
ctctctgcaaccttgactattagcaatatcagcgaagtagtgcaatattattcaggaaagatggttgccagctgccctagtttgaccggagagatcaaatatgaagtggctagcagttatttggttggtatggtgattagtgtatatgccaagcttttacagataggcaagaattgacagtagcaaattcttgactagctccgccacctacaggaaaatctagaagaataaaagaaagtcagagatggcgatgtttcttggttgctgtcattagctgccgcttgacacctcggcgacgaaaaaggagccgtccactcactgagccttttgtccccctggacatgcaggtgagtggcatgtaaccaacctgaatgacaggaggatcattgtggtggcaacgccaggaggcagttggatattcaagatcatgacatgaaagactttgggaaggggagagggcaatctccatggatcaaggtgtctgcacatgatccaagcgcacaactgctcaaagcacacaagagatcgtgttgtgtgttgtgtttttgggccgtaccaggaccagagcgggcccctatagctatagctatagcagcaatgagctgggtcgtactctctccacgacaacactgaaccgtccgtgtgcgttcctgttgccgtactgaaatccacagagaggatagctgggctctgatccgggatttatgtcaggcccattggggaggtcatgtgactcagcaggtcagtgcgtttccgctcaccagctaccattgcgagatcagtaggatgtgtcactctctctctgctgctcttttggattcttggcgaggtttcagattctctccagtacccacttgcattgcagctctgatggtcgccaggtaccaagagcacgcctctgcgtaatccactgtgctaataggcacctttgaattgatgcatgcatgatctatctgctgccagtttgctccatcggcaccagcagcaacagctcgtcacgtcacacatgactaggcatatgtattgcaacagccttgttcagttcaccgcagtgagatgtactgatcccccctcacagctgaaatcctgcacacagcaaggtccccaccccactcatcataaactcatgcggtgaaatgcaatgtactcccctcgaatttttgtttttttttctctctctcactccgtgccgaaatatagttatttatagccatcttttttcgtccacatttaaataaataagaatgaatttagacatacgtatcaacaacattcttagattttactaatgaatgtatgtttagtctaaaatgaataatattttaggacggacaaagtaggtatgtaagcacatagcaaaaagcttaataatctaaaaagacaacgccttataatttag

SEQ ID NO: 113782 - DNA, 1527 bp, Zea Mays
cacagatagatctgggtatcatgagcatgtgtatatatgtagtgcagtcaattaggcatcaataaaaataaataaagcatcaatagatggagggtgaggctgtccatatgttgcaatcaggccaccaccagtggaataaaggacagccaacattgcaagcgttcccagccactcaaaggctaaattcacgtttgcaccagatctcggaggaaacaaaaaagatggcccctaaattagtctttgttcttcctgttgtgctcctcgccttggcgctgcaggcgatcctccggccaccgccgccaaagctctgtggctccccaggtggccctcctctgacatctcccaggatcaagctcagggacggaaggtaccttgcgtacaaagaggatggagtacagagagacaaggccaggtacaagatcatcacagtgcacgcatttgatagcaccaaggacttcccctcgcctgtttctaaggagctcgtggaaggactgggaatttacctccttgcttatgacagagctggatatggggaaagtgaccccaatcccaaccggcatgtcaagagcgaggcgctagatatcgaggagcttgccgaccagctgggccttggccacaagttctatgtgctaggggcctcaatgggaggatactcggtttggggatgcctccagtatatacctcacaggcttgcaggagctgcgctggttgtgccaattatcaactactggtggccttcgttcccagctgaattatccaagcaggccttcaacagactgattgtgccagagcagagaactctttggattgcacacaacataccttccttgctttacctgtggatgacccagaggtggttcccttcttctgcagcagccatgcaccaccctgaaatatttagcaagcatgacatggaggttcttcagaagatgatggcaatgccaagaaccattgagaacaaatcaaggcagcaaggcatttatgaatcgatccaccgtgatttacttgtcgcttttggaacttgggagttcgatccaatgaatgtcaccaatccatttcctcaaaatgagggctctgtgcacatctggcaaggacgcgaagataggttggtgcttgttgagctgcagaggtacattgccaagaagcttccgtggatcaagtatcatgaagtcccagaaggtggacacatgttcgtgatggtagatggatggacagaccgaattctcaaggcactcttgttaggagaagagcccctagatgtgtgacagtagttccattttcaaaatgtcaaaaactgcagctgccagctgttattttacttaattttattcccaatttgtacacttgtattcctacaacaccaagactagtctaattcataatccgatagactttccatcatgtcaactcattacaacagcagtgataccattgtactcatcccatacgcatatgcctttggtccaaaattgatgtcaacccagaaagcacgtagtcaaaacattcaaattggagagaggggtgttt

SEQ ID NO: 113783 - DNA, 116 bp, Zea Mays
gtcatagtacgtggcgcaaacgttggaggtgaattttatggaagaaaaaatttgatagttagatggtgttttctatttgagcagtaaatggtgtttattcttgtacttaatggcag

SEQ ID NO: 113784 - DNA, 681 bp, Zea Mays
gccccctcgcgatgctatggtgcctttgtgacctcaaccaccatgccgcgagtcggacatgatcggggcctgctggagcggccacgcgcgctggtgcggtcggcggacccggccgtgcagatcgccggcaacttcgcaccggtcggcgagcaggcgccggtgcggtcgctgccagtgtcgggccgcatcccgccgttcatcttgggcgtgtacgcacgcaacagggccaacccctacttcgaaccgtcgacggggcaccacctgttcgacgacgacgggatggtgcgcgcggtgcgcatccgctacggcgcggtcgaatcgtacgcatgccggttcaccgagacggccaggctccggtaggagcgcgcgctggggcgggccgtgttccccaaggccatcggcgagctgcacgggcactccgagatcgcgcgcctgacgctgttctacgcccgcgagctgtgcgggctcgttgacccgtcccgcggcacgggggtcgccaacgccggccttgtctacttcaacggccgtctcctggccatgtccgagcaagccctgattgccgctgtcggctctccacttctccagttctgggtgaagaagtaaagatcagccgagaatgaggtcaacccagttgaatccaatggagctgtggtctcggttaagaagacaatatatacaaca

SEQ ID NO: 113785 - DNA, 288 bp, Zea Mays
atgcaggacttgagaagtaatagcggagtgttaaaccaggccttaagtattggctcaaagcagagcaatactgagcggcatgtcagatttgccgagcctgcatactcatttattggaatgcactgcatctttgacaactgcaaagcctcagttactatactgaaatttggccgcgcaaattctgatctgcttgcatatggtgcggcagatggcagcttgatggtattccaggtttctgagccaccatctgttcttcaaaaaatgatagggcattctaaaaatatcaca

SEQ ID NO: 113786 - DNA, 454 bp, Zea Mays
cttctgatgcaaattttgaggtttacaacctcgcccaacccagggctcggaccgaccacgtcacaggaggcgccatcattaccctaccccaagctaactcaggctacggggaacaagaccggcgtcccatctggctcgtttcggtaaacaagtaatgatggcgccccgcatgctctatgacgccggcggctctcagcccccttacggaagcaaggagacatcagcaaggactcgacagccccgacagctgtcctcccgccaggctccagcgctcctccgacggccacgacaccacacgaaccgggtgccaaaacctctccggctgccacgacggcatgtacttagggcactagctcctctctgctagacacgttagcacactgctacacctcccattgtacacctggatcctctccttacgcctataaaaggaaggtacagggccctcttacag

SEQ ID NO: 113787 - DNA, 2200 bp, Zea Mays
tattaaagccattgccttatgaagctttttatcctgaattaacccatatatcaaagaaccataagtccaggcatttggatggcagccttcatgttccatcaatttgaagacctctagtgcagcaccaaccatcccaaccttgcaatacccatcaattatagaagtgtaagtgacaacattaggagctaaaccatttgcaaacatctcattcagcgtctctttagcctcttttaatctacacttcttgatgaggacattaatcaacactccatatgcctgtaaatcaagcttgcaattgcttgatatcatattactctttaccctgagtgcatcatcaatcctttcagccttgcaatacccattaatcaggttagtgaatgtgataactgtaggtgtgaagccccttgcaatagcgccattcagcaattcttcggcttcgtctagcttcccaccacataggccataaatcagactgttgtatgtccagtcatctggattacacccattttgttccatcagtgctttaatccccaatgcatccttcatccttcctgacttacaatacccatcaatcattgcattataagtccaaacacttggtaccacccctctcaaaggcatttcatcaagcaaccccctggcatcatgaatcctgccctccttacaaagaccttttatcaagagtgtatacgtgtgcagattcagggagcacccatcgtgtaccatcatgaacacaagcacaagtgcctcccttacacaccgtgcttcacagagcccctgaatcaaaatggtgtaggagtactcgttcctcctgcaacccatcagcggcatcatcatgagtagccagcaagcctttctcaagtcacttgttcggcagtaccccagcaacagtgcattacatgtgtatgtatccatctgcatcccagactccctcaacaagcagaaataccggtgtgctatggcgagactgcccttcttgcagtatgccatgatcatagtgttgtaagtcaccgtgtctggcaacaatccctcctgcacgaggtgcgagtacagcttccccatatactccgtcatgtcgaatcgcagcagcgacctgagcgccaagttgtagcactttggggacagcacgagtcgcttaccacccactcgacggattgcctgaattgcgtcgacggcctcgcgcacgtcctctgcggtgccggagcagctaatcatggagaggacgagcttgtcgtagttggcgggcgcgcggcggcgggcgaggagctggagcagcgcggcgtgggaggcggcggtgtggcggaacccggggcggcgcgcgacacactcgaagaaggccagagcggtggccgggtcgagaggggacaccggggcgcggaagaggtcggccacgtgcgcggccgtcacggagggggacagccgcttgtaggcgctgcccttgttccagcggcgcgtggagaggacgcggccgagctccgcgacgatgtccggggtggatgtcgaggcgacggcggccgcgggccgggggaggggcgggaggcggcgcatggtggcggcggcctttagggttctgcggggcggcggcgacacggaggcggaggcggcggccgcggcgaagcggaacgaaatgcccgactctaattccgctcacagctgctaccgttggatgcgatataaatgtcccaggtttaaaatatgcgtaccctttaagcacaggatacgttgccaaaaagtatgctcaatcccgtcgactcgtaggattcggtctggcagccggcgaccggcggccctccctccctcacgcagcacgctgcgccgtcgcctccaccccaccctcctctcgcctgccgtcctcccctgccgctgcggcgccgtcgtcgcctcttcctgcaacgccgggaatcgatctgttgcggccgcttctctgacgtcgagaggaggacggctgcgccatcttctccaccacaccgcgcccgtcttcaccttcgcgttcacgcaatgaggatgcccagcggcgggccggtgtggatctgactatctgaggccaccaccgcctaagcatcgcccgatcctgtttgtaccctgtcaacggccaccagcccaccaccgttacagacccgctcggtttgatcctggccttatccaaaaaaagcaacgctagttgcccctgtcactgcaaattcacattatgttatgttct

SEQ ID NO: 113788 - DNA, 698 bp, Zea Mays
atgtgatgcagacaacgcattggttcctttggcatttgctttggtggagagggagaacaaagatagttgggcttggttcttacgtcttgttcggatccatgttgtgggtcctggtcgagaggttggtgtcatatctgacagacatcagggtattcttagtgcatggccaacgtacaccagtctgacatacattgctgttgctcgttgtggtggcttgactagcgcagcagttgacaggctcctgtgcagctctaggtcgacactccgcaaggagttggaccttccacagccgcacaaagctcatcacgtttgacaagggacacatttgctgacgacgacgatgaggatgatgatgacgatgacgacgttcatgtgcgtcacgacgagatcggtctgtcccatctacaggttgctccagtcaccgaaccgtcacagcctacgccacgcagacgacgaccacgtgatccttacactccaggcaccgacactcttgaggccaagtgtaagactaggaggaagtgaggtggtggatgtcttcttatttgggatgtgctatggattgtttctgatatggctgtgatttggactatgtgctacgcacggcgatttggactattttttgttttagactatgatttgtgctatgtacttgattttgtactatgtgtgatatggactacgtatgatattgtctggtt

SEQ ID NO: 113789 - DNA, 1960 bp, Zea Mays
atctccccctgcagtcttggacgcagggaatacttgaaaccccggctcccgatggatctcctctctgctgcgtacggtgctacctctgacgatgaggatgccgcggaccgacccttctccatgccggttgccaccaggtccgcctccttctctccacctcccatgaagccgccgcggtgggaatctcacccatacctccctccaacccactgcttcccgcaaccacctctgcccgacgcagcgctgccactggcatctccatccagcggcagatacatttccaagagggagcgcgctctcctggcctcatcaggggcacatattgaatccggatcatccctgcctctgacgagagtggattttgaatctgcagttggctctatcacctatccaaatctacgagctgacattttgcattctttgcgatgccaaccgaaacctggaccaagcacaagtttccctttgaggctctcagtttgtttgaagggtcacactaaagcaatcaattgtgtagattggtcaccgactcatgggcatcttcttgcttctgctggaatggatcacacggttcatgtatggaatgtatgggacaaagggaataccactgctcgtgttttgaaacatcacactgctgctgtaaaggatgtaaggtggtcacttcataggccctttttactttctggagggcttgattgttccttacagctagttgatgttgttgagggaaaagtaatggaagtattcaaggaggatcaagctgtggaggttatcaagttcaatccaagcaaccccgatctcttcctatctggtgggtccaagggttcccttaaactctgggatattcgatgtggtctggtaacaaaagaatttcagagaagccttggaaccatccttgacattgacttcagtgctgatggaagacaatttatctcttcaactgacacaaccagaagcaatattagtgagaacactataattgtttgggatgtcctgcgacaagttcctttatctaaccaggtttataccgaagcattcacatgcccgtgtgtaaggtaccacccacgtgaagcatcatttgttgcacagtccaatgggaactacattgctattttttcagcaaggccacccttcaagctgaacaagtacacgcggtttgaaggacatggagtgtggggtttccctgtgaagtgcagcttttcccttggcgggagagaactcgcatctggttcatccgatgggtccatttacttctatgattacaggtcggcaaggcttttgaggaaaatagaagccttcaaagaggcgtgcactgatgtcgcgtaccacccagtaatgcctaatgtgatcgctgcttgtagctgggctggtgaaatatctgtctttgagtgacatgattataatgctgtgtggagaagcatcagcagttcagaaccgctagcatatatatatatatatatatatatatatatcttctgtgactcaaacaccagttaatggtcatagcagattccaaaataaaaataatttgctgtatggagttcatcgtctgaatttcagtctcagcctcgcctatgaacagattatttgtggtttcaaacaaagccttgttctttctgttcaaagtagatgaaacatcatagcacattgattgtagtggcaacatggaccgagaagaagataagtgagttgaagaggctgctgagcgggcaaagcgtatagctgaactttcaccgccgcctgagccgtatgatcccgaagtcgatccggccatgaaggaagcattagaaacgataaggatcgccaacgaagctgtcaacagactcctaaatgaagctaccgataagatattgaaagaggactgaattcttgtgtactaaaaaatgtaatattcgtgtatgagtcgaacatcgaacgtttgtatgtatattaatgtaatatatttcttttgcgatgcatgaaa

SEQ ID NO: 113790 - DNA, 1094 bp, Zea Mays
gtgatcaagttgccaacagcaagaaagttgagttgctgtcgcgagatatattccggagacagttttctgatctagctaggctagctccggtttgcagaaacaacaatcggagacaccgtaggaaatagtaaatttaaaccatattttctgcagaggtctatgagttatgatcatcactgaattatatatatggtttagcaattttccacggagttggactgtgctgatgcctagtaattaacaagacagggtccacaggtcgtccaacaagaacagcgtccaacgacctggcagcgacgttcttgaattctctcatcggcctcaaccctctatttaaaccctccaaatcctggccattcctcagcagcagcagcagcacagtcatccacactaacgaacgaactcttgctccgatcacgagctagctgaggtcgacgatggcggctgtgctgaacagcaggaagacgccgcaggcggtggtggccgtgctggtggcggcggcgctgctggcttcgtccgcttcggcggcgatcacctgcgggcaggtggggtcgtcgctggcgccgtgcatcccgtacgcgacggggagggccagcgcgctccccgcgtcgtgctgcagcggcgtcaagagcctcaacagcgcggcgcggaccagcgcggaccgccaggcggcgtgccgctgcctcaagagcctcgccaacagcgtcaagagcgtcaacatgggcaccgtcgccaccatccccggcaagtgcggcgtctccgtcggattccccatcagcatgtccaccgactgcaacaagtacgtgatccagcttgcttgcttgtttgctgtcatcatccatgcatatgcatatgcatctccatctttcattttctcaattcttttgggacacgcatgcaggatcagctaagttacgacgaccaagctaataagcctaccgaacgtacacgtacgtcccgcgcgctgcacgagtgatgaagccagggaagaaataaaataaagccgctgtattgccaggagcagcatgcagtatcgatctatatatatactgtactgtagtactctatattatgtatgtgtggcctgcagtgcg

SEQ ID NO: 113791 - DNA, 1057 bp, Zea Mays
cctcagcagcagcagcagcacagtcatccacactaacgaacgaactcttgctccgatcacgagctagctgaggtcgacgatggcggctgtgctgaacagcaggaagacgccgcaggcggtggtggccgtgctggtggcggcggcgctgctggcttcgtccgcttcggcggcgatcacctgcgggcaggtggggtcgtcgctggcgccgtgcatcccgtacgcgacggggagggccagcgcgctccccgcgtcgtgctgcagcggcgtcaagagcctcaacagcgcggcgcggaccagcgcggaccgccaggcggcgtgccgctgcctcaagagcctcgccaacagcgtcaagagcgtcaacatgggcaccgtcgccaccatccccggcaagtgcggcgtctccgtcggattccccatcagcatgtccaccgactgcaacaagatcagctaagttacgacgaccaagctaataagcctaccgaacgtacacgtacgtcccgcgcgctgcacgagtgatgaagccagggaagaaataaaataaagccgctgtattgccaggagcagcatgcagtatcgatctatatatatactgtactgtagtactctatattatgtatgtgtggcctgcagtgcgagttgcttcgatccacctacttgttcagacagtttaatggtttttggtgcctgttatgaatcatccaatatatatatatatatatatatatatatatatatatatatatatggtggcaaagtattgatgaagagatataaaggacgatcagaggagatgaatcgatatatagaagccaaacaaattaaatttctactataaacaattttggttcgacacaaagataatgataaatgagtacctcacaccagccaaacaatggttgcatattctcgatgatgatcacgagctcaataacggaacactcaaaccagcaaagaaccaaaagtgcttcagcaaaatacaccaaaacccgatatatagtgatgatatcccaacttcaacaaattaaatagaagaaagagcataaactcaaatataata

SEQ ID NO: 113792 - DNA, 384 bp, Zea Mays
atgccactacgagcagcagagaggctgcttcaagaagcttgtttggttgtgagttgtgacaccggcagccggatgccattatatgatgatgcagaatatgtggtatttgaagatccagaacagtttgaggacccatgccatgatcccgatgaaatcgcattgcttgggccagtttcagagtctttagataatttccctccagacttggattgtggattcatcttgagtgatgttgtcaaggaatcacatgggaggccttcaccaattgagtctcctctctctaggtctcgtatggttgaagaaaatcctatgaagcctctgcacttgttttcaattgagtctcctctctctagatcttgtgtggagcacgccattggttcatga

SEQ ID NO: 113793 - DNA, 112 bp, Zea Mays
cacccacccctttctgctttatacaaaattctatactccttaatatgggagtttcatcgtgcgtcatcgtgagtccttacgcaccccttcttctcctgcaccctactcgcaa

SEQ ID NO: 113794 - DNA, 807 bp, Zea Mays
gcaattaaacaagtgttcgtcaataaacaaagcctacgatctcttaggtgtaccgtacgtccatgtttagcttagctttccagtcggccaccatatatatatagcatccaactacaacatatatcgattgccatacacatccatccatccatccatccatccctaaaaatcaaggctacacaccaacttactttctaggtctcaaattaaatggcctcctcgtcctcctccttgctgctggcgtcgatggcggtggcggcactctttgtcgtcggctcgtgtggcggcgcgctcaccttcacgatcggcaaggactccagctccaccaaactatccctcgtcactaacgttgccatctccgaggtgtcggtcaaggagaagggcgccctggactggtcggatgatctcaaggagtcgccagccaaaaccttcaccctcgatagcaaggagccgattaagggccccatctccgtccgcttcgctgtgaaaggtggtggctaccgcgtcgttgatgacgtcatccctgccgacttcaagcctggctctgtttaccagacaggcgaacaaatctgagtaatggattctgctgcgtgcagattatattgatctctaaaataaatgtttgacagagactaattaagcacacaaacaaagcaagacactaattcatttcctatgtttactttgtggtaggcaactgcaaaacaatgtattgtatgcatgttctcctctcacatatgttgttggtgtgctgtatatataattaatttcttaactttttttcaggcacatatgtatgttgaaatc

SEQ ID NO: 113795 - DNA, 1029 bp, Zea Mays
atgcgcaaggacgacgacaaattcggcgaggcgctcgcccggcgcgtgtatcgcctccgcccggcaccggacggctccctcctcgacgccgccttcgccgacctcctgcacgcgcacttctacgagtcctgcccctacctcaagttcgcccacttcaccgcgaaccaggccatcctcgaggctttcgccgggtgccgccgcgtccacgtcgtcgacttcggcatcaagcaggggatgcagtggccggctctcctccaggccctcgccctccgccccggcggccccccgtcgttccgtctcaccggcgtaggcccgccgcagcccgacgagaccgacgccctgcagcaggtgggctggaagctcgcccagttcgcgcacaccatccgcgtcgacttccagtaccgtggcctcgtcgccgccacgctcgctgacctggagccgttcatgctgcgaccggagggcggcggcgacacggacgacgagcccgaggtgatcgccgtaaactcggtggtgcgagctgcaccggctgctcgcgcagcccgggtacactcgacaaggtcctggggcaccgtgcgcgcgggtgcggccgaggatcgtgacgggtggtggagcaggaggccaaccagaactccggcacatttcctcgaccgcttcagggagtcgctgcactactactccaccatgttcgactcccctcgagggcccccggctcagggttccgggttccgggttccgggcggcaagcggcaacggtggcctggagaggaggtggtggcgttcgaggattcgacaagcacgacggtcgaccggagaggaggcggtggtggccggtgtgatgcttcccgcaagggatactgctgttctcatcgtgactgtacgttacaggatgtggaggatcctacatggcatttagccgacgatgaagctctggattctgacagaggaggagcgttccaagatacaattttttttgggtctaaaacctcgagtgaagaagttggatgtcagattcacttttgcttcttgtag

SEQ ID NO: 113796 - DNA, 2004 bp, Zea Mays
ctcctatccgccgttgctaatccttccacactcctcccccgcaaccacgggatctctcactgtcccaccccactccctcctccatttggcagtggcacatctatataggcacccggaatccccactcccccacgacgccgtccccgtccccgtcccgacgaattggaataggagaagcaaaagatgatggatctcgccgacagccagcaacagcggctcatcgccggcgcggctctgctggtcgccaccgtcgccttcttcaggttcctcctgcgctctcgctccgggggcaagcgcctgccgcccaccatcccgggggcgccggtggtcggcggcctcgtcaagttcatgcgcgggcctatcccgatgatccgggagcagtacgcccgcctcggcagcgtcttcaccgtccccatcatcagccgcaagatcacgttcctcgtcgggcccgaggtgtccgcgcacttcttcaagggcaacgaggccgagatgagccagcaggaggtgtacaggttcaacgtgcccaccttcggccccggggtcgtctttgacgtcgactactccatcaggcaggagcagttcaggttcttcaccgaggcgctccgggccaataagctgcgcagctatgtcgaccagatggttgttgaggctgaggagtacttctcaaagtggggagaaagtggcactgttgatttgaagtacgagttggagcacctcatcatactgacagctagccggtgcttgctgggaagggaggtgcgagaaaagctgttcgacgatgtttctgctctcttccatgaccttgacaacgggatgcagccaatcagtgtcctcttcccgtacctcccaatccctgcgcataagcgccgtgacagggcacgggcacgtttggcagaaatctttgccaccatcatcaagtcccgcaaggcctctggacagtctgaggaagacatgctgcagtgcttcattgattccaagtacaagaatgggcgccccaccaccgagggtgaggtaaccgggctacttatcgcagcgctctttgctggacagcataccagctcaatcacctcaacctggactggagcgtacatgcttcgcttcaagcagtactttgcagaagccgtagaggagcagaaggatatcatgagacggcatggcgacaagatcgatcatgacatcctggcagagatggatgtcctctaccggtgcatcaaggaggcccttcgtctccacccgccgctgattatgttgcttcgccaatcacacagtgacttcaccgtgacaacaaaggaaggcaaagagtacgacatccccaagggccacatcgtcgcgacatcgccatcctttgccaacaggctgccccacatctacaagaaccctgactcgtatgaccctgatcggttcggtcctggaagggaggaggacaaggctgcaggcgccttctcatacatctccttcggtggcggcaggcatgggtgcctcggtgagcccttcgcctacctgcagatcaaggcaatctggacgcacctactgaggaactttgagttcgagctggtatcgccattcccagagaacgactggaacgccatggtggttggcatcaagggcgaggtgatggttaactacaagaggcggaagcttgccgtggacaactaagattgtggccgcagtctctagatgcttgcttcttgttgattcaattgttttcacatgtttgtcagcatttgttcagtgcaagttctgctgtacgcaagccagccttgttaggggtgtttctgttgtttaggattttgaaatttgtttcactatggggccgccatgatctgcaacttctgcatgttcagcttcctggctaagcattcccctatgtcaaatctgtaacttgtagcatctataagcctgtgggtcttttgttcaaatcctgatgtttatcattgtcttagatggatgtaaacacaaacataacaaataacctaatgaataaactcaggtgttcagtgtgaa

SEQ ID NO: 113797 - DNA, 2086 bp, Zea Mays
ctcctatccgccgttgctaatccttccacactcctcccccgcaaccacgggatctctcactgtcccaccccactccctcctccatttggcagtggcacatctatataggcacccggaatccccactcccccacgacgccgtccccgtccccgtcccgacgaattggaataggagaagcaaaaggagattctctcatacctgtagctagtgcttgccgctctgcatcctaaccccacggaactgccgttcgtttcccacgaatcagatgatggatctcgccgacagccagcaacagcggctcatcgccggcgcggctctgctggtcgccaccgtcgccttcttcaggttcctcctgcgctctcgctccgggggcaagcgcctgccgcccaccatcccgggggcgccggtggtcggcggcctcgtcaagttcatgcgcgggcctatcccgatgatccgggagcagtacgcccgcctcggcagcgtcttcaccgtccccatcatcagccgcaagatcacgttcctcgtcgggcccgaggtgtccgcgcacttcttcaagggcaacgaggccgagatgagccagcaggaggtgtacaggttcaacgtgcccaccttcggccccggggtcgtctttgacgtcgactactccatcaggcaggagcagttcaggttcttcaccgaggcgctccgggccaataagctgcgcagctatgtcgaccagatggttgttgaggctgaggagtacttctcaaagtggggagaaagtggcactgttgatttgaagtacgagttggagcacctcatcatactgacagctagccggtgcttgctgggaagggaggtgcgagaaaagctgttcgacgatgtttctgctctcttccatgaccttgacaacgggatgcagccaatcagtgtcctcttcccgtacctcccaatccctgcgcataagcgccgtgacagggcacgggcacgtttggcagaaatctttgccaccatcatcaagtcccgcaaggcctctggacagtctgaggaagacatgctgcagtgcttcattgattccaagtacaagaatgggcgccccaccaccgagggtgaggtaaccgggctacttatcgcagcgctctttgctggacagcataccagctcaatcacctcaacctggactggagcgtacatgcttcgcttcaagcagtactttgcagaagccgtagaggagcagaaggatatcatgagacggcatggcgacaagatcgatcatgacatcctggcagagatggatgtcctctaccggtgcatcaaggaggcccttcgtctccacccgccgctgattatgttgcttcgccaatcacacagtgacttcaccgtgacaacaaaggaaggcaaagagtacgacatccccaagggccacatcgtcgcgacatcgccatcctttgccaacaggctgccccacatctacaagaaccctgactcgtatgaccctgatcggttcggtcctggaagggaggaggacaaggctgcaggcgccttctcatacatctccttcggtggcggcaggcatgggtgcctcggtgagcccttcgcctacctgcagatcaaggcaatctggacgcacctactgaggaactttgagttcgagctggtatcgccattcccagagaacgactggaacgccatggtggttggcatcaagggcgaggtgatggttaactacaagaggcggaagcttgccgtggacaactaagattgtggccgcagtctctagatgcttgcttcttgttgattcaattgttttcacatgtttgtcagcatttgttcagtgcaagttctgctgtacgcaagccagccttgttaggggtgtttctgttgtttaggattttgaaatttgtttcactatggggccgccatgatctgcaacttctgcatgttcagcttcctggctaagcattcccctatgtcaaatctgtaacttgtagcatctataagcctgtgggtcttttgttcaaatcctgatgtttatcattgtcttagatggatgtaaacacaaacataacaaataacctaatgaataaactcaggtgttcagtgtgaa

SEQ ID NO: 113798 - DNA, 1606 bp, Zea Mays
aacttgcccaacacccctgcagtgttggacgcagggaatacttgaaaccccggctcccgatggatcatggatctcctctctgctgcgtacggtgctacctctgacgatgaggatgccgcggaccgacccttctccatgccggttgccaccaggtccgcctccttctctccacctcccatgaagccgccgcggtgggaatctcacccatacctccctccaacccactgcttcccgcaaccacctctgcccgacgcagcgctgccactggcatctccatccagcggcagatacatttccaagagggagcgcgctctcctggcctcatcaggggcacatattgaatccggatcatccctgcctctgacgagagtggattttgaatctgcagttggctctatcacctatccaaatctacgagctgacattttgcattctttgcgatgccaaccgaaacctggaccaagcacaagtttccctttgaggctctcagtttgtttgaagggtcacactaaagcaatcaattgtgtagattggtcaccgactcatgggcatcttcttgcttctgctggaatggatcacacggttcatgtatggaatgtatgggacaaagggaataccactgctcgtgttttgaaacatcacactgctgctgtaaaggatgtaaggtggtcacttcataggccctttttactttctggagggcttgattgttccttacagctagttgatgttgttgagggaaaagtaatggaagtattcaaggaggatcaagctgtggaggttatcaagttcaatccaagcaaccccgatctcttcctatctggtgggtccaagggttcccttaaactctgggatattcgatgtggtctggtaacaaaagaatttcagagaagccttggaaccatccttgacattgacttcagtgctgatggaagacaatttatctcttcaactgacacaaccagaagcaatattagtgagaacactataattgtttgggatgtcctgcgacaagttcctttatctaaccaggtttataccgaagcattcacatgcccgtgtgtaaggtaccacccacgtgaagcatcatttgttgcacagtccaatgggaactacattgctattttttcagcaaggccacccttcaagctgaacaagtacacgcggtttgaaggacatggagtgtggggtttccctgtgaagtgcagcttttcccttggcgggagagaactcgcatctggttcatccgatgggtccatttacttctatgattacaggtcggcaaggcttttgaggaaaatagaagccttcaaagaggcgtgcactgatgtcgcgtaccacccagtaatgcctaatgtgatcgctgcttgtagctgggctggtgaaatatctgtctttgagtgacatgattataatgctgtgtggagaagcatcagcagttcagaaccgctagcatatatatgtgtgtgtgtgtgttctgtgactcaaacaccagttaatggtcatagcagattccaaaataaaaataatttgctgtatggagttcatcgtctgaatttcagtctcagcctcgcctatgaagagattattggtggtttcaaacaaa

SEQ ID NO: 113799 - DNA, 129 bp, Zea Mays
atgtttgatattgaaagcttatcaacattgctgtgctctaactttgagaattgcagagtatcattggtccaattaacagggacaagaacaatgaaagctagaactgagattggagcaaatattttaagt

SEQ ID NO: 113800 - DNA, 2061 bp, Zea Mays
atggccccacgtcaaaaaaggagcgggccgtaccaaggctgcaaggcacctacacacctactccacgaacgaaacacacctctcctcttgctgtcctgcggtccacttcttcaactagttatcccaggttctcaactcccagtagaaaacttcacctgctggctggctgcctgcctgcccacagaaattgcgcccggccgccccccattcaccttcaaaaaaggagccaggcttcccatcaacgagggtgtcggccatctgagcagctcccctgcccctcgcagcggctactctacaggtctagcgactctttcgccatccatagagggaggaggcgcggcggagatggtgggcggtggcggcggcgggccgctgcggcgggtgggcaagtacgaggtgggacgcaccatcggggaaggcaccttcgccaaggtcaagttcgcgcagaacaccgagaccggggagagcgtcgccatgaaggtgctcgaccgctcctccatcctcaagaacaagatggccgaacagattaagagagaaatatccataatgaagcttgtcaggcatcccaatgtcgttaggctacacgaggttttggcaagccggaagaagatatttataattctggagttcatcactggcggcgagctattcgataaaattattcgtcatgggagactcagtgaagcagatgcccgcagatactttcagcagcttattgatggtgttgatttttgtcacaagaaaggagtctaccatcgagacttaaagcctgaaaatctcctccttgattcccaaggcaatcttaaaatttcagactttggactgagtgcatggcctgctcagggatctttccttctacgtacaacctgtgggactccgaactatgttgccccagaggttctcagtcataagggatataatggcgcacttgctgatacatggtcatgtggagtaattttatatgtattgttagcaggttatcttccatttgatgaagtggacctgactaccctttatggaaagattgagagtgcagaatattcattcccagcctggttttcaggtggtgcaaaatcactgattcgtagaattcttgacccaaatccagagacacgaatcaggatagaagagatcagaagcgatgaatggtttcagaaaaattatgaacctatcaaagaaatagaaaatgaggaaagtcaatctcgatgatgtcaatgcagcttttgatgatcctgaggacgataatgaggatgctttcgaagatgaaacaggtcctctaacacttaatgcattcgacctaatcattctttcgcaaggattgaatcttgcagcgctctttgaccgcagacaggactgtgacaagcttcaaaatagattcttatcacgcaatccagcaaaggttatcttgtcaagcatggaggttgttgcgcaatcaatgggatttaagacacacattcgcaattataagatgagggtggaaggtctaaatgccgacaagactagtcatctctcagttatggttgaagttttcgaagttgctccatcaatcttcatggtagaactacaaagagcagcaggagatacttcagagtataacacgttcgtaaataactactgcggcaaattagatgatatcatctggaaatttccaactgagaagggaaaatcaaggataccccggttatcaaagtctcattcataatctagtgctgtgtgttatcaattactatggacttaagtggatatatttgcagagtgtatcgcaattggattatgatattctaagtgtagctcttcgagtagtatatgtttgtatattcagagtccccatgtacaaagaggccgttttaattgaggtttccgtacctcgattccctgtgcaaagttttcatcgatgttttagactgcacatctgtatattttgtcgagagcatcagtttcttagacaccacctatgtatcatgtgtttgttgccaactagtgtcatttttgtaagatctaacttgtgatatacttggattgagtggtatggttgaaaagagtgtgaaagtccattaaaaa

SEQ ID NO: 113801 - DNA, 514 bp, Zea Mays
aattacttttgatctggggtcattctcagctaactctgcaacttttctcatgtcacagttcgtaaataactactgcggcaaattagatgatatcatctggaaatttccaactgagaagggaaaatcaaggataccccggttatcaaagtctcattcataatctagtgctgtgtgttatcaattactatggacttaagtggatatatttgcagagtgtatcgcaattggattatgatattctaagtgtagctcttcgagtagtatatgtttgtatattcagagtccccatgtacaaagaggccgttttaattgaggtttccgtacctcgattccctgtgcaaagttttcatcgatgttttagactgcacatctgtatattttgtcgagagcatcagtttcttagacaccacctatgtatcatgtgtttgttgccaactagtgtcatttttgtaagatctaacttgtgatatacttggattgagtggtatggttgaaaagagtgtgaaagtccatt

SEQ ID NO: 113802 - DNA, 2091 bp, Zea Mays
tgtgaatttatcgtaataagtgtgtgtttgatggagtttctcagacttggttagagccttactgctcgctagggaggagttacttttggggggtttggccaggctagaggtatctcctaccatgcctttgtgctgatgtagtgtgtttgatttggttgggtcgtccggtcgtttcatgctttgtcataggtgagtcggattttagtagcatggtttttgtggtgttggtgtgtgcgtgtttgtaagggctcttcctttttttcttaatataatgatacactgctctcctgcgtgtttgaggaaaaagtatttccatacatctatgtacacaatgaatagttctctacccctcatagcagccaaatggaacagccagccacttcaaaaaaacaaaaagatgccatgtagggaaaaagaagtcctctatctgagcatgtattgtggttgccatcaccttgtacattttttattttatagttttctttacagacattgtatttttgcccaattagttgtttgccattgtcactgaggtgggccaaatgtgtcattgggacattgatagcaagggattgcaaaactttgtagtggaaaatatttgattgtaatgttcccgtctgcttatctccctttttttgagattacatagtacaatgcggatgctcacaacacactcacagtcacccttcaaccggcaaattctttaaattgatgaagtcgctacaggtgccttgctattgacgggaatgtcgcctactactcaaagcacaacaccaataaatcattaatattcacttccatgggaagtcgaaggcgtctctctccctcgacaggaacatcgcctaccactgaaagcactgtgccgataaatcctgtaatatttgcttccacggaaagtcgaacatagaacctgaggtgctactaagtcaagcgcctcagtctctttcgcttgccaatgtcatttcttccactaggctatagaccctttcgcttgccaatgtcttcctgacctacattaggtaccttacattaggcaccttttagaactagcgatgtcatttcttccctttgttttgtgttgaagaaattactaatagaaatagaaaggtggggtgagggtgataactgacattactgatgaattgggctccattgttctactttctaaacctataataaagcagtcttttgcggttaactctggtgtactttatgtgtattactataaatttattgtttctttttttgccaatttgttttatatgatttcaggacgataatgaggatgctttcgaagatgaaacaggtcctctaacacttaatgcattcgacctaatcattctttcgcaaggattgaatcttgcagcgctctttgaccgcagacaggactgtgacaagcttcaaaatagattcttatcacgcaatccagcaaaggttatcttgtcaagcatggaggttgttgcgcaatcaatgggatttaagacacacattcgcaattataagatgagggtggaaggtctaaatgccgacaagactagtcatctctcagttatggttgaagttttcgaagttgctccatcaatcttcatggtagaactacaaagagcagcaggagatacttcagagtataacacgttcgtaaataactactgcggcaaattagatgatatcatctggaaatttccaactgagaagggaaaatcaaggataccccggttatcaaagtctcattcataatctagtgctgtgtgttatcaattactatggacttaagtggatatatttgcagagtgtatcgcaattggattatgatattctaagtgtagctcttcgagtagtatatgtttgtatattcagagtccccatgtacaaagaggccgttttaattgaggtttccgtacctcgattccctgtgcaaagttttcatcgatgttttagactgcacatctgtatattttgtcgagagcatcagtttcttagacaccacctatgtatcatgtgtttgttgccaactagtgtcatttttgtaagatctaacttgtgatatacttggattgagtggtatggttgaaaagagtgtgaaagtccatt

SEQ ID NO: 113803 - DNA, 2148 bp, Zea Mays
atggccccacgtcaaaaaaggagcgggccgtaccaaggctgcaaggcacctacacacctactccacgaacgaaacacacctctcctcttgctgtcctgcggtccacttcttcaactagttatcccaggttctcaactcccagtagaaaacttcacctgctggctggctgcctgcctgcccacagaaattgcgcccggccgccccccattcaccttcaaaaaaggagccaggcttcccatcaacgagggtgtcggccatctgagcagctcccctgcccctcgcagcggctactctacaggtctagcgactctttcgccatccatagagggaggaggcgcggcggagatggtgggcggtggcggcggcgggccgctgcggcgggtgggcaagtacgaggtgggacgcaccatcggggaaggcaccttcgccaaggtcaagttcgcgcagaacaccgagaccggggagagcgtcgccatgaaggtgctcgaccgctcctccatcctcaagaacaagatggccgaacagattaagagagaaatatccataatgaagcttgtcaggcatcccaatgtcgttaggctacacgaggttttggcaagccggaagaagatatttataattctggagttcatcactggcggcgagctattcgataaaattattcgtcatgggagactcagtgaagcagatgcccgcagatactttcagcagcttattgatggtgttgatttttgtcacaagaaaggagtctaccatcgagacttaaagcctgaaaatctcctccttgattcccaaggcaatcttaaaatttcagactttggactgagtgcatggcctgctcagggatctttccttctacgtacaacctgtgggactccgaactatgttgccccagaggttctcagtcataagggatataatggcgcacttgctgatacatggtcatgtggagtaattttatatgtattgttagcaggttatcttccatttgatgaagtggacctgactaccctttatggaaagattgagagtgcagaatattcattcccagcctggttttcaggtggtgcaaaatcactgattcgtagaattcttgacccaaatccagagacacgaatcaggatagaagagatcagaagcgatgaatggtttcagaaaaattatgaacctatcaaagaaatagaaaatgaggaaagtcaatctcgatgatgtcaatgcagcttttgatgatcctgaggacgataatgaggatgctttcgaagatgaaacaggtcctctaacacttaatgcattcgacctaatcattctttcgcaaggattgaatcttgcagcgctctttgaccgcagacaggactgtgacaagcttcaaaatagattcttatcacgcaatccagcaaaggttatcttgtcaagcatggaggttgttgcgcaatcaatgggatttaagacacacattcgcaattataagatgagggtggaaggtctaaatgccgacaagactagtcatctctcagttatggttgaagttttcgaagttgctccatcaatcttcatggtagaactacaaagagcagcaggagatacttcagagtataacacgatacatccaaagggacaaatttacattggacagtaatgcctgtaatagggtgatgctgatgcttgctgcacagattaacttctaataaaattttcgtaaataactactgcggcaaattagatgatatcatctggaaatttccaactgagaagggaaaatcaaggataccccggttatcaaagtctcattcataatctagtgctgtgtgttatcaattactatggacttaagtggatatatttgcagagtgtatcgcaattggattatgatattctaagtgtagctcttcgagtagtatatgtttgtatattcagagtccccatgtacaaagaggccgttttaattgaggtttccgtacctcgattccctgtgcaaagttttcatcgatgttttagactgcacatctgtatattttgtcgagagcatcagtttcttagacaccacctatgtatcatgtgtttgttgccaactagtgtcatttttgtaagatctaacttgtgatatacttggattgagtggtatggttgaaaagagtgtgaaagtccatt

SEQ ID NO: 113804 - DNA, 2009 bp, Zea Mays
atggccccacgtcaaaaaaggagcgggccgtaccaaggctgcaaggcacctacacacctactccacgaacgaaacacacctctcctcttgctgtcctgcggtccacttcttcaactagttatcccaggttctcaactcccagtagaaaacttcacctgctggctggctgcctgcctgcccacagaaattgcgcccggccgccccccattcaccttcaaaaaaggagccaggcttcccatcaacgagggtgtcggccatctgagcagctcccctgcccctcgcagcggctactctacaggtctagcgactctttcgccatccatagagggaggaggcgcggcggagatggtgggcggtggcggcggcgggccgctgcggcgggtgggcaagtacgaggtgggacgcaccatcggggaaggcaccttcgccaaggtcaagttcgcgcagaacaccgagaccggggagagcgtcgccatgaaggtgctcgaccgctcctccatcctcaagaacaagatggccgaacagattaagagagaaatatccataatgaagcttgtcaggcatcccaatgtcgttaggctacacgaggttttggcaagccggaagaagatatttataattctggagttcatcactggcggcgagctattcgataaaattattcgtcatgggagactcagtgaagcagatgcccgcagatactttcagcagcttattgatggtgttgatttttgtcacaagaaaggagtctaccatcgagacttaaagcctgaaaatctcctccttgattcccaaggcaatcttaaaatttcagactttggactgagtgcatggcctgctcagggatctttccttctacgtacaacctgtgggactccgaactatgttgccccagaggttctcagtcataagggatataatggcgcacttgctgatacatggtcatgtggagtaattttatatgtattgttagcaggttatcttccatttgatgaagtggacctgactaccctttatggaaagattgagagtgcagaatattcattcccagcctggttttcaggtggtgcaaaatcactgattcgtagaattcttgacccaaatccagagacacgaatcaggatagaagagatcagaagcgatgaatggtttcagaaaaattatgaacctatcaaagaaatagaaaatgaggaaagtcaatctcgatgatgtcaatgcagcttttgatgatcctgaggacgataatgaggatgctttcgaagatgaaacaggtcctctaacacttaatgcattcgacctaatcattctttcgcaaggattgaatcttgcagcgctctttgaccgcagacaggactgtgacaagcttcaaaatagattcttatcacgcaatccagcaaaggttatcttgtcaagcatggaggttgttgcgcaatcaatgggatttaagacacacattcgcaattataagatgagggtggaaggtctaaatgccgacaagactagtcatctctcagttatggttgaagttttcgaagttgctccatcaatcttcatggtagaactacaaagagcagcaggagatacttcagagtataacacgttcgtaaataactactgcggcaaattagatgatatcatctggaaatttccaactgagaagggaaaatcaaggataccccggttatcaaagtctcattcataatctagtgctgtgtgttatcaattactatggacttaagtggatatatttgcagagtgtatcgcaattggattatgatattctaagtgtagctcttcgagtagtatatgtttgtatattcagagtccccatgtacaaagaggccgttttaattgaggtttccgtacctcgattccctgtgcaaagttttcatcgatgttttagactgcacatctgtatattttgtcgagagcatcagtttcttagacaccacctatgtatcatgtgtttgttgccaactagtgtcatttttgtaagatctaacttgtga

SEQ ID NO: 113805 - DNA, 1691 bp, Zea Mays
atggccccacgtcaaaaaaggagcgggccgtaccaaggctgcaaggcacctacacacctactccacgaacgaaacacacctctcctcttgctgtcctgcggtccacttcttcaactagttatcccaggttctcaactcccagtagaaaacttcacctgctggctggctgcctgcctgcccacagaaattgcgcccggccgccccccattcaccttcaaaaaaggagccaggcttcccatcaacgagggtgtcggccatctgagcagctcccctgcccctcgcagcggctactctacaggtctagcgactctttcgccatccatagagggaggaggcgcggcggagatggtgggcggtggcggcggcgggccgctgcggcgggtgggcaagtacgaggtgggacgcaccatcggggaaggcaccttcgccaaggtcaagttcgcgcagaacaccgagaccggggagagcgtcgccatgaaggtgctcgaccgctcctccatcctcaagaacaagatggccgaacagattaagagagaaatatccataatgaagcttgtcaggcatcccaatgtcgttaggctacacgaggttttggcaagccggaagaagatatttataattctggagttcatcactggcggcgagctattcgataaaattattcgtcatgggagactcagtgaagcagatgcccgcagatactttcagcagcttattgatggtgttgatttttgtcacaagaaaggagtctaccatcgagacttaaagcctgaaaatctcctccttgattcccaaggcaatcttaaaatttcagactttggactgagtgcatggcctgctcagggatctttccttctacgtacaacctgtgggactccgaactatgttgccccagaggttctcagtcataagggatataatggcgcacttgctgatacatggtcatgtggagtaattttatatgtattgttagcaggttatcttccatttgatgaagtggacctgactaccctttatggaaagattgagagtgcagaatattcattcccagcctggttttcaggtggtgcaaaatcactgattcgtagaattcttgacccaaatccagagacacgaatcaggatagaagagatcagaagcgatgaatggtttcagaaaaattatgaacctatcaaagaaatagaaaatgaggaaagtcaatctcgatgatgtcaatgcagcttttgatgatcctgaggacgataatgaggatgctttcgaagatgaaacaggtcctctaacacttaatgcattcgacctaatcattctttcgcaaggattgaatcttgcagcgctctttgaccgcagacaggactgtgacaagcttcaaaatagattcttatcacgcaatccagcaaaggttatcttgtcaagcatggaggttgttgcgcaatcaatgggatttaagacacacattcgcaattataagatgagggtggaaggtctaaatgccgacaagactagtcatctctcagttatggttgaagttttcgaagttgctccatcaatcttcatggtagaactacaaagagcagcaggagatacttcagagtataacacggtcagagcttttcttttgcacttcttactcttttcatatgattgcaactgatatactacctaaaactttatgcaaccagatacatccaaag

SEQ ID NO: 113806 - DNA, 2049 bp, Zea Mays
atggccccacgtcaaaaaaggagcgggccgtaccaaggctgcaaggcacctacacacctactccacgaacgaaacacacctctcctcttgctgtcctgcggtccacttcttcaactagttatcccaggttctcaactcccagtagaaaacttcacctgctggctggctgcctgcctgcccacagaaattgcgcccggccgccccccattcaccttcaaaaaaggagccaggcttcccatcaacgagggtgtcggccatctgagcagctcccctgcccctcgcagcggctactctacaggtctagcgactctttcgccatccatagagggaggaggcgcggcggagatggtgggcggtggcggcggcgggccgctgcggcgggtgggcaagtacgaggtgggacgcaccatcggggaaggcaccttcgccaaggtcaagttcgcgcagaacaccgagaccggggagagcgtcgccatgaaggtgctcgaccgctcctccatcctcaagaacaagatggccgaacagattaagagagaaatatccataatgaagcttgtcaggcatcccaatgtcgttaggctacacgaggttttggcaagccggaagaagatatttataattctggagttcatcactggcggcgagctattcgataaaattattcgtcatgggagactcagtgaagcagatgcccgcagatactttcagcagcttattgatggtgttgatttttgtcacaagaaaggagtctaccatcgagacttaaagcctgaaaatctcctccttgattcccaaggcaatcttaaaatttcagactttggactgagtgcatggcctgctcagggatctttccttctacgtacaacctgtgggactccgaactatgttgccccagaggttctcagtcataagggatataatggcgcacttgctgatacatggtcatgtggagtaattttatatgtattgttagcaggttatcttccatttgatgaagtggacctgactaccctttatggaaaggtttggttcttaactacaagccaataactcttttgagattaggtacttaaaaagagaggtatatgcattattttattaatgctacagaaccaatattggtttgatactcactacttatgaaatagagaagggggaggtagtagcgcaactgcaacttggcatacatgaactcacttcttactttactttgtaacttgtgtcttgtttaaattcaaaggaaataagcattggctctttagaatagatgtttgtatataagagtgcttcttatttccttttgcttctgagctgtatatatgtatttgttgctttcaccctttgtactcaattcacatatatttactggtggttttaacaagaaattttatcttagataattgattgttcttgtggaatgaaatttctatatcttgctgccttcttttcttaatgcagattgagagtgcagaatattcattcccagcctggttttcaggtggtgcaaaatcactgattcgtagaattcttgacccaaatccagagacagtaagttaagctcgacaatatttagatggaagaaacttgctatgagctgtaccttatcataatataaggcatattattatgctgttaactttccccagcgattctgcagtgctctgatatatccctgcagatactaagaactttgttaagactataattgtgacatattagcatgatgccataaggcctgctcaacaagtacaagcataactactgtttgctatgtcatatgttgccaattttattcaagctggaaacttatatgagttctcatcattaatgatatgaatttgtgtactttgtaaaaggctaatatcccaaacaggaatactaaccaaattcttggatttttaatgtaatgttcttggtctgatcggcatataccaatgagcgtatgtttggtttcacccaaaccggaggggattgagggggattgaatccctttctattcaattttgactaggaagggatttaatcctctccaatccccctcaatccact

SEQ ID NO: 113807 - DNA, 240 bp, Zea Mays
ttgaaggataaattgaagagttatggagttgaatgttttgaggacttactactggttgaggatacaaacaatcctgggatgaatcgtggctatgccttgcttgagttttctactcgacctgaggcaatggatggtttcaggatattgcagaagagggatgtagtctttggagttgatcgtagtgcaaaggtttcctttgctgattcctaccctcaagttgatgacgaaataatggcatag

SEQ ID NO: 113808 - DNA, 279 bp, Zea Mays
agaagcctttatgaacatggaggtcttcaggcagaaggtctaatcaaagcctggttcagagaaatgccgaggggggtactggactctatcccacctgaacaggtgatgcaatgccaatctgaagaggactgtgcttgggtatcgaaatgtcttccactagctgaagcagctttgcttgactgggctgttaatctgatggatgatgtagtccaggaagaacagataaacaagatgaatgatcgcaatattgctatggtttttgtgccaaatacgacttag

SEQ ID NO: 113809 - DNA, 2067 bp, Zea Mays
atgctattcaacatcccacactgcaaatcacaagctcctgtagccgccgtcgtagcagccatttccagcatccgcttctcctcctccctgccggcacttgttccgccgcctccgcccctgcacgatgagaacccgttcgctgcgctccgcggcctcccgggcctcgcgcgccagctgttccggtgggcggagactactccgtgtggcttcccccgctccgcctccgcgttcgccgccgtcctcatcccgctcgcccgagccaaccacatccgggccgcctaccctgtctccctccgcgccctgcacctcgacctcctcctccccctggtgtccctcctgtccgctcccctctctaccgctccacggtcactattgagcctcctcttacgcttgtccaccaagtactcgaaggaatgcaaagcccgcgacgccacgctcgacacctgttcgacgctgtgcttgtccgccttccgcgagatggcaagccacggcgtggcccctgacgttaaagactgcaaccatgtgctccgtgcattacgtgatgcggccaggtgggatgacatttgtgctgtgcatgaggagatgctccagcttgggattgagcccagtattgtcacgtacaatactttgttggattctttcttgaaggagggaaggaaggacaaggttgccatgctgctgaaggagatggagacccgggggagtggttgcttgccaaatgatgtcacgtacaatgtggtgattactgggttgaccaggaaaggtgacctcgaggaggcagcagagctggtcgagggaatgcggctgtccaagaaggcttcatccttcacttataacccacttatcactgggttgcttgcaaggggctgtgtcaaaaaggtatacgatttgcagttggagatggagaatgagggcattatgcctacagtggtgacgtacaatgcaatgattcatgggctgcttcaaagtgggctggtagaggctgcacaggtgaagtttgcggaaatgagggcgatgggcttgctaccggacgtgatcacctacaattcgttgctaaatgggtattgtaaggcaggtaacttgaaagaggctcttttgttgtttggcgatttgaggcgtgcagggttagcgccgacagttttgacctataacattcgtatagatggttattgtagattaggtgatttagaggaagccaggatattgaaagaggaaatgggagagcaaggttgtttgcccaatgtttgtacatatacaattctcatgaagggttcgcttaatgtgtgtagccttgctatggcaagagaattctttgatgagatgctgagcaaaggtttgcagccagattgctttgcttataatacaaggatttgtgcggagctaatcctaggggatattgccagagctttggagttgagagaggtgttgatgttggaaggcatatcttctgatacagtgacatacaatattcttattcatggactgtgcaagactggtaacctgaaagatgccaaagagctgcagatgaagatggtcagtaatggtttacagcctgactgtatcacatacacttgcttgattcatgcacattgtgaaaggggacttctaagagaagcaagaaagatctttaataacatgatctcagatggtttgctaccctcagctgtgaccttcactgttattattcatgcatattgtagaagaggaaacctttattcagcatatggttggtttcgaaagatgctggaggaaggagttgaacctaatgaaataacatataatgtcctcatacatgcattatgcaggatgggcagaactcaactggcttctcatcattttcatgagatgctagaaaggggattggtggcaaacaaatacacatatactttgttgatagatgggaactgtaaagtgggcaactgggaagatgcaatgagattctattttgaaatgcatcagaatggtattcatccagattatttaacacataaagccttggtcaagggatttgatggtcacgtgcaccatacaattgagtacttggatattgttattttgggtgaatag

SEQ ID NO: 113810 - DNA, 273 bp, Zea Mays
atggcggtcgcgacctccgatgaccaactccgaccaggaattggcggagttccaccggcgcaccgcggtgtttccggacgtaatccccatcgcaagcactgggctaacttcccacgtccaccagagggccccaaatcggcactagcgcctgaatttcaatggcggcgaggagctcagccgcccgggcattgttctttccgcagtcgactcaaggaggttgcgagggaagggagatgtaggaaggagaggcttcggccgcgttttcttaaatag

SEQ ID NO: 113811 - DNA, 415 bp, Zea Mays
cgcacatgaacaccgtcaccgctgcggcggcggcggccatcgcctcggaccccaacttcacggtggcgctggcggcggccatcacctccatcataggcggcggaggccatccagttccgattccaattcatcatggcgggcaggggcaaggacgacagcagcagggcctgaccccgacgagtaacagcaacgccaacaacaacaatgcggtggtcacgagcagcagcaacaacactgccaccagcaacagtgagacccagtgatgttcaaaattaagctgtattgttgattcattgttccctaactttttttttactttatttcgtttctgctagctagatacattacacctactagtatgtatgctaaataatactccgtgcgccccagaatataattctttttagcttttttt

SEQ ID NO: 113812 - DNA, 1336 bp, Zea Mays
cttgcaccacacccttcctcctctcctctcctctcccctctcctaaaccgctcggctggctctacacctgcagctaggcagccgacgtcggacttgggatcttgcatggacaaggcccacctcggaggaggcctgttagctctcgacgcgtcgccgcggcctctcggcttcctcaacctgctatcgccgccgacgtcgtccccgccgtttcacaggacaagaacgatggaggccgacgacgtccccgccgttccaggcaacaagggccgtaggtccatcgaggtggacttcttctccgacgacaaggacaagaagagcgctgccgctgcagctaacgacaagaaggaagacctgacgaccattaaccttcttcccggcagcaacgccaacgacgacgacgacgacgaggcggcgacccggctccggctgccgaacgaccaagacaggcagaacaggaacaccaacgagctttcggccatgcaatcagagcttgcgcgcatgaacgacgagaaccagcggctgcgcgggatgctcacccaggtcaccaccagctaccaggcgctccagatgcatctcgtggcgctcatgcaggcgcgggccgacggccagccgatgatgcctcctgcagtggcccagacactgccggtgaccgacgccgctgctgtcatgccatcgccgagacagttcctcggcctaggaccagcggcggctgccgaggagacgtcaaactcgtccacggaggtgggcagcccgcggccgtcgtcgtccgcaggcaggcggcaggaccaacagcaacaggcggcggagcgcggcgacagcccggacccggcggatccgtcgacaacagcaaggcagctagcgcagcagcaggaggccagcatgaggaaggcgcgcgtctcggtgcgcgcgcgatccgaagctcccatcatcgccgacggctgccagtggcgcaagtacgggcagaagatggccaagggcaacccatgcccgcgagcctactaccggtgcaccatggccaacggctgccccgtgcggaagcaggttcagcgctgcgccgacgaccgctccatcctcatcactacctacgagggcacccacaaccacccgctcccgcccgccgccgtggccatggcctccaccacctccgccgccgcctccatgctgctgtccggctccatgcccagcggggacaacttcctggcgcgggccgtgctgccgtgctcctccggcatggccaccatctccgcctccgcgccattccccaccgtcacgctcgacctcaccaacgggcccgcccggtgctcctcctcccgcgcgaccgccgccgcacctgcag

SEQ ID NO: 113813 - DNA, 1465 bp, Zea Mays
cttgcaccacacccttcctcctctcctctcctctcccctctcctaaaccgctcggctggctctacacctgcagctaggcagccgacgtcggacttgggatcttgcatggacaaggcccacctcggaggaggcctgttagctctcgacgcgtcgccgcggcctctcggcttcctcaacctgctatcgccgccgacgtcgtccccgccgtttcacaggacaagaacgatggaggccgacgacgtccccgccgttccaggcaacaagggccgtaggtccatcgaggtggacttcttctccgacgacaaggacaagaagagcgctgccgctgcagctaacgacaagaaggaagacctgacgaccattaaccttcttcccggcagcaacgccaacgacgacgacgacgacgaggcggcgacccggctccggctgccgaacgaccaagacaggcagaacaggaacaccaacgagctttcggccatgcaatcagagcttgcgcgcatgaacgacgagaaccagcggctgcgcgggatgctcacccaggtcaccaccagctaccaggcgctccagatgcatctcgtggcgctcatgcaggcgcgggccgacggccagccgatgatgcctcctgcagtggcccagacactgccggtgaccgacgccgctgctgtcatgccatcgccgagacagttcctcggcctaggaccagcggcggctgccgaggagacgtcaaactcgtccacggaggtgggcagcccgcggccgtcgtcgtccgcaggcaggcggcaggaccaacagcaacaggcggcggagcgcggcgacagcccggacccggcggatccgtcgacaacagcaaggcagctagcgcagcagcaggaggccagcatgaggaaggcgcgcgtctcggtgcgcgcgcgatccgaagctcccatcgtaaggaggagtttttgtttttcctttctctttctttctttctttctttctttcttctatctttctttattttttcctttctttctttctttctttctttcttctcatatggaagatgatcgtgggcagatcgccgacggctgccagtggcgcaagtacgggcagaagatggccaagggcaacccatgcccgcgagcctactaccggtgcaccatggccaacggctgccccgtgcggaagcaggttcagcgctgcgccgacgaccgctccatcctcatcactacctacgagggcacccacaaccacccgctcccgcccgccgccgtggccatggcctccaccacctccgccgccgcctccatgctgctgtccggctccatgcccagcggggacaacttcctggcgcgggccgtgctgccgtgctcctccggcatggccaccatctccgcctccgcgccattccccaccgtcacgctcgacctcaccaacgggcccgcccggtgctcctcctcccgcgcgaccgccgccgcacctgcag

SEQ ID NO: 113814 - DNA, 1163 bp, Zea Mays
gaagagtagccttgtctagcaagaagaagatagagggatgatgtgattatacgcaaaatactaaaacctagggtggtagtacaagcagtagttatgagcaggcctcttctctctctttcctgttccgttctttttctttttccctgcggaattccccgtcttccctagtgcctcgcttcgatatttcgattggattggattaccaagggacagagggagggaatcccacacacacctctggccctcgcgaggccaagggaagggaagcactcagcactcagcagcagaaggaccgccgtaaatggcgctgccggtggcgaagctggggaccctagcgctgcggacgctgtccaagcccatcgccagccgcctcaagagccaggccgccgtccaccccaagttccgcaacttcatcatcgccatcgcccaggcaaaccaccagatcaccacaaagatacaaaggcgcatttatgggcatgccacagatgtggcgatcaggcctttggatgagcagaaagctgttcaagctgctacagatctcatcggggaagcctttatcttctcggtcgctgttgctgctctaatttttgaggttcagagaaacgcaaggtctgaggctaggaaggaggaagctcgtagacaggaacttgaggaattgaaacgaagggaagagagtatagctaaagaattggaagatcttaaattgaagcttagtgaaattgagcagcttgctaaagggcgaggcctgacaggaatcttgaacttgaaacgggtccatggcacagaggtcggcaaggcagcagcacctctgcgtgagtaagcaatccggctttggcgcaggaaagtatgattccttgtcgcccccattatttggtaagacttgtgttgtcgtgctcaacctattctttggtgctcatattggatccacatttgtagtggttgatccatggacaccctgagacagtggtaataatacagcgtaacaaagaaatcaaattaaagcgcaatatgtatgtgctacttggtggcggtgaccacaaaatcagatgttaagatggattagggcttgtttggttgtatacttaaggtgtaaaaaatgccacgtttcagattaaagctggttgtttggactgttgcaactataaacgatagagacaaaaaca

SEQ ID NO: 113815 - DNA, 950 bp, Zea Mays
ttatctaataatctatttgtatgttcaactcaacttaaagggcagccaacatattagagccaacaatttggagcaattgaccaaactattgaaaaataattgtttttgtgtgtgtggctagaagtagtagctggtcaaatccttggatgccaagaagaagaagaagagtagccttgtctagcaagaagaagatagagggatgatgtgattatacgcaaaatactaaaacctagggtggtagtacaagcagtagttatgagcaggcctcttctctctctttcctgttccgttctttttctttttccctgcggaattccccgtcttccctagtgcctcgcttcgatatttcgattggattggattaccaagggacagagggagggaatcccacacacacctctggccctcgcgaggccaagggaagggaagcactcagcactcagcagcagaaggaccgccgtaaatggcgctgccggtggcgaagctggggaccctagcgctgcggacgctgtccaagcccatcgccagccgcctcaagagccaggccgccgtccaccccaagttccgcaacttcatcatcgccatcgcccaggcaaaccaccagatcaccacaaagatacaaaggcgcatttatgggcatgccacagatgtggcgatcaggcctttggatgagcagaaagctgttcaagctgctacagatctcatcggggaagcctttatcttctcggtcgctgttgctgctctaatttttgaggttcagagaaacgcaaggtctgaggctaggaaggaggaagctcgtagacaggaacttgagaattgcctatgagtccagccaacaacaacataggaaaacaatgccagaaggatcactgatcattttattactaaagcaagcctcatttctagatttccaaatagtccagtgaactgccccacaacctatcacaatt

SEQ ID NO: 113816 - DNA, 1808 bp, Zea Mays
tacaggcaaaatatttccggtcctcaaagctcccgcccgccctccttccctccctccctccggcgccagtccaggcacaggcaggcttcagtctccagagatggcgaggaacgagcccctagacttcgagaacgaggacgatccgctcctccccgccccgcgccccgccaagaggagcaaggtcatcggcatggatgatctcctgctggattactttcaatctggtaaaaaggacaagctcaaagttaaggctgccaagtctaagcatggccccaaaggaggatatgattcaggtgaggaagacgacagggctacacagcaagagattacagtctgcaaaatatttgaggaagttcagcaaaagggcaaagtgatggatgctagagacgatgtacccccatggggtcaacaattttttagatgccagaaccccccctcaaatcttagcaatggcggagttgagaattgtcatctcctgcaatcattctctgcaattgaagatataggttttgatctagagatgcatcaaggagaggggttcctcgaaggcatgctgttggatggatggcttctgaatttggttcgcatatgtggttttgttgaagactctgtagcatcgtggacgctgaccaacttgttgcattcacccaatgagaaattacaagtttctgcagctgacttttgggatggcattctttccttggatgaggctggtgaaccgttggtcaaccttgggtattttccaagttactctgttctaaaacgggctatgctgagctatggatatctatttgatacttcaggcactaaggcttcaatctctggaagcactgctgcaggtggccctgatgatagtctgcctcataacatcattgcttggttaagagttgtatctgcttgctgcaaaatcagaaaagtgcattccatcttctcgccttctgaggcagaagaacttcttgctattgccatttccctctttttggaccgtcgacttgaagggttgctgcttgttttgggagactgcctgaattcacttatattatacttcaatacgagtgagtgggaaactagctgtgtgatggtggctgaatcaattgctcagagggtcacactggacctcaattgtttaagggttgttgactgcatcactggtacaaataagcgcagcaaaatcctaaggagtcaggtggcacttcagctgctgaagatcagctttgggcttaaggtggcgaatgttgagaagattttgaagctagtcacatccatcaacgtgaaggagaaagaatgtgacttcttcaggctttatgtgtatctagtattgatggacaacttgctcttctcaagtgatgcatttagagataagactgggatggttgatgcttggcggaattatctgcgcaactgttccacccaaattgggtgcacggactggagattctatgctccaaaggcccgaaacaaggcttcttatcttctgcaaggttcaatcttgaaaaaaagcagtggcgatggtaaaagttgtgtccggtaatcaaaggggaccaaatgtctggtgcagcagtgcccaggttgtggttccattcgatgggcaacggcgaagtgctcatatcattccatgttttatgtacaattcttttttagttgttgtgttttagttcaaaaatgaactagcgagcgacaaatattcgagaacagagttagcagccagatttagaggggtgttgattgatgtatctgtgggggtgcttctgcttggttgattgacagaaacaaaaaggaaagagagcagcaagggatgattgggtgca

SEQ ID NO: 113817 - DNA, 2126 bp, Zea Mays
agggattccagcttctggaaccttcctttcgctatacgacctgagttcgcttcaggcagccgccgctctctctctctcccgcgtccgtcccaccttcgcaagccagccacctccctgagaggcctgaccgtgatttcggcgtggcatccaaaggcggtcaagattcgagaggccggaggaaccaagcgtagggcctccgaccccacgtcgtcgtccgcgcgcgccgcccgccgccgcagggagatgggggccgattactacaaggtcctcggcgtcgaccgcggcgccagcgacgacgacctcaagaaggcctatcggaagctcgccatgcgatggcaccccgacaagaactccaccaataagaaggaggcagaaaccaagttcaaggagatctctgtggcatacgaggttgcctgcccctccctctcactctccatgtgtttgtcttgccaggattattactgttccaaattcctcgcctttggggcttcgatccattcgctgtccctgtctttgtggttcatgctgacgaacaaaactgcctgtctgttataccggccagctctttggacacagtagtgaattcgatactgcaatctggaccacgcaccaatactgcaaaggatttaactttaagatgagctcgtgataataaaccaatcttagccagggagtaacaagttttagcttatcgatttgaggttctgattatctgcacagctgaattatacatttccctccatgattcgctttcctactgctactcttgcatctgttgtgttgaccaatcctgtgtgcgcctcttaggtccttagcgatcccaagaaacgtgcaatctatgatcagctaggggaagaagggctcaaggggcagccgcccccaggagcaggaggtcctggcacatctcccttcttccctggcggggctcattccaccgctcaccattttaacccgaggagcgcggacgatatatttaaagagttctttggatcccctggcatgggtggcatgagaacggaaccaggatttcaaaggtcaatgtttggcaacgatatcttctcttcgcgcttccgcgctgagggttccaccagtatgcagcagccattgcgcaaggcagctgcaattgagaatccacttccagtcggccttgcagatctctacaagggtgtgacaaaaaagatgaaaatctcaagagagactattgatgccagcgggagaatctcaaacacagaggatattctgacaatacaagtaaaggctggttggaagaagggaacaaggattacatttcctgacaagggaaatgaagctccaaatatgaaacctgctgatattgttttcatcattgatgagaagccccatgatgttttcactcgggagggaaatgatcttgtcgtgactgagaagatctcactggtggaagcactgactggctataccgcacgtgtcactacgcttgacgggcggagcctatcattgcacatcaactcaataatccatccaaagtacgaagaggtgatgcctggagagggcatgccagtgcccaaggaccccacaaagaagggaaatctgcggattaagttcaacataatgttcccctctaggctgacttctgatcagaaggccgggatcaagaggctattgggttcttaggccgccacctcaaatgacatcttctttatgatgaaagttgtttgtgaatattgccagtaatttgtttgtcacagtttagttttttaaagtggtgcccttagttttgccgatgtcctcatttttacccttagtcgtgtttttttttctaaagttttgctcttccagtgttctatagagcagaagggtaaaactgatgaaaaaaatatgactaagggtaaaaatgaggaacctgacaaaaataagggcacgaattaaaataggttttccggtgggtgggtagttgatgaattgtaaatcccaaacaaaccggccggcccttagcaaccacaacaagggtgaaccttcaccattttattttagtcaggcagagtgttgtgccctttgcattacggtattccattcagttacaggtgaattaataccgctgtgtaccgccaaccggatttacttaaagaagccaaatttgtatcgct

SEQ ID NO: 113818 - DNA, 1727 bp, Zea Mays
agggattccagcttctggaaccttcctttcgctatacgacctgagttcgcttcaggcagccgccgctctctctctctcccgcgtccgtcccaccttcgcaagccagccacctccctgagaggcctgaccgtgatttcggcgtggcatccaaaggcggtcaagattcgagaggccggaggaaccaagcgtagggcctccgaccccacgtcgtcgtccgcgcgcgccgcccgccgccgcagggagatgggggccgattactacaaggtcctcggcgtcgaccgcggcgccagcgacgacgacctcaagaaggcctatcggaagctcgccatgcgatggcaccccgacaagaactccaccaataagaaggaggcagaaaccaagttcaaggagatctctgtggcatacgaggtccttagcgatcccaagaaacgtgcaatctatgatcagctaggggaagaagggctcaaggggcagccgcccccaggagcaggaggtcctggcacatctcccttcttccctggcggggctcattccaccgctcaccattttaacccgaggagcgcggacgatatatttaaagagttctttggatcccctggcatgggtggcatgagaacggaaccaggatttcaaaggtcaatgtttggcaacgatatcttctcttcgcgcttccgcgctgagggttccaccagtatgcagcagccattgcgcaaggcagctgcaattgagaatccacttccagtcggccttgcagatctctacaagggtgtgacaaaaaagatgaaaatctcaagagagactattgatgccagcgggagaatctcaaacacagaggatattctgacaatacaagtaaaggctggttggaagaagggaacaaggattacatttcctgacaagggaaatgaagctccaaatatgaaacctgctgatattgttttcatcattgatgagaagccccatgatgttttcactcgggagggaaatgatcttgtcgtgactgagaagatctcactggtggaagcactgactggctataccgcacgtgtcactacgcttgacgggcggagcctatcattgcacatcaactcaataatccatccaaagtacgaagaggtgatgcctggagagggcatgccagtgcccaaggaccccacaaagaagggaaatctgcggattaagttcaacataatgttcccctctaggctgacttctgatcagaaggccgggatcaagaggctattgggttcttaggccgccacctcaaatgacatcttctttatgatgaaagttgtttgtgaatattgccagtaatttgtttgtcacagtttagttttttaaagtggtgcccttagttttgccgatgtcctcatttttacccttagtcgtgtttttttttctaaagttttgctcttccagtgttctatagagcagaagggtaaaactgatgaaaaaaatatgactaagggtaaaaatgaggaacctgacaaaaataagggcacgaattaaaataggttttccggtgggtgggtagttgatgaattgtaaatcccaaacaaaccggccggcccttagcaaccacaacaagggtgaaccttcaccattttattttagtcaggcagagtgttgtgccctttgcattacggtattccattcagttacaggtgaattaataccgctgtgtaccgccaaccggatttacttaaagaagccaaatttgtatcgct

SEQ ID NO: 113819 - DNA, 1274 bp, Zea Mays
gtactgctggtgccagaacgccgggtccaccggcgtcgggtgcgcccacggcgccaggtgccggggcggcgccaggtgacgcggccacacgggcagcatgggagtcgccgctgctgcttcagccgcggcggcgtgcggcggcgggtggccccacacgtgcagcgggcggcagaagcgcggcggcgggaacccgatggtcgtcggcaccacccacggcggcctggcggcgtccgtcgtcgtcgtcgtccttggagctggcggcgcgtacatgtggcgcttctgcgcccaggtggcggcctccgcctcccgcgccatcaggtgctttctgtgcgaccggtacttctgcaagtggctggcaatgttgtgccttgtgaggcagtccgtgcccatgatctccaggatcctggacggcacggccttgtcgatgcccagctgctccaccgcctgcacgaaccgccggtgcagctccggcgtccagtccacctgtaccttcaccttgcgcttgccgccgttggagttcttgcccgccgacttcttcttgctgctgtggccctctgccgacgccgacgacttgttggccccggacccggcaggagaagaatcctcctcctccgtcgtcgtcgtcgtcgtcgtcgtctgcagctttcttctggcggcggctactgctacacctttgtcgtcaccacatgtttgctccaacgacgacgacggcttctcttgtgctactgccgccgccggctggtcgtcggcgccgaatactgccactgccagcaggtcgtccgcaggaggggtggacgagaactcggcgaggagctccgtggtgtctacctccaggtcggggaggatgtccccgtcagcgtcgaagaagggcacgtcgcagctgaagtcgatgtagtccaggaggttgtcgtccaccatggcgaagcagtcgccggacgtcgggaacaccacatggtggtcgccgacgaagccgccgccgccgccgcagtgctgctccgccttgctgccgctgctagtagggccgcgcagcgtcgacacctcaagcatggatagggccgggtgtgtatcggtggagatcgagatatatgttcgatcgtatatatcaagattattctagactaataaagcaataataagcacgtagctagcttgtattatattgtatagtctgcgggcttgatctagctagctagctagagactggatagactgctagcagcttcgatctaatctgggacgacgacgacatagaatagaagaagagaaagatgaga

SEQ ID NO: 113820 - DNA, 1113 bp, Zea Mays
tggattgaatcaatcaattacttttatcgtacaagtacacactagagactatggtgttgtcacttttagtagcagggtgctaaagagagattgtattcctgagttcattcatttccgtctctgtaactggctatctgcttcaagtgaactcttgacattcttttcctgcatagacagccttccagtcttcatctttctaattatgcattagttcaatgacatgtttagcatgaacgaaacactatttggatgtgcttggaaaataaattttactttattattacgagtctgcacaatggggtctaggatgcagtctatggtaattggctaattgccttctgcacctaactgctagttagtggtctggaacttgtttagcatacagtaggtaacttttcagttcaattccacacacacaaacaaatatattatgttggtccgagtgaccaacagagttacagaaaagcaattccatattggtgggttatgtctcattattatatctagttaacaggtaacccaccgcttttcctaaattatagtttggttgtgaaggctgttgaatacctcaggagtcttctgtcatatacttacaaataggactccatgtagtttcagtagtgcttcttgtagccattatatgtaaatttgcaacctggtttttattaaaccactccttaagttttaggggtgctgatcaccagtgggatggtaatctttttgcaactgttggtgctcaagttgatatatgggatcctgacaggtatttatgattcatttctagcaattccaattttgtttctatgtgttaccagcatccacactcattttatctgcacaggtcggagccagtaaatagcttcgagtggggtaaacatacggttctctctgttctatttgatcctggggattgtaatattttgattaaatcagtgatcggagtctaacactctatgacgacctgcccatgtcatcaccagctagaaagctaataatgaaggtcagttgattctcatatttggaatcctgataaatgtacattttctctagcttctgttttttacctactgaattgacagtgatgtatgctttgactatgcagacaagctaagg

SEQ ID NO: 113821 - DNA, 543 bp, Zea Mays
gctagggtttccgcaccgcacctctagtcctccacccaccccaccccactaccgcgcgccgcgcatcgccgagtgcctcgtcggagacgagaccggcgtcatcgtattcaccgcccgcaacgaccaagttgatttgctgaagcccgatgccacggtgatcttgcgcaatgccaaaatcgacatgttcaaaggatcaatgaggcttgcagtggacaaatgggggcggattgaggctacagagccagccagcttcacagtgaaggaagacaacaacttgtcccttgtagagtatgaattggttaacgtggctgaataaccgtcgaagcgtttctgcccccctttcttctttttcacgcacgccataagatgataagaaaacgaacagcatctcgaagctgagtttatttgttacggtggtcgataaggtcaaggcttctgctgttacacctttggatccaatccattaagatgaattacccttgcatctattgtaattgtgtggttatccaaaaagggtgcatttaatcattactatttttttga

SEQ ID NO: 113822 - DNA, 810 bp, Zea Mays
acatccaaattcccaatcccaaccccaagtcacactccacctccgcaaccaaacgcgctagggtttccgcaccgcacctctagtcctccacccaccccaccccactaccggcgatggccaccgcggcggcacagggcggtagcgacaagccggcgctccggaagcccgtcttcaccaaggtcgaccagctcaagccgggcactaacgggcacaccctcaccgtcaaggtcgtcagcgccacccccgtgccgggccgcgcgcgcccgggcgcacccgccgccgcctcgtcccgcgcgccgcgcatcgccgagtgcctcgtcggagacgagaccggcgtcatcgtattcaccgcccgcaacgaccaagtccgtgtgatgtgctatcctcctttgcagttgatttgctgaagcccgatgccacggtgatcttgcgcaatgccaaaatcgacatgttcaaaggatcaatgaggcttgcagtggacaaatgggggcggattgaggctacagagccagccagcttcacagtgaaggaagacaacaacttgtcccttgtagagtatgaattggttaacgtggctgaataaccgtcgaagcgtttctgcccccctttcttctttttcacgcacgccataagatgataagaaaacgaacagcatctcgaagctgagtttatttgttacggtggtcgataaggtcaaggcttctgctgttacacctttggatccaatccattaagatgaattacccttgcatctattgtaattgtgtggttatccaaaaagggtgcatttaatcattactatttttttga

SEQ ID NO: 113823 - DNA, 781 bp, Zea Mays
acatccaaattcccaatcccaaccccaagtcacactccacctccgcaaccaaacgcgctagggtttccgcaccgcacctctagtcctccacccaccccaccccactaccggcgatggccaccgcggcggcacagggcggtagcgacaagccggcgctccggaagcccgtcttcaccaaggtcgaccagctcaagccgggcactaacgggcacaccctcaccgtcaaggtcgtcagcgccacccccgtgccgggccgcgcgcgcccgggcgcacccgccgccgcctcgtcccgcgcgccgcgcatcgccgagtgcctcgtcggagacgagaccggcgtcatcgtattcaccgcccgcaacgaccaagttgatttgctgaagcccgatgccacggtgatcttgcgcaatgccaaaatcgacatgttcaaaggatcaatgaggcttgcagtggacaaatgggggcggattgaggctacagagccagccagcttcacagtgaaggaagacaacaacttgtcccttgtagagtatgaattggttaacgtggctgaataaccgtcgaagcgtttctgcccccctttcttctttttcacgcacgccataagatgataagaaaacgaacagcatctcgaagctgagtttatttgttacggtggtcgataaggtcaaggcttctgctgttacacctttggatccaatccattaagatgaattacccttgcatctattgtaattgtgtggttatccaaaaagggtgcatttaatcattactatttttttga

SEQ ID NO: 113824 - DNA, 1392 bp, Zea Mays
acatccaaattcccaatcccaaccccaagtcacactccacctccgcaaccaaacgcgctagggtttccgcaccgcacctctagtcctccacccaccccaccccactaccggcgatggccaccgcggcggcacagggcggtagcgacaagccggcgctccggaagcccgtcttcaccaaggtcgaccagctcaagccgggcactaacgggcacaccctcaccgtcaaggtcgtcagcgccacccccgtgccgggccgcgcgcgcccgggcgcacccgccgccgcctcgtcccgcgcgccgcgcatcgccgagtgcctcgtcggagacgagaccggcgtcatcgtattcaccgcccgcaacgaccaaggtgtgtgtatgtttgtcctgctctccccctccctctatctatctcctctgctgtggatgactagatttcatgatctgccactgctatctgacgacgctacggaggaagatgagaatataaacaagattttattatgtttacttgtgatgactatatatatagatatatataagaaaagctggggagatgaccttgtcttgtgaatttatatcacgattgtgtttggtttgtggatccagcttatcctcatcgtgagttcattccatgaatctggtaaaatcatcccattctcatggttgtactaataatcattaacttgtgtgtgaggaattagggagtggggaatcatttcattctattccacacaaaaaaaaaatactaagcactgcttagggggtcaagtgacatcaatgctttcaaatgtgccattgttaccttgattccaggtttgcatatattagtaaaaggacgaaatcatctatttgtgaactgtatgactgcaccccagagtgtgtactgtgcacgctacatacactatcagcctctcattcatcattggcttgttttcatggttgctatcatgttcaactaattgttctgactgtgattttttcttttggataactttcagtccgtgtgatgtgctatcctcctttgcagttgatttgctgaagcccgatgccacggtgatcttgcgcaatgccaaaatcgacatgttcaaaggatcaatgaggcttgcagtggacaaatgggggcggattgaggctacagagccagccagcttcacagtgaaggaagacaacaacttgtcccttgtagagtatgaattggttaacgtggctgaataaccgtcgaagcgtttctgcccccctttcttctttttcacgcacgccataagatgataagaaaacgaacagcatctcgaagctgagtttatttgttacggtggtcgataaggtcaaggcttctgctgttacacctttggatccaatccattaagatgaattacccttgcatctattgtaa

SEQ ID NO: 113825 - DNA, 1198 bp, Zea Mays
cccggccttcgttggtgcgcaaacgacgacgacgacgacgtgcccagtgcgcggccggccggggattcatatcgaatcggatcggaggggaagcaggagcccgcagggggcggctagcgctgtctcaattcaaggagctgaggacgacctgtccgtccggagctgatcgagaaacggaggggcggttccagtttcagtccagctagctagctagctagaagatcccattcgctgacagatgggttcctacatccaaggagatgatgaggtccctgtacgagctggacgcgcacctggaccgcttcctccggtcggccgcggcggcgcgcgtgggcacggccccgttcccgcgcgaggcgctgcggcgcatcctgatccagatgaccgccgcctcgggctgccgcatgggctccatccgctactggctcagctccgggcccggcgacttcctgctgtcctccaggggctgcccgtcgccggcgttctacggcgtggtgatcgcgtcggagtacgagcagtgcggggtggacggcaccggggtgcgcgcggtcacggccacggtgcccatgaagccgccgcagttcgcgaccgtgaagaacgtgaactaccttcccaacgtgctgtccatcatggacgccgaggaccgcggcgccttcgcgtccgtgtgggtggacgaccaagggtacgtggccgagggccccatggtgaacgtggcgttcgtgacgcccgagcgggagctcgtgctcccggccttcgacaagatcctcagcgggtgcacggccaagaggatgctcgcgctggcgcctcgcctcgtggacgccggcctgctcgcgggcgtcagcaccagggacatcacagccgaggacgccaagcgcagcgccgagatggcgttcgtcggcagcggcctccccgtgctgcccgtcgtcgagtgggacggcaaacccatcggagacgggaaggttgggaagctgatgccggcgctgtctgatctgctgtgggaggacatgaagtccggtcccgacaggatccccgttccatacaagcagtagcctgagcgaaggcgaagccatgacatgtctctctctctctctctgtgtatgtgtttgcagtcgaatggtgattgccttgcctgaataaaaataaacctctctctgtatatctgagcgaatcgttttggaaatacgagcagattccatcc

SEQ ID NO: 113826 - DNA, 1488 bp, Zea Mays
cccggccttcgttggtgcgcaaacgacgacgacgacgacgtgcccagtgcgcggccggccggggattcatatcgaatcggatcggaggggaagcaggagcccgcagggggcggctagcgctggtgcgtgcttcctccattatattatcattgcgcctcgtcctccccaatcctcattgcccatcacattccatcgaccagtctcaattcaaggagctgaggacgacctgtccgtccggagctgatcgagaaacggaggggcggttccagtttcagtccagctagctagctagctagaagatcccattcgctgacagatgggttcctacatccaaggagatgatgaggtccctgtgtacgagtcgggcgccgaggtgcttgcgaaggtgcaagagaaatgggcggcggcggcggcatcgcggcctcctccctacccggccatgtactcgagcgtgttcggcggcatcatcctggacccggccatgatggttctccccatcgacgaccacatggtccaccggggccacggcgtgttcgacacggccatgatcctggacggcgccctgtacgagctggacgcgcacctggaccgcttcctccggtcggccgcggcggcgcgcgtgggcacggccccgttcccgcgcgaggcgctgcggcgcatcctgatccagatgaccgccgcctcgggctgccgcatgggctccatccgctactggctcagctccgggcccggcgacttcctgctgtcctccaggggctgcccgtcgccggcgttctacggcgtggtgatcgcgtcggagtacgagcagtgcggggtggacggcaccggggtgcgcgcggtcacggccacggtgcccatgaagccgccgcagttcgcgaccgtgaagaacgtgaactaccttcccaacgtgctgtccatcatggacgccgaggaccgcggcgccttcgcgtccgtgtgggtggacgaccaagggtacgtggccgagggccccatggtgaacgtggcgttcgtgacgcccgagcgggagctcgtgctcccggccttcgacaagatcctcagcgggtgcacggccaagaggatgctcgcgctggcgcctcgcctcgtggacgccggcctgctcgcgggcgtcagcaccagggacatcacagccgaggacgccaagcgcagcgccgagatggcgttcgtcggcagcggcctccccgtgctgcccgtcgtcgagtgggacggcaaacccatcggagacgggaaggttgggaagctgatgccggcgctgtctgatctgctgtgggaggacatgaagtccggtcccgacaggatccccgttccatacaagcagtagcctgagcgaaggcgaagccatgacatgtctctctctctctctctgtgtatgtgtttgcagtcgaatggtgattgccttgcctgaataaaaataaacctctctctgtatatctgagcgaatcgttttggaaatacgagcagattccatcc

SEQ ID NO: 113827 - DNA, 3082 bp, Zea Mays
cgccatcgcttcctgttcctcttcttccgccgccgccgtacgatcacactagcaccgccagccgcaaggtcccatggacctcgacccggcctatcccccatcagcctgcgccgacgcctggccctttgactcgctcaccacgtccctgctcttctccccgcagctcacgccgataccggccaactcatccttctcctggctcaccccacactcgccgctctggctcttcgaggaccgccacctgctcccgctcgacgcgcccgccgtcttcgaagaggtccagcggccacgctccgggaattctcacacttcaagcaagccagctgaacagatcagtcacagatggcagtttcatctgtccctggacgaagatggcacagacaactccagcttgttcaaggagaagctgacacacgctcttcgctacttcaaggagtccacagatcaacatctgctggtccaagtctgggcaccagtcaagaatggagaccgctatgtgctcactacttcaggacagcctttcgtgcttgaccaccagagcattggcctacttcagtacagggctgtatccatgacctacatgttttcagttgatgcggaaaatgttggagacctgggcctacctgggcgtgtctataagcaaaaggtgcccgagtggacaccgaatgtgcagtactatagcagtggtgagtaccaacgacttaaccatgcgatcagctacaacgtccatggtacagtcgccctgcctgtttttgatccttccgctcactcgtgtatcgctgttgttgaacttataatgacatcaaagaagataaactatgcctgcgaggtcgataaagtctgcaaagcacttgaggcggtaaatcttaaaagcactgaaatacatgaccatccaaatgtccagatatgcaatgaaggccgtcaagctgcgctggtcgaaatactggagatcttgaccgtagtatgtgaagagcacaagcttcctttggcacagacctgggttccttgcaagtatagaagtgtcttggcgcatggtggtggtttaaaaaagagctgcttaagttttgatggaagttgcatgggggaggtctgcatgtcaactagtgatgtggcgtttcatgtgattgatgctcatatgtgggggtttagagatgcctgtgtcgagcatcacctacagaggggacaaggagttcctggaaaggcgtttatctcacacaaaccttgcttttcaaaagatatccgcaagttctgtaagttggcatatccccttgtacactatgctcgcatgtttgggttggctggctgctttgcaatatgcttgcaaagttcttatactggaaatgatgactacatattagagtttttcttgccgcccgattgtagtgacgaagatgaccaaaatgccttactggagtctgtattaactctgatgaagaggtgtcttcggagcctaaaggtagttggtgacagagatttgagtggggtctctcttcaccttagcaatgtgctaaaacttgagaatgaagaattcaagacagatgcacagtttgataactctgatggttccctttgccaatcacctaacggtgatagacatggaggatcccatgagtttgatggtgggaacaagaaggttttggatgtgccagagggacaattgttgactgatgacttctctcaaggcaatggtacttctgctggcagaccaaatggtagcggtgcttctgattcttctgtgcttcacaaaaccaacaaaccccctgaaaggaaacgtgggaaagccgaaaagactatcagtttagaggttcttcagcaatatttttctggaagcttgaagaacgcagctaaaagccttggtgtttgtcctacaactatgaagcgcatttgccggcagcatgggatttctcgttggccatctcgaaaaatcaataaggtcaaccgatctctctcgaaactaaagcaggtaatcgagtctgttcaaggctccgatgcggcatttaatctcacatctatcacaggtcctctccctattcctgttggcccttcattggattctctcaatgtagagaaattaactcaaagtaaagtggcagaactttcaaatatcgctgttgatggtgacagagattctttgcaaaagtcacttggaaatgatggccattttggtatagtcatgccccagcaaggatctacagaccataacaatgacacacagcttgaagctgacaaggcgtctcactcgagaagttcgtctggagaaggcagcataaattcacgcacttcggaaggctcatgccagagaagtccagcgaaccagacatttgtttgcaagccaattgcttcaacattcgcagaacctcaacttaatccagaggagttcaataaagagcctttccaagaaccacaactaccactttccaggatgctcattgaagattctggtagctccaaagatttgaagaatctcttcacttcaacatctgaccaaccatttttggcccctcccaataatttggtgccaatgaagcattcagggtctgtaacgataaaggcgagttttaaagaagatattgtgaggttccgtttctcatgctcaggcagtgttattgtattgaaagaggaggtagcgaaaaggctaaggatggatgttggcacgtttgatatcaagtatctagatgatgaccatgaatgggtaaagttgacgtgtaattcagacttggaagaatgcatggagatctcacggctttcgggtagccatgtcatcaggttatctgttagcgatattgcgacacactttggcagttcttgtggaagctccggttgatatgcctgtcagccttttgctctgatcaatgggtactcgaaagtgcttgtaccatgagttcagttccacttgaagagttgtacttttgttgctagttagcattactgcattagcgggagcattagttgcttcattgtgtttgataaatgtatcattgtatttttccgcaaaatgcatgtaattgtgcagaatgcacttgtagtcaactttgtatatgttatgtgcaagaaattctatttcaagttataaactagataa

SEQ ID NO: 113828 - DNA, 1510 bp, Zea Mays
atcatcttccccgtccgtcgcattcatccgatccgccccctcctctcccatggcccatcacccctgctccaccaatctctagcgccttgcgcaccagcaagcttccaaatctctgctctactcttggacggacagagaaagggaggggacccaaaccagatcttggcaacaccactgctccacccaaacacaggtagagtagagtagagtagagtagggctgtggtggttcaactccctcccatgttcatgggctcataggtgaaccaccgccgcccacccagggcattggggcttcttcgtctcctccccccccttcaaaaactcctgctttcttgggggttttggttcccgcacaaggtcggagccacggagaggggaggggtcttgctgctacaacagctgggcctgggaggacgaatctatcttggcaacaggtgagggaagccgtcctgtttgcgcatggaggcggtctcaatgtcgccgtcaaccgtctcctcccacacccacgacgaccacgacgccgcttccgtcaccgaggccatgtccttgcaggaaggcctcctcttctccgacaccctcaaggacctgaggaatctgcggtcacagctgtactcagcggcagaatattttgaagtattttacaggaacaactcgcacaaatctactgtgatgacgagtttgaaagattacacagttgaggcccttgttagcacagtggaccatctgggttttgtgtcatacaaggtggataaccttgtcagcgagaaagctgtcgaggttaaggagactgaattcctagtgtcttcagttgaacagagggtacgaatttgccaacagacaactgaccaggaggcaagatcccagcaagctcttcttatcaaggcgccaaagtatcataggcgttacatattaccaggcctggatctactggaatcttccatccacccggtttcagaacctccacggtatagcaggcagtatacaggccgcaagatgcacaagtcccagtcttccatttctactccagttcgtcggcaggctacgatgaggcgtgaaccatctcctacacctaacgatcggtcgcggtcgttatcgccttctcgtaaagcacgagctaaatctccatctcctcgaatcgtgaacacaaatactgcaagagaaacaagggcaggctccccgataccaaattccagcccgatggcacggtccgcctctacggttgcaagaagaccgccttcgaactcgaggcatttgagactagcttccatgcagttgcacagcgactgggagcagcaggagagaagctcaagcaaaggcaggaggggtttcctcaggtcgctgctcacgaggcgccggtggaggaacgacgagtcgtccttgtacagttacttggatgagtactgattgctggaatgttggaactgaaaaaagtctggtgttaactgaatcttctatagatggatgcgatgctctctgctttgccaaaaggttttggtttcccgtttcca

SEQ ID NO: 113829 - DNA, 1621 bp, Zea Mays
atcatcttccccgtccgtcgcattcatccgatccgccccctcctctcccatggcccatcacccctgctccaccaatctctagcgccttgcgcaccagcaagcttccaaatctctgctctactcttggacggacagagaaagggaggggacccaaaccagatcttggcaacaccactgctccacccaaacacaggtagagtagagtagagtagagtagggctgtggtggttcaactccctcccatgttcatgggctcataggtgaaccaccgccgcccacccagggcattggggcttcttcgtctcctccccccccttcaaaaactcctgctttcttgggggttttggttcccgcacaaggtcggagccacggagaggggaggggtcttgctgctacaacagctgggcctgggaggacgaatctatcttggcaacaggtgagggaagccgtcctgtttgcgcatggaggcggtctcaatgtcgccgtcaaccgtctcctcccacacccacgacgaccacgacgccgcttccgtcaccgaggccatgtccttgcaggaaggcctcctcttctccgacaccctcaaggacctgaggaatctgcggtcacagctgtactcagcggcagaatattttgaagtattttacaggaacaactcgcacaaatctactgtgatgacgagtttgaaagattacacagttgaggcccttgttagcacagtggaccatctgggttttgtgtcatacaaggtggataaccttgtcagcgagaaagctgtcgaggttaaggagactgaattcctagtgtcttcagttgaacagagggtacgaatttgccaacagacaactgaccaggaggcaagatcccagcaagctcttcttatcaaggcgccaaagtatcataggcgttacatattaccaggcaatttcatgctctattttatttgttaatgtattatatagcagtccttttattttttttggttcgtacaacaacatacagaccatcatagataggttgtattttgtataggcctggatctactggaatcttccatccacccggtttcagaacctccacggtatagcaggcagtatacaggccgcaagatgcacaagtcccagtcttccatttctactccagttcgtcggcaggctacgatgaggcgtgaaccatctcctacacctaacgatcggtcgcggtcgttatcgccttctcgtaaagcacgagctaaatctccatctcctcgaatcgtgaacacaaatactgcaagagaaacaagggcaggctccccgataccaaattccagcccgatggcacggtccgcctctacggttgcaagaagaccgccttcgaactcgaggcatttgagactagcttccatgcagttgcacagcgactgggagcagcaggagagaagctcaagcaaaggcaggaggggtttcctcaggtcgctgctcacgaggcgccggtggaggaacgacgagtcgtccttgtacagttacttggatgagtactgattgctggaatgttggaactgaaaaaagtctggtgttaactgaatcttctatagatggatgcgatgctctctgctttgccaaaaggttttggtttcccgtttcca

SEQ ID NO: 113830 - DNA, 2283 bp, Zea Mays
atggcgcaaggagcaggacgggacccggaggagctcttcgaggagctgtggcgcgcctgcgcggggccgctcgtggagttgccccagaccaacgaaagggtcttctacttcctccagggtcacctagaacagctgcaagagccgacggacccggcgctgctggctgagcagatcaagatgttccaggtgcccaacaagatcctctgcaaggccgagacagaaacggacgagatgtacgcccagatcactctgcagccggaaccagatcaagtggatctaccccaattacctgaaccgcccctgcaggagacgtcaaggcccgtggtgcactccttctgcaagatcctcacaccatccgacaccagtactcatggcggtttctccgttcttcggcgtcatgcaaacgaatgcctcccagcactggatatgtcgatgccgaccccgacccaagagctcatcacaaaggacctacatggatctgaatggaggttcaagcacatatacaggggccaaccccgtcggcaccttctgactactggatggagcacgtttgtcacatcaaagaagctgattgctggtgacgcgtttgtctacctgaggttaagccaaagccaatacatcgtcaggctgaacaagtacctggaatctagtaaaattggattcgatgtgggcatgaggtttaagatgagttttgaaggggatgacgtccctataaagaagttttctggaacagttgtcgataaaggagatctttctccacaatggcaaggttctgaatggaagacattgaaggtcaaatgggacgaagccacaaacttaaatggccctgagagggtttcctcctgggaaattgaaccattcgatgcatccgcacctgccatcaccatgcccgtgcaaccatcaatgaaaaacaaaaggcctagggagacagctgaaggcctggatattcatgcactggaacctgctcaagaattctggctctctggaaggcctgaacagcatgagaagacaagcgtaagctccagcgaacccaaacatcaagtcgcttggacaagtgaacgcgcaggatacagtgccatgagcagttcaatctgtcagaattctgcagtaactgggagctggttcaagggcttcaattcctccggctcacacccttccctgccagagatctcccagaaactgtttcaggtcaccagcaacgacgcgagggttcctccttggcctgggctctccgcttatcatgctgacgagccctcttccaagctgtcctgcaacactgctctgtgcagctaccagaccgaggaggtggctccaagattttccaatgccgtcgaagaggaaaagaaggagcccggcatgttccgtctgtttggcgtcaatttgattaaccatgctaggagtagtgctaccgctgacaagacgagtgtgggagcaggggaaacatcggcgcgagctgctggttcttttgaagactctgctcagctatcaagagtgacgaaggatcatacgcacatggtgaacggaagcccccgagaaatccaaagccaccagagttgcagtggaaggagtcgtatcaaggttcaaatgcatggaaatgacgtgtgcagagctgtggatttgggaaatctggatgggtacgagcagctgatgggtgaggttggagagatgtttgagatcaaagaccttggctccaaagagaaagaggaatggaaggttactttcattaacgacgagaatgagacaatggaagtcggagctgttccttggcaggagttttgccagatggtgaggaagatcgtgatccattccattggagacaggggccatatggaggcttgcccttgcctggggcaggatgggaagagggactattagaagaagggatttttttttttggctggggcagtcaggagatgggtgctgctgaaacatgatggcgtagcttgtcgatgacaaagaaggcaacagattggttgctggcgtcagttcttccttgagaaaaaaattcagtggaaggaagaagtgatgtaacataggatttgcagaaaagatttgataatgcgtcttttagaagtttggtttggtttaaagatgacaagttaatgtgtgtctagtgatctgcctaaagccttagcgacgggcaacaagcaataacaaggatggatgatgaccttaccttgggtatgttagctgtgtaaatattatgtatgtatgtatgggacattaaattggttggcatacttgactcctgatttatattgtacgtagtgtgttgcagtgctc

SEQ ID NO: 113831 - DNA, 2335 bp, Zea Mays
ctttctctctctgcgcctgcgcctttctcttctccttctccttctccctcctctcaaccccaacaatctctgtctccccatctcctctcaacaaggcggcctcaacaaagtcccaccgcacctttctttaatggagcgagggtgagcctaacaaacactcgacacacaggaggaggtgctgcccgcttctcccctccctcagtctcactcgctccgctctcctccccgagaccaggaggccaagccaagaaccgcaaaccctcaggccgtggccatggcgcaaggagcaggacgggacccggaggagctcttcgaggagctgtggcgcgcctgcgcggggccgctcgtggagttgccccagaccaacgaaagggtcttctacttcctccagggtcacctagaacagctgcaagagccgacggacccggcgctgctggctgagcagatcaagatgttccaggtgcccaacaagatcctctgcaaggtcgtcaacgtcgagctcaaggccgagacagaaacggacgagatgtacgcccagatcactctgcagccggaaccagatcaagtggatctaccccaattacctgaaccgcccctgcaggagacgtcaaggcccgtggtgcactccttctgcaagatcctcacaccatccgacaccagtactcatggcggtttctccgttcttcggcgtcatgcaaacgaatgcctcccagcactggatatgtcgatgccgaccccgacccaagagctcatcacaaaggacctacatggatctgaatggaggttcaagcacatatacaggggccaaccccgtcggcaccttctgactactggatggagcacgtttgtcacatcaaagaagctgattgctggtgacgcgtttgtctacctgaggagcgagaccggacagcagcgtgtgggagtgaggcgcctcgtgcagaagcaaagcacaatgccagcatctgttatatcaagccaaagcatgcatcttggggtgcttgcaagtgcatcacacgctattaggactcattccattttcctagtgtattatagaccaaggttaagccaaagccaatacatcgtcaggctgaacaagtacctggaatctagtaaaattggattcgatgtgggcatgaggtttaagatgagttttgaaggggatgacgtccctataaagaagttttctggaacagttgtcgataaaggagatctttctccacaatggcaaggttctgaatggaagacattgaaggtcaaatgggacgaagccacaaacttaaatggccctgagagggtttcctcctgggaaattgaaccattcgatgcatccgcacctgccatcaccatgcccgtgcaaccatcaatgaaaaacaaaaggcctagggagacagctgaaggcctggatattcatgcactggaacctgctcaagaattctggctctctggaaggcctgaacagcatgagaagacaagcgtaagctccagcgaacccaaacatcaagtcgcttggacaagtgaacgcgcaggatacagtgccatgagcagttcaatctgtcagaattctgcagtaactgggagctggttcaagggcttcaattcctccggctcacacccttccctgccagagatctcccagaaactgtttcaggtcaccagcaacgacgcgagggttcctccttggcctgggctctccgcttatcatgctgacgagccctcttccaagctgtcctgcaacactgctctgtgcagctaccagaccgaggaggtggctccaagattttccaatgccgtcgaagaggaaaagaaggagcccggcatgttccgtctgtttggcgtcaatttgattaaccatgctaggagtagtgctaccgctgacaagacgagtgtgggagcaggggaaacatcggcgcgagctgctggttcttttgaagactctgctcagctatcaagagtgacgaaggatcatacgcacatggtgaacggaagcccccgagaaatccaaagccaccagagttgcagtggaaggagtcgtatcaaggttcaaatgcatggaaatgacgtgtgcagagctgtggatttgggaaatctggatgggtacgagcagctgatgggtgaggttggagagatgtttgagatcaaagaccttggctccaaagagaaagaggaatggaaggttactttcattaacgacgagaatgagacaatggaagtcggagctgttccttggcaggagttttgccagatggtgaggaagatcgtgatccattccattggagacaggggccatatggaggcttgcccttgcctggggcaggatgggaagagggactattag

SEQ ID NO: 113832 - DNA, 1297 bp, Zea Mays
tgaaatctggacagaaaagtccagtctgtcgtggtccccgttcctctgctgcagaggtgcaggcaaccaacaaaagcttcccttcccctccagcctccactctcctctccttttcttccgctgttccgcatcgcatcgcatcgcctcgcctcgccgccagcgcaactccagccctggccgggatctctttcacccccccctctctctccgccgcttcgctcccccgtctcggggcctgcctcggatgctcccggcctcgcatccgctgctctacgcctgcgtcttccgcgacacccacctcgtcgccgagctcgaccacgcccactcccactcccagagcaccgccacctccgccgaccccgtcgcttccgacgccccctcccccgcccctgacgacgacctcccggcgctcgccgctgcgctcgtcgccgccgctccgccgcaccaccgccacctcacacacacagccgccgggcgtgcgcacgcgctgctcctgtccccgccgctcgcactcgccgccgtctcgcgggcgccccacctcccggcatcgcagctcctgctcttcctccgccgcctgcgatgcctccccgaggcccggatgcgggacgagatgccgcgcctagcgctgcgcttgccactcccgccgggcgacgacgcgcgcgaggcgaacgaggtcgccgccgcggaggcccacgcggaggaggaggccgcgcggagggacgctgacctagccgcgcggaccacgcccaagagggaccgagcctcgcaccgggggcgggccggacccagctggacgtggaggcggcagctctggatggtcatccttgcggatctcctcctcctcacaatcctcttcgccgcctggctcgcagtctgccggggattcagctgcattggtcggtaaatagctacacaacctccaaggctgctgctcaatttttaagcaagaaatctggagtgcagtttgtttctcagacgaaaaagtgggtcataccaaccataactcggttgtaaggtgccaatattcgcaaggaaaggtgctttgccccccgcgcgcgcatactgttacgtctttattgtatgaatcgtgtttaaaagtgaatggcaacagtcctggtagactacataagtttgaatttgatggttttggtatggtgatctgtaaacccggtagtgcaatttttttgttcattttcctatagaaagcaaatgtcaaaattttgaccatggcagactcgggtatatgtgaatcttattgtcatgtaatatttgaatatttgccaggcatcttgttctt

SEQ ID NO: 113833 - DNA, 1319 bp, Zea Mays
gaactgtttactttattacctagtctcatcctcttatcagaaagcaaggcagccactcaaaaactctgctagcttctccaccagaggagagcacgtactttcctccacagccacagaggtaacccatggggtgcgcgagctccaaggccagcggcgacgtcgcggtggccgacgtctaccgcccgccgcccaccagcgtttccctcttcgacatcagcgccgtcgaggagccctggctcatcgccaagcagaacaaagccgctgatgacgacgacgacgacgaggaggaggaggaggaggaagagacgaccgacgacgacgaaaagcagcccgccgccaagaccgtggtgccgctccctctcctcgacaagctcgagggctacgagctcgctccggcgtcgtggtccgaggtcagcaaggccctggaggacatgaagcccgtcctcgactccaagtcgccgcctgctcctgctccttctcccaagaagaaaaagactaagaagaagaagaagaagaagactaagacgaagcagcagcagcagcagccgatgcagcccgtggtgcctgctgccacggacgacggcgacgctgctgctggtggcaagaaggcgccggcgacgtcgtccgtcgacgacctaccagacagcagcaggcccgcgccgccggagctcgcgggtcggcgcgtcgtgaaggacaacccgttcctgacgcgcgaccgcgagagcaacaagggcgccggtggtgacggcggcccacggtggaagcggcgggacccgttcgagggctgccccgagcgccggcccccgggcgccgcgggcggcggcgtggtgctgtacacgacgacgctccgcggcgtgcggcgcacgttcgaggactgcgagcgcgcgcgggaggcggtggaggcgtgcgccgcggcggcgggcgtggaggccgtggacgagcgcgacgtgtcgctgcacggggagtacctccgcgagctgcgggagctgctgcccggcgacggcggcgcggcgcctccgccgcggctgttcgtgatgggacgctacgtgggcggcgccgaggagtgcgccaggctggccgagtccggcacgctgcgggagatgatgcgctgggtcaaggcccgcggcgaggcgtgcgcggccaaggacggccgcggctgcgagggctgtggcggcgcgcggttcgtgccgtgctgggagtgcggcggcagctgcagggtgctgctgccgccgccggacggagggacaccaaccaccaccacggagaggtgcgccaagtgcaacgagaacggcctcatgatgtgccccatctgccactga

SEQ ID NO: 113834 - DNA, 707 bp, Zea Mays
gcttcccctccggttcctctcccagagctgaacctgcatccagatcggtggccaggccactgcgtcgcagcgaggagcttctcgggtcgtgcacgggacaagaacgtggtcgaggaagccgagaagctcgccatgagcctgagccggtcaccatgggctaactccacagactactccagcaagagcgcttactcggttgcacagtacagcagtccattccgcatcattggccgtgtcaatgaggttgtatggcattctcaaaggttgcaagctgtgttctaatatcagaaattacatcttgcatctgcttcaaggactccttccgcgcgcacagctcatcggtcactctgctcccgggacatcgaattcgaaagccttgccaactgactcggaagaaatggaacgagggtcccacatgagaggctcgatatcagaggctcggcgagcgatctccatgaccagcatgtctagattgagcagcttctcagatccaaacgcggtgtcacgggaatctatacgtgagcccttcttctcgctctagctgctccttccgttcacgcccaaccaaaacgagttctcaaccgaaccctagccgccgcaccttgccgccgcaccacagcctccgcaccacagccgccacactcaaaacaccatggatcgaactgctcccgtcgtcgctgttgcagaggctgttgatgccgctcgtg

SEQ ID NO: 113835 - DNA, 1192 bp, Zea Mays
gctaaccccaaaaacacacacacacacacactgcctgtttattttgtggacctatagcatattcccgtggtctccccccttttgctttgcttgccgagacggcgaccatggcgaagcagcagaatcctatccccatcccgatgccgctgtcgctgtcgctgcccctcgtcctcgtcgcgctgctcctgccggccgcccgcggcgccgcggagacgccgcagtacacgacggtgcacgcggagtcggacttcgaggtgcggctgtacggcgacaccgtctggatgtccgcccccaccccggacatcccttccttccacgtcgccaccaagctcggcttccacagattgttccagtacctgatgggcgcaaacctcaactcttcgaggatcaggatgaccacccctgtgctcacgagtgtggttccaggtgcagggcctctgcgctcctcggcctactccgtccggctgtacctgccggcgaagttccaggcttcccctccggttcctctcccagagctgaacctgcatccagatcggtggccaggccactgcgtcgcagcgaggagcttctcgggtcgtgcacgggacaagaacgtggtcgaggaagccgagaagctcgccatgagcctgagccggtcaccatgggctaactccacagactactccagcaagagcgcttactcggttgcacagtacagcagtccattccgcatcattggccgtgtcaatgaggtgtggttcgacgtcaactgcagatctacatctactgctgctggtgttgagtcctactgaaaaaaaaacctgccagatgtgatggataataataatttgcatgtaaaacacaagctgtcctgctttattccatctcttactcctagcctacaaattgcctcagcaatcgttaaccgccgtcgtcatcatcagattggcacgtaatagctggaacacgacggcggcagccagcaaggccaggactgccgcggaaatgtacttccagtttaccatcgtcatcgtcgtcggctcgatagatcgcactgtgcattcgtctggaatcaccacctcatcggcttcaacctcctcttttacttgaacgggcctaagtacaccttcgcctgtggtaacattcttgcacagcaatgtgcgctcgctaacattttctttgcacttttgagccaacgccccgttctttttcg

SEQ ID NO: 113836 - DNA, 4445 bp, Zea Mays
ttgcccatcatccaccagcgaagaaacatagggaaaagggaaaaaagatggtcgtgctgccgcgccattatagccccggaatccgcggcgcgcccccgccttccgtcctctctcccgccacaaatcgccgggcgcccgcgccgccccagcctcccttctccctccctccctcatcccctccgtgtcccggagcccagggagcggaggcgggcgggccggcgggcggccatggacgtggactgcgtctcgctgcccgacgccccggcgggcgacgtggatggcggcgccgcccggccgtggcccaaggccgtgaccaacggcggcgtccacgagctgctggagtgccccgtgtgcaccaactccatgttcccgccgatccaccagtgccccaatggacacacgctgtgttccacatgcaaggccagagtacacaaccgttgccctacctgcaggcaagagctgggcgacatcaggtgtctggcgctggagaaagtcgccgagtcgctggagctcccctgcaggtactactcgctggggtgcccggagatcatgccttactacagcaagataaagcacgaggcgcagtgcggcctgagaccgtacaactgcccctacgccggctccgagtgcggcgcggccggcgacatcccttccctcgtctcccacctgagggacgaccacaaggtggacatgcacagcggctgcaccttcaaccacagatacgtgaaatccaacccgcgggaggtggagaacgccacctggatgctgacggtgttccactgcttcggccactacttctgcctgcacttcgaggcgttccagctcgggatggcgcccgtgtacatggccttcctccgcttcatgggggacgagaacgaggccaagaactacagctacagcctcgaggtcggcgccaacgggaggaagatggtgtgggagggcaccccaaggagcgtccgcgacagccaccgcaaggtgagggacagccacgacggcctcatcatccagaggaacatggcgctcttcttctccggcggggaccggaaggagctcaagctcaggatcaccggacggatctggaaagagcagcagacaccagacggcgcatgtactccaaatctgtgcagctaattaagcaatcttcaaacaaacaacaccttgcctgtccttctttctctttctaattaatcgtggtggtggtggtggtgctcaaagggatttatttatttattactaattattaggaggatgtaggatgctcgtgtaaatgaaactgtgtatattatatggatggcatggcatccctggccttaaatcatgtcacagcacagtactgtactgtacctacgggtggccggctgatcaaaagatctttgcttgctgacaaagctgtgtctgcatcttcatgactccatgtttgcattctattcctcccacacaacagtcaccagtgggcgtgccacgtggccgctatcccatccaatggttccacacctcctctttcccaataatcccaggcgccgcgaggcaaacaatctcctcttctctccccagattcactcaccgtccgtccgtccagggagccatggcagcagcagcagcagcctgcatctgtctgcagctctctctcccaagcaaccattcttcctctgcatgtcctccagcatacaggaagcgtgtcgcgctagccccagggagaggaaaccgtcttctctgcactgcatctggcgcctcttcttcttcttctgtggtggtgaccaaggagcaggaggaaggatctcctgagcccgaaatctttagctacaaagacgaccccaacttcaggggctgcaagggctgcggcagggacgagcttcagaggggctgcaatggacaaggccggatccagggcggcatagccgccgtcccgggcttcggctggtggcccatcaaggcgtaccggccgtgccccggcttcgtcgcgtccggcggccgctaccggcgccagggccaaagcatggacgacgttgcatccggcagggggaaaaagaaaccctctcccgccaaaaaacaagcttaacccctctagctagtttatgttcatcaggtgaattcagaatctacccaagatgggagggaactgggggaagctcaagttattcaggaacagcagttttttttgggtccacaacgccaatgtatatgcactagtttggagtactgtttgcagaaacaacaattgtatcagtagcttggaacatctgactgtaccctaattgtattattgtcttcatcaagtggcgaatgcaggatcttgcactggtataagcaagcacccacccacaggatgatgtgcattattacgctgctgccgtcttcttgacgaactcgtccctgagctgcctccgcaggatcttgccggacaccgacttggggatggcgtccacgaagcgcagcagccggagcttcttgtacgacgcaacgcgccccgccacgtacgccatcatgtccgcctcgctctccggcgcgccacgtcgccgcaccacgcacgacgccgggacctcgccggcctcctcgtccggcagcctgcgcccgcatacatgcatgatgacccgcaggaacacacacgcacaatctccaactgcatgccgcggtccgctcggtcgcttacccgaagacggcggcgtcctcgacggacgggtgagacagcaggatggcctccagctcggcaggggcgacttggaagcccttgtacttgatgagctccttgatgcggtccacgatgaacacgtcgccgtcgtcgtcgatgtacccgacgtcgcccgtgtggagccaccccgcggcgtcgatggtgcgctccgtctcctccttcttcctgtagtagccctgcatcacggcctggctccgcacgcagatctcccccggcgtgttcttgggcagcgaccgccccgtgtcggggtccacgaacttcacctccaggttgggcaggatgaagccgaccgacttcttcttggcgacctgcaccgccgaccccacgtcctcgccgccgccgctggcgtgcgtcagcgtgatgcagctgtgctccgtgagcccgtacgcctcctccacctgcacgcccgggaacttgcgctcgaacgccgccaggaggtccggcgcgagcggcgcggcggccgtcatgacggacctgagggccaggccggacaggtcgaactcgtcggccacggggctcttcaccatggccagcatgaccggcggcacgacgggcgcgaacatgacgcggtgcgtcagcagcgcgcccaggaacgcgcgcaggtcgaagcggtccatcaccaccaccgtgcccttgtgccgcagcgtggcgcagcagatgccggtgatgccgtagatgtggaagaagggcatcaggcccagggtgaccacctgcccgaccagctcctgcccgacggcgaacatggaggagcagaggctggacaccaggttccggtggctcagcatcacgcccttggacacccccgtcgtaccagacgagtaggggagcgcgcacaggtcggactgctgcgccggctcaagcgccaccaccggcgcgcccgcgcggtccgccatggcgaggagctcgtcccagcctatggcgccgggaagccgcgccacgtccccgatgccgatcaccggcacgccagcgtccttcaccttgtcgtaggccaccgcgtcggcgaccacgagcctggcctcggagtcctccacctgcttcttgatctcggcggcgacggcgcgcgggttcacgccggagaagaccgctccggcggacatgatcccgaggctcaccacggggtacaccgccaggttcgggagcgcgaccaccacgacgtggcccctgcggacgccgatggaccgcagcgccctggcgaaccgcgccacgagcgccgtcttgtccgcgtaggcctcggcgtccgccagcacgaactccggcacggtgacgtcgtctggtacggccacgggcgggaaccggctccggaagatgtgctcctcctcagactcatgcaaatgcacggcggcgatggccgcgtcgcccatcctcagctgctgctggtggtggtggttgtgggtatggagctgaaggaagggcgctgcgttggcatttgaagagacgaccggaggtcttggcattgggccacgcgaggaaggtgaaggcatgttggtggtggcgacacaattcttgcgtggtgtcaagaaaggtggtgtgcaggtgaggatcggttgtgtcatggcctttgacctcgtagaacttggctgggtcatgctcatgtcctttgagctcacagagcttagagccaccggtcaacagtgacacgcgtgaaagcagcgttgtcgtgttcatcatagttcgcaatagagttcagatgatataatagttggttaagtgcatgcacaaattcttcaaatgaaagaaatatcaattcgcccccata

SEQ ID NO: 113837 - DNA, 1381 bp, Zea Mays
ttgcccatcatccaccagcgaagaaacatagggaaaagggaaaaaagatggtcgtgctgccgcgccattatagccccggaatccgcggcgcgcccccgccttccgtcctctctcccgccacaaatcgccgggcgcccgcgccgccccagcctcccttctccctccctccctcatcccctccgtgtcccggagcccagggagcggaggcgggcgggccggcgggcggccatggacgtggactgcgtctcgctgcccgacgccccggcgggcgacgtggatggcggcgccgcccggccgtggcccaaggccgtgaccaacggcggcgtccacgagctgctggagtgccccgtgtgcaccaactccatgttcccgccgatccaccaggtggccgcctgcatcctctatctggttggatggaattgagatgacaatctgcatatgtatgcagtgccccaatggacacacgctgtgttccacatgcaaggccagagtacacaaccgttgccctacctgcaggcaagagctgggcgacatcaggtgtctggcgctggagaaagtcgccgagtcgctggagctcccctgcaggtactactcgctggggtgcccggagatcatgccttactacagcaagataaagcacgaggcgcagtgcggcctgagaccgtacaactgcccctacgccggctccgagtgcggcgcggccggcgacatcccttccctcgtctcccacctgagggacgaccacaaggtggacatgcacagcggctgcaccttcaaccacagatacgtgaaatccaacccgcgggaggtggagaacgccacctggatgctgacggtgttccactgcttcggccactacttctgcctgcacttcgaggcgttccagctcgggatggcgcccgtgtacatggccttcctccgcttcatgggggacgagaacgaggccaagaactacagctacagcctcgaggtcggcgccaacgggaggaagatggtgtgggagggcaccccaaggagcgtccgcgacagccaccgcaaggtgagggacagccacgacggcctcatcatccagaggaacatggcgctcttcttctccggcggggaccggaaggagctcaagctcaggatcaccggacggatctggaaagagcagcagacaccagacggcgcatgtactccaaatctgtgcagctaattaagcaatcttcaaacaaacaacaccttgcctgtccttctttctctttctaattaatcgtggtggtggtggtggtgctcaaagggatttatttatttattactaattattaggaggatgtaggatgctcgtgtaaatgaaactgtgtatattatatggatggcatggcatccctggccttaaatc

SEQ ID NO: 113838 - DNA, 1194 bp, Zea Mays
tcttccaaccaccctatagcttagctttccacacacatgcatcacctgcccacaggccgccgccgcgagccccccggcgccggggaacttaccaggcagcagccaccaccagcggggccggcgccggcgccggggcaccaccaccgcccaccaccagcggatcggggccgccccttcttcatgccgccgcccgcgccaccgggccgctcgcacagcaacgaagcatcgccagcggacccgcccatcgccagcgccagcagcagcagcagcaggctgccgccgccgcctcctcctcctcctcgtcctcggccgtcgccacacccacgcgtgtacggcgactacgaccccgccgagggcctccgccgtccccctctccctctgcctccgcctcggcgcccgccgtccccctgctcctccgcgctggcgtcctgcctggccgcgacggcgttcctgctgctgtcggcgggcggcgccggcgctgcgctgttcctgctgttccgcccgcggccgcccgacatctccgtggccggcgtgcgcctgccctccttctccgcgtccaacggcaccgtggccttcaccttcgagcagacggcggcggtgcgcaaccccaaccgctccccgctcgcgcacttcgacagctccctccgcgtcgcctacgcggggggcgacctcggcgccgtctacatccccgcggggctcatcgacggcggccgcaccaagcacgtgtccgcggtcttcgacgtcccggccatccccgtcgccgcgcagccgcagggggccgtcgaagccgcccagcaggctcagccgccggttatcgaggtccgctcgctgctggtggtcaagggcagggtcaacgtcctgcgcgtcctcacgcaccgcgtccaggccgccaagctctgccgcgtcggggtctcgccgctcgatggcacggtgctcggattccgctgctgacttcgtttatttcttgttgcagctcagctttcaacgagagagagagagagagatgttcccttcccttccctttgcaaacaaacaaatgacgaatatacgtgtgtgtattcacgtaggtagatttggatcagcaacaacgacaacatagcagatcgataaaacccaccgaggggtcggtcagttaatagagtatacatagtccctatctaagttcataagcatcttataaagatcctaagcaag

SEQ ID NO: 113839 - DNA, 1124 bp, Zea Mays
tatggaagccacaaccacaaccacaatccccggcggcggaggggaaaaggaaagaatccggaaatcggcgatcaaggaagaggagaagcgactcacctttgggagggtggccagtgtgccgaggaagaagagggttttagttttagtaggcgaggaggggcagagggcagtggggcgggttgagcgcggaggaagcctccgcgcacacggcacacgtatgcgacgagatccaaagttaaaaggtcatgccgtacctccctccaacttcataaatttctactcaaagcggacgctctaaactttagcacttaaaaatttaaacataaatgttaaaatgtcctaaaattgaagtgcattcaatagtaacttagctcttgaaaatgcgttaaaatttagcacactactaaactttatcacatgggattcaaacatggcctcgtaagagcatatataaccatatttaacacgaggtcttttaaatagtctcgattgtattgttaaacttgctctaaaacttttagtatccgtggaagatttttaaaatccgaacggcgttcggcggagaagcccacggaccgatcgatggaaacagccgcgtgtctaatcgaatccatcaatcactgtatctcaacagacgctgcctgccgctagcctcacctttttactatttgtttgtttgtttacacttatagatgctcctctctcgttcttctggttttttttacagtggtatcgctagatcatgattcaaacgtttctttcgtttaagcaaacgaggcaacggcgactgatcactgatccgccactcaaaaggaagagggggaggacaccaggctccaggtctgtcaagatggagcagaagatggctttggtcaagcagaggctggctggccttgcttgattgtaccagcagctgaagcaggtacctgaatcaaagaccacggttagaccctgcgtgaaatgatccaacactggcttcagagtagcaccgtttctttgattaagctcagcacatgttcatctcaagtctgtgaatgatagctggtacctgaatcactactatgaaacttggcatttgtgatatctttgatttcaccaccagtactgtagatagtgttgccctt

SEQ ID NO: 113840 - DNA, 474 bp, Zea Mays
atgatgagagcaacatacaacaccgtggggcatttgccttcaacacgatttcacgctagctgctatgctaggcacgatctcgtcttctgtttccagctccatcactcgtcttgtgtttgcagcaaactcagccctgagatgttcagtgtagagcgtcagcgacttgtggaattctgcaaagcacttgtcatggacgtatctgcggttgctcccagtcccagcagacgacccaacgactgtcccagacatgtaagccctcctgtcgtttcagccgagttcttggatcctggctcattgaagtatggcctgtcattcagcacgaggccctggatggagaccagaacctgcagcatgctggagctcgacttgccccacttctcgcaccccttgccccaccaggtgttcagaaggctcaggcacactttcccgctctcgtacaggttcgggttcagccgaagtccgccagaatggtag

SEQ ID NO: 113841 - DNA, 1663 bp, Zea Mays
atggagggagtccttgagcggtggaagacgaagatcttcgttggtggcagcctctccgccgcgcgaggacgaggcacgactcaagtggcattttcgtggctcggcggtggcgtgatggagtcctccagcaagtcatcatacagcaagctgtccgctgcaaatgacaagatggattccgatgccgccgggagccacgagagtgcacggtcgaatggcctctcggttgatgcagccgacaaggcgccggccgcgggaggagcgggcagagctgacaagacctccgacgcttccactggtagcagtgacgacagcttggtggatagctccggtggtactggccgccatacgaagcggcacactgggagcgatcgcaggtgggaggccatccggtcggccagcgccgggggctccccgctcagcctcgtccacttcaggctcctgaagcgcctgggctacggagacatcggcagcgtgtacctcgtggagctgaggggcacgggcaccttcttcgccatgaaggtgatggacaaggaggcgctcatcagccggaacaagctggtccgcgcgcacacggagaggcagatacttggccttctcgaccaccccttcctgcccaccctgtacacccacttcgagactgacaagttctactgcctcgtcatggagtactgctgcggcggtaacctccattcgcttcggcagaagcagcctaacaggcatttcactgagcaagcagccaggttttatgcctccgaggtgttgcttgctctcgagtacctccacatgctcggcatcgtctacagggacctgaaaccagagaacgtcctggtcagagatggaggtcacatcatgctctccgacttcgatctgtcgctgcggtgctcggtcagcccgatgctagtcagatcctcatcggtccatgccgccgccaacaacggcgtggtccatgccgacggtgccagccagcagggccagggctgcatacagtcaccgtcagcgttcttcccgcgcatagtactccccaagaagagccgcaagaccagcaggtcggactccagcatcaaggacgggtcgatcctggagttcaacgcggagccgacggacgcgcggtccacgtcgttcgtcggaacgcacgagtacctcgcgccggagatcgtcagaggcgagggccacgggagcgcggtggactggtggaccttcggcatcttcctgtacgagctcctccatggcacgacgccgttcaagggggacagcaaccgcgccacgctgtgcaacgtggtggaccagccgctgcggttccccgacgcggccccgcctgtgcctgtgagcaccgtcgcccgggacctcatccgtgggcttctggtgaaggacccccagaagagaatcgccaccaggaggggcgcagctgagatcaagcagcacccgttctttgatggggtcaactgggcactcgtcagggatgctcaccctccttctgtccctgaccctgcagacttgggccggtttgcatctaaggagaagccggcggcggcagttgccactgctcatcgtgctcctgcagctaaaccaaagaccggcaattttgttcagtatttttaggttgtctatatatcatgtttttgtttttggcagacaaaaaatacaagtcattttttaagaacaa

SEQ ID NO: 113842 - DNA, 795 bp, Zea Mays
atccactttaatcctttgaaaataacaagaaatatatatacacaaaagagttgtcttcttaaatatgtccttccatcatcaacaaacatatgaacataaataattacacattcttgtaatgatcacccccaaatcggaaacaaagaaaaccccacactacaaatgtacacgcggttcatcgagacgacgacggtacaaagaataacaaattaatgtccatgcatgccaagtgtttgtctgcttttacttgataacttttcactccgtgcggctacgcttaagtatcacggcaacttaatttaatttaccagcagcaagcaagggagcgaggagggagcgctttgcatgctcgatccgtcgacaggatcacttctcctcagcagcagcagcagctgctgctggcggcgccgcctcttcggcagccggcttatcctcctcttccttcttctcttcttccttcttctcctctaccaccgccgcctccgacggtgtctctgccggcgccggtgccgcctccgtcgctgcagctggctcggcctcctccttcttctcctccacggcgacttcccgggaggtggcctccgccgccggctcttccttgggctcctccttggggataaacggtgcgaccttgtccaagatgaaggtgatcgccggaagcaggggcgaggtgccggacttggccaccgcctcgctcaccaccttggctccagggaagtctgcacatgcatagacaaatataaaaagatccatgttccatgtgtatgcatatgcatcatgtatacaaacagttga

SEQ ID NO: 113843 - DNA, 839 bp, Zea Mays
gggcaccactgctgattgatcttgcgtgcccaccctgctcaccatcagctatccatctatccattgcttcgttccaagttaatctcgtgttccaaattaccaccgcttccttgttttcataccgctaattaagagtgcagcagattaatattcttgattttagtattaagcttataaagattcataaaaataaattttaaatttattgtatgtcttcttaaatgatagatataaaattcatatgtaaatacgaatattttttcgttttttttgtcttcttaaatatgtccttccatcatcaacaaacatatgaacataaataattacacattcttgtaatgatcacccccaaatcggaaacaaagaaaaccccacactacaaatgtacacgcggttcatcgagacgacgacggtacaaagaataacaaattaatgtccatgcatgccaagtgtttgtctgcttttacttgataacttttcactccgtgcggctacgcttaagtatcacggcaacttaatttaatttaccagcagcaagcaagggagcgaggagggagcgctttgcatgctcgatccgtcgacaggatcacttctcctcagcagcagcagcagctgctgctggcggcgccgcctcttcggcagccggcttatcctcctcttccttcttctcttcttccttcttctcctctaccaccgccgcctccgacggtgtctctgccggcgccggtgccgcctccgtcgctgcagctggctcggcctcctccttcttctcctccacggcgacttcccgggaggtggcctccgccgccggctcttccttgggctcctccttggggata

SEQ ID NO: 113844 - DNA, 267 bp, Zea Mays
atggtgataactagcaattttacatcagcacgatacatctggtcattctggggttgcaagatacgacgacgaccaaacaagccaatgctattcgtatgctcaaggctgcatgcatcacgcatggttaaaccaaagcgtcatgaaaaggcagtgacactttcagtcagctcaagaaaacccgggggcgacattggtggcatcgctgcttcttcctgtgtgtcaaccatttccaggatctttctcacggttgcctgcaactttccatga

SEQ ID NO: 113845 - DNA, 1879 bp, Zea Mays
cgcgatcgcccgccgacccgacggcggcatggacaccgagtacgtcgaccaccccgcccgtcgccgccgcgatcagacggcgcatctctttttcgcacgcgggggcctttttcctttctctatcccccatctttgtcgatttcttttatttttcttccccccttgaggatgatgatgatcgcctcgggccgtcggctcctgcaggtccttgcagcaggggagctcctcgtcgtggcacacgacgggcgccgtgtcgtgtggagccgcgcagcagcagaagcgccagcggtgccagggttcttccagcgatcaagctggttccagctcaagtagttctctgcaaatatcagaaccagaaccccaacaaatccaagaagaagaggattactatatggaggatgattgtgatgatgattttgatggctacgacgaagatgattatgacttcgatgaagctgactttaaccagcaccttgctgataaatttgatgatttggatcttcctccaggcgtggaggccaccgtaccttggttgcagaaaactacacccaaggaagatgtcaaagagccacctaaatcaaatactgcagatgagaatgcaaataaatatacgcagttcaagcagtttgatactgttcagaatttctctgaccattactacgctaagaattctcatggagagccaaacagagcctggtcaaagagagttcaacatgactggaaacttctggagaaggatctaccagcgtatatttttgtccgggttgctgaagatagaatggaccttcttagggctgcgattattgggcccaagggaacaccttaccatgatgggcttttcttctttgatattcacattccctctgcttatccttgtgctcccccgctggtatattaccactctggaggacttcggattaatccaaacttgtataacaatgggaaagtgtgtcttagcctgttgggtacctgggatggtagaggttgtgagaagtggaatccagctcaatcgacaatgctgcaagttcttgtctccattcaagctctgattttgaatgacaagccatattacaacgagccaggatatgagtcctatgccaacactccgaatggagagcggttggctttggactataatgacaacacctttctgcactcatgcaagactatgttatactcacttcggaggcctccagagcactttgcagatcttgtcgctggccactttcgggtgcatgggcacacgattctcgcggcatgcaagcactacatggcgggtaatgatattgggtcagtggtgccagaggaggaggaggaggaggaggaggaagagtcatcagaacacaagagcggtgatgctggagcatcgggtagtgcaccagagctaggagtgatcaaggcaatccctacgaagagacgcagctcattcaatccaagcttgaaggtgctgtacgaagatctgctgatggaattcaatgtgaagggtgccgacacaaggaaattcatcgatgagaagttgaagaagaacaaacctgcagccgcctgaggaacatgcttgcaggcaaagcttttgtaggtataactggtcttggtggtgatatctaggacctggaacttgcttgctcacatgtagtagagagtatggtttaggggtggagtgctgagagagttctctctcggcactatttatcgccaatctaaatctaatgataggtttaccgcatcataaatatatatgtaacggctatatcgtctttcgctgattgttctggcatatcatgataggtttacccaaggacgaaagctaagtaccaattggtttggaactgtattacggtctacttgtttttatatatttgacgccatatagttcaattct

SEQ ID NO: 113846 - DNA, 2739 bp, Zea Mays
agacccgcgcggccatcctcctctagaaccttccacggccccacctcctccttcgttcctccgctcaccccaaccctcctcggctcctccctccacgcctctcctcgtcgacgagcggacccggtctacgcccccgacccccacccccgtccctgcccccgtccccgccccctcccgatcccagatcccgccctcccatcggggcatcagccatggatcagagccggcgggcggtggagtcgtactggcgatcgcggatggtggacggtgtcacggccgacgacgacaaggtcgcgcccgtctacaagctcgaggagatctgcgagctcctgcgcgcctccgacgccagcatcgtcaaggaggtcgccgatttcgtcctcaagcgccttgacaacaagagccccctcgtcaagcagaaggctttaaggttgatcaaatacgcagttggaaaatctggtactgatttcaagagggagatgcaaaggcactcagcggctatgcgccaactagttcattacaaaggccaccctgatcccttaagaggggatgcccttaataaggctgttcgcgaaactgcgaatgaggctatagctgcaattttctccacagaggaccctaaacctgctgttgcaaccgaaagtcttggcaagcgcatacagggctttggaaatactaattacgagccatctagagatgacaagaagtctttccttagcgagcttagcgaggtagtgggtattggaagtgcatccattaagcaggggttgagcaactttgctgcagcgcatgcaatgatgacaaatgacaatggtagcacatacaggagccctaatctccgtagatctttgaccacggaatctgaaagatatggtcggtatgatccaagtgaaattcaacgtgagagccgagcctcatctgatgcttcaaagaatgcaccttctggtccttggggtccaacttccagttctacaccaactgatgaaactagctcaagtcaaccagggattaagactcgtgaagaaagacttctagagacaattgttactgcaagtggtgtgcgattgcaaccaacgcgagatgctctgcaaatttttttcgcagaagcttccaaattggatgcagttgccttgagccgtgcacttgagagcaaactgaattctccattatggcaggttcgcatgaaggctatttgtgtgttagaagccattgtaaggaaacaggatactgatccttactctatcatcgcttcatatttcactgagaacacagcttctgttgttaaatgctctgagctgccacaggtttctctcagagagaaagcctcaaaggtcttgaatatgctgattggggaacaacctaccggaaccgcagcaacaaaagctgcgatgcccacacctgttcagatgcctgatttgatcgatacaggtgatcaagatgatctggcaacaagttctggacatgcaagcattgaacagaattctgggaacagtgcatatgtttcttcagttgatgatttgcttggtggtgaacctatttctgatacaagtgtcactgctgatagtaatggaagcgacccatttgcagatgtatcattccatgaggcagagactaaggagactaatgatctgttctcagggttgacagtagaagagaaatcatcaactaccatgcatgatagttcttcggacaaaaatgaattaccagatatctttggcagctcccctgattctttcaaccagggtagtgttactgaccaaggaactgtcaatgatttgattgctggcttgaaccttaatggaacaggccatgctcagtctgcagttaaagcagaacccaatagcaacagtggttcacagttctttgatacaaaaaatgagtccggccatgtgccaagtgctgcaacattgaatgacattcttggtcaaaactcgctttaccaacagcagcagactccattgcagtacagctttcctcaacatatgatgctcaatcaatcatttcctggacaacaattaaattatggtgccatggggattcttcttgctcagcagcagcagttactgcaaagttttggaaatttcaatgctggacttgggaattcttctttcaattcgatgaacggtgggaatacatctgtgcttccagatattttcaattcaagtaatcaacctcaaaatcatgttgcagtgatgagcagttcgaagaaagatgacaataaagcttttgattttgtttcggatcaccttgcagcagcacgtggttcaagaaagtgaaacaggaagcaatgaacatgtccagatgctggaaagagctcaagtatttgatggacacaatagctgggaattccaaaaactgcatctcgtcacagcctcgcagattggatgcgtgattcacacggctggtttggcattgtttgaacacatgagaaggaagggttgttccatacggttggaagacgagatgttgcgttgtgtactatgtatttagacgaagactgttcttttttacgctgaaaaataaattgcatcttccgtctttctttgtgttgtgctccttttctctatcctttttcttttctagaaaaaaaaagagtgagacactatacgtgtttgttacctgcaggttttatgtttcttttctgtacaagtatatggaggatttttttggtggcaattgtaaagctttggaacgtgaataagagggtgcagtatgatatgtgctgctacatgatcctggcaa

SEQ ID NO: 113847 - DNA, 2407 bp, Zea Mays
ccacctcctccttcgttcctccgctcaccccaaccctcctcggctcctccctccaccgccttgacaacaagagccccctcgtcaagcagaaggctttaaggttgatcaaatacgcagttggaaaatctggtactgatttcaagagggagatgcaaaggcactcagcggctatgcgccaactagttcattacaaaggccaccctgatcccttaagaggggatgcccttaataaggctgttcgcgaaactgcgaatgaggctatagctgcaattttctccacagaggaccctaaacctgctgttgcaaccgaaagtcttggcaagcgcatacagggctttggaaatactaattacgagccatctagagatgacaagaagtctttccttagcgagcttagcgaggtagtgggtattggaagtgcatccattaagcaggggttgagcaactttgctgcagcgcatgcaatgatgacaaatgacaatggtagcacatacaggagccctaatctccgtagatctttgaccacggaatctgaaagatatggtcggtatgatccaagtgaaattcaacgtgagagccgagcctcatctgatgcttcaaagaatgcaccttctggtccttggggtccaacttccagttctacaccaactgatgaaactagctcaagtcaaccagggattaagactcgtgaagaaagacttctagagacaattgttactgcaagtggtgtgcgattgcaaccaacgcgagatgctctgcaaatttttttcgcagaagcttccaaattggatgcagttgccttgagccgtgcacttgagagcaaactgaattctccattatggcaggttcgcatgaaggctatttgtgtgttagaagccattgtaaggaaacaggatactgatccttactctatcatcgcttcatatttcactgagaacacagcttctgttgttaaatgctctgagctgccacaggtttctctcagagagaaagcctcaaaggtcttgaatatgctgattggggaacaacctaccggaaccgcagcaacaaaagctgcgatgcccacacctgttcagatgcctgatttgatcgatacaggtgatcaagatgatctggcaacaagttctggacatgcaagcattgaacagaattctgggaacagtgcatatgtttcttcagttgatgatttgcttggtggtgaacctatttctgatacaagtgtcactgctgatagtaatggaagcgacccatttgcagatgtatcattccatgaggcagagactaaggagactaatgatctgttctcagggttgacagtagaagagaaatcatcaactaccatgcatgatagttcttcggacaaaaatgaattaccagatatctttggcagctcccctgattctttcaaccagggtagtgttactgaccaaggaactgtcaatgatttgattgctggcttgaaccttaatggaacaggccatgctcagtctgcagttaaagcagaacccaatagcaacagtggttcacagttctttgatacaaaaaatgagtccggccatgtgccaagtgctgcaacattgaatgacattcttggtcaaaactcgctttaccaacagcagcagactccattgcagtacagctttcctcaacatatgatgctcaatcaatcatttcctggacaacaattaaattatggtgccatggggattcttcttgctcagcagcagcagttactgcaaagttttggaaatttcaatgctggacttgggaattcttctttcaattcgatgaacggtgggaatacatctgtgcttccagatattttcaattcaagtaatcaacctcaaaatcatgttgcagtgatgagcagttcgaagaaagatgacaataaagcttttgattttgtttcggatcaccttgcagcagcacgtggttcaagaaagtgaaacaggaagcaatgaacatgtccagatgctggaaagagctcaagtatttgatggacacaatagctgggaattccaaaaactgcatctcgtcacagcctcgcagattggatgcgtgattcacacggctggtttggcattgtttgaacacatgagaaggaagggttgttccatacggttggaagacgagatgttgcgttgtgtactatgtatttagacgaagactgttcttttttacgctgaaaaataaattgcatcttccgtctttctttgtgttgtgctccttttctctatcctttttcttttctagaaaaaaaaagagtgagacactatacgtgtttgttacctgcaggttttatgtttcttttctgtacaagtatatggaggatttttttggtggcaattgtaaagctttggaacgtgaataagagggtgcagtatgatatgtgctgctacatgatcct

SEQ ID NO: 113848 - DNA, 1058 bp, Zea Mays
caaacagtctcgtgcgcttttactacaccacgcttacggatgtatccgtctccccctccccacctattttatggtgtgagcgtcagccgtcagcactcaccaagatccaacagacacttcttcaatccactagctaagcgcgccatggcaaagttcgctcttggtcaccaccgcgaggcctccgacgccggctgcgtccgtgccgtcctcgccgagctcatcctcaccttcctcttcgtcttcgccggcgttggctccgccatggcaacagggaagctggccggcggcggcggggacacggtagtgggcctgacggcggtggcgctggcgcacacgctggtggtggccgtcatggtgtcagcggggctgcacgtctccggcggccacatcaacccggccgtgacgctgggcctcgccgccacgggccgcatcacgctgttccgctccgcgctctacgtggccgcccagctgctcggctccacgctcgcctgcctcctcctcgctttcctcgcagttgccgacagcggcgtgcccgtgcacgcgctgggcgccggcgtcggcgcgctccggggcgtgctcatggaggccgtgctcaccttctcgctgctcttcgcggtctacgccaccgtcgtcgacccgcgccgcgccgtcggcggcatgggcccgctgctggtgggcctggtcgtcggcgccaacgtgctcgccggcgggcccttctccggcgcgtccatgaaccccgcgcgctccttcggccccgcgctcgtggctggggtgtgggccgaccactgggtctactgggtcgggcctcttatcggtgggccgctcgctgggctggtctatgacggcctcttcatggcccagggcggacacgaaccgcttcccagggatgacaccgacttctaggcagtaggtgtgtgttctcctgaataatttgaattgaaaacacatgtattgaagcctctaatgtttcggtttcgattcgaatggaatggaagcagcagtatcaaataaagtctcggtgaggtcgtaattcacttaaacatatgtttttaagacct

SEQ ID NO: 113849 - DNA, 1782 bp, Zea Mays
acaataactcaacaaacttatctctaatataaatactcctctcctcgcttcctacccggcgcatcctcgtactagcgaatcctctcttcgtccagttattctcctcacaaaggccgaagcttaaatcacctccggttaggatctcatcagtctaattcctccttgtccttgttcgtttctggtagggctagtcggctcactcggcctgcgattccaagcgccgccggttcgccgcttcgttacctccaccagggatcatattgtcgaaataagttggcctcattcgtgatggaaggggcgcaaggatcaagcattgtgacaaaacacaataaaaggcagtctcctgtgcagagatggaggccagtttcaacagaagcagttccccagcatcaccaagatgacattattgagacatcaaattctggaagcaagaaaattatagaggattgcatagcttctagtgagaatttgccaccagatggaacaaccaatgttgttgaagttaccgccaatgatgcttcatcgtcaaaaaataatttaagttttgggtacagttcaactaaagtagttatagaagaccatgcggagttatctggcttcaataaggatctagctgggtccaatgtcttcgggacacattcctcctctgttgaggcggttcaaagtcgacagcttgactactctcatttcatatcacttccattggctttacacccagatcttgtcaacaaactgaactacttccagagttcgatccttggggaagaaaacagtaacaaagatgggagccaaagtgaaggttctattggtgaaatggactatgaccacaagcaagcggaagcaaaaatgggtgccaaaggctcccaatcagattttggcattgacaagtcaatatttatcaaacccgaaacgtttcacctgacggttcttatgttgaagttgtggaacaaggaacgtatagataaggcctcggatgtgctccagtcagtatctacccaagtaaatgaagctttggaaaatcgacctatttccatacagcttaggggtctgacatgcatgaaaggctttccagctaaggctcgggtggtatatgttccagtgctggaagttggtagcgaagggcgcctagctcatgcttgcaaagtcataactgacgcgtttatcaaggcaggcctagtttttgaaagggacgtgagagaactgaagttgcacgcgaccgtaatgaacgtgcggcacaggaagagcagaaataaacggaacacatggacggattcgtttgatgcccggggcatattcgggagatttgggaaggcggagtggggtgcatatcccatccatgagatccacctttctcagaggttcaagtttgacagaagtgggtactactattgctgctcgtcgatccccttgcctgcggagatgcacacggagtgaggtgtgtagctgtgatcatgttgtaggtttttaaggggcgtttatagcatatacatatatatattttaccgcagttcatgaggcgtttaaccttgttattagcgttggcccttaggggccaggtgttaccatgtatctatctatcggtttgaatcaccgatgggcaggtgttaccgtgcatctagtgttttgaatctgaatcgccgatttgagccgttgttggatgctgttgtatgttacaagcaatggcaggcactggtagtgggttccctgttgtaaagttgtagttggtgttgaactgttggttgttattgcctttccatatggcccattccattgtgcagtcaa

SEQ ID NO: 113850 - DNA, 1779 bp, Zea Mays
acaataactcaacaaacttatctctaatataaatactcctctcctcgcttcctacccggcgcatcctcgtactagcgaatcctctcttcgtccagttattctcctcacaaaggccgaagcttaaatcacctccggttaggatctcatcagtctaattcctccttgtccttgttcgtttctggtagggctagtcggctcactcggcctgcgattccaagcgccgccggttcgccgcttcgttacctccaccagggatcatattgtcgaaataagttggcctcattcgtgatggaaggggcgcaaggatcaagcattgtgacaaaacacaataaaaggcagtctcctgtgcagagatggaggccagtttcaacagaagcagttccccagcatcaccaagatgacattattgagacatcaaattctggaagcaagaaaattatagaggattgcatagcttctagtgagaatttgccaccagatggaacaaccaatgttgttgaagttaccgccaatgatgcttcatcgtcaaaaaataatttaagttttgggtacagttcaactaaagtagttatagaagaccatgcggagttatctggcttcaataaggatctagctgggtccaatgtcttcgggacacattcctcctctgttgaggcggttcaaagtcgacagcttgactactctcatttcatatcacttccattggctttacacccagatcttgtcaacaaactgaactacttccagagttcgatccttggggaagaaaacagtaacaaagatgggagccaaagtgaaggttctattggtgaaatggactatgaccacaagcaagcggaagcaaaaatgggtgccaaaggctcccaatcagattttggcattgacaagtcaatatttatcaaacccgaaacgtttcacctgacggttcttatgttgaagttgtggaacaaggaacgtatagataaggcctcggatgtgctccagtcagtatctacccaagtaaatgaagctttggaaaatcgacctatttccatacagcttaggggtctgacatgcatgaaaggctttccagctaaggctcgggtggtatatgttccagtgctggaagttggtagcgaagggcgcctagctcatgcttgcaaagtcataactgacgcgtttatcaaggcaggcctagtttttgaaagggacgtgagagaactgaagttgcacgcgaccgtaatgaacgtgcggcacaggaagagaaataaacggaacacatggacggattcgtttgatgcccggggcatattcgggagatttgggaaggcggagtggggtgcatatcccatccatgagatccacctttctcagaggttcaagtttgacagaagtgggtactactattgctgctcgtcgatccccttgcctgcggagatgcacacggagtgaggtgtgtagctgtgatcatgttgtaggtttttaaggggcgtttatagcatatacatatatatattttaccgcagttcatgaggcgtttaaccttgttattagcgttggcccttaggggccaggtgttaccatgtatctatctatcggtttgaatcaccgatgggcaggtgttaccgtgcatctagtgttttgaatctgaatcgccgatttgagccgttgttggatgctgttgtatgttacaagcaatggcaggcactggtagtgggttccctgttgtaaagttgtagttggtgttgaactgttggttgttattgcctttccatatggcccattccattgtgcagtcaa

SEQ ID NO: 113851 - DNA, 1766 bp, Zea Mays
gtctcacaaacttttttttagtctatcggtaacccgcttcagctagcgagcattgagcagtctgcagtcgccgagccgcgtgtccgccgggccggcggttaccaagctcaccaaaaatctttccaggttcgaggccgcccatgttcgcctgcaggtctctcctcgcaagggctagtcggctcactcggcctgcgattccaagcgccgccggttcgccgcttcgttacctccaccagggatcatattgtcgaaataagttggcctcattcgtgatggaaggggcgcaaggatcaagcattgtgacaaaacacaataaaaggcagtctcctgtgcagagatggaggccagtttcaacagaagcagttccccagcatcaccaagatgacattattgagacatcaaattctggaagcaagaaaattatagaggattgcatagcttctagtgagaatttgccaccagatggaacaaccaatgttgttgaagttaccgccaatgatgcttcatcgtcaaaaaataatttaagttttgggtacagttcaactaaagtagttatagaagaccatgcggagttatctggcttcaataaggatctagctgggtccaatgtcttcgggacacattcctcctctgttgaggcggttcaaagtcgacagcttgactactctcatttcatatcacttccattggctttacacccagatcttgtcaacaaactgaactacttccagagttcgatccttggggaagaaaacagtaacaaagatgggagccaaagtgaaggttctattggtgaaatggactatgaccacaagcaagcggaagcaaaaatgggtgccaaaggctcccaatcagattttggcattgacaagtcaatatttatcaaacccgaaacgtttcacctgacggttcttatgttgaagttgtggaacaaggaacgtatagataaggcctcggatgtgctccagtcagtatctacccaagtaaatgaagctttggaaaatcgacctatttccatacagcttaggggtctgacatgcatgaaaggctttccagctaaggctcgggtggtatatgttccagtgctggaagttggtagcgaagggcgcctagctcatgcttgcaaagtcataactgacgcgtttatcaaggcaggcctagtttttgaaagggacgtgagagaactgaagttgcacgcgaccgtaatgaacgtgcggcacaggaagagcagaaataaacggaacacatggacggattcgtttgatgcccggggcatattcgggagatttgggaaggcggagtggggtgcatatcccatccatgagatccacctttctcagaggttcaagtttgacagaagtgggtactactattgctgctcgtcgatccccttgcctgcggagatgcacacggagtgaggtgtgtagctgtgatcatgttgtaggtttttaaggggcgtttatagcatatacatatatatattttaccgcagttcatgaggcgtttaaccttgttattagcgttggcccttaggggccaggtgttaccatgtatctatctatcggtttgaatcaccgatgggcaggtgttaccgtgcatctagtgttttgaatctgaatcgccgatttgagccgttgttggatgctgttgtatgttacaagcaatggcaggcactggtagtgggttccctgttgtaaagttgtagttggtgttgaactgttggttgttattgcctttccatatggcccattccattgtgcagtcaa

SEQ ID NO: 113852 - DNA, 1363 bp, Zea Mays
gctagttctgacacaagtggagagcatgcatatacgtttgtgatttcttctttaataaaaaaaagaacccagcaattcagcaccgaccttggatccttgaattttgttgtccccgggtagctaggcaatggagcaatgcgccgacgaccacggtgggcaggtcccgaggcttgagggcatcgaggaagaaggcagcccagccgataagtgggctccgacgactgtccggccaccggagacaccgacggagacgatggagttcctggcaaggtcctggagcctctcggcggcagagatctccaaggccctcagggcgctcagctgcggcaatgccgcctccgattctcctcccgctgtcgtcgccacgtccacggcggagcggccgccgcttggcagtgatcatcgccgcctgtctctgccgcagaaggcagacgcggcggctggggctggtggtgaagccggcggaggcacgagccagcccatctctcccagggtgcacctgggcgacgtgaagctgcttcgcgccgcggggagagggaagacggtgggcgcgtggatcaaggagcagagggagaagaagcgcgccgaggcccggtcccgcaacgcgcaggcgtacgcggccacgtccgtggcgggcgtcgcggcggcggtggcggcgctggtggccggcgcggtgttctcgtcgtcctcggcggcgccggagcagcggccggccaagggcgacggcggcggcgccaagaccgcggcggccgtggcgtccgcggcggcgctggtggcgtcgcactgcgtggagatggcgcaggcgatcggcgccagccacgaccagatcctggccgccatccactcggccgtgaacgcgcagagcagcggcgacgtcatggcgctcaccgcaggcgcggccacggctctgcgcggcgccgccatgctgagggcgaggctccacaaggagatccaggcgactgcgttgccaggcgacggcagggagccggagagggacatctcgccgctggtcttcgtctcccggggcggcgagcttctgaagcgcaccaggcagggcgccctccactggaagctcgtcaccgtgtacataaactccggcttcgaggtggttctcaagatgcagagtgcacatatggccggcaccttcatcaaaaccaaaaagtgtgtggttctggacgtgtgctcggagataccggcatgggcaggcagggaggtgggcaggaggggatacttggggatcaggacggtggagagggtgatcgagttcgaggtcaggagcaggcgcgagcagcgcaagtgggtgcagggcatcacggggatgctgcttcgccgcgacagcatcaacaatgccgcctgcttgtaa

SEQ ID NO: 113853 - DNA, 82 bp, Zea Mays
aaatatgcaatgccgacaaatagggtgcaactgggtttttttaaaggagaatcgacgggaggacgaggagccccacctaaac

SEQ ID NO: 113854 - DNA, 1841 bp, Zea Mays
aaagtcacccgatccgcggccgcgtctgccgtctggtggcaccagaattgaaccccacccgcggccgccgccgcagcaacgtcggcaatccgagacgccggaggcctcctcctctcctaataccgccccccctcgggaccgggagggagtccgccgcggtgcggatcgcggccacggccacggaaaacaccggggcgcggctcatggaccgcatcgtcggcggcaagttcaagctcggccggaagatcggatgcggctccttcggcgagatctacctcgccacgcacgtggacacctacgagatcgtcgccgtgaagatcgagagcagcaagacgaagcatccacagctgttctatgaggcgaagctgtacaataccctccaaggaggaagtggcattgccaacgtcaagtggtgcggtgtggatggagaagagaatgttctcgtcattgatttgctggggccgagtttggaggacctgttttgttattgtggccgaaaattcacgctgaagactgtcctgatgttggctgaccagatgattacaagaatagagttcatgcattccaaagggtacttacacagagacatcaaacctgacaactttctgatgggtcttggtcggaaagcaaaccaggtatatataattgattttggtcttgcaaaaagataccgtgattccactacgaatcgccatattccttacagagaaaataagagcttgactggtacagcgcgctatgcaagttgcaacacccaccttggaatagaacaaagccgcagagatgatttggtatctctaggctatgtgcttttgtattttctccgaggaagcctcccttggcagggactaaaagccgcaacaaaggcacagaagtatgacaagatatgtgagaaaaagatatcgactcctatcgaggtcttatgcaaatcctgtccggtccagttttcatcttacttccattattgccattcattggcatttgatcagcgacctgactatgcatttgtgaagcgacttttccgtgacttgtttatcagccaagattatgagtttgattatgtcttcgactggacagttttgaaatacaaacaaggccacaaacaaaagcaaagtcctggggcacctattgctcgacctattcaagcacatggaccgaaacaagcaggtgtaaatggtgttattaatcataacgaagcccaggagcatgtagagacaagtcgtccaacagggcaagctgcatggtcgcaagacaaacaggcaaccaacaatgatcggaatcctgacgtgcggcataccgtgaaccttagacaagacatggctgctggaaaagcacagctgacaacatctgtggctcttcctagttcccagtggaaaaattatagtgattcaagacataaaggacaatttgatgctgttcaccacaatcagggtattgtaaacataactagctcatctaacagttggcttcctacattccagcacaatgccccaggaaaatgacagatcatatctggtggagcaaagaggaagtgctttgagagttagaggaggcccctgttcatctgagttggttcagagttaagcattgcacaatctgtagacttgatgtctcatgtattgttactgaggtggctcctgaagcactgatgcatttgatgatactattagctgataatatggaaggtttgctcgcggttgtgatgactcttgaatgcttgggcagtttgttggaccgctgcttaaatgcttctttgtagtagttctggatgccttgtaaattgcttacatgttaatatatgtatgggttgaacattgcaaataagatgatctgagctttgc

SEQ ID NO: 113855 - DNA, 670 bp, Zea Mays
agtactagctagctcgcctccagctagatcatccctcgcccagccacacgccacaccgtacattcattcgcgcgcgcatctggagatcggccctatccgcgttgcaatttgcatgggcagcagctccgacgagtgctcgccggcgagggagatgtgcatggaggtcggcggcggccgggggaggcgcggcggcgggggcagcaggtcggcagcggacggcggcaggaccgccaagcagaagcagccgcagcgtggactgggcgtcgcgcagctcgagaagatccgcctccacaaccagatgctggccgcgtaccgctccgccacccggcagccgccgcacgaccacccccagcagccgcagggccacgacgtcgtcgtcgacgctgccacgcattttcagctggtgccgccgccacggagcgactccagcccgttccagccgtaccaccaccggggcgtcgtgcagtactacggcggcatgtacagcaggaccgcaacgagcccgccgtcgctgtacgcgcacgacgtcagggactcgtcgggacacaggctgggtccgccgccgccgcagcagcactactgcatgacgatgatgagcagcagcagcagcaggagcgacgacggtgcctgcagcgccgccgaggagctcgacttggagctcaggttgtag

SEQ ID NO: 113856 - DNA, 3673 bp, Zea Mays
ttcctccgccgcttccgcgttggacgcactggacagctcacgcacgccgctgctttcgcagccagccagttggttccaacggaacatttccatccacgcccgccaccgcgcaccggcatctccatctccatctctatctctgatccgctgcagcccgcaggcacgttctccatcagtccggccgaccggcgcgcggcaggcagcgagcgggccactgtgtgcgcgcgcagcgcagctaccgaattttcgctgcacaaaaccagagggaggagaggggagggtgggggcaaaaagggaacgaaaagaaagggagggacagaggtgcagggccaacctgcgtggtgcgggtggtttcgagcacgggcaagcgccaccccgctcgctgccgatcccaatccggctacagcagcggccgccggccgccccgcctgcggggcctccctccgaccgttccccccgccctccatggcaggctccatggtggaccgcgccaccagcgacatgctcatcagcccggactgggctaagaacatggagatctgcgacatatgcaaccgcgaccctgggcaatcgaaagatgtcgtcaaggcactgaagaaacggattggccacaagaatccaaaagttcaacttcttgcgctaactttgttggaaactgttattaaaaactgtggggatatacttcacatgcatgtcgcagagagagatatattgcatgagatggtgaagatagtgaagaaaaagtctgatcctcgtgttaaagagaaagtattggtgctgatagatacatggcaagaagcatttgggggaccacgtgcaagatatccacaatactatgcagcataccatgagttggtgcgtgctggagctgaattccccaagagaccagagaaacctgcacctttgtttaatggtcagtctcaagcagcaaggaatatgcgtagtcctgaccaacaggatgctgcagaatcttctactgccaatgatttccctgctttgagcatgtcagagattcagaatgctcgtggtattatggatgtacttgccgagatgctgaatgctttaggccctggaaacagagagggattaaggcaggaggtaattgtggaactcgtggaccaatgccgcacttacaagcagagagtagtgcagctagttaattctaccacggatgaggaacttatgtcgcaggggctcgcactgaatgatgatttgcagagtgttctagcaaaacatgatgcaatagcagcaggcattgcagttcgagtggagaaaaaaccaaagtctttgcaatcacttgtagagactgaggattcggcaaaccaggactccaaaaaggagcagggactcatagatattgaggatcccacaagccaagatgctgcaaaagagccaaatcaaagtacaagtgaccaatctccttttgagcaattagctcttccagcaccaccagtgtcaaatggcgcagcaacaaaatctgaccttggcattgatcttctgagctgggatgatacccctgctacagcacaaaatccactagctcttgttcctgtcacagatcctcttgctgactcgacttcatcgaatcaaaatgcactagcaattgtggacacattttcacagaacagcaccgttaacagcaacactcaagctgctgacccctttggtctcaatccaagttctgctattccaggatctcaggcatacaacactccaactcagcagcatttccagtcgcaacaggcgacactgtatccgaacgggggtgctggaacgtcctatgatcaggcatcccagtttaataatgttaattcagggtggaatgatcaagctgccaaccttccagcagagcaagcactgaattacgatgatcaaagtggaaaccttccgccacctccttgggaggctcagccagcggcaagcaacgaaatgccaaatggtgaattgggaggcgtgcaacctctccctgggacagctgggcagttcggcggcatgcagcaggcattgcaaccacaagttaaccacatgggagttccacaaaggcagccaatgtacagcaaccagtcagggattggggtggcgccaacactgatgcaggcaggcttggggaaccagcagttgggttcgacatccatgatgggcatgcctccacagatgtatggcggcggatcgcaggcagccatgatgtacccgcaacaaatgccagtggcgccgcagcagccgatgtatggtggtggtggtggtcgtctggcagggtacatgcagcatcctgctgtggccgctgcgcactactacagcaacctggggacggcgggaatgtatgggtaccccggcgcgaacgggctgtcccagagcatgtatggcctctcggtgcaggataactcgtcgtaccagactaagacggcgccaccctctgcggtgatgaagcccgaagacaagcttttcggcgacctcctgagcattgccaagaccaagaaagcttcatgagacgagcacgagcaggagcaggagctttgtcgtttgatcttttacacttgtgtaacattcattgtctggctgtcgtataagctttttggggtcctcttttttttttaaaaaacattatttgttcccacgatcccattggattcgttataccgtacgtaaatgatgattcaataaagggtgtgcagtacgtacttacgatattgtacatacggtgcagaaatgttttcagtattcatatatgtataaggaaccgatgacggcggagatccggcgagctgtgtacagacccaaaggctctcctcatctgaagcatccgtggctttccttggagatgtaacctgccttttctgtttttaatcaatcatctctgtactctgttctgcctgcgtcgctttcggctgcatcgctagcactagcagcggggtggggtgggggtcgtagtcgtgctaagcaagcagcgatccgcaccagaatccatccaatcgcgcggccatgggcgacggcgagacgcggctggtggccgccgcgacggcgaggaagtggctggaggacccgcgcgtggggtacgacggcggcgtcggcagccaggcgctgagctgcgtggcgatcgccggcgcgcgggtctccgtcgccgagcgcggccgcgtcgtctgctcgctccgcgtgcgcgcccccgtcgccgacgcggaggggaggtggcacgccggagcgatcgcggcggcggtggactgcgtgtgctcggcggtggcgtacacggtggaggccgcgcccacggctaccgtccactacagcttgtcctacttctcgccggccgatcgcgacacggaggtggaggtggaggggcgagtggtgggccggatggggaagctgacggccgcggtggtggtggtgcgcgataaggagtccggcgagctggtcgccgtagggaggcagtgggtgacccccgcctggccgaccaaggccaacaaaaccagcaagctctgaagaagaaatgcagtagaattttttgtataataattcgccggcacacttgtcatcttggaaattcgatctttcatttcatcttggtaggtattcctggtttcaggcacgagctcggactcggtctttggggccggccgggatcagaatcagacgcgggtacgagcggtgccgcggcattgtctggatcttgcactggggaacg

SEQ ID NO: 113857 - DNA, 2082 bp, Zea Mays
tccatggcaggctccatggtggaccgcgccaccagcgacatgctcatcagcccggactgggctaagaacatggagatctgcgacatatgcaaccgcgaccctgggcaatcgaaagatgtcgtcaaggcactgaagaaacggattggccacaagaatccaaaagttcaacttcttgcgctaactttgttggaaactgttattaaaaactgtggggatatacttcacatgcatgtcgcagagagagatatattgcatgagatggtgaagatagtgaagaaaaagtctgatcctcgtgttaaagagaaagtattggtgctgatagatacatggcaagaagcatttgggggaccacgtgcaagatatccacaatactatgcagcataccatgagttggtgcgtgctggagctgaattccccaagagaccagagaaacctgcacctttgtttaatggtcagtctcaagcagcaaggaatatgcgtagtcctgaccaacaggatgctgcagaatcttctactgccaatgatttccctgctttgagcatgtcagagattcagaatgctcgtggtattatggatgtacttgccgagatgctgaatgctttaggccctggaaacagagagggattaaggcaggaggtaattgtggaactcgtggaccaatgccgcacttacaagcagagagtagtgcagctagttaattctaccacggatgaggaacttatgtcgcaggggctcgcactgaatgatgatttgcagagtgttctagcaaaacatgatgcaatagcagcaggcattgcagttcgagtggagaaaaaaccaaagtctttgcaatcacttgtagagactgaggattcggcaaaccaggactccaaaaaggagcagggactcatagatattgaggatcccacaagccaagatgctgcaaaagagccaaatcaaagtacaagtgaccaatctccttttgagcaattagctcttccagcaccaccagtgtcaaatggcgcagcaacaaaatctgaccttggcattgatcttctgagctgggatgatacccctgctacagcacaaaatccactagctcttgttcctgtcacagatcctcttgctgactcgacttcatcgaatcaaaatgcactagcaattgtggacacattttcacagaacagcaccgttaacagcaacactcaagctgctgacccctttggtctcaatccaagttctgctattccaggatctcaggcatacaacactccaactcagcagcatttccagtcgcaacaggcgacactgtatccgaacgggggtgctggaacgtcctatgatcaggcatcccagtttaataatgttaattcagggtggaatgatcaagctgccaaccttccagcagagcaagcactgaattacgatgatcaaagtggaaaccttccgccacctccttgggaggctcagccagcggcaagcaacgaaatgccaaatggtgaattgggaggcgtgcaacctctccctgggacagctgggcagttcggcggcatgcagcaggcattgcaaccacaagttaaccacatgggagttccacaaaggcagccaatgtacagcaaccagtcagggattggggtggcgccaacactgatgcaggcaggcttggggaaccagcagttgggttcgacatcctgctgtggccgctgcgcactactacagcaacctggggacggcgggaatgtatgggtaccccggcgcgaacgggctgtcccagagcatgtatggcctctcggtgcaggataactcgtcgtaccagactaagacggcgccaccctctgcggtgatgaagcccgaagacaagcttttcggcgacctcctgagcattgccaagaccaagaaagcttcatgagacgagcacgagcaggagcaggagctttgtcgtttgatcttttacacttgtgtaacattcattgtctggctgtcgtataagctttttggggtcctcttttttttttaaaaaacattatttgttcccacgatcccattggattcgttataccgtacgtaaatgatgattcaataaagggtgtgcagtacgtactt

SEQ ID NO: 113858 - DNA, 650 bp, Zea Mays
tttttttttacgtttgttttggtttgcatatttatctgtgttcatatattaaagttcctatgtttccagggttttgtcagcccagcagacagaacttatgacgcgttaggattagtgaatcgtttaagcaagcacagtgctgctgctgcagtggaggcctgtgagatgctagcaagtggcaacacgacttctgataaggaaaacaaggataatacggatggcaaggaactagtgacaagaaaatcacagattaagatcatggccgaggcgcgagtcctggatttcgacgaatctcccgcacctgcaagaacagcagataagaaacttggcagctgtcaccggagatctgttagctcacccattcttccttcccccaaccttagaagtttccgataggtacaccatatatggcatcatcgtacattacccacctgcatgtattggtgaactctattgttattatgtctccttagagcgcgttgttgaaactattggagcgtttcctttctttcgttactctattgttattactattattatgtctctcagcccggaaacaggcatcagtaccagtgaactgttgaaactaccctaatcattcaaattaaattattatattgcccgatgcatgtagcttcttgtgacaacaa

SEQ ID NO: 113859 - DNA, 2831 bp, Zea Mays
atgccgagtgataaagcaaaagctccaaagaagaagggcgaagaggatcctggaatcccgccagctccctgtgaaggagaaattagccatgagccacatagacaacggtcactcaatgggtggcaaaaggttctaaaccctgaattggtcaaagggccatggtccaaagaagaagacgaaatcatagttcagatggtaaacaaatacgggccaaagaaatggtcggccatcgctcaagctttgcctggacgcataggaaagcaatgccgggagcggtggcacaatcatcttaacccagccataaacaaggaggcatggacgcaagaagaggagattactcttattcatgctcataggatgtatggaaataaatgggccgaacttacgaaatttttacctggaaggacggacaatgcaattaaaaatcactggaacagttcagtgaagaaaaaggtcgattcgtacatatcttctggtttactttcacaagtcccatgcctctctctgattgaatgtcctgcacaatgtgactctttatcggctatggaccaacaaaacaacggaggtactgattgcaatgaccagaacactagcgtggtcttaagctctgatttacaagtaaatgtggatgccaacaagaaagaagcacatgactctcactcgtccttgtgtcaaggggtatgctatccttccacagagactgtaggatctgttttgcctgatgacctggagatggatatggatgaaggatcaggaaactctatttttgcagacgatcaaactctttgtagcacatcaaatcaagaacaatctatggtgccatttgttgttgcacaggaaatgcctgtctctgtgctatcaagtgtttctagcgctgagcagaaacggcacttaatctctgatgccaaaagcttgaaatccgaactttggaaagatgtttgtttgcaaactcttattacaggagatacagatgaccctgatgcttcttcaagattaaataacccagattcttctaaaatggacaccaattttttgaaagaggcctacccattacacacaccaaatccatccagtgtgattgaaactgtatatgaaccgatggcgttggtgacaatctctcccccttttatatgttcagatggtttgtctttcgcacccgaaaatagatctaagccaggagaaatgtcagactgtgaagcagagatggtcacatgctcaaacaatttttttggtaatgccgagcaatctgctaaacttgccagcagtgatgacaggccagaggctttcacaatgactgagagcactacaaactgtgggggtgaacaattgacagatgccaaagaacctgtggccagtacagcaaaagaacggttatcgaaagacatcgagactatgccagataaaaagaagggtgagggggctctattctatgaacctcctcgattccctggtttggatgtcccgtttatcagttgcgatcttgtaacttctgctgatctgcaagaatttagtccccttggaattaggcagtggatgcggtcgaccatgaatgtcccaactcctttaagattatggggctctccaacacatgatgaaagcccagatgcactaaaaactgctgctgaaagcttcccatgcacaagttcaataatgaaaaaaagacagagaagtctattgtcccctactccagatgaaagaattgagaagaaatctgggattgcaaagggggtgacggacatctcctatatgataacggccacatgttccatgaatgcaaccaatgatgaagacattgttactgaatcagctgtgtgtgctaagcaaccttctttgaaacatctagacaagaagcttgagttctctgacattaacaaggaaaactctgatggagcatctgaacaggccaaagatgcacaaaacacacaactcgtggatgagcaacattcctcaccaaatgttgtgaatcctaacactgatctacaagacaatatacaacctgtacagattcttgtagagcaaagcagcaataaccttatttcctctgatcatggtgcaaagccatcctgtaaggaagtgattagttcaaaatcaaagcctacaaaactacttgttgaaaaatcatcaccatgtatcaacgtggattacgaatatgtgaatttattggctgataccccaggtatcaaaagaggactcgaatctccatctgcatggaagtctccttggtatatcgatatgcacatgcactttcagggttttgtcagcccagcagacagaacttatgacgcgttaggattagtgaatcgtttaagcaagcacagtgctgctgctgcagtggaggcctgtgagatgctagcaagtggcaacacgacttctgataaggaaaacaaggataatacggatggcaaggaactagtgacaagaaaatcacagattaagatcatggccgaggcgcgagtcctggatttcgacgaatctcccgcacctgcaagaacagcagataagaaacttggcagctgtcaccggagatctgttagctcacccattcttccttcccccaaccttagaagtttccgataggtacaccatatatggcatcatcgtacattacccacctgcatgtattggtgaactctattgttattatgtctccttagagcgcgttgttgaaactattggagcgtttcctttctttcgttactctattgttattactattattatgtctctcagcccggaaacaggcatcagtaccagtgaactgttgaaactaccctaatcattcaaattaaattattatattgcccgatgcatgtagcttcttgtgacaacaa

SEQ ID NO: 113860 - DNA, 190 bp, Zea Mays
gggtttcgtgtttattggtcatctataatataggaggcgagggtggcggcacctcccaggcatcgacaatggggcgggagttccagtccttcatcttcaggtcgtcgcgcaccgagcattcctcgcaggagacgactcgtctggcgcgcacgtccaggccgaagagcttggacttggagccctggaagaa

SEQ ID NO: 113861 - DNA, 1651 bp, Zea Mays
gcccctaccccagtctctctgctggcttctcattgacatggacgtctcagcgttccttgcactgctgctcattgcccccctctccggcctactacttttcctctccaccgggaggaagacgccgtacggcggcgatgaaggccggcggttgccgccgtcgcctcggggccttcctctcctgggacacctgcctcttctgggccccctgccgcaccggaagctgtgggcgatggcgcaggcgcacggccccgtcatgctcctccgcttcggccgcgtgcccacggtggtggcgtcgtcggcggccgcggcgcaggaggtgatgaagacccgcgacctggcgttcgcgagccgccccagggtgcgcatggccgagcgcctcctctacggccgcgacgtggccttcgtcccctacggcgagcactggcgccagggccgccgcgtctgcgtgctccacctcctcagccagcgccgcgtcagctccttccgccacgcccgggagcaggaggtcgccgcgatgctcgcccgcgtccgccgcggcggcgcgcccgccgtcaacctcaccgcccacatcatctcctacaccaacggcatcatctcacgcgcggcgttcggagggatcggctactacgacggtcccgacggcggcggcgagaagctcgcgaagttgttcgccgactttgaggggctcctggggaccgtcaccgtgggggagttcgtgccctggctggcctgggttgacgcgctcatggggctggacgccaaggccgcacgcacgtccgcgcagatggatgccttcctggaacaggtgatcgcggaccaccgccggaggcgccgtggcggccaccgtgaaggtggtgacgatcaccgggacttcgtcgacgtgctgttggacgtgaacgaggacgaggcgcacgccggtggagccacgttcgacgacgtggccatcaaggccattatcctggacatgtttgccgccgccacggacacttcctacacgacgctggtatgggccatggcggagctcatcaaccacccacgcgagatgcgcaaggtccaggacgaggtccgcgcggccgtcggcggcggcggtcgcgtcaccgaggaccacctcgaggagctgcgctacctcaggtgcgtcatcaaggagacgttgcggctgcgcacgccgctgccgctcctcgtaccccgggagacgaccgtggacacggagctgctcggctaccacgtgccagcgggcacccgcgtcatcgtcaacgcgtgggccatcgcgcgggaccccgccacgtgggagcgcgccgacgagttcgtgccggagcggttcgccggcgacgacctcacggcggactacttgatgcccgggcaggacttcaggtccgtgccgttcggcgccgggaggcgaggatgccccggggtggggttctccgtgccgaccatggagctggcgctggcgagcttgttgtaccacttcgactgggagctgccggccggcgtggcggcgaagctggagatggacgaggtgaacgggctgtcggtacggcgcaaggcgcccctgtatttggttgctaaggcatggtctcctcagtaagatcgatctaccatgtgatgtggtgcagtttgtctgaaatgaatattctgtgtgtgtctagggctc

SEQ ID NO: 113862 - DNA, 1881 bp, Zea Mays
gctccccgcgcccggaagggcgacgccggcctcggcctcgccgccgacgccctcctcctctgggtcggggcttaccacgtccgtcgttgtggggatcgcggtcggcggcttcgccgtgctgctcctcggctgcctgttctgcctctgcctcttcaggagcaacaagaggagccggaggcggcaccgccaccacccgccaccgccgccgccgccccacctcttgcactactacggccacccgccgccgccgccgccgcctccgcacaaaggggatcagcaccaaagctggcagcataacgcccctccaccaccccctgatcatgttatcaagatcaattcacatcctacccttccgccgcctccgcataacgtacatagcagtggttccgcttcgaaccactcgggtggtgagagccgccctgcgctgtcgcctggcactgcccttagcttttcaaggagcacattcacttacgagcagctgatgacagcaacgaatgggttttctgacgctaatctgctggggcaaggaggttttgggtttgttcacaaaggagtgctaccagatggcacagaggttgccgttaagcagttaagagatggcagtggccagggagagcgcgagttccaggctgaagttgagattatcagcagagtacatcacaagcatcttgtatccttggttggctattgcatttctggagcccacaggttgctcgtctacgagtttgttccaaacaatacattggaattccacttacatggaagaggcagaccaaccttggattggccaacaagactaaaaattgctttgggttctgcgaagggattggcatatcttcatgaagattgtcatcctaagattattcatcgtgacataaaggcctcaaatattcttctcgatctaagatttgaagctaaggtggcagattttggacttgcaaaattcacttctgatgcaaacacccacgtttcaaccagagtgatgggcacatttgggtatctagcacctgagtatgctgcttctggcaagctcactgagaaatcagatgtcttctcttttggagtaatgcttcttgagctaataactgggcggcgccctgtaaattcaagacaagcggacgacaacctggttgactgggcaaggcctctgatgataaaagcatttgaggatggtaatcatgatgctctagtggacccccggctgggaagtgagtacaatgataatgagatggcgaggatgatagcctgcgcagctgcatgcgtccggcattcttcacggcggcggccacggatgggtcaggtcgtccgggcgctggaaggcgacgtatctctggacgacctgaacgagggcgtgcggcccgggcacagccggttcgtggggtcgtacggcagttcgacgtccgactacgacaccagccagtacaaggaggacctgaagaagttccggaagatggcgctgggcggcagcgggctccagagcagcagcgcgcagacgccgacgagcgagcacggggagaacccgtcggtgtcggtgtcgagcagcgacggcgacggcggcggaggaaccggcgaggagcgtgaagacagacggcaggcagcgtcgtgaggcgtgaggcgtgcccagcctacggcccccgcgcatgcatctgtagatcctagtcctctcgacatcgctacgtacatgtctaattgatagctgacctgtggccgggaggcgggactactgagagattcatgattgctttcttttcttttgtgtgtgtgattctcttggtgggtacactggtctcatgcatgcgatctctgtataaattcaccgactctttaggaactgattactattggctattcgtatattatgagtatactcagtgttgcacg

SEQ ID NO: 113863 - DNA, 2163 bp, Zea Mays
gattattatatttattcactggtaaagcccagtggagagcacacgcctcttctccccccccaaaaaatccagcagcagcagcaagccccacgcaacattagcagcaggagaccaccccaatcccccacggacattcgccgcgaacccttatctgcacgccgcgccatggccgccgccgccgccgccgcggtcgcccacctctccatccacggccgcctccgccgctcaccggagcatcggccgtccatcaccaccaccaccacctcctcctcttcctcgtccgctcaccgcccgtccctgctgcggtgccgcgcgttcaagcaggaggccggcgacggcgacccggctgaggccgacgcgcggaagcgcaggaagggcccgctgtacaagctcaaggcggcgatccagggcctcgcgggatcccgctccgccgccgccgaggtgtacgggggagagtaccagtaccagcgcgccgtcgagaaggcggaggagatattcttctcggttactactcagctaggcagatatgttatcactatgatgagcagcggtgttgtacttggggttggattccagctgtcaggtggagacagccaaatgaacgaactaatttggtatagctggcttggtggggtgattatcggcacaatgataggtgcaaacagtgtcctagaggaacactgcaaagctggacctcgcaatgtcgtcataactggaagcacaagagggttaggaaaagcgcttgctcgtgagtttcttctttctggagaccgtgttgtaattacttcacgaagtcctgaatcagtccttcagactataaaagaacttgaagagaacatacaggaagggttatctgttgccaaaaagaagcagaggaatattctatcgcatgccaaggttgttggtacagattgtgatgtctgtaaacctgaagatgtgaaggagttagtgaattttgctattaatgagcttggttcagttgatatttggataaataacgctggcacaaataaaggttttaggccattggtaaccttttcagatgatgacatcactcagatcgtctcaacaaacctagttggttctctactgtgcaccagagaagccatgaatgtcatgcaataccaagagaagggaggccatatattcaacatggatggagcaggttctggaggatcaagcacaccactaacagctgtctatggttcaactaaatgtggactaaagcagttccaaggatcacttctgaacgaaagcagaagatcaaaagttggagtgcatactgcttcacctggtatggtcctcacagaccttctgttaagtggttcatcgctcagaaataaacagatgttcaatttaatatgtgaacttccagaaacagtagccagaactttggttccaaggatgagagttgtaaaaggaagtggaaaggcaatcaactacttaacaccaccaaggatcttgcttgctctggttactgcatgggttcgacggggtcgatggtttgacgacgagggaagagcggtgtatgcagctgaagctgatagaattcgcaactgggctgaaagtcgagcacgcttctcgttcaccgacgccatggagatgtacacggaaaacacatgggtttccgtattctcgctctcggtggtctgtgcgttcataatcctctctagctccggtggacctcttccaggcacatgatttccagagctgtcaaactactagtagacggccatgcatatgctcattttttaccccaccaaaggcattctactaccagaagccatttgatacagcacttaatgaatggggaagaagagaaccccccacagatgtagatatataggtgcaacggagattagcagctgcctcctcgcaccatttaaagtttggctagctaacctatgtgctcatagaagggtaaatagaatttattgcgtgggcattccactgccgtacgtaagctggactatgatccgtgacttttttaaggacatgtatgcaaagttaggtgagcaggatcagagtcgacattgcctcgtgtacatgcatgtagttgtcattataatcactgtaacttctggtatcgcttgtacccttcaaaattcgaagacattatattgtgaagcgaagtggcacacaccatgtgcatatggtttatct

SEQ ID NO: 113864 - DNA, 2732 bp, Zea Mays
gattattatatttattcactggtaaagcccagtggagagcacacgcctcttctccccccccaaaaaatccagcagcagcagcaagccccacgcaacattagcagcaggagaccaccccaatcccccacggacattcgccgcgaacccttatctgcacgccgcgccatggccgccgccgccgccgccgcggtcgcccacctctccatccacggccgcctccgccgctcaccggagcatcggccgtccatcaccaccaccaccacctcctcctcttcctcgtccgctcaccgcccgtccctgctgcggtgccgcgcgttcaagcaggaggccggcgacggcgacccggctgaggccgacgcgcggaagcgcaggaagggcccgctgtacaagctcaaggcggcgatccagggcctcgcgggatcccgctccgccgccgccgaggtgtacgggggagagtaccagtaccagcgcgccgtcgagaaggcggaggagatattcttctcggttactactcagctaggcagatatgttatcactatgatgagcagcggtgttgtacttggggttggattccagctgtcaggtggagacagccaaatgaacgaactaatttggtatagctggcttggtggggtgattatcggcacaatgataggtgcaaacagtgtcctagaggaacactgcaaagctggacctcgcaatgtcgtcataactggaagcacaagagggttaggaaaagcgcttgctcgtgagtttcttctttctggagaccgtgttgtaattacttcacgaagtcctgaatcagtccttcagactataaaagaacttgaagagaacatacaggaagggttatctgttgccaaaaagaagcagaggaatattctatcgcatgccaaggttgttggtacagattgtgatgtctgtaaacctgaagatgtgaaggagttagtgaattttgctattaatgagcttggttcagttgatatttggataaataacgctggcacaaataaaggttttaggccattggtaaccttttcagatgatgacatcactcagatcgtctcaacaaacctagttggttctctactgtgcaccagagaagccatgaatgtcatgcaataccaagagaagggaggccatatattcaacatggatggagcaggttctggaggatcaagcacaccactaacagctgtctatggttcaactaaatgtggactaaagcagttccaaggatcacttctgaacgaaagcagaagatcaaaagttggagtgcatactgcttcacctggtatggtcctcacagaccttctgttaaggtaagctctccatacttatcagttgtcattatatgatttgtaaaggtcgctgtgaacttcatatacgttgactgtctgatataagaataatattgcatttgacttggcccaaatgttcataatttctaaactgcagagtatcgtgtaacaattaacaatttgaggacacggtttgactttgtgcttctttgcatacatatgcataacacatcaaatgtcaagctgtgtagatgtttctgagattaccttggcacaaatcggcatagtctggtgctgtagaatactagaatatatattccatagctatgtgaattagttgtttctctatatatgaaattaattagtgagacatgttttagctatgagtctacaacatgcttaaataagtaaataactatgataacagaaagaccaaacatagccttagtagttcttgtctagttttgctatatgtgtaaatgtgaattacttcttttgcagactactcacctatgatctgatgaaccctcttactgtgacatgttggaatcatgattcttcttctttactgactacctgtttctttgcagtggttcatcgctcagaaataaacagatgttcaatttaatatgtgaacttccagaaacagtagccagaactttggttccaaggatgagagttgtaaaaggaagtggaaaggcaatcaactacttaacaccaccaaggatcttgcttgctctggttactgcatgggttcgacggggtcgatggtttgacgacgagggaagagcggtgtatgcagctgaagctgatagaattcgcaactgggctgaaagtcgagcacgcttctcgttcaccgacgccatggagatgtacacggaaaacacatgggtttccgtattctcgctctcggtggtctgtgcgttcataatcctctctagctccggtggacctcttccaggcacatgatttccagagctgtcaaactactagtagacggccatgcatatgctcattttttaccccaccaaaggcattctactaccagaagccatttgatacagcacttaatgaatggggaagaagagaaccccccacagatgtagatatataggtgcaacggagattagcagctgcctcctcgcaccatttaaagtttggctagctaacctatgtgctcatagaagggtaaatagaatttattgcgtgggcattccactgccgtacgtaagctggactatgatccgtgacttttttaaggacatgtatgcaaagttaggtgagcaggatcagagtcgacattgcctcgtgtacatgcatgtagttgtcattataatcactgtaacttctggtatcgcttgtacccttcaaaattcgaagacattatattgtgaagcgaagtggcacacaccatgtgcatatggtttatct

SEQ ID NO: 113865 - DNA, 1480 bp, Zea Mays
ccagttaaccaccaccaccagtccatcagtcttgtccgacaccacactcgccgtcccgcaatgaactacggcggcggcagcaggagcagcagccggctccgggaccggctggcccggatgttccgcccgagcgcgctgctccgctccacctgcaacacggccgccgccgcgtcctcctgctcctcctcgtctcccgcgtccacggccaagcctccgcctccgccctgtggctgcgggcggcctccgcgtgctcctccagccgcgcgctgctcggcgccgtcgtcgacggggactcgtcgttcctcgcctcctcgcggcgcgacctggccgtcgccggccgcgccgagtccttctccgccgccgtcgaccgccgccgccgcagccgcagcagcctggacgcggcgccgccgccctcccgcttctctgtcgacgcgccggcggctctggcggagacgggccgggacaaggaggagaagaagaagaagaagaagagcccgcgcgacgacgacgacgacgagcaccggctcggtgtcggtggcagcagcaagaacgacagcaggatgaagctgctgctgtccaacccctacggcttcagcagctccgacgacaccgacgtcttcagcagcgacggcgaggacgacgaccgcgccgccggccgcggcagcaagaggccgggcgagtcggcggcggagaccttcttctcctcgtcgcgaagcttctcgtcggactcctccgagttctacaccaataataagaagcagcacaagaagaagacggcgacgaaggcgaaggcgaaggcgaagggaatggcaaaggcaaaaccccctgcagcagcaccctccgaccgcagtagcaaggctccggcatcgtcgtcccgccgccgtccccagtaccaccggcgcgcggcgagcagctgcgacacgtgcggcgtgcgcgacgggttccggcccgtggtggtggtgtcggcggcggcggaggagcaggtgcgcagggggttcgcggtggtgaagcggtcgcgggacccgtacggcgacttccggtcctccatggtggagatgatcgtggggcggcagctgctgggcgcgccggacatggagcgcctgctgcggtcgtacctgtccctgaacgcgccgcgccaccaccccgtcatcctgcaggccttctccgacatctgggtagtcgtccacggcggctaggtacctagctagctagccttcacgtgcaccggccggatcggtccggctagctagctgtgccggaccatgcgcctgcaacttcgtccgccatcgtcgtctcgtcgccaataagcctgctgtcctgtccatgcatgttcatgcgcgattaacctgccttgttgttgttattattattatttgttagttaaggcgagggcttgtcaatgagctcaagtttgaaatcaatcctgtgcgagcgagcactgctgccgcctttccttttattatatgcatgccaccatttg

SEQ ID NO: 113866 - DNA, 2223 bp, Zea Mays
atggcgcggtgctctacgtgcgatcgtttctcgaggttcatggagacgacggacgagttcgcggtgccgccacgtcccgcgctcgtgcacccggacgccgacggcgttcgaaccccgtcggccctcggcccgctctcccccgaggacccgccacccgcgttcatggagcgagattggcgacacggcggcgataacacggccgcgtatccagggtgctcgccgttccagccgtccgcggccgggcgcccggtctcgatcagcctgccggcgtcgccgacaggcgggttcgacatctccagcaggacggaggcggagctgcagcgggatgccgccgccgtcacggacgcgccgccgccgaggatgatgatgctgccgccgttcgccccggcgccggccatggctctcgagcagcctggcaaggtggtgttccggtcccagccgatccccgctgcgccgccggtaggtgacgggggccacgacgacgagttcggccgcagcgcgccggcggccatggccctcgagcagcctggcaaggtggtgttccggtcccagccgatcatccccggtgcgcctccggagggcgacggcgccgcccggggccacgacgacttcggccggagcgcgccggcggccaagacgcgcagggacagccgggacaccagctacgactcgttcaagacgtggtcgggcaagctggagaagcagatcgccacgcacctgctcggcagcagcctgcagcagcaaccggagcacggggaggagccggaggaagacgacgcggcgagcgaccgccgcaactcctccatgcccaaagtgcagcgcttcttcgccgcgctggaaggccccgagctcgacaagctgagggtactgacgccgatgacaccatccatacgttatactagtactactagtgctgttgacgcgaacgccaggtggcgtgcgtttgttagcttcgtcgccgccgtgctgctgtggccggcgcacgtgcctttagctgtcgctgatgccgatgaagaagctgacgtcgttttgtcgtactggtggcagtcctcggaggagctgatcctgccgtccgacaagacgtggccgttcctgctccgtttcccggtgtcggcgttcggcatgtgcctgggcatgagcagccaggcgatcctgtggaagcggatcgccatctcggcgtcgacgcggttcctgcacatcacggtgaagatcaacctggtgctgtggtgcgcctcggtggcgctgatggcggccgtgtcggcgctgtacggctgcaagctggtgttgtacttcgaggcggtgcggcgggagtactaccacccgatccgcgtgaacttcttcttcgcgccgtggatcgcgtgcctgttcctggcgatcggcgtgccggacgtggtggcggccacgctcccgcactggctgtggtacgtgctgatggcgccgatcgtgtgcctggagctgaagatctacgggcagtggatctcgggcgggcagcggcggctgtcccgcgtggcgaacccgtcgaaccacctgtccatcgtgggcaacttcgtgggcgcgctgctgggcggcatcatggggctgaaggagggtcccatgttcttcttctccgtggggctggcgcactacatggtgctgttcgtgacgctgtaccagcggctgccgacgagcgagacgctgccccgcgacctgcacccggtgttcttcctgttcgtggcggcgcccagcgtggcgtgcctggcgtgggcgcgcatcaccggcgagttcggctacggctcccgcgtcgcctacttcatcgccatgttcctgtacgcgtcgctggccgtgcgcatcaacctgttcagagggttcagcttctcgctggcgtggtgggcctacacgttccccatgaccagcgcggcgatcgcctccatccgctactcgtccgaggtgaagaacgccttcacgcagtgcatgtgcatcgggctggccgcggcggccacgctggccgtggcggcgctcttcctcgccacgctgctgcacgcggtggtgtaccgggacctcttccccaacgacatctccatcgccatcacggagcgccggcgcagcaagcccctcgtcggggaaaagatgctgctccgcctgcgcagcggcaagaaggtgcagcaggcgctctccaccgcccccgccgacgccgccgcggacctggaggccgcgcgcgccgccacgacgacgtcgtacacgtag

SEQ ID NO: 113867 - DNA, 1347 bp, Zea Mays
ttcccagcgcacaaggggaagaccagatctcccccatttctcctccacgccgccccctccgcatttcccgtgctcctctcgttccggcatggcggagcagacgcagccacaaggggaaggcggcgctagccccaagcacgagtccctgatggagaagctcgccgacaagctccacgtcggcggcggcaaggccgactcctcctcctcctcggactccgacagtgacgagcggccccgcccctcggcaccgcctgccgacgagctcaagcagccctccttctccgacgccgccgccacggcggccgccgaggccaaagccaaggtgttccgccttttcggccgcgagcagcccatccacaaggccctcggtggcggcaagcctgctgatgtgttcttgtggaggaacaagaacatctctgctggagtacttggtggtgccacagcaatctggatcttatttgaattgcttggctaccatctccttacttttgtttgccatggtctcatattcgccctgggtgttctctttctctggtccaatgcttcatcgtttatccacaaggctccaccaaagatcccagaggtgatcattcctgaagatttagttgtcaacattgcgctatccactcgttacgagatcaacagagcctttgccaatctccgccagattgctcttggccgggacctaaagaagttcctaatggttattgctgggttttggttgctttctgttcttggaagctgctgcaacttcttgaccttagtttacattgtctttgtggtgctgcacacagtacctgtcctgtacgagaagtacgaggatcagattgactcgtatggcgagaaggggtgggttgaaattaagaagcagtatgccgtgttcgatgagaaggttctgagcaaagtacccaggggtcctgcgaaagacaagaagcactagatgcaagtgattcgaggtccctgttagtagggaatgctagcaaaaccggttcgagtttctccggaggggggcagcacttgtgggtgtgagcaccagtttgccacctgtgcattacgttgcgtatggctgcttagttgtttggtcttgatgggagtaagccgaattgctagctttgcgcttcatccagtgatgcagacgcagcatacgaatttctgtagtgctgtttgagtttgatctgtgttgtatgatgtgtgcagactgtgcttgcgacacttttttggtacttatatattgatgcattttggaatttgatgatttttatggttttttttttgctgagcttagacaacacatacacgggctgttaaacattgttgctttgcccacccgactgctggagtcggcct

SEQ ID NO: 113868 - DNA, 1231 bp, Zea Mays
ttcccagcgcacaaggggaagaccagatctcccccatttctcctccacgccgccccctccgcatttcccgtgctcctctcgttccggcatggcggagcagacgcagccacaaggggaaggcggcgctagccccaagcacgagtccctgatggagaagctcgccgacaagctccacgtcggcggcggcaaggccgactcctcctcctcctcggactccgacagtgacgagcggccccgcccctcggcaccgcctgccgacgagctcaagcagccctccttctccgacgccgccgccacggcggccgccgaggccaaagccaaggtgttccgccttttcggccgcgagcagcccatccacaaggccctcggtggcggcaagcgtatggttctgtttcccacgctcccgatgctgcttgctattaggcttgagatttctagatcggatctgggtgggcctcggtgctcgggttgcgggctactagatctgactgctggagtacgttttatggaatgcgctagctagggtgttaagaacgaactggccgtttggatcacagattgggatcttgcctgctttgacaaatggaggcgactagtatgcttgatcactctaacgcttgcttcaaatttgatcaatccaagtcagtgcacttgggtacttatctgaactgtatgctgctaatatttctcaatgttaagcttgtccgaactgaggcacgcaacatttttacagtgtctggtctgccagacgaatactgatgccgtttcggtaacagtcatactgctactgactgcttgagtaacctttaaacaatactgcaaaccacttgaattcatgtggtctgtcggtgtttaacatggttggaaccaattgcttatccgcttagggatgctttgtcgtgactgcaagcacatttcaggggtgttatgtatttttgtatcagatcaatgctgaagggcccttatggttgttttgtgctaagattatgaaaatataaagttttaaaatttatttgtaaaagaaacatctagtagacttcatgttatgtttctctcaataaatggcatttcattggagctgtttggtactacattatctacactgaaatggaaggtctttctttggagaaattgtgatgcttgggttgtgtttttgtgcctgattatacatgtctttaatgtaaacaaatgacaaccagcacactataacctcattggtttgtgtctacag

SEQ ID NO: 113869 - DNA, 2258 bp, Zea Mays
acaaaaaggcacgccccacccagtccagtccccaccaagcaggcgccacccgttcggtccgtacaggaggggtccaccatgccgtgctcctcttcgtcgtccaaccccttccactccctcgcctccgccttccccttcctctcctccacatccccacccccatccccacccgcctcgcccgcgcccgccgctccccacctcgccgtcccgctcctcctccccgtctcctcggcttccgagtcccgccgcggggcgcagccgctgccgggcacgcggatggtcggcgcgggcgcgaccggcgggggtaacatggccagcggtggtggggggcccgcgttcgtgggccaggtgttcaccatgctcgacccatccgggaacgggctcatggccgttaccacacgcttcgagctcccgcgcttcctcaccaacaggactcctatgtggttcaaaaggatgctatcaccgtcgaagaagactgaaaatagtccagtatttaggttttttatggatctgaatgatgcagtatcctatgtaaagcgactaaatgtgccaagcggcatggtgggggcttgtcgccttgatgtagcatatgaacatttcaaggaaaagcctcacatgttccagtttgttccaaatgaaaagcaggtccaggctgccaataagctattgaagtcacttccacaaaggggcagaaggaaaaaacttgatggggttcctgtttttagtgcgcaaaacttgaatattgcagtggcaacaaatgatggaattagatggtacacaccatacttttttgataaaaacttgttggacaatatccttgaagcttctatggatcaacatttccattcgataatgcaaaatcgccatacacgtcgtagaagggatattgtcgatgatagtttaacatcagaaataattgaagaaagtgctgaaagcttgcttgagcccccagaggttcaagaattaatgaatgagattggcccagctggtataccattaaatgttgtaacgaaagctgcagagattcagtttcttgatgttgttgataaagtccttctaggaaataagtggttaaggaaagcttctggcatacaaccaaagttcccttatgttgttgattcatttgaagaaaggactgctgtttcaattgccaatattgctactaccagcagtttaactgcttcaaacgacgacagcagttgccagaataatcaagaaactcaatcttccgagccaagtggtgataacagcagctacagaaatcacaataatgaagatcataatcactttccgtttagcaatctgcttccaaatatatggccagggcatgacagaaagttcaaatcacaagagagtgacaataagtttagcagatatgatgccgacgtgaagagtaagttacaagcaaaccctcttcttccgaaaatcaccatggttggcatctcaatgggtgatggtgcacagatgagcaaagccaacttaaagaagacaatggaagacttgacaaaagagttggagcaaacgagtgaagaaaatatgttcggtgatgaaaaagacccactttttgttgccaacgttggtgactactcaaggataacaaagattagctctgcatgaggctcgttgaccaacaggcgacagcaagggtgttgtactgaactgctaacgaagtctacagtccatgatactgatcttagagggctctactgatataatgatgcaaatcggaggtcatcagatcatatggacattcgactgtcgaccgttctgactttagaggctatccaacgtcaacagttacaagccaatctaaattttcggatatgatttgccaaaaggatgattgtaaatagaaaagtttgcagaatgtccaccatgcagttaggcgtgaagatctgaagcaacatgttgttggatttctaagatcttagctcgtaacagctgtagagtatggtggtatatagcttcaggattgagatgggggtcacaggagtctgtcaggtgagcagagtcgaataaattgatgtgggtagcatttttcttcactagctgcgtatcggatctgagtgtgtatggcgagagttacggtaaatgttggttcgcatataggtccttggattatttattgtacgcgatatggtgaaaggaggttgtagctaacatgttgtgtctccgatcatcatactgacattattgtctctcatgatcttatacttgcttataaatagaacttaaaactttattttgagttgacagca

SEQ ID NO: 113870 - DNA, 523 bp, Zea Mays
tgcttctcatggggaaacgggaagtgaatgtttttctgactcgggaagttatacaaagctatgagctagccggtccggctgcctgcaccgcatgctcaagaagaagaatgactgtaagaaacaagcccagcaattcgaaggacagcatcacttctcaacattgggtgcaaggtggtattgatgagcgtcaagcactcaagttcaccccagaactccagatcagatgaagaggtgttttttttttcttgcatccctcatgtttatacattttttttacgaaaaatatattagaatgatctctggtggtagtgttggagttggaggcttactgatcatcgtgcacccgtcaggtcagagagcaactgcaagcctacacgacacaggagcccctttatttttctttcctcttaaggcaaggcaactcctgtttgtaggggaatcgttatggttctgcttctgattgctcctagttcttccatcattttcgtgttcaaagagaaggctcccagaaaataaaataacg

SEQ ID NO: 113871 - DNA, 1851 bp, Zea Mays
atggcggcagccgttgccgttcttcgcgccgccctccgccggggccgtccggcagctgcgtcgctactgcaccgccttcccaacccctctgctcggagcctcccgccaccgcctcctctcggtcgagcgcttcgtcccctctcgcggcttggtttctccgccggattcgggcactcctcctccaccgaggattttggcttcggctactcccccgccaccgaggattcagcggccgccgcgaagcccaagaccaagaccaaggccaggaagcaccccatgaagcagtcgcgcttcgacttcaccaaggtggacgccgcgcttctccccaccgtcatcctcgtcggccgccccaacgtcggcaagtcagccctcttcaacagatttatacggaggagggaggcgttggtgtacaatactcctggggaccatgtcactcgtgacatccgtgaaggagttgccaagcttggggatctccgtttccgtgtgcttgactcagctggacttgagactgcagcaacatctgggagcattctcgctcggacagcagacatgacagggaatgtattggctaggtctcaatttgccattttcttgattgatgtgagggatggtcttcagccgctggatcttgaggttgggcaatggctgcgcaagcatgcatctggtatacatacgcttgttgcaatgaacaagtccgagtcacttgatgagcatggatttctgactgctgctgctggagaagcacacaagttggggtttggtgaccctgttgcaatatccgcagagacaggcctggggatggcagaactctatgagatactcaggccattgtttgaagaatacatgtttcagcttcgaaataatgacctcaaccaagatgatcctatctcggaggttgaaactgaggcccatgatggtgatgagagcaagttacctttgcagttggcaattgtgggacgtcctaatgttgggaagtccacccttttaaataccttgttgcaagaacagagagttcttgttggtccagaggcaggcctaacaagggactcgattcgggctcagtttcaatttgatagtcgaaccgtgtatttagtggatactgctggttggatggaaagatcagggaaggagaaagggccagcatctttgagtgttgtgcagtctaggaagaacttaatgagagctcacattgttgctcttgtgctggatgctgaaaagattgctaagtccaaaagtagcatgaatcatccagaaatcgtgatagcacggcaagcaatagaagagggccgtggactagttgtgattgtcaataaaatggatctccttagagataaccaaacactgtttaacaaggttatggacgctgttcctagagaaatccagacagtcattcctcaggtgacaggaataccagctgttttcgtgtcagcgctggaggggagggggcggattgctgtgatgcgccaggttatagatacctatgagaagtggtgtttaagattgtcaacatcacggctcaaccgttggttgcgtaaggttatgagcagacattcctggaaagattcagctactcagccaaaagtcaagtacttcactcaagtgaaggcacgaccaccaacatttgttgccttcatgagtgggaagactcagctttctgatacagatactaggttcttgacaaagtccctcaaggaagatttcgacatcgggggaataccgatacggatcatacaacgttctgttccaagaaaagcttatgctaagcgcaacaacacaaggaacactggccctagggttgtcaggatgaaaacagacaaacggacagcggtatctgacccagccctgtcatag

SEQ ID NO: 113872 - DNA, 1355 bp, Zea Mays
atggatatactgttggtttgtacagttgtgctaatcaagtgctttcaggctttggatgcattgcttgatatatctggtgtgtcttcagttgaaaacatggaaacaaaccatcaaagtgccagaaggaatgacacatgtcatctagatatgttttctggaaatgggctatcagtggagaatctgactgcagggaatagaagaagtctacgccagttgacagatgagatatccaacactgggctccagtctgaattaggacacgagtttttatggggtgaacctcagatcagctatgcggaggctgttaaggaggcaccacgctcatcaacattgccgtcaagatcaactgtaatgaaagctggtccacaacaagtcctggattcactgtttaaaattcctgaaacacgcacgtatgagccaagttctatggactggaaaaaggtagtaaagaaactgcaaacaatcaattataccgctgcatcaaacaatcacgaaaggcctaaggatgggggtggctatcgtgagctccgtggtgttgctgcaaggcattacgataaaatgaaagaatactatcagaaagctgcctttgcatattcgaagggtgacaggtcatatgcttcttaccttgctgaggaggggaaacattatcgagaactaggtcgcatagaagacgagaaggccagcaggaatatatttgaagccagaaataagcatataacgaacacagtaaccatcgacttgcatggccaacatgtccaacatgctatgaaccttctcaaaattcacatgatgatttgtatttgcattccatctgtcttactgagggtaattaccggttgtggttcagaaggtacagggaagggaaaaataaagcgctcggttatagagcttgcggagaaggaacatattgagtggcgcgaagagaactctggaactgtagcccttcgacttggtgggccaagagagtatcggttccttgagcatgaaagcgattctgacctagtggggaactttaacatagattaacttctgatctaatctatgtattcccgtatttatgtgttatagctatggatgctgcctaggttgcgatgtaggctgtagttctgacacagaagctcggtattgtagttgggtaaattatggtgtaatgttgaccccaggctgctaactgtgcaatcacagaagctctgactgtacaaccgtagcccttctgtgagcaatgcaacacaggaaccgtaatcatcgtgagttgaagaatatcatactatggccgattgccacgggaaccaattttggcctgtaccaactggaacttacgatttgtatgaaaatatattcaacacttaggccac

SEQ ID NO: 113873 - DNA, 2236 bp, Zea Mays
acgactgaaaaaattctggaaatcgaaacccaccctcgagcgacgccaagcggccaagacggagaggagaacaattggggacggggaaagtccagggggaagccacggccaccggcgcgatgaaaccgtcgctttcgaagaagaagggcaagaagaagaagaagtcctcgctgccggccgccgcaccggcccctccgccggcggagggcgctgcggatacggaggcatgtcccccgctgcccggaaccataaccctaaccgctgccaccgctgctgcggcggtggtttcggagacggagtccagcagcagcggcgaggcctcgacgtgcccatccgcctgcttcaccgcaagctcgtctgggaccgcgtcctcgcactccttctctgccttgtcctcgtcggcgtccacagcttcgtcgtcggccgccggcgaggagcggcgggacctcacctggctgctcgacgcattcgccagcgccaccttcgaccagatcgactccgcctaccgcgaggccggaggggaccctttcgtggccgccggtatcctgtcctccacgcaggacactcacccgccgcagcccccgcagccggcgccgcagcccccgccgccaccagacctctcgccgcgcagtggatctggtggaaggaaggctggtcggaggcccaagcgggttgccgtggccgctacgggcatggtcgcggacgtgattggcaaggagtacacgcgacccgcggctaattctgtagtaagcatgccaaatgcttggaagggtcgggacggggagagcgatggcagcgggtctggtggccgcaaggacagtgttgaagaggcagagcagttcctgtgctccatgctcggggataattccgagcttggcatgggtgttgtcagagacgtgctaggccagtatgggtacgatgttgagaaggctttggatgcattgcttgatatatctggtgtgtcttcagttgaaaacatggaaacaaaccatcaaagtgccagaaggaatgacacatgtcatctagatatgttttctggaaatgggctatcagtggagaatctgactgcagggaatagaagaagtctacgccagttgacagatgagatatccaacactgggctccagtctgaattaggacacgagtttttatggggtgaacctcagatcagctatgcggaggctgttaaggaggcaccacgctcatcaacattgccgtcaagatcaactgtaatgaaagctggtccacaacaagtcctggattcactgtttaaaattcctgaaacacgcacgtatgagccaagttctatggactggaaaaaggtagtaaagaaactgcaaacaatcaattataccgctgcatcaaacaatcacgaaaggcctaaggatgggggtggctatcgtgagctccgtggtgttgctgcaaggcattacgataaaatgaaagaatactatcagaaagctgcctttgcatattcgaagggtgacaggtcatatgcttcttaccttgctgaggaggggaaacattatcgagaactaggtcgcatagaagacgagaaggccagcaggaatatatttgaagccagaaataagcatataacgaacacagtaaccatcgacttgcatggccaacatgtccaacatgctatgaaccttctcaaaattcacatgatgatttgtatttgcattccatctgtcttactgagggtaattaccggttgtggttcagaaggtacagggaagggaaaaataaagcgctcggttatagagcttgcggagaaggaacatattgagtggcgcgaagagaactctggaactgtagcccttcgacttggtgggccaagagagtatcggttccttgagcatgaaagcgattctgacctagtggggaactttaacatagattaacttctgatctaatctatgtattcccgtatttatgtgttatagctatggatgctgcctaggttgcgatgtaggctgtagttctgacacagaagctcggtattgtagttgggtaaattatggtgtaatgttgaccccaggctgctaactgtgcaatcacagaagctctgactgtacaaccgtagcccttctgtgagcaatgcaacacaggaaccgtaatcatcgtgagttgaagaatatcatactatggccgattgccacgggaaccaattttggcctgtaccaactggaacttacgatttgtatgaaaatatattcaacacttaggccac

SEQ ID NO: 113874 - DNA, 1290 bp, Zea Mays
acgactgaaaaaattctggaaatcgaaacccaccctcgagcgacgccaagcggccaagacggagaggagaacaattggggacggggaaagtccagggggaagccacggccaccggcgcgatgaaaccgtcgctttcgaagaagaagggcaagaagaagaagaagtcctcgctgccggccgccgcaccggcccctccgccggcggagggcgctgcggatacggaggcatgtcccccgctgcccggaaccataaccctaaccgctgccaccgctgctgcggcggtggtttcggagacggagtccagcagcagcggcgaggcctcgacgtgcccatccgcctgcttcaccgcaagctcgtctgggaccgcgtcctcgcactccttctctgccttgtcctcgtcggcgtccacagcttcgtcgtcggccgccggcgaggagcggcgggacctcacctggctgctcgacgcattcgccagcgccaccttcgaccagatcgactccgcctaccgcgaggccggaggggaccctttcgtggccgccggtatcctgtcctccacgcaggacactcacccgccgcagcccccgcagccggcgccgcagcccccgccgccaccagacctctcgccgcgcagtggatctggtggaaggaaggctggtcggaggcccaagcgggttgccgtggccgctacgggcatggtcgcggacgtgattggcaaggagtacacgcgacccgcggctaattctgtagtaagcatgccaaatgcttggaagggtcgggacggggagagcgatggcagcgggtctggtggccgcaaggacagtgttgaagaggcagagcagttcctgtgctccatgctcggggataattccgagcttggcatgggtgttgtcagagacgtgctaggccagtatgggtacgatgttgagaaggaacaactcgctgctttgtgttctgaatggatatactgttggtttgtacagttgtgctaatcaagtgctttcaggctttggatgcattgcttgatatatctggtgtgtcttcagttgaaaacatggaaacaaaccatcaaagtgccagaaggaatgacacatgtcatctagatatgttttctggaaatgggctatcagtggagaatctgactgcagggaatagaagaagtctacgccaggtgtttgcttagcacaattttagtttaatgctcgctctcttggatgctaaagatatgcattgatattttgtatggatgaaaaatgaaatttatctttattaagtgctgtttgtattaggaaa

SEQ ID NO: 113875 - DNA, 1884 bp, Zea Mays
tcctcctgtagtctacctccacacctgttacgacggtacgacctcttgctctctacctgcagtgtctatctgatcattgatgagccaacagcccaatatccctgagctaattcagctgtgccatccatcgagcttctgctgtgctgctggtcacgagcgcacatatatattatagactactactcttctgtcgacggcgtgccctatgcggccggccgagatcatggaccgccgccgctttgccgagacggagggcaagagggcgcacgacccgctgtacagcccgcggcgcgcggcgagggcgacggccaccggcttccccgtcggtgagcacggggaggtgctggcggggccagtgatcgtgggcgcggggccggcaggccttgcggtggcggcgtgcctcaccatgcggggcgtcccgtacgtgctgttggagcgccatggctgcgtcgcctcgctgtggcgccaccgcacgtaccgcaggctgcgcctccacctgcccaaacgcttctgcgaactgccgctcatgccgttcccgccaagctacccggcctacccaacccgggagcagttcctcgcctacctcgaggactacatcgccaccttcggcatcaggccattcttccgccaggccgtcgtcagcgccgagcacgacggcgacttctggtgcgtccgcaccctcgacggcggcggcaccagccgggagtaccgctccaaatggctagtcgtggccacaggcgagaacgcggagcccgtcgtgcctgacatcgacggcatccatgccttcaggggcctcgtcatacactccagtgactaccgcagcggcgagagctaccggggtaagaaagtgctcgtgatcggctgcggcaattccggtatggaggtgtctctcgacctctccaaccacaatgtacacacgtccatggtggtgcgtgactcggtgcatgttcttccaagagagatcatgggtgtctccacttttggtttgtccctatggcttctcacgcatctatcaattcagaaagtggaccaaatactcctggtgctcacacagcttgtgctaggagacaccgcacgcctcggcattcctcgacctaacattggtccgatggagttaaagagagtctctggaaagacaccagttctggatgtgggaactatagccaagatcaaatctggagacattaaagtgtatccagcaattcaaagttttcaagagcatggggttcagtttattgatggcaagtctgaatcatttgatgttgtgattcttgccactggatataaaagtaatgttccttattggttgaaggataaggatttgttttcagagaaaaatggatttccacataattcaaatgaatggaaaggaaaaaatggtctttatgctgctggattttcaagacgtgggctacttggtgtgtctatggatgctacaaatattgcagatgacatccttggatgttggaatgactttggctatgaaagacacaagagaaaataatatgttatttgtgtgattgataaggataccatctccaatttttactcaaatattttgtggatacgtgtacttgtctatttacatctattcgaacatgtggatgcaataggaaaaatattgtgctaacttctccaccaccacaatcatacctaccaccacaatcatatagttgcattagacaagtacatgtaaaagttataggtttatcttttgtattttagttttgctctaacattagatcttctaatttgagagacaatcgttggattctttttctttgtgaggttgaagagattcttttattttgacaaacaacgcaagttgtttttgtaagtgttgattgtactagatgaatgggtaaatttcttgtttttcttata

SEQ ID NO: 113876 - DNA, 1520 bp, Zea Mays
ccacccccaccacacccaagcccggtgcctcgcgtctccactccacctccggggcgtaggaggtcgggtgcccgtgccatcccccacataccaaagcgtcggaagagggtttcttgaggggttttagtcgggtgtccaagcttggttgcggagtcaaatgcgagcggagtgatgtggcccatggaggaggagatgttcctggcggtgaagcggacggagcacgtcgaggtcacttcccgggcgatggattccgcgccggcggcggggcccaggacggtgcgggtcttctgcgacgacaacgacgcgaccgactcgtccggcgacgaggcggagggcgcggccgcgcgcaggagggtgaagcgctacgtgcaggagatccggctgcagcgggcggtgccggtgaaggaggaggcggcgtccgcgagggccgtcgcgggggagcggcccaggccgctggccctcccggggcggaagaggaagtccgacggcgccggcgccggcgccgagccccggttccgcggcgtgcggcggcggccgtggggcaagtacgcggcggagatccgcgacccctggcgccgggtgcgcgtctggctcggcaccttcgacaccgccgaggaggccgccaaggtgtacgactcggccgccatccagctccgcggggccgacgccaccaccaacttcgagcacgcggcggtccccgtccccgtccccgacgaggtcgcgggtcgcctcccgcagccgccgccggctccggcgtccaagaacgcgtcgtcctccgccacgtcctcctacgactccggcgaggagtcccacgccgcggcggcctcgccgacctccgttctccgcacgttccctccgtcctccgcggccgccgacgccacctgcaagaaaccggcgccggccgcggagaccgacgagtcgaccggcgtcggcggcagcaggagcagcgtgtacgcataccccttcttcgccaacgacgactgcttcggcggcgacttccccccgctgtacactgacttcgacctgctggccgacttcccggagccgacgctggacttcctggcggacatccccgaggagaagctgccgccgctgccggagccgttccccgcggcgagccccgacgagtgcccgtccgacgcggaggcggcgtcgccggcgaggtggcagcaggtggacgacttcttccaggacatcaccgacctgttccagatcgacccgctgcccgtcgtctagcgctcccgcccgcccgccagccctcccctccctctgcgcaccggatccgcctagcccgtccggccaattttgttttcgtgctgttgttgtttttttgggtcctagtcgttaattcttttagcgtaaggtgaagagagagagagataagaggtgtccgtccggctctgcagtgcgtccttgtggccccgccgccgccgctgctgccatgtgtgccgagcatctacccccccggcaaggaggaagaagagtccttgaccggggcgagcgaggctgtctgtctgccc

SEQ ID NO: 113877 - DNA, 853 bp, Zea Mays
cccagaaatgcttctaattcttccatagaagagaacatggaactctcttcacccactgatatgtccactttactgcaatctgcttcatcgacagcatttcagaaaccgcaactttttggatgtggtgccatacctgctgaaatatagatcctccaagtccaccaccggcatgcttccatcagcacgtttgcgaagcatgtcacagaagatgcaccacaacttggcgtctcggaggctttggcagacatgacattcttctcaagatgaagtaaggcacagttcatcgagaagggcatgagaacaccatctacggagtttccatctccatcagaaactgagactactgcacaatagttccttctactaaggaacaccaaaattagctgccaaattggcttggcaacccctaatcggtccttctcgtcaccaaggaccaattcaagaatccgatgaggaaaatactccttatctacagcttcttcaccgtcagccttgctcccctcccgttggaaccctcgaaccacggcaacatccccatccatcaaccgctcccaattccccgcctcacacaccgacctgacatgtatcctggacacggcattgccgctggcctgctgcaaccgtgaggagccaaccacctcgacctcacagcccttgcagacaagtggtttgccctccacatccgcgatctccaacaccacctcccctcgccgtccaccttccccgccgccaagtccaacacctccccacacgagcgccggcggtgcaacggccgaccccaacgcgaccgcatcggcggtagtgaaccaccagcccagctcggtgaccgccctcctgatcccctcactggcgg

SEQ ID NO: 113878 - DNA, 186 bp, Zea Mays
atggatacctctctggtgcagcaatggccgctgctcacctctgcacttgcatgggtgtgcatgacccgggagatgagcccgccatcatctttccctcgtgcttggattgaagggagctcctctctgtctttgcattgcagacatggatatgcatgctattgcctcccaagcgccgggaaactttaa

SEQ ID NO: 113879 - DNA, 177 bp, Zea Mays
atggatacctctctggtgcagcaatggccgctgctcacctctgcacttgcatgggtgtgcatgacccgggagatgagcccgccatcatctttccctcgtgcttggattgaagggagctcctctctgtctgtctgtctgtctctctctctccctttccttcccgtggcggtctactga

SEQ ID NO: 113880 - DNA, 660 bp, Zea Mays
cgccgccgccgaggaggagctctccatctcactctggtctgcatccgcggcggtggccggcggggagggcggccgtgtgccggtgccgctccggcgcacctcctcgaccgtcctgaccacgtccgccaccttgggccgccggtcgggggtcctggacacgcacgccatcgcgatctggagcatctccaccatctcctcctcgatgtcagggacccgcagcagcgcgccgtcgaacacctcggcggtccactcctcgcggacgaccgactgcacccacctcacgaggtggacgacctcgctgccgcgcccgccggatacctggacgggcgacctccccgtgagcagctccagcacgaggacgccgaggctgtacacgtctgaagcctgcgacgccttcctcgtgtcggcgacctccggcgcgcagtacccgagggagcgggacctcgccgcgatcgggttcgccagctgtgccaggccgaggtccgagatgcagccgtatccgtccctgttgacgaacacgttggaggccttgatgttgccgtggacaaatctgccgttgttctcggcgtggacgtgtgccactcctcttgctgcacccagagcgatcttccacctggtttcccagtccaatggcgttcgctcctctcccctcttccctga

SEQ ID NO: 113881 - DNA, 2022 bp, Zea Mays
atggtggtttggcagagttttgataacccgactgatgtactgctctctggaggatacctgggattcaataaaatcaatggcaacatcaacagtcttggtatacattttaatctgtcattcgatgcaactagaaggagaggttttattatccagtatcctgaaggtcggaggtttgctggtgccttccctgaatggatggatattctcgaagatggaaactatacgctaatattcaatgacacatatacatacatacgtttagatgatactagttttgttagattcggtaagcaaggggactgtgattctattttatggtctgccccagaaagtttatgtgattatgatccatattgtggaccttacagcctttgcacgttgtctggctctggctcttgtatatgccctgttggttttaattcagtgtcgacagatgcatggattactgctggttgttcgagaaatgactctctgaattgtgaaaatgtggaagtgacattttatccaatagatggcatccatagatatcccctggaagctttcgcgttggaagttacaaacatgagtgagtgtgaatccgcttgcttaagggattgtacctgtactgcctttgcttacaatgcaagttgcttgctatggttttcggagctgcggaatacaatagtgctcgactctggtctaaatggcatccgtatgtacgtacgtacggcagccagacaacagtcaggttctggaaccgttcctccgttttctttctggaaaagagtgcctcttgaatggatgatcggtgtgataacccttattgttatttctctgattcttttgttgagatgcagaagcaaaccttacagtgctagaactgtgggtgaccatggaagtcttgtggtattctcgtttgcgcaaataaagaactccaccaaaagattctctgaaaaacttggcgaaggaggatttggctgcgttttcaaagggatgttgccaggctgcactcctgtggctgtcaagaagctaaaagaccacagacaggacgagaagcagtttcgagccgaggtgcggaccataggtatgattcagcacatcaatattgtccgtctgcttgggttttgcgccgaaggtagtgggaggttcctagtgtatgaatatatggcgaatggttctttgagcagccacctgttctccaagagttcctctaagctaagctgggagctgcattactcgatcgcgcttggaatcgcacggggcctggcttatctgcacgagggttgcgttgatgaattatgtcctaagattgcagatttcggcatggcaaagcttcttggccgagattacagcagggtactgacaacagtgcgagggaccataggataccttgcgccggagtggatctcagggctaccgataacacacaaggccgatgtctacagctttggaatgattctcctggaaatcctatctgggcgaaggaattcggagaagattgaagaggggaggtttacttacttcccttcctatgtcgcggtcaagttgagcgaaggagacgatgtcatgtggctgctggatagtagtctggagagcaatgctgatgcagagcagctacagagagcctgcagagttgcatgctggtgcattcaggatgctgaagatcacaggccgatgatggggcaggctgtgcacatgctggaaggtgccatggatgctcaagtccctcctgttccaaggtcactgcaaaactatgtcggcgtggaggattctaccactgcagaattttacatctctgaaggctcgtgctagtccagtgtgagcctgcccttttgttctttgtactgcttcggaactgaatctaagcggaacacacagttgctgtgtactgcagttttactcactagtgaactattttaagaatataagtactgcaaccctcacatttcctgattaactgcttcaaatgttggtcagacatcataggaattttgatgtacttcaaccctcatatttcctgattaactacttcaaatgttggca

SEQ ID NO: 113882 - DNA, 1247 bp, Zea Mays
cgggaactatttcgatgagaacgatacatacagtgtgctcaaattatgtcagatagacagatacaaccatacacgcagttgcccgaaggttcatcatttgcgttatacacaaagctcgcagatctttatacacacaatacatactaacatacatacatgaacgtgcacgaaagggaaaccctgagcaaggaaaacacccaagaacgccatcagtcgtcaagagcatgcaccagatgtcgccgctcaagaactcgatcacgcaggactgcaacgggaagcttcagaagtagtaggggaagcgcgccctcatggccggcgacgggcaggactcctggcagagggcgtcgagcttccacccaggcagggcgacgccgtccaccgcgcgcctctcctcacagctgctgcggccggcggccaccgaggacggagtgcccgggcttacgggctccttgcctgccgccgcctttgccgcgtcgactgtgccgtcgccagccaacggccgtgccgccgggacgatggtcacctccggcagcctgctcttcgcctccatctgctgcggatctgccttgaagcctgaagaggtccctgtgatatctcttcactcttcacagtaacttgatatgatagctcgcagtttatatttacttccgcaacaaatggaaaaggcgatggcgtttgtctccttctatgctacagagaaacggataagatcagagcgggtggatatttctttccggagttagtgctgacagtgatgactgataggtgcatcatgattatcttcctcctcctgttgtttttaaataattgtggttggcctacgttatcctcttcccgagtcattcttgtagagtggcccccatgtgtcagctatgtatgtgcacccaccaaggcaccaggtaaatacactgaagaagatagcaatgctgcagaacactcaggtgtcagcactcagcagtcgagacagggaatgactaccatatttttaagatgatgacaatactctcaaaggcatgttctacgtacatgactgcagaagaaatggatgcttagcacattttcagcagcttcatggctctcgtgttaatcaaaacaaatgagaacaggcagatgtccccccaccccctgaagaccaaatatgagcaacaattagttcttctcctgttatcaatctagattctacgatgtacactacactatcagagatggaactactacaaaagacctacagtacatggctacataca

SEQ ID NO: 113883 - DNA, 1249 bp, Zea Mays
ctattgctgtcagtcacttttgcggagagggagagacgcgcacgccagcagcgtcacaaaaagcgagcgcgcgccaccgcttccgctcccccgagaatatccatatccattatcacagtgtctcctactatttctttttactcactgtggtggactcgtctctatatattgcaagggtaatgacacttgtctgactcccctcacatacagatacagtacagttcacacactctcctgtctcctatccatccagccaccgaagctagccaagaccaagatgtctcagttgctgcacctgccggacctcgcggcgccgcggaccaggatgggctcggcgctggcggcgggggcccgcgtcaagcagggggaggcggggacggcgagggggcgggtgctcagggtcgccgaccccgtgcggcgggagtgcctggtgccggtcccgccgccgccggtcctcgccgcggggaggcgcggagacgacgacgacgtcgacgaggagaggcagcggtactacctcaacctgggctacgcgatccggacgctcagggaggagctccccgacgtgctctgcaaggaccacagcttcgacatctacagagaagacattgtcttcagagaccctctcaacacattcaagggcctgggaaactacaagaggctcttctgggcgctgcgcctcaccggccgggtcttcttcagggcgtcgtgggttgaagtggtcagcatatggcagcccgccgagaacagcatcctgcttcgctggaccgcccacggcgtccctcgggtgccctggggctggtgggacgccgcccacgcccgcttcgacggcgcgtccgtgtacaagctcgacaggaacggcaagatctacgagcacaaggtgcacaacgtcgctacgaacccgccggccaagtccaaggtcctgccggtccacgagctggtcaggtcactcggttgcccctccactgcccaacccacatgttctgacttctgaagctttcgtcgtcgcagtgatgtgccatcttatatcttattattcgagattaattagcatggataggatgctacgtcgagattaattatctggaagaaggattggcgtgggtttaacatgataccctccattttttttgtttttcagtgtgatttgatagcgcacaaagttacagagcactcctgcaggctgcagttgtatatatgtacagttatagaataagaacatcagttattgattgttaaagcatcagtcagc

SEQ ID NO: 113884 - DNA, 1515 bp, Zea Mays
ctattgctgtcagtcacttttgcggagagggagagacgcgcacgccagcagcgtcacaaaaagcgagcgcgcgccaccgcttccgctcccccgagaatatccatatccattatcacagtgtctcctactatttctttttactcactgtggtggactcgtctctatatattgcaagggtaatgacacttgtctgactcccctcacatacagatacagtacagttcacacactctcctgtctcctatccatccagccaccgaagctagccaagaccaagatgtctcagttgctgcacctgccggacctcgcggcgccgcggaccaggatgggctcggcgctggcggcgggggcccgcgtcaagcagggggaggcggggacggcgagggggcgggtgctcagggtcgccgaccccgtgcggcgggagtgcctggtgccggtcccgccgccgccggtcctcgccgcggggaggcgcggagacgacgacgacgtcgacgaggagaggcagcggtactacctcaacctgggctacgcgatccggacgctcagggaggagctccccgacgtgctctgcaaggaccacagcttcgacatctacaggttccattccaattccatcgcctggccttttcttttacttggttggaggactcgactgagctgctggggtatcacagggcatggctgcttgcttgcacttgcacatatcttgggctaaacagtttgattttgtacactgtgccgcctcctctgttcaaatcaacagcttgggtgtgccaaatgctctgtttgaagactgtgcccttttaatttctgtccccaactccccatcaatccacctttttttttcctaactacatacatctgccactgtacgacagagaagacattgtcttcagagaccctctcaacacattcaagggcctgggaaactacaagaggctcttctgggcgctgcgcctcaccggccgggtcttcttcagggcgtcgtgggttgaagtggtcagcatatggcagcccgccgagaacagcatcctgcttcgctggaccgcccacggcgtccctcgggtgccctggggctggtgggacgccgcccacgcccgcttcgacggcgcgtccgtgtacaagctcgacaggaacggcaagatctacgagcacaaggtgcacaacgtcgctacgaacccgccggccaagtccaaggtcctgccggtccacgagctggtcaggtcactcggttgcccctccactgcccaacccacatgttctgacttctgaagctttcgtcgtcgcagtgatgtgccatcttatatcttattattcgagattaattagcatggataggatgctacgtcgagattaattatctggaagaaggattggcgtgggtttaacatgataccctccattttttttgtttttcagtgtgatttgatagcgcacaaagttacagagcactcctgcaggctgcagttgtatatatgtacagttatagaataagaacatcagttattgattgtt

SEQ ID NO: 113885 - DNA, 517 bp, Zea Mays
aaccagagccagagctcgacgagccgccctccagtcggccggccgtccggcgatatatctccccgaccgtcgtgcctgtgcgagagttgacacctatatatagaggcatggagacggtggcggcgagttacggcggcggcggcgaaaagagggagctgcagcagcagaacaagcaggcgggcgggtgcgggcaccaccaccacttccagatgccgttgcactacccgaggtacaggcgggaggactacgagggcatgcccgagtggcagctcgaccgcctcctctccgagtacggcctgcccgtcgccggcggctccgtccagcagaagcgcgccttcgccatgggcgccttcctctgggacgccggcgacaactaatgtctaattaacatgtagcagcagtcagcagagttaaaagtacgagctagttagcatgtatgtatatgaaccaatgctgtatatctagtacagtacgtctctgtatatgtatgtatgtacgcggctggcttattgccttg

SEQ ID NO: 113886 - DNA, 4719 bp, Zea Mays
ctgcaggcagacaagctaggttttactgcttcattgagcacaaagatccgctgacctcttgctcttggtaaaaatccaacctttcttgtattgttttcttcctgggaaaacctccttgtggtgcataaacttcgtagtacactctgccatttctggagaggaagctgagaactactatccatatctggcacgacccttgtcaagaaccatggctgttcacatgccatgaagctgcttgaactggaggcacctaaatgctgtggattgttcctatgcagatgattggatcagtggtttcaggcttcggggggttcgatcagatgttgtatgaataatagcaggattgcttgagagactatagtttgggtactgtttgcttctgtatttactggtacggtttcctactgatctgcggctgcgcaggaaggcattctcttttttgccgtaccatggatgcaccggatgttcaacagagcatgggatataaggagtccaggggtggtatgcctaagtttttccatgcccttggaccagcactcctgatttcaatgggttacattgatctcgggaagtgggtggcagccgttgaagctggttcttgttttggattcgacctggtgttgctggctctccttttcaatttcactgccattgtatgtcagtaccttgctgcttgcattggcactgtcacagggaagaatcttgcagagatatgccaccaagagtacaaccagccaacatgtatattccttggtgttcaagctggattgtctttgttgacgtcagagctgactatgatttttggcatagcactcggattcaacctcctgtttgaatatgatgatctcatcacagggatatgctttgcaacagtgatggaagggacaataaatgcctgcatagcaggatttgcacttcttagttatgtgcttggcttattggttagccagccacaaattcctctcacgatgaatgtaatattccccaagatcagtggtgagagtgcttactctctgatggcgcttcttggtgcaaacataatggcacacaacttctacattcattcatcagttgtccagggtcagaaaaagtcatctgcagttggtcttggagccttatttcacgaccaccttttttcaatattgttcatttttactggaatctttatggtgaactatgttctaatgaactctgcagcagcggaatctactaatactcttctcattaccttccaagatgttgtagagctaatgaatcagatatttgtaaaccctctggcaccaactatatttttagtggttcttctcttctccagccacatcatctcgctgacatctgctatcggtagccaagtgatttcacaccatttattcggtataaaccttcctctttctggacatcgtctcctactgaaggtttttgccatagttcctactctgtactgggcgaaagttgcaggagctgaagggatataccaattattaattatatgccagattattcaagccatgcttcttccatcttcagtcgtcccactttttcgtgttgcttcatcaagatcaataatgggagcccatagagtgtctttgcatctggagatactggtttttcttgcatttctccttatgctattttcaaatatcatatttgtggcagaaatgctatttggcgacagtgggtggatgaacaatctgaaaggatatactggaagccctgtggtgctcccatataccgttttagttttagttgcacttatatctgtggctttttcactgtacctggctgttacaccattgagatctggaagtcatgaagctgaatcccatgaatggtctgtgcattctcagagagaactcttgaatacttctcaagaaagggaagatgttaaggtggacaatgttacatatgaggaagatcaaagatcagatgttgtcccttctcccagggatgtgcctgacagccatccggaactggccttggactatattgatacttctgacactgctgtagaatctgatcacgactctcaacaatctactgcttatgcatccactgctcctgaaacctgctcctccccgtcgtttactcgcgaggagtcaaaatcagttgttgcagtcaactggccggagcctttggagaaggttcctacttctactgtgatggaggaaagcacagtagaaaatgtggtctctaggatcacgactgaaagagatgttttagtagaaacagatgttgtctcgggcaaggataaggaagatatccgtactttggagtctgagaagtcaattgttgatagcaccccatatgtgtctgatgacggtccgccatcccttactttcagcaggggaaagggctcagatgcaggaaatggcagtggtagtctctcaaggttatctggtttgggccgtgcagcaaggagacagctagctgctactcttgatgagttctgggggcatctgtttgattaccatggtaagctcactcaagaagctagcaccaaaaagtttggtatcttgcttgggatagaccttagaacacctagcacatctgtaagaacggataaacaagctgctgaaatacttaagagcccactggtgagagactcaatgcggggggcagcttttttgtcaagctcagtggacatgatgtcccctaagaatgaaacgtcgaatttggaacttgcatatgggcttcagaggggacctggcatgggattgtcaagctggtctcagggtatgcagctaccaaatacacagctgcagagctcaagcaatagcctacttgagcagagtgcaagattaaactcaaattttagttcatcttattcagacaacaatcagttctaccaacctgcaacaattcatggataccagctcacatcttacctgaaacagatgaatgccagcccaagcctttactctagcatgccgctggacccacaacggcttccaaaatcatctgtgtctgctgtgccaaactatgctgattccatgatgcatgctcgtaatcataacctgcttgcttcactgggtggtactactacacagcttcctgcaacatcccgcgtaggctcaatgatgcctgaaagatcgtattatgatccttccagcgttgatgggaatgaaaacgctggttcacctgcttactcaaaaaagtaccacagctcacctgatatgtctggaataatcgctgcaagtagagctgcactcttgaatgaagcaaagttgggtgctgccattggaccacagtcatacctcagcaggctggcggcagaaagatctcaatatgcaagctcaacagccaggcccgcggctccattagcatttgacgagctttcacctcctaagctccagagtgatatcttctcggcgcagtcaagcatgagaccaagtgctagatccctttgggctaagcaaccatttgagcaattgttcggcatgtcaagtgcagagctcagtaaaggtgacttcaatcttccaggcagatcaggtggcgtggccaaggatgatttctcttataaggaatctgagacgaagcttcttcagtccctcaggctctgcatcatgaagctccttaagctagagggatcagggtggctgttcaagcaaaatggtggttgtgatgaagatctaatcgaccgagtcgctgcagccgagaagctattgatgcaagggactgccgagaatcaactgctgcttcatggtggtgatctccagcaacattcttccgaccaggccggcatccagtacatgcgcacgcttcccaactgcggggaggactgtgtttggcgcgcgtcactcgtcgttagtttcggtgtctggtgtgtccgccgagtgctggacatgtctctggtggaaagcaggccagaactttggggcaagtatacctatgtccttaaccgtcttcaggggatcttggaccctgcgttctccaagcctcggggtgctctgacaatatgcacctgccttcagaaagacaccagagtgcgcaatagcccaccccacagtgggctaacagccatgggcccggtccccacaccgatccggggcgccttcacgaccgcaggcgtggttctggagatgatcaaggacgtggaggctgcggtctcaggccgcaagggcaggagcggcacggcggcgggcgacgtcgccttccccaaggggaaggagaacctggcctccgtgctgaagcggtacaagcggcggctcgccagcaagggccagtagcgcgcgggtgtcagacaggcaggcgatcgcaagcaatgttaggaggagcctgactattgttctccaggggggctgccactggcgccggcctccctgagccctggattttttcgttgcacgacgttcctagggaccggtggttgcccgatggtcgtcttggtcccttccagcaggttttttttttccttccctctttctgttggtttctttttgttggctttgtgatgttttgtaaggggcaactagggtatgtgctcagaaggactcaagatgtacacgcgaagatgtactagtctgctgatgcagcgttgtaaagtccacactctgcaggttaaccctttttggggccgtcaagtgttagtgcgtgccctatgtatgttaatcacccctgcagagaggttgcgaatactgaactactcacagacctgcacctgtcgagatcgtttgtaatatccgacgtcttgttcagaattgttctcactcttttttgccc

SEQ ID NO: 113887 - DNA, 86 bp, Zea Mays
ataaggagaggccccaggccagagaaaaaagcatcgaatttccccccgttaattggcctgagccctcagccgtctaccagcagcag

SEQ ID NO: 113888 - DNA, 555 bp, Zea Mays
ctcggaagttagtaagttctcggaagttagtagcttcacgccgtcagctgattaacttcctacgactaacttcctacgactgactgtagccctacgaagttagctggctaactttctatggctgactgtagcccctaggaagttagcttcctacggctgactatagcccctaggaagttagctagctaacttcctacgacccaataagcctctaggaagttaatttgaccaacattacaaatgctgtttatttttattttacaccacattccacatcataacaaatatatagcacaacatatttttcacataaaacatctcacacataatcacataacaatatttaaatccatagtctcatcaattacattacaaaagtctcatccatagtcataataagacacatctcattcagtactaataagagacaatatctcatacatagttataataaaagtctcaagtatgagaacacaataacatatagtaggacacttgtgcggatgcttgcatgaaatagctgacgatcctatggacgtcggacactgtgtgcac

SEQ ID NO: 113889 - DNA, 2066 bp, Zea Mays
agcggcgcggcaagctagatgtcggggaagaaggccagcgagttcagcggcgaggagcagcaacaggtgatcgccgagttcgaacggctgacgcgggatgctgccgccgtccagccggagacgctgcggcggatcctcgacgagaacgccggcgtcgagtacctccaggggttaggcctcgacggccgcaccgacccggacaccttccgggcctgcgtgccgctcgccacgcacgacgacctggagccctacatcgcgcgcctcgccgacggcgacacctcccccgtcctcaccgccaaacccatcacctccatctccctcagctccggcacgacgcaggggaggcgcaagtacttgcccttcaacgacgagctattcaagctgacgatgcatgtgtaccggacctccttcgccttcaggaacagggcgttccccgtcgagggcggcggcaaggcgctgcagttcgtctacggcagccggcagctcaccaccaagggcggcctgacggtggcctcggccaccacgcacctgtaccgcaacgaggggtacaaggccgcggtgcgcggcatccagctgccgtgctgcagccccgacgaggtggtcttcgccgcggacttcgcgcagtcgctctactgccacctcctctgcggcctgctctacgccgacgaggtccggaccgtgttcgccgtgttcggccacaacctcgtgctcgcgctccagacgctggagcgggcgtgggaggagctgtgccacgacatccgccgcggcgccctgtcgccggcgcgggtgaccgagccggagctccggcaggccgtgtccgcgctcctcgcgaagccgaaccccgcgctggccgacgaggtggcgcgccggtgcgccgaggccaggctcggcggctggcgcgggctggtccacgcgctgtggcccaacgccaggtacgtgcacacgatcgtgacgggctccatggagcactacgtcaggaagctccggcactacgccggtggcctgccgctcgtcgccatggactacggcgcgtcggaggggatggtcggtgccaacgtcgagccggaggtgccaccggactcggcaacgttcgccgtgctccccaacatcgcctacttcgagttcatcccgctcaagaccaccaccaatggcggcggcggtagcagagcggactgtactgataccggcggcacgagctacagctccggggcggatcccgtcggcctgacggaggtcaccgtcggcgagcactacgaggttgtcatgaccaccttcgcagggttgtaccggtaccgtctgggtgacgtggtgaaggtggccggcttctacaactcgacgcccaagctcaagttcgtgagccggggatcgatcggccccacgctgtgcatcaacgtcgacaagaacacggagcaggacgtgcagctcgccgtggatggcgcggccgagatactgacctcctcgagcaggctggaggtggtggactacaccagccacgcggacgtgtcgacggacccgggccactacgtcgttttctgggaactcagtggcgaggccgccgccgacggcgtgctgcagcgctgctgcgacgagctggaccggcgcttcgtcgatgccgggtacgtgagcgccaggaagacgcgcgccatcgggcccctggagctacgtgtgctgcggcggggcgccttccagaaggtgctgcaccactgcctctccctcggcgctccggcgaaccagttcaagctgccgaggtgcgtcgcccggtccaactccggcgtcctccaggtcctctctgacaacaccatcaaaatcttcttcagcacaacctacgactgaagttgccagacggtggcgcggcgaccatgacaaatcaggcggtctgctgtgagtgacagaatttagcgccaagagcgactggttttcttttgaaaagttgcactctcatgcgtgcctacgagcctgttcgcatgattttaatgcttacagacttctactgcttatatagtgttttgtctctctatatattacaactacagcagttcgaatcgaacagctggagtgttttctgc

SEQ ID NO: 113890 - DNA, 1848 bp, Zea Mays
agctaaatggcggagaagcagggcgacgagtgtggcagcttcagcgcggaggaggtgatcgccaagttcgagcggctgacgcgggacgccgcggccgtccagcgggagacgctgcggcggatcctcgccgacaacgccggcgctgagtacctccgaggtctgggcctgggcggccgcaccgacccggacagcttccgggcctgcgtaccgctcgccacgcacgcggacatggagccctacattgcgcgcatcgccgacgagggcgacacctcccacgtcctcaccgccacgcccgtcacctccatctccctcagctccggcacgacgcaggggaagcgcaagtacctgctgttcaatgacgacctcttcaagtgcgctatgcagacaggccagactagcttcgctttcaggaacagggctttccccgtggaagacggaaagtcgctgcagttcatttacgccagccggcaattcaagaccaagggcgggctcacggcgacgacggcgaccaccaacgtgtaccgtcacagggacttcaaggcccacatgcggcacacccagtcggagtgctgcagccccagcgaggtgctcttctgcccggacttcgccgagtccctctactgccacctcctctgcggcctggtcctcgccgacgacgtccgcacggtgtccgccaccttcgcccacagcctcgtgctcgccttccggacattcgagcgggtgtgggaggagctgtgcgccgacatccgccacggcgtcccgtcgccgacgcgggtcaccagcccggccgtccggcgggccgtgtcggccctcctcgtcgcgccgaaccccgccctcgccgacgaggtggcgcgcaggtgccgcgggctcgtcaactggcgcggcgtgatcccggcgctgtggcccagggctaggtatgtgagcagcatcgtgacggggtccatggagcactacgtgaagaagctccggcactacgccggcgccctgccgctggtcgccctggactacggcgcgacggaggggatgatcgcggccaacgtcgagccccgggagccaccggagtccgccacgttcgccgtgctccccaacatcgcctacttcgagtttatccctctgagcctcaggggatgcgatgtagccggtgccgcggacgcgcgctacacggaggcggatcccgtcggcctgacagacgtcgccgtcggtgagcattacgaggtcgtgatgaccaccttcgcggggctgtaccggtaccgtctgggcgacgtggtgaaggtggccggtctctacaactcgacgcccaagctcaaggtggtgtgccggcggaacctcgtgctgtccatcaacatcgacaagaacagcgagcacgacctccagctcgccgtcgacagcgcggccaaggtcctggccgcgggcgcggggaggctggaggtcgtggactacaccagccacgcagacgtgtcgcgcgacccggggcactacgtggtgttctgggagctgagcgccgagcccgacggcgacggccacgtcctgcagagctgctgcgacgagctggaccgcgcgttcacggaccccgggtacgtggggtcccggaaggcgcgcgccatcggcccgctggaactgcgggtgctgcggagaggcaccttccagaaggtgctgcggcactacctctccctcggctcccccgtgaaccagttcaagctgccacggtgcgtcgcgccgtccagctccgccgccggcgtccttgagatcctcgccgccaacgccgtggaggccttcttcagcacggcctacgactgaagcaagcaaccgggcacgttgcacgatgatgggaaggaaggccgccgtcgt

SEQ ID NO: 113891 - DNA, 1164 bp, Zea Mays
acctattgcctggacaacaaaaagtgatatatctgtacatgattcttttttttatctgctcttgtgtatggcttgagaacctgttgctgtgtggttgtcttaaaaagatcgccttccccattccccatttacagggccatcttatgcaaatgaccatgatggttcccccttcgttcccgcaagaactccactatctgaacaaggaggacaggctgcttcgctggctggtcgtgaagcacagagacacggtatacgggttggagttcttgaacgcggatggcgggagggacgagctgagaagtttcagccttggtcacacgaagggcgactacgatattgaaattgactccgacgacgaagactacgatgactccgacgacgaagagtacgcaatcgaggaggaggaagaggaagaggaggcggcgaaggatgaggagaagaagtagaactgtttggccaggtttctgcagtctcatctgtattggcagatgcgcgttttcttagaaatcaaatgttctctttgtaacatctgcgactttttataaaggctgtagggtatgggatgagagtcagaacctatcacttgtgtttctgaacttttaaaaccaggaaaacgggagctggaacttaccggttggttgtaaaatggatgacatgaatttggaaaatcttcccgtgacaaagcgtgctttgatactattttgataaaatctcctcatgacataatctgccatgtgtgtgcgttgatgtcttattgggcaagtctaagcaagaaagagttgcaggaccttattcaggagggcgctaagctgttcggtttgcgcagccaatgtcaaggtggttactcaagatggaggccatgaagaaaatgatgtggaggatgagccgactcatgaagactaatgaagagttgaaaaggctttgtgggaagagaagctggatgtctgttctgtgatgccccagttctggtggtttgctagtgtctttgggattggatattgctgtcttattgttgttgatgagttggctggttattagtttcgttggttgacaggtttagaactagatcttttgcagctcttaaacttgctagggtagttagcctgctgtgcttctatctttggccgcaacacacctgaattagtgctgtccatgtggcttttt

SEQ ID NO: 113892 - DNA, 112 bp, Zea Mays
gaaaggaatattatgctgttataactttagagaatttaggcctgagtatttttagagtgggcaaaggatgctcaatttgtaactgggttgcctaggagcataactgtccccc

SEQ ID NO: 113893 - DNA, 1302 bp, Zea Mays
gcgccccggccctcctgtcgcccttgctgtctcgggagtcggggccccgtaaaaaaggcaaactcgaccccgcgaccgcttcctctgctcctcttcctcctctcctctcgcatccgcagcttccccagccagctagggtttgcagatgacgaccgcggcgcgccccacctgggcgccggccaagggcggcaacgagcaggggggcacccgcatcttcggcccctcccagaagttctcctcccgcgacctcgccgcgcacacctccctcaagccaagaaaagacggtcaacagacccaagaggagttacagaagaggaatctcagggaggaacttgaggaacgtgagcgcaagcactactcttccaaggataagtcctatgccgaagaaagagaccggcggaaaagctctagccatctactcttagaaggttcaaagagagagacagaggataagatagttccacgagaaatcgatgctgatgactccgatgtggagcctaaaagcgatgacgagagcgatgaagatgatgatgacgacgacactgaagctctaatggcagagcttgagaggattaagaaagaaagagccgaggagaagcttagaaaggagcggcaacaagcagaagaggaggccaagatgaaggaggctgaactgatgcggggaaacccgttgattaatatcaacaatgctggctccttcagtgttaagagaaggtgggacgacgacgtggtattcaagaatcaagcacgaggagagaccaagacaccgaaacggttcatcaacgacaccatcaggagtgatttccaccgtaaatttcttcagaggtacatgaagtgacgcttccgtcgttcacaattcagcctggagcccctcatcgttatcatgtttgtgtatgagcgaaagatcattattgtgttgttgtatgaaacaagagtgtaaacatatgtctactacttaacaaagttatgctgagcaatgcatatcctagttgaatgtgacaatgctatgttttctatattttgacgttatttggttgtaatcatatttaagtttgactaggaaagatgagctcagagagcagcacagatggattgagtaagggtgtgtttggttgagtggagaacggttgtacgaaagaggggcgaactctataaattattgggatgttcttgctccactaaaatgattgacgatgggtaggctctattctccagttcaaccaaacacaccctgagatgtgagatcaactccagcagcctcctgtgtatggctaatctaagaaactttgcatcgcgtgtcct

SEQ ID NO: 113894 - DNA, 790 bp, Zea Mays
gacatccggtcctctttccccaagctagctagctcgcccagccaagcctgaagcgcgcggccataggagcagaagccaagcacaaggcaaactaataagttaggtagagatcgacagaaatgggcaacgtgctgccatgcctggtccaacaagcaggcacagcagcaggggctctgccagccatgaaccccaagcggaggctcatctccctcaaactcctcacgaaggccatccacaagatgaagaagaggctcggtcccggcaaggcggccaagatagacagcaaaccgttaccgtcgtcggccgcggtggaaggaggagaagttcgtgttgaagcgagaagcaaggccaccagcagcaccaacagccgcaagggtgccgtgctgaggacgaggctccatggccggagcagtggcctgatcaacaagcaggggaagaagggcgtcgtgcgagtcaaggtggtcctgaccaaggaggaggccgcgcggctgctggcgctgacagtcggcggccagaggcacaccgccgcgcagatcgtggccgagatgaagaagatggaggcccgccgcgccgccgccggcagcgccgcgtggcgcccggcgctggccagcatcccggaggagtcgtcgtaggaagaccggtcggtcgatgcatgagctcgttcatcagactggtgagccagagagagacttgggttgagaggcgaggtgacgacggcgtacgctccccctcccatatgcacgcgccaggccgccggcgtagatcctcgctcaccgtgccgatgtacagc

SEQ ID NO: 113895 - DNA, 1483 bp, Zea Mays
aggacgctgtccctccccttcccaccgctgcatgggcaaagccttctccctgctccggccaccgcaaccacctcgcgaggacgacacggagatgatggagctgaggaagcgcccgaggccccggcgcctcgacccggacttcctctcgtccccgcctcccatgccgccgaggaagcgggcacggaagcaggcagcggcgccgaagccggtcgaggccgcgggcgctctgaagtggcagccgccgaggaagggctccaggcgcgccacggtgggcatcgggtgtcccgtcgctgggctccatcctgcgacgtgcggccggcagccgccgctgcgcatgtcgacgcgcgtcctcttccgcccgcgccatccattcaactggtacgagccggacctgtggacggaggtggctaagcacctgtgcggcttcgacctactccgcctctccttgacctgccgctggttccaccgcctcctcgccgacgactccatctggcgctacgccttcttccgcgaccttaacctcaccgacgccaacccgcacgttcatcgcccgctctcccgctcctggcgctacctctactttgccgccttcgatggctcccacgccttctcgctctgccagaacggcgagcaccgaagttcgtggcggatcgggtcattcgtgctggactcgccgcacatggtgctgatcgggaagctgccgctgccgaagtggctgccgtcgtgtcccgaagacgtacggctcaccatcgcgatactgggcgcctgcaagctcctcaacgtccgccctgggatctggatcactgacatgcatgtgatgcgatgccccttgtgcaaacggaacagctgccgagggaacaagcagatcctggacgcacgccactctgagctgttcctggagaaggcgtactgggacgagaccttggagtacgagagcctcggcgagcactttcaggacgaggaggtggccgccgccttctgtgccgttgtcaacgcgaagcagttcgcttccccatccactgcatctgtcctcaacagggcctggaccggaaagcacgacgacccgatgaccaggcactgtgcttccgcaaccgccgctgccatccacaccaacctccagagcaacggaggactactatcgacgtttgaggcgatgcgggacacggccagggacgggcagatcgtgtccatacgcatctcccaggtgctcttctgatctgtacccaatgctgccttggctgctgtgatttatgatggaagtaggcctggccacactcgttctttttttttactgctattgatgcatttctgtctagattggactgcagagagaaagttggggcagatttccggcttcaatttatgtccttattagtagtatattgcacacgtactggaatctgcttgtttgcttaatggctataccacgaacgggttttgtcactgatgtgctgaaaagaatgcggatgcttttgtttctttt

SEQ ID NO: 113896 - DNA, 111 bp, Zea Mays
ttcttttgcctctgccaaaacccaaatcctcgcttctttaattttgcttctgtactcaaatagaactggtgtaacagttatgtgcttctattatggttaaatagaactggt

SEQ ID NO: 113897 - DNA, 1205 bp, Zea Mays
ccattaaccccggccccggcaactccccaagtcgagcaacaggccaaacccccagccgccggaagccgctaccgctagcacctccgatcgagtcggcgccatggaagacgtcatcaccgacgtgccgccgccttcccgcttttcccctgacgacctcgacaacttcgccgctccgccagcgcagcccacccccatcttcgtcgtttccccgaaccctagcccaccggccccgcgcctcctcgtcgtattcatctcccccacctccctcgcgctcctcgcctccccgccgccgctcctcgcctccctgctcctcccggacctgcccctactcccgcacgcgcccatgcgcgtgtacctccacccctccggcgcgctcctcgccgcggcgcacggcgccttccccgcccaccgcgcgcgcgccgccgcgaaggctcttgtctccaggctccagccggaggaggtgctggttttggacgcggtccggagcgggacgtaccggggccgcctcgccgcggacgagcccgtggaagggaagttggagacccgcgcggcgcgcgcgcggggaggcgtgggggctgccaaggcagtccaggctctggtcccacccggcagcgtggtggacgggctcggcgccgccgtgctcgcggagtgcgagatccggggcaaggcggccagcatggtggtgacgtggccggcggactccaggcccgcggagttcggggtcatgcggcgcgtggcggcggagctcggcgtcgacaccggcaaggccgcggccagggtctccggccggcccgacctggattccttgtacacttgagatttctctgttactgctgctgaattgctgatttcgttggctgtggcgttgggttgtctgatgagtgagtgttttgttggtttgagacaatttggggtcaaatctggtctgacggacgagttggtttgcgtgatttcatatatgaacaaattctgatctcagttgtgtcgttactgctgtaatgatcactgattgaatggattgccttcctcagaagccatgtgaaggccaattacaatgaagcgcagaaaggttcatgacaagctatatgcgctctgtttgggtaaggcttaggggtgactaaagtttatttcgtgtcacatcgaatgtttgaatatcgaatgtttaaatatcaattatgagtattaaatataagcttattatattt

SEQ ID NO: 113898 - DNA, 360 bp, Zea Mays
gactcggttatacattgactatcctacagcacagttataatacatacatgggctatcctacataagtcaacatcacaggatttgactgcagttatgtacttggttatacattgtctatcctacagctcggttatgatacatacatgggctatcctacataagtcaacatcacaggatttgactgcagtggcatctcaacgattggcagaagtagcagaggagttttttacccaagcatatgggtggaagtttagtgtacggattgactctatgtcatggttatatagaagccaggagtggtacaaggtttttatatcatttcaaggtaacaatcttgaaaataataaagcttcccttatg

SEQ ID NO: 113899 - DNA, 222 bp, Zea Mays
gcgaccgagctccccctcgatcgtttcccgcttggtgatcttggtgagttcatcaccctcgtgcaccgtcttgagcacgtcccaaacttccttggcgctttttagtccttgcaccttgttgtactcctccctacttagagaggcgaggagtatggttgtggcttgggagttgaagtgctcgatttgggccacctcgtcctcatcataatcctcatcccctac

SEQ ID NO: 113900 - DNA, 1467 bp, Zea Mays
atgtccacagtgacgacggcttctagtccacccacgtacgcttataaatggcagcgtctcttcgctgaacgctgcaaccaagcacggataggagtttcaggcattccgggcgtcacgcatctgatcagaaatgctaagggcggtggcgttcgccgtcttcctcctctctccgccactcggcaccacggctgttcgcagagctacaacgcgatctacagcttcggcgactccatcgccgacaccggcaacctctgcacgggctccggcggctgcccgtcgtggctcaccaccgggcagccaccctacggcaacacccacttcggccaccccaccggccggtgcaccgacggccgggtcatcctcgactttctagctgatcactttggcctgccgcttctcccgccgtctaaggcgatcggcgccggggacgtcaggaagggcgcgaacatggccatcattggcgccaccaccatggacctggagttcttcaataagcacggcctcggcagcagcatctggaacaatgggcccctgggcacccagatccagtggttccagcagctcatgccctccatctgcggcgccggtgacgaccattgccagagctacttcaacagctccctgttcgtcgtgggcgagttcgggggcaacgactacaacgcgccgctcttcggcggcaaggccatggccgaggtcaggagctacgtgcccgagatcgtggaccggatcgcaagcggcgtggagacgctgatcgggctgggcgcggtggacgtggtggtgcccggggtgctgccgatcgggtgcttcccgctgtacctgacgctgtacccgggctcgagcaaggacggcgactacgacgaggccggctgcctcaggagctacaacaacctctccagctaccacaacgagctgctgaggcaggcggtgtccgggctgcagagcaagcacggcggcggcgtccggctcatgtacgccgacttctacgcgcaggtcgcggacatggtccggtcgccggagagctacgggctgcaatacgggctgagagtgtgctgcggcgccggcgggcagggctcctacaactactacaacaaggcgcggtgcgggatggccgggtcgagcgcgtgcggcgacccggagaagtacctggtgtgggacggcatccatctcacggaagccgcctaccgttccatcgcggatgggtggctcaaggggacctactgcagccccggcatcctgcgtcgttgaggacctcgccatgcatatcaatcactctatctatctatacgactatagtaataatcaaataatgttagggccggatgagactgtggtggcaaagaaaattgacagtttctctatactttgtgcgcgctacggaagggtcgtcatttccgctctccaatacctttggctagggagaaatatcttaaatataatataggatttaaatgtttaatttgaagatct

SEQ ID NO: 113901 - DNA, 92 bp, Zea Mays
ttctgtgctaattatgtgtttattatctcccatctttcagcggtaatggccgtccttgtcattctaggaactatgctgttatctgctcatct

SEQ ID NO: 113902 - DNA, 3118 bp, Zea Mays
atggcctccgggccgccctcgccatccggcaaaccctactcgcgcaaatctcacgccagctccaaggctcccagcgtcccttccttcgacgcccacaacggccagctcctacccaccgtcaccttttcgctgccctccacgaccaccgcccgccgggagctgcgccgccgcctctcttccgagctctcccaggtgcgcgccgccgtcaagcgcctgaactccctcccggctcccgccccctcctcggcgctctctgccaccgacccctccacgccgcatccgccgtacccgccggcgtccaagcacaagtctaagaagggcggcggagtcccgcagccgcacctctcggcggaggcgcggcgcaagctctacgcgcccgtgttcaagacctgcgccgctctgctctccaggctgatgaagcacaagcacagctgggtgttcaacaagcccgtagatgcgagcgcgcttggcctgcacgactaccatacaatcatcaccaaacccatggacctcggcacagtcaagtcaaagctaggtgccgggcagtacaagtcaccacgggaatttgcaggtgatgtgcgtctgacgttccagaacgccatgacgtacaaccccaagggccaggacgtgcacttcatggccgagcagctgcttaacatgttcgaggagaagtggccggagattgaggctgagatagctcagctatcaccacagcctcctacaccatcctcagcagcacccaaaaagccaaagccaaaggagatagataattctaggccgttagagaggtctgattcgacagttcatgctgccgggatagaagctaccccgaagacacacactggcagaccccaagttttaaagaagcccaaggcaagggagcccaataagagggatatgacattctgggagaagcagcggcttagcaataacctccaggatttgccaccagagaagctagacaatgttgttcagatcataaagaagaggaacttgtcactcagccagcacgacgatgagattgaggttgatatcgatagctttgatgttgaaacattatgggagctcgatagattcgtgacaaactataggaagagtataactaagaataagcggaaggctgagctttctgcggtaaggccggatgaagctgatcctgatcaggagccggagaaggtagaacatgtgaggcagggcaaggcggatcaggatcaaattcctgcagtacaagaaccgattccagaaccagaaacagttgatgttgatccacctaaggaaagtgcagcaggtgggccagtcatacggacacagatagttcatcagcagatggttctgatgctgggcaatcacccagaacgtagcatctataagccagctgctgctttttggcatatgcagaattggttgtttgttattcaaattctaactatatttggaaaattgagaggggaggaagtaccagtccatgggatcggtgaaggagaagcatctagtaatttgaatggtgatctaatgccttgctataagaaaacaccccaagtaggagctccatgggttttctttttcatgatgaaactctcacgtccaccgtcggagtatcatacatccctgaaaaaattagcagcaattgtacaagggatcgcgaaaaagcaggctagagtgtttcctgtttcgtttgttcggcggcctcttcggctcttcccggtggggacgcgagcgcgaacacatcgcgttatccccggctccggccaaatgctcccgcttcgccgcctaccgccgctcccactgccacgcggtcccgcaccccgccgcctgctatcggccgcggcatccgcggccgccgtctcgccgcttccatggccaggcctcagcgcctggcgccgggcgccgcccagcgacctccgcacgtggggcccgaacggtccctgcgcctccggcgacgtcgatgagccggctgctgacgccggtgcggcctcgtcgctggcggagatgggggcgctcgtgctgtccaccgccgaccccctcgccaaggcacggcgcacccacgccgccttctcccggtgggccgccgggctccccatcggccaggcgacggcccccgaccaccccgccaggcccgataagcccctcgtggtgacgcagaaggagattaccacgcacaaggagatgggggtgccgctcaacgcgtacatgctgcacaacctggcgcacgtcgagctcaacgccatcgacctcgcatgggacaccgtcgtgcggttcgcgccgctcagggatacgctgggggacggcttcttcgcggatttcgcgcgtgtggccgatgacgagagccgacattttcgctggtactcgcagcggctaggggagcttgggttcagttatggtgatatgcctgttcacaatcttctgtggagggagtgtgcaaagtcctcaagtgacgtttctgcacgattggcagtgattcctttggtccaggaagccagaggtctcgatgctggaccaaggttagtccaaaggttatctggttttggggaccatcgatctgcagacattgtggcaagagtagcagaggaagagcttgcacatgtttctgtaggtttgtattggtttctcaaagtatgccaaatgatgggtcgtgaaccaggcgatactttcaaagacttgataaaggaatacagtgttgtactgaagggtccatttaactatccggctcgtgatgaagctggtataccccgagaatggtatgacgagaagttcaaacaagaagcagcacaaaaactttcagaggtccatgatagattagcttgtattgttgagatggagaaagagagtgcaagtttgaatgactaagtgccacttgatgtacatgggagattgggttttgtctggctggagtggaaagattaacgaatcatcaaagtgtgtacctaccagtggatgcttggaaagttttctgccgtcggatgggaaaccagatattgtaggcctggagccgtgaactaataccattaggatgctgggttactttttttttggaaactagacgctgtattacttggatgtattatttggaacaacactgacggtggattggtatgatacatgtccattcttcattcta

SEQ ID NO: 113903 - DNA, 590 bp, Zea Mays
ctttcatattatcgtttggtttggaagtatttggagaacaaatgaatttatcataggaaacatgtgcagatacggacacagatagttcatcagcagatggttctgatgctgggcaatcacccagaacgtagcatctataagccagatgttgatgggggcactggaaaccataacaccttagttcaagaaaggattctagcatgaatttatggggtgagattgctgtaaattttggccatgtaggaactctaaccagtgccatgctgtttgtcgttttgttgacgaagtggatccccaggatagcacatgcacggattcacctgtacaactgtcagcagttgtgtacttactgtagagtgtgccgtatttacctagtcgccgagctggaagttacctcaacatattggaattggataggaggaaacctgaaaactggggcaggtagtggaacatgcggtgaggtgaagaccaggaacctggaggcctcgccctgttgtaagattgtacaattgttatagccgtgtaattcctgtcggtgtttgcatcagcattagtttttctttataaaaggtttgcagcattgccattga

SEQ ID NO: 113904 - DNA, 2221 bp, Zea Mays
ttttactagcaatggaaaggagaggagcaaaagagggagccaaaacatagcaaggaaaaggaaaaagaaaatgatcctctctccccagcacttgcgacaggtactagcaggctagcggctgcctcccttgtccccaccggccgccaccaccaccaccacggcaccaccacaccgacccccttcccctcccctctccctgtcgtgcggtgcctcctccgcccaaatccccaaatccgcgcctccgatccgccgccgtccacgatctgccgcagccgttgacccgctaaaaatggcctccgggccgccctcgccatccggcaaaccctactcgcgcaaatctcacgccagctccaaggctcccagcgtcccttccttcgacgcccacaacggccagctcctacccaccgtcaccttttcgctgccctccacgaccaccgcccgccgggagctgcgccgccgcctctcttccgagctctcccaggtgcgcgccgccgtcaagcgcctgaactccctcccggctcccgccccctcctcggcgctctctgccaccgacccctccacgccgcatccgccgtacccgccggcgtccaagcacaagtctaagaagggcggcggagtcccgcagccgcacctctcggcggaggcgcggcgcaagctctacgcgcccgtgttcaagacctgcgccgctctgctctccaggctgatgaagcacaagcacagctgggtgttcaacaagcccgtagatgcgagcgcgcttggcctgcacgactaccatacaatcatcaccaaacccatggacctcggcacagtcaagtcaaagctaggtgccgggcagtacaagtcaccacgggaatttgcaggtgatgtgcgtctgacgttccagaacgccatgacgtacaaccccaagggccaggacgtgcacttcatggccgagcagctgcttaacatgttcgaggagaagtggccggagattgaggctgagatagctcagctatcaccacagcctcctacaccatcctcagcagcacccaaaaagccaaagccaaaggagatagataattctaggccgttagagaggtctgattcgacagttcatgctgccgggatagaagctaccccgaagacacacactggcagaccccaagttttaaagaagcccaaggcaagggagcccaataagagggatatgacattctgggagaagcagcggcttagcaataacctccaggatttgccaccagagaagctagacaatgttgttcagatcataaagaagaggaacttgtcactcagccagcacgacgatgagattgaggttgatatcgatagctttgatgttgaaacattatgggagctcgatagattcgtgacaaactataggaagagtataactaagaataagcggaaggctgagctttctgcggtaaggccggatgaagctgatcctgatcaggagccggagaaggtagaacatgtgaggcagggcaaggcggatcaggatcaaattcctgcagtacaagaaccgattccagaaccagaaacagttgatgttgatccacctaaggaaagtgcagcagatgataatgagagatgtgtgggtgaatcatcacctggtcatttggaagatcagaagggagagaatgctggtagatcaagtagttctggaagctctagcagtgactcgggttcatcctctagtgatacggacacagatagttcatcagcagatggttctgatgctgggcaatcacccagaacgtagcatctataagccagatgttgatgggggcactggaaaccataacaccttagttcaagaaaggattctagcatgaatttatggggtgagattgctgtaaattttggccatgtaggaactctaaccagtgccatgctgtttgtcgttttgttgacgaagtggatccccaggatagcacatgcacggattcacctgtacaactgtcagcagttgtgtacttactgtagagtgtgccgtatttacctagtcgccgagctggaagttacctcaacatattggaattggataggaggaaacctgaaaactggggcaggtagtggaacatgcggtgaggtgaagaccaggaacctggaggcctcgccctgttgtaagattgtacaattgttatagccgtgtaattcctgtcggtgtttgcatcagcattagtttttctttataaaaggtttgcagcattgccattga

SEQ ID NO: 113905 - DNA, 2012 bp, Zea Mays
ccgaccgaccggccaaccaaccagccagtcaaaaagagtgcttcgctcccaaccttgctcctccattttgctgcagccatccgttgtcgtaggaagcagcagcaaagtaactacctgctgaaatgggggacagaaagttgcgtcagaaattcggcacgggaaacgccggcccagtgccagtggtgggatgacgaaggattacgagagaattctcacggcggtgcatgttgaggagctagctgacggtgatatgtgtttgctgaattcatgcatggtatgctgctgaaatgctcgtgatggtggttggtggcatggtgggcgcgcggagtaatctgcgctccactgctctgccgtcgtcagtggtgagaagccgaggacacggacggcggcggcggcttgtcgccattgccgccgccgttgtgctcctcgtcgccctgcatcctggtggggatgcggatcccggagaagccgacgccgggcgagaacccgatggccgacacagcggggctgagcccgccgtgctgcatcgggttgtcggcttcgacgctctccggccatcctcgctcggagggctggttactggactgaaggggtcccctctggaagaagaactggctctggccgccaaacgccgcctgcatgtgcgccgcctgctgcgacacgttgaacaggtagccgccagcgctcccgccgcctgggtcgggcacggtccacggcaccatgcgctggctctgcgcctgctcgccccacatggcgccgccgccaaacgagtagctggcggcgccggagaagagcgcctgctgcgccgagccattgccgccgtgggcttccgaccggtcctgctgctggtggaacatggggtctgggagagactgcagcgacagccggagctcctggctgtggctgccggtgcgcgacaggaggtcgggcgtgtagctttggaagcccatggccgacgactgcgccgccgccgtggacgacgacgcctcgccgccgccacccgtgccagccatgggaaagaacgacttgatcgtgtccgcgatggagtccgagtcgagcgacgccgggaggaagcccgcggcgccgccgcttgctccaccggcgccggagaagtcgaacggagcgtgcgcggcgacggtgatggcctgcgcctggtcgtcggagttctcggcggcgggtcttggttctgctgcacttgctggtggaactgcagcagccggttgttgtggtgccgctgctgctcatctgcttcttgctgcgctcctccgcctcctcctccttctccgccgccgcctgcgtcgccgccgtgaggagcccggtggtggtgcctcggatccagatcccccgcctggttgcccgccgctactgctgctccgcgtccgacaaggcgcgtccatccaactcgccggcgcccataactaggacgacaagaaacacagaaaagaaaacagtcaaaagagtggagaagaaggcggcggtggcggcatggagatggacatcaggcgaagtggtggccagggatggatggacggacactgacccaggaggagaggcgaggcgaggagttggggagacaaactagaagcaatcggattctcggattcggatggatggcaacatcacattttacccttgggggtgggggtggggggacgggggaggcaaagctcgaagctttctcgctttctttttcccctcgggagtgtgggagctccgagcgcaggaggcacaagggaggcagcaagacaggatgataagactgggatttgggattttgtgaggagagagaaggggagagtgcgtgtgcgtgtgtgtcactcttctcttctcttcactctcgtgacttgtgagtgccgctgccactcgctgtccctatcgctagctcccttgctggcgctagctgatgagcgtgcaggttgctggacagggtggacagcgaggtgcaagaagggtgtttgggaagccaaatttggaggagctggcatgcgtcgatttgggcgcctcattttcgt

SEQ ID NO: 113906 - DNA, 1023 bp, Zea Mays
atgctcgtgatggtggttggtggcatggtgggcgcgcggagtaatctgcgctccactgctctgccgtcgtcagtggtgagaagccgaggacacggacggcggcggcggcttgtcgccattgccgccgccgttgtgctcctcgtcgccctgcatcctggtggggatgcggatcccggagaagccgacgccgggcgagaacccgatggccgacacagcggggctgagcccgccgtgctgcatcgggttgtcggcttcgacgctctccggccatcctcgctcggagggctggttactggactgaaggggtcccctctggaagaagaactggctctggccgccaaacgccgcctgcatgtgcgccgcctgctgcgacacgttgaacaggtagccgccagcgctcccgccgcctgggtcgggcacggtccacggcaccatgcgctggctctgcgcctgctcgccccacatggcgccgccgccaaacgagtagctggcggcgccggagaagagcgcctgctgcgccgagccattgccgccgtgggcttccgaccggtcctgctgctggtggaacatggggtctgggagagactgcagcgacagccggagctcctggctgtggctgccggtgcgcgacaggaggtcgggcgtgtagctttggaagcccatggccgacgactgcgccgccgccgtggacgacgacgcctcgccgccgccacccgtgccagccatgggaaagaacgacttgatcgtgtccgcgatggagtccgagtcgagcgacgccgggaggaagcccgcggcgccgccgcttgctccaccggcgccggagaagtcgaacggagcgtgcgcggcgacggtgatggcctgcgcctggtcgtcggagttctcggcggcgggtcttggttctgctgcacttgctggtggaactgcagcagccggttgttgtggtgccgctgctgctcatctgcttcttgctgcgctcctccgcctcctcctccttctccgccgccgcctgcgtcgccgccgtga

SEQ ID NO: 113907 - DNA, 1212 bp, Zea Mays
caaccacgtcgtgctcttcttccagctaggatggcgtcaccttgctgttcgccgccgtgccgctcagcctctgcgcccggcccttgggccgtgccccgtggcgacttcgcaaggccccctcgaggtggtggacttggcgttggttgtgttttttttttctctcgagtaagtaatacagaattttatacggacatgtagtattataggtagaagagaatggtcaaagtatgcaaaattattccacagcaacggcctgcagctgcagctgcagatgttgctgtcttagactcaaacttctaccaggcaatcactgcgattggccactgctgtacacaagttggcggggcgccgtcaagtcaagacaagccgccaccggcgttgacgacgaggcgagctccaactcgtcgcccaacatctcgaccgccgcgacacgcggcggcgcggaagctgcggtggcccggtcctcggcccgcgccggcggctcggccttgccgcggcagaccgggcacgacgcgcgcgtcgcgagccacacgtcgatgcactcctggtggaacacgtgcttgcagccggagagctgcctcaccatctgcccctcgtccaggacgccgaggcagaccgcgcactcagcggcgccggcgccggcgccggcagcatcagcagccactgaggttgagccgtcggcgccggctcgccgtcggtacgggaaggacgggatcagtgcgatggccgcggcgtcgaggccgggcttgggctgacgctgctcctgcagcaggagccctctcgcgccgtggcgccagcgctggcgaagcaggacgaagcgcacgaagaggaaggcgacgacgaggacgaagcagccggcgaatgacgtggcggccacggccaccagcgtcgtcgctccgcagcaccgggtgccgccgccggctcccggcgaggccgtgctgttggaggacatggcggtggtcgcggagtataggaggattcctgaggcgcgaccgaattaattggctaatggcataggtagtttaacctctttattattttttgtttaaaggaagtcacatttgtttttttctccttagttttcgttattgcaaaaaataaataaattaaaggtagctgtcaaatgtcaagctgagtttgacgcgcctctcccacatttatacgagcgtcttgttgtaattattttttaaatacaattgatttaagaaaact

SEQ ID NO: 113908 - DNA, 183 bp, Zea Mays
aacgttttttcttttcttttgacacttgtaatgcatatacaggtcggctgcccccttcgttgctcattttgtgccacagggaagggagggtttgcaaggaaccttcaaccacatgagattgttgaacaggtgttggccatcgaggagacgttcaaacacagggtgacaaatgttgtgttcatc

SEQ ID NO: 113909 - DNA, 654 bp, Zea Mays
agctacacaagctaagtaaaacagattagctacacaagctaacgacaagtgagcaactattttattataggtatgactagatatacaagaggatacacgagcaacaaatactcactagcataagtatatgaacaagtaaatacaagctagtgaggaaagttgcaaaccaacgggaagatgatgacacgtggcacaatgattttttcccgtggtgtcgatgacttgccggtcacccctagtccacgttgaggtagattcaaagctcccaaccgctcctctatcaagtctccacttgatctcttgagccggattggtcaatgaaccctcaaaccttgattccactagagttgcttttcaccgctccggcgaggcaagcacaacgcctctcacaatcaccaccgcggcctcttcacaatctcctttgaagagctcacggggaaccaccaccaagccgtctaggaggcggcaacctccaagagtaacaagccaacgacctcacttgatgatctccctagtgcctcaaagatcaacaacttgatgcaatgcactagatggctctcaatctcactagaatgcaatcccaaccaatatgagtgagagagagggagaggaaaggctccaatatgctcacaagtgttccaaatggcatccttc

SEQ ID NO: 113910 - DNA, 894 bp, Zea Mays
ttgattaaactaatataataataataatgaattaatgatggcgatgatgacatgatcctagtagtacgttaccaccctactagctaaggtagtagcagtctgtctctgttgtagctcgcgcgcgcgcgttgctgttctccaatcatgcatgcatggcggtcagcattccgagccagtacgccggccgcacactactacacgggtggcggcagcgcctccgcggcggcggcggcggggtcgggctgcttggtggcggcggcggcggcggcggccgcggcggggccgacgaggacggcggcgcggcacatggggcaggtggagtgcgctcggagccaggcgtcgacgcagtcggcgtggaacgagtgcgcgcacttgggcagccgccgcagcttctcgccggcctccacctgcgcgaggcacacggggcagtcgagcgccgccccgccggcgtgcgcgaacgtgggcagcgcggcgatcgcggccgcgctcatgccgcggtccccctcctcttccgccgcgccgatcccgggcgcggacggatggctgccgcggccgcggccgcggaggagcaggcggcgccggctgctgcagatgtaccagatggcgaggtagaggaggaacgtgaggatgccgatggcgaaggagagccccatgaagagcagccgcgcgcgggtgctgtagcgcgagttgtccgaggcgaagagccacgagttgggcgtgctcatgctcatttgcaggaagagcggcgggggtggtggtggtgtttgctttgcttggcggcgggtgctagctacccgcggtggcctggctggccctctgccctttttctttctttctctagtgagtgagctctgatgaggagggagctttactctttgcgcttgctgtgctgtt

SEQ ID NO: 113911 - DNA, 1843 bp, Zea Mays
ggaaaaaggtttatcctgatctgtttgttgatcatgttacagtatctggcctgtccgggagtaaagaggaggcacagagtcaggtactgatcggaatggggctgcttgctggttccaccgtcttcctcctcaccctgctttgggggacctgtgtcgttgttggcaaatgtgaccttgggccaaaccgtgaggcagttgatgtaacagacaccaagggcttcagcttgactggcactggtattacaaccgacgtgcagaccagctatgcagcgcggatcatggggctatctgttatccccttcatcatcgctcagttcccaaagatgttgaagacccaccacgggcagcgtctagctatgttgctggccctcattgtgtcattcttgctcgtgctttcctactgtctgtatcaggttttccagccttggattcagaggaggaagcttgcatacgcaaagcacaagcacgtgatctctgggatactgaggcacgcccagatgcagtcactcggccgtctgctaaacgatgatggcacgcccaatgacgacgtcatcagaaagtgcgttcccctgaacatcctgttgttgcataaccacggtaggataggagagcactaataataattcatggagatggagatggtgatgtcatggaccttttcttatgctgacgcgcaggctgttccgcaagatcgacatggaccagagcgaatccctgtcccgtgctgagctgcacgccctcatcgtcggtatcaacttcgaggaggttgactttgacaggacggatgcggtggacaaggtcatggacgacttcgacacgtcccgcaacgatgtcgttgagcaggaggagtttgtgcaggggatgaagaaatggctcaacgaggccaagcgcagcgtgcccgtgggcggcgccttctccaccaagttcatcaatgaataccacgaggtaatctgctccgcccccgcagcctccggtaggcttaggaattgtggacggcagtgggcagagcactgatgaatggaatggaacggaatggaatttgtccagaggacgaggcaggagcacaacgagctggttgacaggtccgatgaggcggtggagagcgtggagaaccccgggtggtgcatcgccaaggccgtggcgctgctgctgctgggcgccgccatcgcggccgcgttcgcggacccgctcgtggacgccgtccacaacttctccaacgccacgcacatcccgtccttcttcatctccttcatcgcccttccgctcgcgaccaactccagcgaggccgtctccgccatcatcttcgccagcaggaagaagcagcggacctgctccctcacattctccgaggtgtatggcggcgtgacgatgaacaacacgctgtgcctcggcgtgttcctggcgctcatctacttcaggaacctgacatgggacttctcgtcggaggtgctcatcatcctgctcgtctgcgtcgtcatggccctcttcaccagcttccggaccacgttcccgctctggacctgcctcgtcgcctacatgctctacccgttctcgctggtcctcgtctacatcctcgactacgtctttggctggtcataggctctcatcggcgcctcgagtgaacacgaccctgattggagcacctgggttttaacagccgccggtgtttctgcttgaccttgtaattttgactcatgtgaagctatctgtccagacttcttatatttctttgtgtatccaaagcacgcacgtacttcgtcaaacagcagctgcatgttttcagctcccttgtctgtacgtacatattgattttattttacctcaattgttagagttgtttgtt

SEQ ID NO: 113912 - DNA, 1613 bp, Zea Mays
ggaaaaaggtttatcctgatctgtttgttgatcatgttacagtatctggcctgtccgggagtaaagaggaggcacagagtcaggtactgatcggaatggggctgcttgctggttccaccgtcttcctcctcaccctgctttgggggacctgtgtcgttgttggcaaatgtgaccttgggccaaaccgtgaggcagttgatgtaacagacaccaagggcttcagcttgactggcactggtattacaaccgacgtgcagaccagctatgcagcgcggatcatggggctatctgttatccccttcatcatcgctcagttcccaaagatgttgaagacccaccacgggcagcgtctagctatgttgctggccctcattgtgtcattcttgctcgtgctttcctactgtctgtatcaggttttccagccttggattcagaggaggaagcttgcatacgcaaagcacaagcacgtgatctctgggatactgaggcacgcccagatgcagtcactcggccgtctgctaaacgatgatggcacgcccaatgacgacgtcatcagaaagctgttccgcaagatcgacatggaccagagcgaatccctgtcccgtgctgagctgcacgccctcatcgtcggtatcaacttcgaggaggttgactttgacaggacggatgcggtggacaaggtcatggacgacttcgacacgtcccgcaacgatgtcgttgagcaggaggagtttgtgcaggggatgaagaaatggctcaacgaggccaagcgcagcgtgcccgtgggcggcgccttctccaccaagttcatcaatgaataccacgagaggacgaggcaggagcacaacgagctggttgacaggtccgatgaggcggtggagagcgtggagaaccccgggtggtgcatcgccaaggccgtggcgctgctgctgctgggcgccgccatcgcggccgcgttcgcggacccgctcgtggacgccgtccacaacttctccaacgccacgcacatcccgtccttcttcatctccttcatcgcccttccgctcgcgaccaactccagcgaggccgtctccgccatcatcttcgccagcaggaagaagcagcggacctgctccctcacattctccgaggtgtatggcggcgtgacgatgaacaacacgctgtgcctcggcgtgttcctggcgctcatctacttcaggaacctgacatgggacttctcgtcggaggtgctcatcatcctgctcgtctgcgtcgtcatggccctcttcaccagcttccggaccacgttcccgctctggacctgcctcgtcgcctacatgctctacccgttctcgctggtcctcgtctacatcctcgactacgtctttggctggtcataggctctcatcggcgcctcgagtgaacacgaccctgattggagcacctgggttttaacagccgccggtgtttctgcttgaccttgtaattttgactcatgtgaagctatctgtccagacttcttatatttctttgtgtatccaaagcacgcacgtacttcgtcaaacagcagctgcatgttttcagctcccttgtctgtacgtacatattgattttattttacctcaattgttaga

SEQ ID NO: 113913 - DNA, 505 bp, Zea Mays
accgcacccagaggaggcaaggagcccatccacatccacctggtcctgctctcaccacaccgccgcgccaatggcggctcgccggcagcaccgccgcggcttcccgctggtcccgctcctgctctccctcctggccgccgccgcgtacggccgcctcatctccgacggcggcccgtccgcgcagctcctctcggtgatccgcctctcggggtcctcgccggccgcgggggcggccgccaaggccgaggagaagtgcgagcagtcctacgggttcctcccctgcaccaccaccgtgctcgggaacctcttcctcgtgctgacgtacggctacctcatgtacaaggcggccacgtacctgtcggcggggagcgagctgctgctcgagatcatggggcccggcctcgtcggcggcctcctcctccccatcctcggcgccctccccgacgcgctcctcgtgctcggttcgctctccgtacccctcgcccgcctcatttctgtgctttga

SEQ ID NO: 113914 - DNA, 3103 bp, Zea Mays
atggagaagctggaagaatctgagactaaggttggctttctatggtatgaacatatatacaagctagacaaaggcccagaaacacaaatgcacacccttgccaaaaacatcgctgggacttctttggtctacacaaaatattttaaaatgatagaggaaggcacctactacatactggagatatgcagttgcacaagccatgtcatcgttcagatccgcaaaggcaagctcagttttgagcaactaaataacattaaatatagggcattatatggtataactataaccaaattgactcagggagtgactgctgatgaagaggaactcatggatgaaggtatcagatcattgatccctttcatgtcatggtctattcaaaaggaaaatccacttctgagattaacagttgagaactgtgagttgtccagtattggtgtgattatacttctggactgcctcacaaatgcgaagcaactccttgatgtgctatctattgcagacaatcatctagggagtcctgtggcagctgcattggccagattcttgggttcacatgtacgagctttaaatgctacagatatcggcttgggaacagtaggcttccaaatacttgaggaaacattgccaacagaagtagctctttcccacatcaacatcagcgtcagcctcggctcagcccccgccatcgctgattcgctggccatcagagtcggcggccaggccatgtcgaggttctggaagccagggtcggagaagccgagcaccctactcgtcgacgacgaggagggcggagtcgtcttcctgccctcctccagctccgtctcctcctccggctttggttacgcgagtctagagagacagcggcaacggctgccggtgtacaagtaccgcaaagccattctctacctggtggagcggcacgccaccaccattgtcgtcggcgagactggcagcggcaagtccacgcagatccctcagtaccttaaggaggctggttgggctgacggtggtcggcttataggatgcactcagcccagacgactggctgttcagatggttgcatcaagagtagctgaagaagtaggtgtaaagcttggagaagaagttggttataccatccgattcgaagatcaaacaaacccgggtatgaccatgataaaatttctcacagatggggtattgattagagagatgatggaagatcctcttcttaccaagtatagtgtaattatggtggatgaagctcatgaaaggtccatctcaaccgacatgttgctgggtctcttaaaaaagattcaacgtcgtcggcccgagttacggcttattatctcctctgcaacaattgaagcaagatcaatgtcaaccttcttcaacattaggcgaaagaattctttgcttgggtcttctgataatttgcccagcccagaacctgctgtactttctgttgaaggtaaaggatacaccgtggaaatccattatgttgaagaacctgtctcagactacttacaggctactgtgaatactgtacttcttattcacgaaaaggaaccaccaggggatatcttggtattcttaactggtcaggatgacatagaagctgctgttaagttgttgaatgaagaaattcagcaccttggaagacactatttggacttgctgattttgcccttgtactccggccttccgcggggagatcaagatctcatttttgctcctacatcaaaagggaaaaggaaagttgtgttatcaaccaatattgctgagacatcgctgactctggagggtgtggtatatgttgttgatagtggattttccaagcagaaatgttataatccgatttcggacatagagagtttagttgtcgcaccaatatccaaggcatctgcaagacaacgagcaggcagagctggaagggtgcgacctgggaagtgctttaggatctatacagaggaatattatcttactgaaatgcagtcagaaggaattccagaaatgcaaaggtccaacctggtctcctgcataatacagttaaaagccctaggcatagacaacatcctgggctttgattggccagcttctccatctccagaggcaatgattcgggctcttgaagttctattctccctaggtatcctcgatgaagatgccaaattaacagtacccattggcttccaagttgctgagatccctctggaccccatgatttcgaaaatgatcttgtcagcgaatgattttggatgctctgatgagatattgaccatagcatcatttctgtctgttcaatctgtatgggtttctgtgaggggagtgaagaaggaatttgatgaagcaaagcttcgatttgctgctgctgagggagatcatgtaacattcctgaatatctacaaaggatttcaccagtctggaaaatctagccaatggtgttacaagaactttttgaattaccaagcactgaagaaagttgtcgacattaggggacaacttctcaggatagtgaagagttttggtatacaactgaaatcatgtgacagagatatgcaggcagttagaaaggccattattgctggttcatttactaatgcatgtcatctggaggaatacagccaaaacggaatgtataaaacaattaggacattacaagaagtttatattcatccatcttcagttctctttagggtcaatccaaagtgggttgtctaccagtctctcgtctcaactgacaagcattatatgcggaacgttattgccattgagccatcatggcttacggaagctgcaccacatttttatcagttccgagcattcaatcctgctccccactaacattactgtgggcaggactgcacgtcgttttgtaattttagagaacttaactttcctagggccacaattttgttgaagaaaaggattgccaatatttgtatatgctaagcacttgtggcattattctattccagtgatgatgggacggccaaaatcacacttgtcggtttatcccaaaatcacagtagcgagaaatctgtaacttgtacaacctcttgaatttgcccacattttgttcttgtcagtttatgggaggatgcagtttattggactatataga

SEQ ID NO: 113915 - DNA, 1168 bp, Zea Mays
cgcgtctctgccgccatgcccgctctccatcgaaggaaggcgccattccagggattaccgcaccattctcgccctcgtccgctctccggcaccattccagcattccagggattaccgcctccccctcgatccgcggcactctcccccgtccttctcgagtatggcaccgccagtccgcctcgcgacccctgcctcctcccccctcgctctcttgttcccccagccaccgcgaggaactctgaaccccattccccaccaccgtaccaatccccgcatctacgccgctccccccgccccctgtcaactacgccaggtcctcgccatcgatgtcgcccaagcgtgtcgtcctcgcccccgacctcggcgtgcgggattcggtaccgaaagaagagacaggaggagaatacaagccctcagcctcggtgttccccattcaccactcaggcgcagtccatcgctccttcgacgagggctccagcgactacggctccatcgctcctcatggtgatgccgccgagggttgtcctacgaagccgtccgcgatgccgagggttgtcctacgaagcagacacgccctgcggctgcccacacaaagggtttggttcttgttcctccaagctactgcgcgtgtgcttccacattcggcacagtgggagccctcatggcagcagacgacgtgtgactccagactcggcgtagacgacccacaaggagctgctaatggcggaggctgagcgccgccatggatctgacacggtgtggaatgggaggagccgaagcggagattggatcaaagtgcactgggcaggagccaagcaaatcccaaatgtgtcagctgagtttcggtctcatattggtggagctgctgtatctgcagcaaagtggttctttctttgttttctctgttgatacgtttttagcagttattctgtttaatccttctatttcacatatagggtcatttattggattgtttgtgtggaaggcagttggttactacaatgctggaacagtggagtttattgtggacactctttctggagagttctacttcatggagatgaatactcgactccctcctcccctcctagatcccgtgatctgctacgaagctgccatcaacgccctcctccccctctccgctcagctcctcctcgctctttcgtag

SEQ ID NO: 113916 - DNA, 2418 bp, Zea Mays
gaggcggtttttttttgcatttctggccaaatttaccgacgaatcctccagcgcacgcactggtcacacagcacagtacagcactacacatgcggtcaccaacccacttgtactcaacagctgttcattcagggtactatgctagaaggaattaataataataataatattactattatcgcctggcctcgccgatcagcggccagtccaacccgacccaatttgtttttgtttgccaagaaaataattgaatggaccatcccggccggcctgagaaggaggaggcacgagcaagccaacaccacaacctacaaataaatcatcacaccaccaacaacaccaagcaccacgggagggagatggcccccgccaaggaatcgaaatgaaaaaaaaaatgtgggaaggagcaggcaagaaccacgaagcggcagcggaaccgagagacagaggcaggagcgcaagaggacaagaaggcagctcaggattctcagaacgacggcaacttggcgcatcgctgcttgaggtacacggagcagccgtccttgggcacgatggtgggcatgtacaccgggtcgtcgcacccgggcgtcctctcccgccggaagtccaccaccgacacgaacagcgccatgaacaggacgaggtggttcagcgcgtaccgctgccccacgcactggtgcggcccggcgccgaatgccaggaagttgcgcctgtacgccacgtcctcccgccgcgcctccgagaagaagcgctccgggtcgaacgcctccgcgtccgggaacccctggaacgacgactcgtacacggacgggaacacgatggcgcccttgggcaccgtgtaccactccgtcagctggaacgcctcgcccgcgatgtgcggcaccagcgtcgcggggggccggtgccggaccacctcgcgcgccaccgcctgcgtgtaccgcatcccctggatcgtctccgccgtcatcggctcgccggagtccggcgaccaggcggccgacacctcggcgcgcacgcgggccagcacctccgggtgggagtccagcgccgacaccgcccagcagagggacgaggtggacgcgtcctgcgccgcgaacaggaagtcgaacatgaacccgccgatctcctcgtcgtcggtgtgcgcggggggcgggcgccccgccgccgccgcctcgtccatctcccgcagcgtgtcctgcatccagaagtccaccaggcactcgggctcgccgccggcgcgcatccgcgccttgctctgccgcgcgcactcgcccagcgtgcgcaccagccgcgccacgccctccctggcgcgccggaacgcgaagcagggcaggtcgatgggcagcgccatgagcccgacgttgaagaggttgtagtcccgctcgaaccgccgccgggcctccccggcgaggtacggccccacgaacaccgtctgcgaggtctccaggttcatgtcgcggcagggcacgcggatggggaacgccccgccaccgccgccgccgctccggtcgagccaccgccggaggtgcgccaggatgacgcgctgctggagcgcggcgtaggtggacagcgcgcgcggggtgaagttgggcgcgatccgccgccgcaggtccttgtggtcctcgccgaacatgtagatgaggttgtggtcgccgaacagcttcttgccgaaggggtggccgatgaggtggaacgcgtcggggcggacgttggcgaacacgcggtgggacagctccgagtcgcggatgaacaccacgaaccgccccaccaggaagtcggcggcgaggcccgcgccggaccgcttggcgcgcgccgcctgcgcgtcccagaaccccgtcgggtcgcggatcatgtgcgctacgctgccgaggaacggcaccacgagcgccggcccgggcaggggccccttcttccggtggtaggacacctgctccatcaggaagtacaaagccaccgcggcaaccaggaacggcgccgccgcgcggaggtccaaggagctgggcatgggcacgggcacggacagagactgcgccgccattgcgctatgctctggccaaaggctggccacgagcagcaaccgccctagccgccgccgccgccgccgcttctgctacaggtcaaccgtgagggctgaggctcgtggggagctctctctctctccctccctctcctttgacgcgccgcgcggatggtgttccaaagaggtctatttatgcgacgcgaacgcgaacgcgagcgatggactggaagggaaacgaacgaaggttggagcgggaatctgaggtcaaaggctggctgctgggaaagggaaagggaaattgcaagggaaaaaggaggtggtcttttcgcctggctggcacggccgtggcggattggctgatggccgcggcccgccccggggtggaagaaatgaggccg

SEQ ID NO: 113917 - DNA, 1695 bp, Zea Mays
cacacagtcacaccaaacactgtgaacccacccagaaaggaacacagacacagggcagcccgagtcaccggtctatgcacccgagtccacaacggtcccccacctcgaacccaccgatcatcggcttcgccgtcgctgtagccgtctaaaaatacctcccgatctccgacgagttgtcgaactatggcatctcccgcgcaccgggcgcctcaccgcttccggcggcctcttcgcgcgccgctgccgccgccgccgccgcggctgcctactccctctttatactcccgccgtccctccgcgcaccaggtatcccaattaagaaccatcgtgccaagaccttcaaggaggcgtcatgccattcaagttgtcacggcatttgatgatgatcctggggatttctcgctggtgcacgatgacggggacgagcagtttggtgttcctcagtattcaagcgagagtgaatggagcgatgatgatgtcatattgacggcattcacagatgttgagttaccgatggcagtcaagagccgggccgagggtgcactaactatagctgcccataggttcgccacgattgacaaagggcataagaagagcagttttatcagcacttgctggattcctttttgcaccagtcgctgatagtctgaagatccaccatttccggaggagaggaaagtctgtttctccatcaagtagaaagccaacccctggaatgggaggattattctttgttcctgttggtatttttgttgcaaaaagagaggttggttccaactcgaatggagttaatggagcagctatgattaccctcatatttgcgatggttgggttgcttgatgatatttctagtctagcagtagatcacaattataaaataccgcgatggataaggttcttggttcaaattgttgctggcatttacttctctaactggttgggttctacagatatttcaacaccatatagcatgaaatatctggttcctctgccgcctcctttcggccttgcactcattggaaaagtatatatggttctggctgctgcatgttcactttccatgggtccggcagtaacactcgttgatggtcttgatggtttggctggtggtattgctgctttggcactcatagcactatctgttgcagctctcccgatttgctctgaattcagtgtttttggagcatcaatgtcaggtgcttgcattgggtttctttttcacaacagatacagggcctccgtggttatgagccgggttggttctttcgcactcggaggagcagttgccacaattgcatcatgcagtggaatgtttcttccaatgttaatagcatgcagtctcttctttgttgagctactgtttgcaatattgcaggttccttttcacatggctaaaaactctttccgcggaacaagcagacatcccctgaaaatccgcccctcgcattactacctcagacttctagggataaaggaaccttatatcgtggcgggcgcatacatgatatcatgcttcctaactctgttggcaggataccttggccttgtctcagcgtagatgaactctcgtcgcttcctctctttttcttttcagttgtggtacatgataaaatccaggcagccattattgcttcatttttatgccaggtctgtgtttcagtgacacagagaatttaacagatgtagtcgttcttt

SEQ ID NO: 113918 - DNA, 1728 bp, Zea Mays
cacacagtcacaccaaacactgtgaacccacccagaaaggaacacagacacagggcagcccgagtcaccggtctatgcacccgagtccacaacggtcccccacctcgaacccaccgatcatcggcttcgccgtcgctgtagccgtctaaaaatacctcccgatctccgacgagttgtcgaactatggcatctcccgcgcaccgggcgcctcaccgcttccggcggcctcttcgcgcgccgctgccgccgccgccgccgcggctgcctactccctctttatactcccgccgtccctccgcgcaccaggtatcccaattaagaaccatcgtgccaagaccttcaaggaggcgtcatgccattcaagttgtcacggcatttgatgatgatcctggggatttctcgctggtgcacgatgacggggacgagcagtttggtgttcctcagtattcaagcgagagtgaatggagcgatgatgatgtcatattgacggcattcacagatgttgagttaccgatggcagtcaagagccgggccgagggtgcactaactatagctgcccataggttcgccacgattgacaaagggcataagaagagcagaactcaacaagggctgatgaataatgttggactggttgctttcttagtgatgttacttttctttgtcgactggtgttcttggaagattgttagactaccactggactctttttacttgacacgtccttttttaacatcggcagttttatcagcacttgctggattcctttttgcaccagtcgctgatagtctgaagatccaccatttccggaggagaggaaagtctgtttctccatcaagtagaaagccaacccctggaatgggaggattattctttgttcctgttggtatttttgttgcaaaaagagaggttggttccaactcgaatggagttaatggagcagctatgattaccctcatatttgcgatggttgggttgcttgatgatatttctagtctagcagtagatcacaattataaaataccgcgatggataaggttcttggttcaaattgttgctggcatttacttctctaactggttgggttctacagatatttcaacaccatatagcatgaaatatctggttcctctgccgcctcctttcggccttgcactcattggaaaagtatatatggttctggctgctgcatgttcactttccatgggtccggcagtaacactcgttgatggtcttgatggtttggctggtggtattgctgctttggcactcatagcactatctgttgcagctctcccgatttgctctgaattcagtgtttttggagcatcaatgtcaggtgcttgcattgggtttctttttcacaacagatacagggcctccgtggttatgagccgggttggttctttcgcactcggaggagcagttgccacaattgcatcatgcagtggaatgtttcttccaatgttaatagcatgcagtctcttctttgttgagctactgtttgcaatattgcaggttccttttcacatggctaaaaactctttccgcggaacaagcagacatcccctgaaaatccgcccctcgcattactacctcagacttctagggataaaggaaccttatatcgtggcgggcgcatacatgatatcatgcttcctaactctgttggcaggataccttggccttgtctcagcgtagatgaactctcgtcgcttcctctctttt

SEQ ID NO: 113919 - DNA, 911 bp, Zea Mays
aggcaaatatgagatagcatttcatcccttatgtattcaggtaactgatttcttgaggcaaactgggaagctgcatggattgtgtccctctgcatcatgcaagaaaggaaagatcacataattctctgaacaaagagctatacaaacattagctgcgggtatttggaagagaacttacgaaatttctggtacggcaacttccctggacaaccagatttgtcatgtttcctatgaggtatgccaggaaaaaggttaggatgatatctatagcaaagaagctgttgacaatgttctcaaccagaaaaagcacccatgagagatgtctcagaaatgctagctcaaatggacagatccatgctgagtaaacaacaagcacaagcaagaacgtctcccaggttctgataaggcatgacaaacaagcaaggtaaatacttatattttctttcgcagtatttgaaagcaaatactatgaattttacctgtaacacgaatcataaggagaaatgatgaatttcctcaacttgattgactcgtttgcttttgctcctagagatgggagcaggtcattgtgaaatatattgctaatatcttccattggtgtgtttgactagaacaatgatagtaccaaacttgatatcattgtatgcgctcctataaatgttttcggtgtatggagagctttctggattgtttggcagtgaatctttgcatgcctttgatgggcaaaggatggttgtgtttctgttccaaaatgacggctgcggatgctgcataaataagagtttggtttggttccaagaaggattggaagaggatcaatgagacatgaaagcatacagcaggaaccctccaaaaggcttcgccaatgaagttgtatggacagatatataaataaaaaggagtttacttaa

SEQ ID NO: 113920 - DNA, 182 bp, Zea Mays
gtgaccgagcgtgcacaaaaagaagtcatagcgcgcgtgggtctgggatttggacgttgttgcccctagtaattgcacaaaaaagatgcatttaagagaaatcgaacttgagacctccagtctagaatgccttggagctgctgcagcaaccaatcaagcctgattgttttagtgacgttaat

SEQ ID NO: 113921 - DNA, 1826 bp, Zea Mays
tgaaactaaaaagtttttttttactggacatgttgccggaatggccatgccacgaaatgtaattacaagcaggattagctttatcattattgcaacaagaggcaccttattccttactcgaaaagtcgaaagtaaacgaagctagcgcacaagagcacgaaatacttcatggtagcacagctgcactgcacaggtgcatgcgcgtccttccctaaacgcctcagtgccccgagagcacgcttggaatcgcatcacatactggcgtcgtcgtccgcgtcgaagagcatccagatctcgttgaccctgccggtgaactcgaagggcgagttgtactgcgcgacggtgtagggcgaggccgggtcggccctgcgcgcgtcgttgacggcggcggcccaccgggtgccctggaggctggcctcgagccgcgccgcctgctccccgacgtcggcgtccgccacgaagcccccgaagcggcgcacggccgcgtacctggccccggcccagcggtccacgcgcaggccctcggccggcggcgggtccgcctggttcttggccggcacgtagaagctcacggcgaaggcggaggcgcagaagggcccgtcgctgggcgacacccgcgtcagcaccggcgccgtcatctcgatcgtctggttgtacgcgttcttgccctggatgtagtcgaacagcctgcaatcgcgcgcgcgtatccggtgtgagcccaccacagctaaggactacgtgcgagcacgtattattttctctctttggctctggcccatttgaaggcggcccaataagggacggaagcgtgcgtgtggaggcgagaggtggtggcttactgtaggaagccggtgcgcgtggcggcgacgaaggagatgtcctcgatgggcgccgtggtgatccacatggcgtccgtgtaccgccggatctcgaacccgttggcgctgtccaccacctcgtacgccgggcactcgatgcgctcgcacgtcggcggcaccgccgcggcagcgacggcgacgagcagcgccgcggcgaggagcaggctggcacggcgcgccatatgcttgcactgcttctggtggatggcaggatgagggggtagcggagtgagatgaggtctggtgctcgacctccgttcgtgcggctggggatcggctgcgatgataaatacctctgcttggccttggccccgcgctctggaaggatgctcgcggcgcaggcgcttccacgtcgctgggtttcgagcgcttggccctcgttcgtgctcttgctagagtccgccggcgtgaggttagctgcagaagcacgtagaaagcacccagttttggtggtttctgagagattttttttcttgcttctggattgtggtcgagtcgttttcaagtacactgagacacattatttgcagttgctttcagtttcagcttgcaggatacaaataattggtgagctttactggtgaagcaaggagctcatggcgtacagctatatgtctgctggagtgctggccggagccgagctggtggcctcgtgcgaattctggatgaattttgtaccacgaggttggctggcgcctggcgggcggcggtagtgcagtgcagtgcagtgcacgcggccgcccgattctcagtcgggcaagggacggcgtccaataatggcagtcgattcgcggcagctttcagctacagaacacctcgagctactgccctcgccgtttctcctgtctcgtctcctcatcaattgcaaatggttgatggtccaacggagacgacgcgcattcatggcgagcgctgtggcccaacctccaactgcgccagccgcgagag

SEQ ID NO: 113922 - DNA, 1300 bp, Zea Mays
gccatgcccaccatcctcgctcgctccaaccacgtatctacatgtcgcctccgacatccacgcccatgctccgtgcagtgcttgacgcgcccgctccaatcgcgtctatgcatgctgcgactgccatccttgccacccgcatgcctcatctgcatcctccgtttatcgtacttatccgcggtgatatgctagagcgtcagcaaggcggactctccatccctccagagagggagggaggcagcagccataccaatctgcgtggcgggaggtgcccggactgcgtacccacgggcgagcaggattttgacgatccacgacccgatgaagtcgccggcgtcggtggccatcgtgcgctgacgcccagtcccttcttcctctcggggcggtggtgccgccgggcgaatggattcgtccgagagcgagcaaataggggtaagcatttatcaagcggaagtaggaagaaatggtacagtgaagtggaggaaatgacacaggacacaagcggaagttggcatctcaaggcggtcgcactcgcacggttagcaatgcactcccctaatttctgccctttttatggtttcacgattatctgaatatggagttcaaggattgatcttttctgagttctttgttgccatattttctgtccatgtaataaggttgtggctaaaatattgtgtcaatcgggcttgtgtgttgctgttctattcttgcgtagtgcagctccgaagtcgctgctaccaggtgcccctgtgcctatcaacactgcttatcaacgggctatacccttgtatggtggacattcacgaagagcaagctccggcaccgttgctgttctggtctcggccgtggagatggaactatgattaaaagaaaagagaacactacggaaggaacctaatgatgctcagtgtactgctgctttcccacgatgctcatgatgtcgaagtctgcagttgctagactggcccgagtaattgctaagttttgtagaaaatgtttaggcccatttttgaacgcatgaatttcgtataggctgtatttcacatgaaatacacaggaacaaacatttttcctgccttccaaacaggccgttaggattagttgaagttccagtttgatcataggcacctacgtcgatgctctttagtaagatgtaagcaatctgtcttctggccaggttgagcaaggcttagctgcagtgtatcagtgtggtacaactaatgtatttatactgtacaatctaatgagactgtatggattagagctatcagaacctgcacagatatttcacaataaa

SEQ ID NO: 113923 - DNA, 1242 bp, Zea Mays
atggataaaagcaaaagatggaaaaagaagcggagaagagaagatcgcccgccatctgaccaactccagacctcagacagacagacagagctgaacgatccagccaagcgcatggaaccgtctctgtgcacgccgcacgccacggtgaccgcagcaaatgccgccccgctatccgtgcgcgcccaccgcggcgcgcgcagggctcgtgccgccgtgcgcgcccacagccaccaccagggggcgggggcgcgggagccggagccggagccggccgacccccagggcgcggtccctgccaagggacgaggcccgccggcgctgcccaacgccgcgctgcgggtgggcgccggcgtggcgctggcgctcgcgctgggaggcgtgtcgtggacggcgcgcggcgggagcgccggcgccgggcccgggcccgtcacgcagccggccatggtgtgcgccctcaacgccgtgaccgacgccgcggtccgcgcctccgcggagcagcgcggctcggcgaccatgaagacgagcgtggacgcgctctcggactcgctgttccggcgggaggactcgcccagggaccgcgccacgctcatggacctcgtcttcgagcaggtcaccaaagagcatatcaccgaccgggggaagctgacgagcctgctgcagaaggagttctcggcctcccgcgactcggaaaggaagcttgacctcggactgctgctcaccgacgttctgatcaaccagagagactggcagagggcgaaggaagtttgccagcagatcacaggccgctaccagcgtgactcgaggccgtaccttcacttggctgtgatcaacatgatgatagcggtggaagccatgctgtcccctgacaccgccaccaccgacgacatcgagaagatgaccaagaccgccgtggacgcctggaaggagttcaagaacaagagcgagctagccaaggggtcggcagattccaccgcctgatatagctcatgtaaatacaccgtgtgtgcttgcagtttggctgacgctgaaggtttctgtcgagtgctgattgatccagggatgactgatgaatttgtgtgtcctatgactgccaagtcgtttcaattattccaatgtgtgtcacttaattttctaattattatttttacacttgttcacttcatcatttacaagaaaaaaggttctagtttgtcaattattaccctgcagcatggtcctgctcctgcatttaaattaaaaaaa

SEQ ID NO: 113924 - DNA, 236 bp, Zea Mays
tattttaatttatctttttcatacgtttgagttcatgtgacttattttagaaacttgagctcacaaactttctcttgtttggtctatgtatggtgggattctgtcaatttataatctatgttcgttcagtcagtcgttgtaaactctcttttaatcgctcacttcattggtcgtgttgtatcaagtcatattagatagagtaaataataacaacagttagccaaatcaaaaaaaaa

SEQ ID NO: 113925 - DNA, 1184 bp, Zea Mays
acttttcgaagtagcagcccggaactccggatccaccgctaccgccgccgcgtctaaaccctccaccgccgcggtgcgtcagaggcagaggcagagaggcagaggcagaggcagccatggggagccgcctcgggcgccgcgtgatccactttgccaacctcccgctgaaggtcatgctgccccccgcgccgctctcctccgtgcaggagttcgccgtgcggaccgtcccctccgcttccaaggtggacatccggcgctgcctcgagtccatgtacggtttttccgtcgccgaggtccgcacgcttaacatggagggcaagaagctccgccggggcccctttctctccgccaagcccgactacaagaaggcctacgtcacgctccgcgccccgctcgcggtctcgcgcgacctgttccccatcggggccatcctcgcggagcgggagcggaaagccagcgcagccgctgcgaggaggaaggcggtggagggcgccgaggtggagggggagagcaaggggaagcactggatggaggacgagagggagggcttctccagggctggctgcgggaaggtcgtgtatgggaaccctgggaggctggggaggaagaggaggggaggggataaggtgaaggagcaagctggggacgaggcggccaagttcccgtggtccgggatgcgcctggctaccgagaaaccgaggagggtgagacgctctccatcgaagaagggaatagtcctgaagcaaaaatcacggaaggtatccctgcagcaccgctcaaagaagttgaaagcttgatagtacttgacttgagctgctgtaccgaaccactggaggatcctgccatcgagcgtggatgcaggccgtggacccataagttcgctggcggacctgccttgtttttaaattaccaaataaacaccgaacgttgaaggacttgtaaggattttgtgcctttgatatgggatttagaaggctgcatcgggcatgtgtgctggaggaccagacctggaagggttcatgggcgttccctatcctatactgtcccttcgtttgatatgagaattgagatttgtttagtaattaactgactactagcattgctgattagagatcatgtactgttatttttcacttgctgtccgactctgtttatttacctgctccgatgatccttttatagca

SEQ ID NO: 113926 - DNA, 3288 bp, Zea Mays
acacccgctcgcgtcgccctcgccgccgggtatcccgcccgcgccaggcacccctcccccggcgcgccgtgatgcccgccgtcgggtatcccgccctcgtcagcgcacccctcgccctcacccccgtcttcgaagagccctgcttccatcctcagcgccgccagctcgccggcatcctcctaatccttgctcgatgctagattcgccagactaccgaggcgctgctcctcggatctccggagaggtggcagttgtttgccggttatcggcgccgcatgtctcagatctgagatggacagaatctgggacggcaggaggggcggggtgtcggtctgaggcgttccgccgcctccgaggaggcgcctcaggagcaacggcggagggggccccagggactcgcctcgctccgagcgccgacggggcgagcgcctcatgctcaacggcgggggtggctgcgccagtcgggacgacgacgacgatatcttcgacgagagcctcagcgacgaagacgacgccgccgagcaggagctcgcgccacggtaccaccaccagcggcggtcaccgaacacgacgccacattcgccgtcgccacctccacccagcggtggccaccacagcagtagtagcagcggtggcgggggttatcacaaccaccatcacggccagcaccaccagatgcagtagaagtgcggcgactccaatcccatcgtgtccaaggccgtagacgagatgattggtgtccctgtcccgaggaaaccccgctccgcttcaacgaaacgttcttcgcatgagtggcctgtccccggcggcggaaccagtggaggcagcaccggcgcaggagacggctcgcagattgcagattcaacgggcctttgtcacggccaatctctccagcgtcagcctccactaccgtcccggctcggaagaagcttgtgagtttccaagccctccgtttctcgccaaagagggcacgagaactacctggtgagtccgaacagcacctcggcaacctcgatttcctcaactgcctggtgagtccgaacagcacctcggcaacctcttgaatgaaagagggcgacttcgaaatcttcgggactgtggtggcggctgtggttgtggcgggtttgttgatggagctggggacagtgatagtcgctgctttgacgctcgctcctcgccagtttgctcgtcttctccacgttgcagccagcaaagtactttcctgtcactcccttgagttgagggctcagtcctacgtagcaagtagtcgcagctccctgaagaaatgcatacacgaaatttcagaacacgagtttcgagataataacgtcgctatgaacaagaattggctacaaaaatgaaatacaaagatctggctccagacctggggtacattcttccacagtatgtaagtggcaacctaaagcacctctgcaagaggaaacaaggtgcttcagaacattgtcagaagataagtgttcctagctagagcctgagaacatatattctatgtgagaaaaaaaggaaaaataaaaagagagcatactcatgagaacaaggagtgcctcatcaaattggtcatgatcaatccaggatggacactgttaactgtgatgtttgctccttcttcctgtttacgaacattaacaatgtgtaagagcagaatcctgaaggatggcacataatttgagaaccaggagtaggtttcagagttttaaccagtgtaggcatgcatcagaaccatggattttcatacataggtaaaagggaacgagatcatatcatctctgcaagtcacactgatatgtatcaagatcccaaaggttccgaagttatctaaatcccaaagttcgcaatggccattgcttactgggtgccccttatatagttagtgcgtcatgacagtgaagcaggacagagcattagggccatgatggacaaattgtttctcttcaggtttctacccttcccgaaagagtaacagacatggataatactattaggataccctgaaaaaaataccttcagccttctagagagctccttcgcatgcagcaagttcgccagcttagactgtccataagccattttgtcgttgtatctgcaagttaataaaagatcattacttgcagttcaatcaacagacaattcctacaaagcagaaccataaacgcacatacattttctcatcattgaggttatcgaagtcaattcccttcggatacgtatggtggtgggcgactgatgacaaattcacaatgcggccctcaatacccgtagacttggcagtggccttcatggtatcaaggaggagattggtaagcagaaagtgtcctgataaaaaaacaatttcaagcaagtcatgctgtcagtgagagaatacctagatgatttgtcgcaaactgcatctcgaccccgtctttagacagctgaaaagggcaaaacatgacgcctgcattatttctgtggaacagaaaaggattccctcaagccttgatccagtgcaaagaggaaagcgctaaaataggcggaaactttcatatatatgaaagaaaaaacaagcaaaggaaactttcatatatatgaatgaaaaaaaacaagcgctaaaagtaataatacgtatatgctggagatagattcaacgaaatcaaaggaaactttcatatatatgaaaataaaaaacaagcatgaacaagaggtgaatagggttacatcaggatgttcagagggagtttgatcgagttgaactggtccacaaaagccctgacagacttgagggagctgaggtctagcttcagaacatcaatacgtgccgttgggttcttctccatgatggtctttcttgcttctgatgcagcttctgtgtttctagcagcgatgaccacatgggctcctctcagcggaagactcttgatgtctccagaccaatgccactagctcctcctggcatatgcaaaaaattacaagtttcagtaaaatttggaaaataatagatttttgacaccttggaattgagttaagcgagcaactggaccctcaaaatactatagtgagatgaaaaagactgaagatgatagctatctaactggaaggatccagcatcattgacctcaatagattatggataatcataatctctgcgcggctgcttgctgataggttctactaagcatggttaattgacttgtattttcacctaaatatagatgacatggaagaaaaatgtttttatgttcaccttagtagataagtatcttttttcttgctccaataattatcattaatcaa

SEQ ID NO: 113927 - DNA, 535 bp, Zea Mays
gcatgcatcagtgttataacgagtcaccgcctcgctgtccagagatctgggatgctctgagggttgccgcagagtccgatctagcccttgcccaaaccatcgtggacagtgctggaatcatcgtctcgaaccctgacatgacgctctgctacgacgagagagactccaagtacgagctgcccaagtatgtcttgagcgagccagcgaacctgatccgcgacgggtgattctggacccccaaaaggttttgcagcagcacgaaacagggccacgtgaatttatgtggatggttgattcggtcgctggttctggattgtaactttcagggacgctgaaagcttgtttcagcgctgtatgttgtatagtgatgttattggacacgatgtgtagtctctagacctgctactgctgaactcggtcattcagggacagtgaatgcagtgtcgtttaggctaatatgctgcagccttattcatccctcctcctatcctatttcagactccactatatctatataaatagtgcagtttgcact

SEQ ID NO: 113928 - DNA, 1303 bp, Zea Mays
aaacgagaagcgcccggcacccacctggtacccggtccgagagcgcaaattcacatttcacccaagcaaaggcaaagcaaatgcgtgaaagaatgactgtttaccaaatgttaaaccaaatacccacccctgcagtctttgtacatgaagctcctccatgtttgatctttacaagctttagcaacaaacacgaagcactccctgacaccattttcgccaccatccatcatcttggcatctactaggttagaaggtatgacttgtacatgtctgttgttagggtctaggaagcagacctctcgccctggtgctagaataggctgtacatgcggtacgaaatgtcaacctgagggcagttccttccagaatcgctgcttccatcagtccatctatcatgagttgacattattggctgttggagcaatgtgcctgccataccacccctcatgtctgaagttgttccctgggaaaatactttgtatcccccagtagcagtagccatgtaactagtggaagttccatcccaattttcagcctcttgacgtggatgtgacgagccaccagggtaaaatgaatactgagggtcatttgaccaaccaaagagggtgcctggaaactgtctgtgactctgactccagttccggttggtatcggtcaaactgggtggtgaagagatgttcatgcttagattttgtgtgacatctccatcatctttcaggcaatctgtagtcaagctagtaaagtcttgttgatctggaataccacaatcttgtaccagggcatcaggtgcagagcaatgtccagagcaagctttgcctgaaccggagtacagatgaggcttctcaaatccaggaggacaagcttgtctcctttcctttctatgcagagatgccacatcagtggatgatactgcactggctggtcttgatagcatagtgctatctgaagaatgagaggaaacaatatgaccagaccgaattgtgtcccagcgcctattgtgcgagctatcaccatcagacaacgatgcattcttattaagagtgctgcagcagaaacttgctcttgctatacctgtattagaaactgaaactggtgcattttgttgatttaccagctgtgatcgattctttgctacaagcttcatgttcaaatctgaaagattgtgtgatccagcagatccttgagttttggcataagatgcagaaagattactgggaagagttccgctgctcatattctgtgatgcagtcaatctgtgtgacacagtgctctctggtagttgcttataacctccaagaactat

SEQ ID NO: 113929 - DNA, 1403 bp, Zea Mays
gttcgctaatggacgaataaattccatcacaaaaacattgaactgtatggaacatgctatactgaaagcgtgggggcaaaaacaaaaaaagaggacaaggaaacgagaagcgcccggcacccacctggtacccggtccgagagcgcaaattcacatttcacccaagcaaaggcaaagcaaatgcgtgaaagaatgactgtttaccaaatgttaaaccaaatacccacccctgcagtctttgtacatgaagctcctccatgtttgatctttacaagctttagcaacaaacacgaagcactccctgacaccattttcgccaccatccatcatcttggcatctactaggttagaaggtatgacttgtacatgtctgttgttagggtctaggaagcagacctctcgccctggtgctagaataggctgtacatgcggtacgaaatgtcaacctgagggcagttccttccagaatcgctgcttccatcagtccatctatcatgagttgacattattggctgttggagcaatgtgcctgccataccacccctcatgtctgaagttgttccctgggaaaatactttgtatcccccagtagcagtagccatgtaactagtggaagttccatcccaattttcagcctcttgacgtggatgtgacgagccaccagggtaaaatgaatactgagggtcatttgaccaaccaaagagggtgcctggaaactgtctgtgactctgactccagttccggttggtatcggtcaaactgggtggtgaagagatgttcatgcttagattttgtgtgacatctccatcatctttcaggcaatctgtagtcaagctagtaaagtcttgttgatctggaataccacaatcttgtaccagggcatcaggtgcagagcaatgtccagagcaagctttgcctgaaccggagtacagatgaggcttctcaaatccaggaggacaagcttgtctcctttcctttctatgcagagatgccacatcagtggatgatactgcactggctggtcttgatagcatagtgctatctgaagaatgagaggaaacaatatgaccagaccgaattgtgtcccagcgcctattgtgcgagctatcaccatcagacaacgatgcattcttattaagagtgctgcagcagaaacttgctcttgctatacctgtattagaaactgaaactggtgcattttgttgatttaccagctgtgatcgattctttgctacaagcttcatgttcaaatctgaaagattgtgtgatccagcagatccttgagttttggcataagatgcagaaagattactgggaagagttccgctgctcatattctgtgatgcagtcaatctgtgtgacacagtgctctctggtagttgcttataacctccaagaactat

SEQ ID NO: 113930 - DNA, 216 bp, Zea Mays
atggcgacgccttcccgtgaacaatccagttcagcttgcgcagagtcagttagatcccactcgatttacacggggcttcaccggagtcttggaagggctcaccctgacaggcagtgttcccaaaatcatcccgctgcaattcagagccatgatggcaccctcagcctggacaaattcaacaaaagcaatccttgtggaatgtacattatcccctag

SEQ ID NO: 113931 - DNA, 540 bp, Zea Mays
ttaacagaagttactttgatggctgattgccaagatagtcatcctcagtggttccatcacgtccagtgaaacaggagaaaccgaaagctggctatagaagggcctgatctaaccagttcccttccaacaacaggtttgcaaaagggtacaaagaaaacgtttgtaagaatgtgagcagacgcatcatgatgcaccggaccgcggaagccttcagcttatggcgacgccttcccgtgaacaatccagttcagcttgcgcagagtcagttagatcccactcgatttacacggggcttcaccggagtcttggaagggctcaccctggacatcccacagttccatcagcattggcagatacaaatatgttcagtttttcagtctagataacctacaaataaagagaaatggagaatgtggctagaggggaggtcatgcctgacaggcagtgttcccaaaatcatcccgctgcaattcagagccatgatggcaccctcagcctgtgattcagagttcaaaagttagaatcaatatctccatctta

SEQ ID NO: 113932 - DNA, 1080 bp, Zea Mays
atgggccgggcgtccgccgatccctccacctcccgccacggcacgcctgcgcgccgccggcgacacttcttccgccaccgctcaccgaccccctccatcgacggaatgtcccaagaactcagcccctcgcacaccgccacttcattcttggagcaaccgtccttcatccccgccccctacgactacgacgacggggacgtcatgggctcctacgtcgcggtcgcgcctctccccgtcttccgcggcgaccccggcgagcgccccgacgtccacctcgcccgcttcgaccgcgtccgccttgccaacggcgccgcgaccccggcggccgccgcccgcatcttcccggcgtcgctagacgccgacgccgcgctgtggtacgacatcagggtctccggcgccgatgtcaactcgccggtaccgccgtggcacgccgtccgcgccgccttcctcgacttcttccgcccgccgggcgccgcggaccgcgcgcgcgccgagctcgcggcgctgaggcagggccccggcgaggctgtcaaccggtaccacctccgcctgcagggggtcctccggcggtgctcaggcgtcggattcgacgtgccgaacgcgctgtcgaaggccgccttcatcgacggcctcctcgccgagttcaaggactgggtgaagccgcagcatcccgaggagctggacgacgcggtggcgctggccctaagctgggagcgcgccgagggcgtgcgcgaggcgtggcgcgtggcgaaggcggcctgcgcccctgcccccgccacacccaccgtggtaaggtgctcgttgtgcggtgctgacgggcacgaggaagcgcggtgcgaggcgcggaggagcggcgtcgtggcggaggaggaaggaggcgggagcgggccgctgtcgcgactcgggagcgcggtgagcacccgctcggcgcagtgccaatgcaggaggcaccggtgcgggaagaaggcagtggctccgagtgaggtcgccggagatggcgacgcgagcggggcacctgcggacaagccatccaaccaactggctggccttgtgaatttgatgcgttctttacgcagttaa

SEQ ID NO: 113933 - DNA, 2197 bp, Zea Mays
gtgctttacttcgcgcgagcaaagaggggagctggggagggcaaacacgcactagacccaaatcctcgtagctccagacatccagaacggcagaaccttctagaccaaaccttcgacccatcacctcgagctccagccatgtcgctctcgtcggcgcgccagcgccgggccactgcagcgtcgccaccgacagatgatgggtacgccaaggacgccaaggacaggaggcggcggcccggcggagacggggacagcgaggacgagggtatcaagtggttcctcccgttcctggcgctcgggctcctccgccacatgagcgcgtcctccaacctgatccacgactgcgacgaggtcttcaactactgggagcccctccacttcctcctctaccgctccggcttccagacatgggagtacagttccgactttgctcttcggtcatatttgtaccttttctttcatgctcttgtagctgggcctgcttcattgatctttggtgagcataaggttcgtgtgttctactcagtgagaatctttcttggtctcatttcaactattaccgaaactgttctggtggttgctctttcaagaagatatgggaagcggcttgcttgttatgttcttgcaatgctatgcttatccagcggttgcttctttgctagtaccagtttcttgccaagttcattctccatgtatgcagtaacactttcgtctgcactcttccttcttgagaaatatgctggtgcagtctcagttgcagctgctggagtgatccttggttggcctttctcaattttggtcttcctccctgttaccgtttattctctaattagaggatcttttagaagggtttttctatctggatttgtgacttcactgtgctttcttgttctttcgtttgttgctgattattactgctatggtcgattgacattctcggtgttcaatcttctgaaatataacgttattggtggcggcgaaagtcacttgtatggaaccgaggggttttcattttacttcaggaatggattcaataatttcaattttgccttcatcctggctcttcttttcttgggggttgtaccatttgcaagaaagaaatatgctcctgatctcctgatagttgtctctcctgtctatatctggttggctttcatgtctttgcaggcacacaaagaagaaaggtttctctatccaatttattcattgatatgtgttgcagctgcagctgttattgacagtttacctgattttttccatgacaaatattcatctgatcagtctatttttgaaaagatagcgaagggtctgcgtcctttgatacttggttttattctgtgtgcttcccacagccgaacattttccatgttaaatggatatggtgctcccctgcagatctatcagcatctagaacatcatgatgacactggacccgggtctattctgtgtgttggaagtgagtggcatcgctatccatcatcgttcttcataccctcttatatcagtgaagtccggtggatagatgatggcttccgtgggttacttccatttcccttcaacgagacactgggtgggaccactgcagctccgtcctacttcaataacaagaacaaggcggctgaagggcaatatctgaaagacattggagcatgtaacttactggtggaacttgatctaagacggccttacccctcgcgcgggagtgacttgtcgacatgggaggcattggccgcactgccgttcctggacagagagctttcccctgcattatatcggtccttcttcataccataccgatggcaacaaaacaatgtgttcggcctgtacaagctactgaggaggttgcatcctgaccatgcgtaatcaagggaaatgtggggtttgcttcaatgagcttaatcacgtgatttcttttaacaaacagcttgcagatttttactgccatagattttctgatcccaatgtgtaatggcgtacctatttttgtcccactgatccttccatcatacaaattcatcacgagatgacgaggatgagagtgctcaactgctgatgtagggagggatgttcgaggagaatcatgttgtgaaacggctgcttcgccagttgttacctttttggattgtttgttgaatattagccaatgacagactgatagatctatacctttttatgttgagcatttttttcctcctgc

SEQ ID NO: 113934 - DNA, 592 bp, Zea Mays
gtgctttacttcgcgcgagcaaagaggggagctggggagggcaaacacgcactagacccaaatcctcgtagctccagacatccagaacggcagaaccttctagaccaaaccttcgacccatcacctcgagctccagccatgtcgctctcgtcggcgcgccagcgccgggccactgcagcgtcgccaccgacagatgatgggtacgccaaggacgccaaggacaggaggcggcggcccggcggagacggggacagcgaggacgagggtatcaagtggttcctcccgttcctggcgctcgggctcctccgccacatgagcgcgtcctccaacctgatccacgactgcgacgaggtcttcaactactgggagcccctccacttcctcctctaccgctccggcttccagacatgggagtacagttccgactttgctcttcggtcatatttgtaccttttctttcatgctcttgtagctgggcatccaaacaaacccctaaattagctaaattacaaccaaatcagccatgtatcctttgtactatgttgcaactagttattgctactgactaatgctaagagtaatggccatgttt

SEQ ID NO: 113935 - DNA, 748 bp, Zea Mays
gtgctttacttcgcgcgagcaaagaggggagctggggagggcaaacacgcactagacccaaatcctcgtagctccagacatccagaacggcagaaccttctagaccaaaccttcgacccatcacctcgagctccagccatgtcgctctcgtcggcgcgccagcgccgggccactgcagcgtcgccaccgacagatgatgggtacgccaaggacgccaaggacaggaggcggcggcccggcggagacggggacagcgaggacgagggtatcaagtggttcctcccgttcctggcgctcgggctcctccgccacatgagcgcgtcctccaacctgatccacgactgcgacgaggtcttcaactactgggagcccctccacttcctcctctaccgctccggcttccagacatgggagtacagttccgactttgctcttcggtcatatttgtaccttttctttcatgctcttgtagctgggcctgcttcattgatctttggtgagcataaggttcgtgtgttctactcagtgagaatctttcttggtctcatttcaactattaccgaaactgttctggtggttgctctttcaagaagatatgggaagcggcttgcttgttatgttcttgcaatgctatgcttatccagcggttgcttctttgctagtaccagtatgtatctttgtaaattcagttttctattgttgtttggaaattatattgcagacgtgtgattgctccaactggatgcta

SEQ ID NO: 113936 - DNA, 726 bp, Zea Mays
atggagagcagcagcaagggcatgtgcaccgtcgagaggcgcggccgcgtgcacctcatcaccatgaccggcgccggcgagcaccgcctcaacccggacctcctcgcggcgctccgctccgctgtggccgcctccgctggcgccggcgcgctggtgctggccgcggaggggaagttcttctccaacgggttcgacctggcgtgggcgcgcgcggcgccgcccggcctgcacggcgccatggacggcgggctccgcgcgctgctggccgacctgctggcgctgcgcgtgcccacggtggcggcggtgacgggccacgcggcggcggccgggtgcgcgctggcgctcgcgcacgacgccgcgctcatgcgcgcctcccgcgggctcctgtacatgagcgaggtcgacgtcggcatcaagttcgtcgacttcgtggccgccgtgctccgcgacaaggtccccgacgccgcggcccggcgcgacctggtgctgcgcggggaccgggtggccgcggccgaggccgtgcgccggggcctcgtggacgccgccgtggacggcggccccgaggacgtggtggccgcggccgtcgctgaggccgagaggctggccgccaggggctgggacggggaggccgtcgccgagatcaggaaggccgcgtggccccagctgtgggcccaggtcaaggaccacggcgccgggccggcgccggcgcggccgcggctctagtcg

SEQ ID NO: 113937 - DNA, 2628 bp, Zea Mays
cgcgttctgcggcgcagcggctgggctgaggacggcgatgctcacacacatgcttgaaacaggtacacattgggaattcaccaacctatagacttgaaaggaagcttggaaagggaggatttggacaagtatacgttggtcgacgtatttcagctcctcgtctcagtgaccgtaaccctggttcaaatgctttagaggttgcactgaaatttgaacaccaatccagcaaaggttgcaactttggagctccttatgagtggcaagtttacaacactcttagtgggaaccatggtgtcccacgggtacactacaaaggaaagcagggagagttttacatcatggttatggatattttgggaccaagcctatgggatgtttggaataataattcccactcgatgtctgttgagatggttgcttgcataggtatagaggcaatctccatactggaaaagatgcactctaaagggtatgtccatggtgatgtgaagcctgagaacttcttgcttggtcctcctggtaccccagaggagaagaagctttttcttgttgaccttggattggcaactaaatggaaggatgctggtacggggcaccatgttgaatatgatcagagacctgatatttttaggggaactgttcgctatgctagcgtgcatgcccacttgggaagaactgggagtaggagagatgatcttgaatccctcgcatacactcttatttttcttctccgtggccgcctcccttggcaaggataccaaggagagaacaaaggttttcttgtctgcaagaaaaagatggcgacatctccggagtctctgtgtggaatctgtccacaacctttccggaattttgttgagtatgtcgtgaacttgaaatttgatgaagaaccaaattatgctaggtgcatctctctttttgatggtattgttggcccaaatccagacataagaccgataaacactgatggtgcccaaaagctagtatatcaggttgggcagaagagaggtcgcttaatagtggacgaaaatgatgatgagcaacctaagaaaaagatcagaatggggatgccggcaactcagtggattagtgtctacaatgcccgtcgacctatgaaacagaggtaccactacaacgtagccgataatagattggtgcagcatattcaaaaggggaacgaagatggcttgtttattagttcagttgcctccagctcaaacctgtgggctttaattatggatgctggcactggttttacatctcaagtatacgaactttctagttactttcttcacaaggaatggataatggaacagtgggagagaaatttctatatcactgcactggctggtgcgaataatggaagctctttggtgattatgtcaagaggaacacaatatgcccagcagtcctacaaagtaagtgatacatttcctttcaaatggataaacaaaaagtggaaggagggcttctatgtcactgctatggcaacagctggaagccgatgggcagttgtcatgtcccgcaatgctggtttcacttctcaggtagtggagcttgatttcttatatccaagtgagggcatccacatgcgttgggacaatggctatcgcattacggcaacggctgccacatgggaccaggcggcctttatcttgagcataccaaggagaaagcctactgatgaaacacaggagaccctgagaacatctgcttttcctagccagcatgtgaaggacaaatggtccaacaacctatacctagcttccatctgttatggaagatcggtgtcctgaagcccgttttcacgatttggtctggttgctgagaggtatattgatatcaaatacaggtggttttatgatatcaatggggcattttgaagctgaaaactctgctaacctacttacctgcaactaacaaaaggtaacctatatatgaggaaaaaagaaagcaaagtctgttgtgtttcgctaatctctaccatggagcaaaagaacattgcggtatgcctttttttttaattgggctgtgtataaattatccaaagtattaggttgtgctgtaaagaatgtagaagtgtacctgctggacggttgccatgtatataaagtcgaattttttacaatgttgtttcgaattacaaagatggaatttgtagctttttcttcattcatctattcaagttacagatcaatagctactcccctccccccaaattataaaaggttcttgtcttttgaagatcattgcttttgtaatgtatctagatatatgctatgttgagatatatagcaaaaaactatctaaaaaaagtagaacgtcttacatttttaaaaaaaagatgtggtatgatgtagttcgtttgggtacatcacccaggatacaaaaaaatgcttgtatgtatgtcgttgatggtccgacaagttcgctttctctcttcgatcccagaactagagttggactgctatagcaatacctaaaagcagtatgatagcaacacacacaaaaggaagtcttgtttttcactatgaatcaattgtcctgttgttccattggacatctacagtgttgctgcatttgctgcaaaacacagaacagtcagaaagaaaaaaacgaagaaacaag

SEQ ID NO: 113938 - DNA, 2622 bp, Zea Mays
ccacattccccgtgcgtctgcggctgcgccgtcccgtgcgctcgtgcttcctcctttgctctcctcgtcctcgaccaccgtccccatcgccgccctcccgccgaccgcctcatccgccgccggggactaaaccctagcccagcgtgcccgcgtctctgccggtatcggctcgccgctcggcccgatctcctctccggacgcgggccggtcgtggggctgagtccgtgacggatgctagcgccccgcggttgctcgtgccgaggcgtggagggcggccgcagcggaatccagtactcggaccgcgacccacgtggtgtctggtgctgtagcagcagcgcagtcgcagcgacagcagcggaggtgggggcggggcgaagggatggacgagtttgacagcggcgggcggagcggggacagggcgggcgccgccgccgccgccgccgcaggagacgacggggccactcctccgttgccccagacggtacacattgggaattcaccaacctatagacttgaaaggaagcttggaaagggaggatttggacaagtatacgttggtcgacgtatttcagctcctcgtctcagtgaccgtaaccctggttcaaatgctttagaggttgcactgaaatttgaacaccaatccagcaaaggttgcaactttggagctccttatgagtggcaagtttacaacactcttagtgggaaccatggtgtcccacgggtacactacaaaggaaagcagggagagttttacatcatggttatggatattttgggaccaagcctatgggatgtttggaataataattcccactcgatgtctgttgagatggttgcttgcataggtatagaggcaatctccatactggaaaagatgcactctaaagggtatgtccatggtgatgtgaagcctgagaacttcttgcttggtcctcctggtaccccagaggagaagaagctttttcttgttgaccttggattggcaactaaatggaaggatgctggtacggggcaccatgttgaatatgatcagagacctgatatttttaggggaactgttcgctatgctagcgtgcatgcccacttgggaagaactgggagtaggagagatgatcttgaatccctcgcatacactcttatttttcttctccgtggccgcctcccttggcaaggataccaaggagagaacaaaggttttcttgtctgcaagaaaaagatggcgacatctccggagtctctgtgtggaatctgtccacaacctttccggaattttgttgagtatgtcgtgaacttgaaatttgatgaagaaccaaattatgctaggtgcatctctctttttgatggtattgttggcccaaatccagacataagaccgataaacactgatggtgcccaaaagctagtatatcaggttgggcagaagagaggtcgcttaatagtggacgaaaatgatgatgagcaacctaagaaaaagatcagaatggggatgccggcaactcagtggattagtgtctacaatgcccgtcgacctatgaaacagaggtaccactacaacgtagccgataatagattggtgcagcatattcaaaaggggaacgaagatggcttgtttattagttcagttgcctccagctcaaacctgtgggctttaattatggatgctggcactggttttacatctcaagtatacgaactttctagttactttcttcacaaggaatggataatggaacagtgggagagaaatttctatatcactgcactggctggtgcgaataatggaagctctttggtgattatgtcaagaggaacacaatatgcccagcagtcctacaaagtaagtgatacatttcctttcaaatggataaacaaaaagtggaaggagggcttctatgtcactgctatggcaacagctggaagccgatgggcagttgtcatgtcccgcaatgctggtttcacttctcaggtagtggagcttgatttcttatatccaagtgagggcatccacatgcgttgggacaatggctatcgcattacggcaacggctgccacatgggaccaggcggcctttatcttgagcataccaaggagaaagcctactgatgaaacacaggagaccctgagaacatctgcttttcctagccagcatgtgaaggacaaatggtccaacaacctatacctagcttccatctgttatggaagatcggtgtcctgaagcccgttttcacgatttggtctggttgctgagaggtatattgatatcaaatacaggtggttttatgatatcaatggggcattttgaagctgaaaactctgctaacctacttacctgcaactaacaaaaggtaacctatatatgaggaaaaaagaaagcaaagtctgttgtgtttcgctaatctctaccatggagcaaaagaacattgcggtatgcctttttttttaattgggctgtgtataaattatccaaagtattaggttgtgctgtaaagaatgtagaagtgtacctgctggacggttgccatgtatataaagtcgaattttttacaatgttgtttcgaattacaaagatggaatttgtagctttttcttcattcatctattcaagttacagatcaatagcta

SEQ ID NO: 113939 - DNA, 1194 bp, Zea Mays
ggactggattctactggaagggcagagcttgaggaagatgatgaagcttctggtgctgactggggtgatgaggacttggatattgttgatgcaagtgaggtggtggcaaatggtggcgattattttgatgcagagggtgaaccaaacgaggaggagggtgaggaaggtggctgggacctggaagatctggaacttccacctgatacagagactccaaaatctgctggcaatgctcgctctcctgtatttgtcactccaacagcaggcatccctgtcagccaaatttggactcaaaaatcttctctggctggggagcatgcggctgcagggaactttgatacagcaatgaggttgcttagccgacaattgggcatcaagaactttgctccgctgaagcccttgtttcttgatctgcatatgggcagtcattcatatctgcgtgcccttgctgctgctccagttatatcagttgctgtagagaaaggttggaatgagtccgcaagtcctaatgtaagaggccctcctgcacttattttcagcttctcacaaatggaagacagactcaaggctgcctacaaagccacaactgagggcaggttcccagaagcactgaggcagttccttagcatcttacatacgattcctgtaatcgttgtagactcacggagagaagttgatgaagtgaaggaattaattgagatagtgagggagtatattcttggtctgaagatggaactcaagagaaaggaattgagggatgatgtgacccgccaacaggagttggccgcttacttcacaaattgcaagcttcagagaattcatatgaggcttgtgctttctagcgccatggctctttgcttcaagcagaaaaactatgctactgcagcacactttgcaaggatgcttcttgagaacagccctcaagaggctcaagcaaggaaggctcgacaggtgctgcaagcttgtcaggataaggatgattctcaccaactgaactatgactttagaaatccatttattgtttgcggtgctacatatgttccaatctaccgtggccaaaaggatatttcttgcccatactgtggatcccggtttgctccttccatcgaagggcagctttgtaccatatgtgagcttgccatagttggggcagacgcctcaggcctggtctgctcccctacgcagatgaagtag

SEQ ID NO: 113940 - DNA, 777 bp, Zea Mays
atgctcaccaagttcgagaccaagagcaaccgggtcaagggcctcgccttccacccgcgccgcccatggatcctgtccagcctccatagcggagtcgttcagatgtgggactaccgcatgggcaccctcctcaaccgcttcgacgagcacgacgggcccgtcaggggcgtccactttcacgccacgcagccgctcttcgtgtccggaggtgacgattacaagattaaggtctggaattacaagactcaacgctgcctattcacacttcatgggcacctcgactacattcgcactgtgcaattccaccatgagtgcccatggatcgtaagtgctagcgacgatcagacaatccggatctggaattggcagtcacgcacatgtgtggccgtgctaactgggcataaccactatgtcatgtgtgcctccttccatcccaaagaggatctggttgtatcggcatcacttgatcagaccgtgcgtgtctgggatattggggctctgagaaagaagtcagcatcacctgccgatgacatcctccgcctcactcagatgaacacagatctatttggaggtattgatgctgtagtcaaatatgtcttggaaggccatgaccgcggggtcaactgggcctcatttcatcccactttgcctctcattgtttccggggcagatgaccggcaggtgaagatatggagaatgaacggtaatagtcctattactaaatggtctgcacttcacatgcttttggtactattcttttgtgtagctgagccataa

SEQ ID NO: 113941 - DNA, 1649 bp, Zea Mays
cggcaacccactccaggtctccaccccagccagagagccctggagcctggagggacggggtcggagcaaggctgaattccaggaagaagccatcccagccgcgtgtcgcctccttccacacctcagtcacccgttctataaatacgcgccaccgcgtaaaccgcgaagaaaaagtaaaagggaggaaaagggtccggtgtggcgacgatggagaggggcggcggcggcggagacgagatgatgatgacctcgggcgcgacgggccggatcgtgccggtgttccgctccgtgctgtcgcggcgcgctctgctccgcgtcgccgtggcgctgcactcgctcttcctctggctgctgctcctcgcccgcggcctccgccggcaccgggcggggaccggcgccgacgcgtcggcgtcggaggcgggggctggggccgggacctggagcgcgcggcggtggcggctgcggctgcaggccgcggaggaggaggacgtgcgccgccgcagggcgctcgcggaggaggtgcccatggaggaggaccggggcactaggtgggccaccttcctcgtcaccggggccaggaggaacgcgcttttctgccgcctctgggcgccggccgtcgacgagatgaggggcattttggtcatcatacatggcttgaatgagcacagtggaaggtacgtgcactttgctgagcagctgacagcatgtggtttcggagtatacgcaatggattggatagggcatggtggaagcgatggcctgcacggctatgtgccttcactagattacgtcatcgaagacatcgaagtgcttgttgacagaattctgatggagaatccaggggtcccttgtttcctcctcggccactccaccggtggggctgtcgtcctgaaggcatctctgtaccctcacatcagggagaaactggaaggcatcgttctgacatcgcccgcgctgcgtgtgaagcctgcgcatcctattgttggggctgtggcgccgatcttctctctggtggcgcccaggttccagttcaagggcgccaacaagaggggcatcccggtgtcccgcgaccccgcggcgctgctggccaagtactcggacccgctggtgtacacggggccgatcagggtgcggacggggcacgagatcctgcgcatctcctcccacctgctgcaccgcctggagaaggtcaccgtcccgttcctggtgctgcacggcaccgccgaccgggtcacggacccgctggcgtcgcgcgagctctacggcgcggcggcgtccgcgcacaaggacctgcgcctgtacgacgggttcctgcacgacctgctcttcgagcccgagcgcgacgaggtcggcgccgagatcgtcgcctggatggacgggatgctccggctccggcggcaggctggatgaagggatggccgtgctgcttctctccttctaggtggtgttcctctccaaagtataataatagatttgtgtgccaagataagatggatgcatttgtgctgtggaactacgttacgtatctatttatatttataacagcggggtaaaagggtcgttttgttttggtgtaaacgaaccaaaacatatggatcaaaatcagacgtaaaaatcagaaacattattacatagagtataaaaataaa

SEQ ID NO: 113942 - DNA, 884 bp, Zea Mays
caggccgggtttagacactgaccccctacttctctgggccctgtgaacgaacgaacggataccctgacggccgggcagagaaatggtgcaaaaacgttagcgaagtagcctggtcgttgaaacctgaaaaatggtctggctgctgctgctgctgctgcatggcatctctgtaccctcacatcagggagaaactggaaggcatcgttctgacatcgcccgcgctgcgtgtgaagcctgcgcatcctattgttggggctgtggcgccgatcttctctctggtggcgcccaggttccagttcaagggcgccaacaagaggggcatcccggtgtcccgcgaccccgcggcgctgctggccaagtactcggacccgctggtgtacacggggccgatcagggtgcggacggggcacgagatcctgcgcatctcctcccacctgctgcaccgcctggagaaggtcaccgtcccgttcctggtgctgcacggcaccgccgaccgggtcacggacccgctggcgtcgcgcgagctctacggcgcggcggcgtccgcgcacaaggacctgcgcctgtacgacgggttcctgcacgacctgctcttcgagcccgagcgcgacgaggtcggcgccgagatcgtcgcctggatggacgggatgctccggctccggcggcaggctggatgaagggatggccgtgctgcttctctccttctaggtggtgttcctctccaaagtataataatagatttgtgtgccaagataagatggatgcatttgtgctgtggaactacgttacgtatctatttatatttataacagcggggtaaaagggtcgttttgttttggtgcccggttttttttgtcagtattattctgctaggctgttctagc

SEQ ID NO: 113943 - DNA, 118 bp, Zea Mays
gttttcttttgagataaatattttgttactgattttaccttttgtctcctcttcttgtttttgttctagaatctatagaaaatggctaacgacgaggacatccatcactttgtttatg

SEQ ID NO: 113944 - DNA, 635 bp, Zea Mays
gatccaaaattgcattatccttttgagctcaacctgtcatctatgatatgtattgtaactgatcatgtttttactacttcatgattcagatcgctgctagcaagaccaagatttacatggtgcttcagcttgtcaatgggggcgaactgttcgacgggattgctatgactgaaactgaaacagaaaacatacaagatgcaaatatggaggaacaacaatcttccttggtggatggtcttaaaactcccactactgtggctgatcaagaatccacagccgtggagtgcttgtccaatcatgagtatcactcgcagactcttggatatgtaattggtggcactaacatgagaagcgacaccaaccatctcacagaagggatcaatatcttaattgtcacactggacaggcttttggaccatctgcaaaataccggtagtttcaaatacaaagagctaaagagtaccaaaaaggtcatgcccgacgacaagctcgctgagttcgcgctcctcgaccccaagccaccaagaggtgagcagagtgtgaaaatcactaggatctatgatgagaagtttgctgatttgggatggggaagaggcgaaaatgagattgaggatgtgtttatcattgttttgtag

SEQ ID NO: 113945 - DNA, 624 bp, Zea Mays
atggccgttttgggtaaaagccactctgagcccggaccgagggagggcgtccacacacaccatgcccccgcctccgtgactgtcgcgctccctgcccctacgcaggtccgtgaccgtcgcgctcccacccccaatgcgcacgctacccccacccacctcccattccgctgccaggatcatgcagctctgcgccgccacgcccgagcgtactggggcgctggcgccgccgcgttcccgcagacgcccgagcggagcccgaggttcacgggcgacgcccgactggggcactgcgttcatgatgtcgccgagcgctacggctgcgccgaggacgccggagaggtggcccgcgctgcccgcactctggagtacgcgcctgcgccgaggcgagagcaggcgaggtggggcggcgaatctgaggcagaagcgcctgcgctttatgaatccggagccgaatcgctccgtccagcttgcctcctcaccgttgcttttgcgctctgcttttcacttgccttgcgtggatctgctcaacgcacgaaccaccgcctcgccgagaaggagatcgtcatcgtcctctcctctgcctccgcggtccccgtcgagagcagtgttgctgtcttcgactag

SEQ ID NO: 113946 - DNA, 854 bp, Zea Mays
acacattcaagcaaggatcgagttgatgaattgctagataccaaaaaaacaacaacatagaattgttgtcatcatctttcactcaatcagctcgtagttttagcaccaaactagagttcccattagctagctgttctttccctgtagcgatacaacaacagatcgatacagcagagagtccgttcaccaactctttggttaattcgattcttcatggcgcctactggagacgcagcggccgcacaggcgccggcaccgaagaagcagtcggcgaagccgaggaggatctcgattgaggggctgcagcgcgccatgtccgacctggccctggagctggccagggacagcaagaagcaggccgccacgcccgccgacgccgacgccgccaagctgcagcagctgccggcgatcgcggagcagcagcagcagcagcagacggcggaggaggaggaggaggagctggcgcggtgcgagtgctgcggcatgcaggaggagtgcacgccccagtacgtgcgccgcgtccgcgaccgctactgcgggcgctgggtgtgcgggctgtgcgcggcggccgtcagcgccgaggccgagggcggccgcgcgacgacggaggccgcgctcgcggcgcacatggccgtgtgcgggcggttcaaccgcgtggggcgcgccaaccccgtgctcctgcagacggaggccatgcggcagatcctcaggaagcggggcgccaggtgcgacagcccccgggtccgggaccgcggcgcccgccccgccgccgccgccgcgctcgccaggagctccagctgcatccccgccataaccaaggacttcaactgacgagctagatgagaggaccacac

SEQ ID NO: 113947 - DNA, 641 bp, Zea Mays
atggcgcctactggagacgcagcggccgcacaggcgccggcaccgaagaagcagtcggcgaagtcgaggaggatctcgattgaggggctgcagcgcgccatgtccgacctggccctggagctggccagggacagcaagaagcaggccgccacgcccgccgacgccgacgccgacgccgccaagctgcagcagctgccggcgatcgcggagcagcagcagcagcagcagcagacggctgaggaggaggaggaggagctggcgcggtgcgagtgctgcggcatgcaggaggtgtgcacgccccagtacgtgcgccgcgtccgcgaccgctactgcgggcgctgggtgtgcgggctgtgcgcggcggccgtcagcgccgaggccgagggcggccgcgcgacgacggaggccgcgctcgcggcgcacatggccgtgtgcgggcggttcaaccgcgtggggcgcgccaaccccgtgctcctgcagacggaggccatgcggcagatcctcaggaagcggggcgccaggtgcgacagcccccgggtccgggaccgcggcgcccgccccgccgccgccgccgcgctcgccaggagctccagctgcatccccgccataaccaaggacttcaactgacgagctagatgaga

SEQ ID NO: 113948 - DNA, 1245 bp, Zea Mays
catatttataataatattatggcgcattttgtccaacaaattttgcatataatagtattgtttgtcgtaccatatatattttatactacaactgatatgattatttaacttgcagtattctagaatttgctaccctacaactcatatgattatttgactatgcacatgtctccaagaatattgtagggaaactacaacagatttgtgccatgttttactctgattttggagttttctgcttaactgaggcgaagcgcaaccaccaggttggctgttttagatctgtctcctagactgccctttgctcaagggaaatccctccttttcatttaacgcaaaagaaacttattctatttatttgtatctacgaaatctggcgtcaaatgttcagttgaactcagatgtgtgagactcaactgaagatcccaaatcatcacattatttccccgtcgaaatcatttgtgtttcttagagagaaaaaatgttttatgcttctgtctcctagactgacctttgctcaagggcaatccctccttttcatttaacgcaaaagaaatttattctgttgaacagtattttcatctttatacttatttggtactgcaacagcaatgagaggagcaatatccttgacaccttaattttgtattgccttacaaaggattttttagctgtcgcttgccaagtataggtcgtattgtgggtagtcacaccaaaactaaaactaatggcaattggtttgcaataggcagtgctctttctgttagctctggatgtcagggcaatgaacaaacacgttgagtatgatagtgatgctaaaattactgcaatgggttgaagccctaccatgtggcaaccattgatccatgcccaaaatgtgcctgccactggtgttcctgtcccaacactcgatcaacatgcaagtaaaaaatgaagcatagagccaaacgatgcgagagaagtatggtctacacatgagccagttcacataaacccttcagacccaagcagctcaagttgtgcggtttggtgtcatggtgttgttcaaacttcgcagtggtgtgtgaaatagaagaatcccaattcccaagcatattatttgtcacgcttggtacaggggaaatacgacagcatcatcgtggaggtgaagagctactacatgtcgatgagcaggtacagggatgataaaaaaagaaaggtatatcttcacgtcgatgagcgggtacagggatgacaaaaaaagaa

SEQ ID NO: 113949 - DNA, 871 bp, Zea Mays
ctctctctacagctagctacctagctagagctagtatctacccgccattgcattgcaccacctctgtcctcgatctctattgctcgaccatacacacacacacacacacgatcgactgctccagctcgcgcgggagaagctcgccggcggtcgatcagctacagctagtagcttggactaataactctgctgtatctgtatggatatggcaatgagccagcacagctccgacacctcgtccacgtcctcctactcgtccgacccctcctccacgtcgtccaccagcccgcgcgccgccgccggcaccagcaacggcaagaagcgcccgcacgacggcgccgccgccgccgccccggcgtaccgcggcgtccgcatgcgcgcgtggggcaagtgggtgtcggagatcagggagccccgcaagaagtcgcgcatctggctgggcaccttcccgcgcccggagatggcggcgcgcgcgccgtgctcaacttcccggccctcgcgcgccacctcccgcgcccggcctccctggcgccgcgcgacgtccaggccgccgccgcgcgcgccgccgtcatgcacgagccagagcctcaacgacctgatgagcccggacggcagcccgtggaggaggtggccctggccgccgagctggtgttcgacgacctggcgcctctgtgggtggaggacgtggtggagttgggcccgtgcccgtcccagcatagctcgtggacgccgtgcgatgggctcgacgccgccgccgcctgtctccactctctccctctcttgtgggactactagctgctactaggctccttgctccgtttgtacatggccttgaaccattttcgtttccgcttcaaaaaaaaaaaaaaaa

SEQ ID NO: 113950 - DNA, 989 bp, Zea Mays
ctctctctacagctagctacctagctagagctagtatctacccgccattgcattgcaccacctctgtcctcgatctctattgctcgaccatacacacacacacacacacgatcgactgctccagctcgcgcgggagaagctcgccggcggtcgatcagctacagctagtagcttggactaataactctgctgtatctgtatggatatggcaatgagccagcacagctccgacacctcgtccacgtcctcctactcgtccgacccctcctccacgtcgtccaccagcccgcgcgccgccgccggcaccagcaacggcaagaagcgcccgcacgacggcgccgccgccgccgccccggcgtaccgcggcgtccgcatgcgcgcgtggggcaagtgggtgtcggagatcagggagccccgcaagaagtcgcgcatctggctgggcaccttcccgcgcccggagatggcggcgcgcgcgccgtgctcaacttcccggccctcgcgcgccacctcccgcgcccggcctccctggcgccgcgcgacgtccaggccgccgccgcgcgcgccgccgtcatgcacgagccagagcctcaacgacctgatgagcccggacggcagcccgtggaggaggtggccctggccgccgagctggtgttcgacgacctggcgcctctgtgggtggaggacgtggtggagttgggcccgtgcccgtcccagcatagctcgtggacgccgtgcgatgggctcgacgccgccgccgcctgtctccactctctccctctcttgtgggactactagctgctactaggctccttgctccgtttgtacatggccttgaaccattttcgtttccgcttgtttttttttttttggttttcacttgttttcatatatccaccggagctacctacaaagagtaaatccctactcgcactgtactacttctcgtatatttggactaaattttggcgggtagccatcgcttaaaccaa

SEQ ID NO: 113951 - DNA, 2896 bp, Zea Mays
atacgtctacgatacgccccctccccctcccccgccgcgcttcgctacattctaaactttgcgtccgttatacagatcggtggaagagatagagagagagagaacaaaggggagcggcaggcggcaggcagcccgtacggcggtgcggggggagcggcgtactaccgtatcccaccaccacccccaccggcacggggccgcgtttaccgggtgcgcggcactaccacgcacgggcccttttttctggtgcgcgccctcaatgcgctattgatacaccccctgggctctggctggctagctggctggccaggctcctcctcctcggcctcgatccgcttctcctcctctgcccgcctacctggagcggggagcgggaagagcggcggcgggagcccggcattctgatccgcttctccgcgcgcaacaccggcctgccgcaaatgattcttgggaagccctgtacctgactactggatccactaccaagctcttcaagttccaggatccattcctctttgtcgggcaagagctcttggcctctgtggattatcagcctgattcacaactctctgcaagaattcgagcgcagatgggccaagaaagcgcggctgacgcgattcctggtttgatggtttctgttggtgtttcgggctaacagactctcttttttttgtttacttcctcaaagttccacttcaacatatggatccgggcttcccgagttggaatctgatcactcgcgtcagtgcttcttagcttccttcatttgccgtcatggaggagcagaactcatggcttattaggaccaagttctcccatactgtctacactagagtggatccacgaagagtagcagctgttgctccggtgggcaaagatgtggtgctgccttttgctccgcttagtaaggatgttgagcggaagctgcagaaaattttcagtatgaagaagtctgcatcgatgcctgttgatcgggatgatgaagacacagggactgcattcaagcactgcgctagcttgccgctagtccggtcctcgcctcagcttgatagggacaaggtcaacaagcccaggagggcgggcctggaggttcctgcaagccccccgatgaactcagagagttgcaagacaccaaaggcaaggagcctggtcaagagcccaagttcgatgatgctcctgagctacttgaacaaggcaccatcaaaccaaggctacagtccgcaaaaggcttatggatctcggcccagaccgagatcaaagtccccccttcccagtatcgcgccttcggaagtgttcagggaagcgaagtctaccagcaagaggtttgcaagccctcctccacagcgaagaggatctgaaaagagtatctatggcaaatcgtttgctagacaggtgtcggatattggtcagagtcctgattggtgttcaactccagtggtatctggtaagcacaagtctcaaaagaatagtgcttggtcaaggaaatccagcggtggaaggaggattagcgcagtaaaccctgcggatgatcgtagggcgcagatggttagaatgaatcaggcggtgcagacgacgttcgattggacgctcgatccatccaagctgcttgttgggcacaggtttgctagtggagcgtgtagccggctgtacaaggggttctatgatgagaagccagttgcaattaaatttatccgccaacctgatgatgacgacaatgggaagacggctgcaaagcttgagaagcagtataacagtgagatcaattcgttgtctcacctgtaccataggaacgtgatcaagcttgtagcagcctacaaatgcccaccggttttttacatcatcaccgagttccttcccggaggctcgttaaggtcatacctaaacaacacggagaaccacccaatccctctggagaagaccatatccatcgctctcgacatcgctcgaggtctggagtacgtacactctcaagggatcgttcaccgcgacatcaagcccgagaacatcctcttcgacgaggactcgtgcgtgaaggtcgctgatttcggtatcgcctgcgaggagaccttgtgtgacgtgcttgtggaggatgaaggcacctacaggtggatggcgcctgagatgatcaagcagaaggcgtacaaccggaaggtggacgtctacagcttcgggctggtcatgtgggagatggtgtccggtagagttccttacgagaacctgacccctttccaggtggcttacgcagtggccaacaggaacttgaggccaacgatttctccagaatgcccatcggccctcgggcccctgatcgagcagtgctgcgccttgcagcctgacaagaggcccgacttctggcagatcgtcaaagtcctggagcagtcccactccatcctctcgcagggtggctgcctcgacgcgcagaagagcggcacctgccaggaccccaagaagcggctcatgcagtggatccagaagctgaaaccaacgcatggcgcctgagtaaccgagttcttacaggctatagcatcgtttcagccgcagttttttttttcttttctgtctagttgggtatgctctcagtagtttagacctgttaaggaggatccttggtttaaggaaccagcgttctaaggcggatgctcgtagctgtgtgaccaaccactggtctgcgagcatagatcttgcagtagctgtacatggttatgcttttgcatctcgtctccccatcatgttaaaacttccctgcaggttgttctcatggatggtaccatagtgtgtgcggtgtgcggtgtgccccctcactcgttgagctgaaagcgagaggaaaatcatacgacgcagagttgactcctgaggccgtctttcgggaaagggtcgtatgctaacacaattattg

SEQ ID NO: 113952 - DNA, 1476 bp, Zea Mays
atacgtctacgatacgccccctccccctcccccgccgcgcttcgctacattctaaactttgcgtccgttatacagatcggtggaagagatagagagagagagaacaaaggggagcggcaggcggcaggcagcccgtacggcggtgcggggggagcggcgtactaccgtatcccaccaccacccccaccggcacggggccgcgtttaccgggtgcgcggcactaccacgcacgggcccttttttctggtgcgcgccctcaatgcgctattgatacaccccctgggctctggctggctagctggctggccaggctcctcctcctcggcctcgatccgcttctcctcctctgcccgcctacctggagcggggagcgggaagagcggcggcgggagcccggcattctgatccgcttctccgcgcgcaacaccggcctgccgcaaatcttgtagcagcctacaaatgcccaccggttttttacatcatcaccgagttccttcccggaggctcgttaaggtcatacctaaacaacacggagaaccacccaatccctctggagaagaccatatccatcgctctcgacatcgctcgaggtctggagtacgtacactctcaagggatcgttcaccgcgacatcaagcccgagaacatcctcttcgacgaggactcgtgcgtgaaggtcgctgatttcggtatcgcctgcgaggagaccttgtgtgacgtgcttgtggaggatgaaggcacctacaggtggatggcgcctgagatgatcaagcagaaggcgtacaaccggaaggtggacgtctacagcttcgggctggtcatgtgggagatggtgtccggtagagttccttacgagaacctgacccctttccaggtggcttacgcagtggccaacaggaacttgaggccaacgatttctccagaatgcccatcggccctcgggcccctgatcgagcagtgctgcgccttgcagcctgacaagaggcccgacttctggcagatcgtcaaagtcctggagcagtcccactccatcctctcgcagggtggctgcctcgacgcgcagaagagcggcacctgccaggaccccaagaagcggctcatgcagtggatccagaagctgaaaccaacgcatggcgcctgagtaaccgagttcttacaggctatagcatcgtttcagccgcagttttttttttcttttctgtctagttgggtatgctctcagtagtttagacctgttaaggaggatccttggtttaaggaaccagcgttctaaggcggatgctcgtagctgtgtgaccaaccactggtctgcgagcatagatcttgcagtagctgtacatggttatgcttttgcatctcgtctccccatcatgttaaaacttccctgcaggttgttctcatggatggtaccatagtgtgtgcggtgtgcggtgtgccccctcactcgttgagctgaaagcgagaggaaaatcatac

SEQ ID NO: 113953 - DNA, 1082 bp, Zea Mays
acaccccgaaaagcccacaataaaacccccctgtctctctcagactcacacacacacatcctgccttcctcagtcctcactcggtcactccccccaagaagagaagccaagccaaacctgccaaagacgacatttttcatggacgccggcgcagcaaccgccgcccgggagcgcccggcgccgccctcgccggtgccggtgccgcaggcgtcgccggacccgtccaaccccttccccaccacgttcgtgcaggccgacaccacctccttcaagcaggtggtccagatcctgaccggcactccggagaccgcggcggccgcggcgtcgggcgggacgcaggcgtcgccgccggccccgcagaaggcggcgccggcgcccccgggccccaagaagccggctttcaagctctacgagcggcggagcagcatgaggagcctcaagatgctctgccccctgctcccggccgccgccgccttcgccgccgcgggcggctccgccggcgccggattctccccgcgtgggttctcgccgcgcgggctcgaggtgctgtcgcccagcatgctggatctcccgtcgctcgcgctcgggagccccgtcacgccgctgccgccgctgccgggctcccaggaggccgccgccgccgaggaccgcgccatcgccgagaaggggttctacctccacccgtccccgcgcggcaatgccggcgccggcgccgacctgcagccgcctcccaggctgctcccgctcttccccgtgcagtcgccgtcgccgaccggccggtcgtgagtccgtgtgacggcatcttggcttcccccctccccttgctctaggctggcctgctcggtacgctctgctgcttgtcgcggcgctcctcaagctggaggccgacccgatctgcggatgatttgctcctacctctcgtcagctctgggacgatgtttcctgtatcttcagtccccatgttgtaatcttggtgtttgtaacagtgattcggcgcataagagagggattaattgatcaccgaattccagtgctcttgctagtccctgatgaactgtatgtagcagattttagcttggcat

SEQ ID NO: 113954 - DNA, 922 bp, Zea Mays
ctcctcctcctcttcacagagccgagaagaaaggcagggtggtgggcgaagagaccccagtcagtggatcgttaatcaaagaaaaaaaaacagcagcttatatcaacaacaaggccaccccacccgttggacgacatggcccgcctcggagccggcgccgtgttgacgctcctgctggctgtcgcggcggcggccgcgttcctcgcggtgccggcctcggccaaggtcggggacctgagcgcggtggagttcgtggcggcgcggggcagcagcatcccggggcagcgcagcagcaagtgttcgggcgccgtgggcgagtgcggcgtggacgaggaggaggagctcgggctgagcggcggcggcggcatcggcgccggcgacgcgctgcggcggacgcttgcgcagcgcaagccgaccaaccggtacatcagctacgcggcgctgcgcgcggaccaggtgccgtgcaacaagcgcggccggtcctactacaccaactgcgcggcgcagacggccgccaacccctaccgccgcggctgctccgccatcacgcgctgcgcccgcagcatgaactgagcgccaaggcggcggccggcggtctgatctgcctgctggctggctgggcagggggcacgcagctggcctggctcgatcgcacaccatgcattgacgtcgtcgcggccggccgccatgccgttggacggtggggtcggacgatgacggaggaggaggcggcggcgcgacgatagtatatacaaacaccaatgaccaaccatactaccagttctattgtcgctgtggcgtagcttctctataaataatatctaactccaacaagatatgtttgattatggatcgcgatctatcatatgtatgccattcattcgttaatttgaaaaaatgatgctgaaaaagagaagctaca

SEQ ID NO: 113955 - DNA, 93 bp, Zea Mays
cagcaggaggacggggagcaacagttacatccgtttttttagttcgttccatatccccgtatgccaactcccggtgcaccccgggcagcccca

SEQ ID NO: 113956 - DNA, 1157 bp, Zea Mays
ccacagagagtcgtcctgcacacaccgtaccggcggccgcctcagatttggacgacgccggcagggttcgtcatcgatctctagactctactactatatatatagcaacactgcacgacgctagattgctagctagataggcgatagatattatatatctcgctagctattggcagtggcactggtttgtggtcactagctagtatatagtaggacccacagcgatccatcggcgggatcgggtccgtgttcttggtgcaaggatggcgcggcggatcgccggagtggcggctctgaacctgctctccgtgctcatggcggcgacctgcgccgccggccgcgacttctacgtcggcggccgcgccggctgggcacccaaccccgccgagcccttcaacgcctgggcggagcgcaaccggttccaggtcaacgacaccctcgtgttcaggtacagcaaggacgcggacgccgtgctgctggtgagccagggccactacgacgcctgcaacgccgcgcagccagcccaacggctcgacggcggcgactcccgcttcgtgttcgaccactccgggccctactacttcatcagccccgacgcggcgcggtgcagggccggcgagcggctcgtcgtcgtcgtcctcgccgtccgcggcgacggcgacggcgacggcacgccctcttcctcgccgcctcccgtcgccacacctgctccgagtgccctgcctacaccgccgccgccgccccatcatgttccgggcaagaacgcctcgtcgccgtcgcaggggccggcgccgtcacccgccctcgcgcctgcgcctgcgcctgacgcgaacgggacgtcttcgtcaccgccgtcgccgtcgtccgccgtagcagccttcaggggtggcttcctgctggcgtgcctgctatccgtaaccgctggagcagcaattattctcgtctgatgtggcaacgtcgtcgtcgtccgtggctaaacttgcatcgatcgtgttgatttccgtctagttcgtgacttagatttgcttctaagttgtagggatcggtcaaaataatttcctgtttgtttgtttgggtcgatcttctactagaatccttcaaagtggaacatgtaaatctttgttagaaggaagggatctccaactttaattataaga

SEQ ID NO: 113957 - DNA, 552 bp, Zea Mays
atgagcaggcgagggggacccgcctccgtaggcgccgccaccgctgggagtagacggagacccaccatacgcgccgccgccgctgggggtggacggaggagacccaccgtacgcgccaccgccgggggtggacggagacccaccgtacgcgccgccgccggtggagggcgacgtcggagaggagccggagccggagccgccgtgggacgggaaaggcagcgtcccgccatgcgacggcgttggaacgtacccgccgccgccgccgtgggacggcgtcggggagctggagcctccgtgcgatggcgtcacgggcgtgatgccgtggccgccgccggtccccgggaacgagcgcgggtccatccccggcacgcagtccggcttcttcacgtcgtcaccttcgctcgcctgctccacgggaccggtcctggactcgaccacggccaccaaggcctgcgcggccagcacggcgagcacgaagctcgcgaggagagatctccacgcctccatggcagcagctgctgctgtctgctgctcacttttctgttgctgtag

SEQ ID NO: 113958 - DNA, 995 bp, Zea Mays
atggtatggaagggtaaaaaattgcatctgagaatggattcgaacatttacgacaaaaaaaagtgggcatcattattatattgcagtgtgaagtccaccattgagaggtacaagaaggccaacagtgacacctccaactctggcacagttgcagaagtcaatgctcagcactaccagcaggagtcctccaagctgcgccaggcgatcgatagcttgcaaaacgcaaacaggaccatagtgggagattcaatccacaccatgggcctcagggagcttaagcagatggagggcaagctggagaaggccataaacaagattagagctagaaagaatgagctcttgtatgctgaagttgaatatatgcaaagaagggagatggatctgcagactgacaacatgtacctgaggagcaagatcgccgagaataataatgaaacggggcagccagcgatgaacatgattggagtgccgtcgacgagcgagtacgatcacatggcctcttttgttgactcgagaaactttcttcaggtgaacatgcagcagcagcagcctcagcactactcccatcagctgcaaccaacgaccctccaactcggatgatgaaattaagaatcttcggccaacaatccatgcacgcaagcacgcagtaaatcatgtgtgtccaactcagataaaaaaatctactctagcgtttgtataattattaataatcgtgactagtaaactgttatatatatatgtatagccatgtgtgtggtggcgcctacatatatgtcatgtggctgtacggcgagtttttttttcacaagcgtttgcagcagcatttggtgttgctcatcgatcaattaatcgcaagaaattaaacttgtcaccactgtgggtgtacgtgttaatgcagttgttgtatctgttaattgtaccctccatcagataaacgcgggtgcgcgtatgcatacttatttatgtgtatgattatttgtgtggtttatatcgcc

SEQ ID NO: 113959 - DNA, 2427 bp, Zea Mays
tttttcatatttcactcaattatatgtagctcttatcaacattcaacattgttcaattatgcagaaatcagctgacaaaccaagtttgggagatgaattggatacttctggtccatcaaaggaacatcagaatgatctcattacagagaagcaaaagatcccagatcttaagagaaggaagcatggaagactcagtaatagtttacagaagaaggctgagaggctaaagtaccttgagagtagaaaggctgtcaaggttggaaaacagcgagatattaaaaaagtgctccctttgcacagcattctgaagaagtacacaaaacatacgtctgttaaaatggttaaggaaaaacatgggaattcaaaaggcactggagtcatacaactctgtcgcaaatcagtcaagcgtgtcaaattctcagaaacagatgatgccaaaaagcaatgttccaaaagaccaccactggaaagcatccgcgagcttctctctgctattagttcttcttcgtcgtcatctatagagatgtcaagtgaagaggaacatgttattgcggaaagtagtagttctcacatgacagagaaagctgtcactatggctagcgaagcaaatgagaacacaaatcatgacaatcaatatgagctcagcagtaccagattgtccaccggtttgcttgatctgaatcaagctcttccagaacctacggacttaaacaatccatatgttccaaattcagaggtttcaaatcttgagcaggcacaggtaggaacttggaatctggatcaacaagttcttggtaatggaagaaaaaacatagactcatcttttgatctgcatggacaggaacaactgagacattctactgagttggacaccacatcaaaaggcaagtccccttgtactctgtcaaacggattccaggattcagtgcatctccaacagaattggagctctatgactttgcatcatggtgtctctcaactctcaactggaggtgaaccatcttcctttgaagttcgagaaagtaatatatcacacagtgagaaacgaaattttagttctgaaacgaacgtggaacaagagttgaggccttctgctggacaaaccttgcgcttgatgggtcatgatcttacagtatccgatactagagttgactatttatctgacgcggcacagaatcacacaaataatactgcagaccatcttaccacaaaggtggtgttggaattgccacgacaaggtcagcctttcctagcattacaaactcagagtattcccagtgtttcagcaagttctgcaaggacagctcaggcacattttggatacagaacaacacataacatcagccacccgttgctcgctgccaatgtgttctctggtgatccatcagtatatgaagacaggtgcagggacttcacaaacttgcaatcacatcgaaattctatattgggatatcctcctctttccaatcatggcagtgctgcatttcttcagaattcaccaccttggcgttattactctgatcattccaccaggagagattcactctcagcgccatttacaccaacagtgatgcagcatgtggcaacaccttcagattaccgtgccaatctgcctcatcagtcatatggtgtgtactctggaagctcaacagttcgacctcttaactctgcaagttttacatgcacaaaccagatagtacaagcagttgacagtagggctactgcaaaccttccgtccagaagtccaacaactggaacgacaagaactcatcacaactccaatacttcatctagcagccgtttggttctgagatcaggccctgtaaagctcagtgccggggcgaagcatatcctgataccaaatgagaatacggaggacgacaattctgcaccaatgtactcttgtgtgtcctttggcagcagtggtgggaatgtttcggcagcttatcagaataaaggagcaggttcccataggcatcagaataaaggagcaggttcccgtaggttctgatccaaaagctggattatcttgctcgttcgttttctggacagctgctgggcaagaggctgcatgttttgaaggaactgaagctgatgacctaggcaatgctgagatgaagatgcaatgcgcagttcggaggatacctgagaccgtgttaattaaaggagggtacttggttttgttttgtggcctgcaagactttgacagatccttttacttctgcagttttattcccccccccccccccctttccaaaataaagaagattttcgttgtttgaaaacgataagtacgctcaggttgtgcagcatgtgaactttgtagggcatacctggagtgtctatgtagctaccggtgatgaagtagaatgttaatgcgactcaaaagctggttgattgtacaacctgtgtcatcaggagttccct

SEQ ID NO: 113960 - DNA, 597 bp, Zea Mays
cttccgtttcctctctctcctcgcccgagaggccaaaaacccagcctcgagtcctcactccccgcagattcgcgtcatagcgcggcggcggcgatggcgtacggcttctccatcaggggatacgcggcgagcatgcggggcacggccgagctcggcccgtttagtttggcggcccgggaactgcagcccatggaggtgcgcgccttccggtggtgggaggacgagctcgcgtccatcaaggcggcggaggcggaggcggagaaggagaaggagaaggaagcggtggcgggggcgggggcggagggggaggaggaagaagaggaagaggaggcgtcggggaacggccgggcgccgaagaaacgctccatcaccgacctgttcgctgaggcgcctgccgtgggcgccggcagcggacccgacgctgtcgtggacgacgaggaggaggttcttcgctccatcgtccgccggagcaaggagctgcgaagaaagaggcgtctggagcaagctgcgttggcgtcggtagcggaggagccggagacgtcggcggcaggcgaacggcgtgcggccgaggggaatttccccagaaagataaactaa

SEQ ID NO: 113961 - DNA, 106 bp, Zea Mays
aaacccaatacggttccattgcttctcaatctgtagtgaagataaagtatgtgttcttttcaatttggaatggtcataagtcaaactaaacttctccagtgacaac

SEQ ID NO: 113962 - DNA, 300 bp, Zea Mays
gaaccacttattgtttttcgcaagaagacaaacagaaagcctgagaggataatattgtatagggacggtgtaagtgaaggtcaattcagccatgttctccttcatgaaatggatgccatcagaaaggcttgtgcttctttggaggaggggtatctacccccattgacgtttgtggttgttcagaaaaggcatcacacaaggcttttccctgaggttcacggaaggcatgatatgactgataaaagtggaaacattcttcctggaactgtggttgaccaaaagatttgccaccctactgag

SEQ ID NO: 113963 - DNA, 1148 bp, Zea Mays
aaccgtgcgagctctataatcgcaaatatcttcgcagtggtgacacccccatcccggggcacgaaaccctaactgaacccatggcgctctccgccgctcgccggctctccaccaccgcgtcctcctcctccgtcgccgacgcgccgccaaagctctcttcgctgttccagaacccgaagcctcgaccgctgcctgtccgcggcgtcgaggagccgcggcggggggccaggcccaggccgaggcagccctgggaggaggaggcgggggcgctgctgctgcggctccacaaggggaggtacctcccgggccccgacctctcgtcggcgccgcacgctgtctcacccgacgccgtcaagaccgccgccgagtggttcgggcatgaccaccagcccgtcgccaaatggctgtcagggagtgatttgaagaagcttgccttgtttgggtgtcccactgttgagcgaagaacggtttttgcatcaaaaagattaagagccttcttcaacatccaggaagacaaaatatgcggttcctgtaaactgagaagttcgtgcaagtttgtgaaccaggaagtggccaggcataatagagtgattctatcagatacgatgagaattatctccttgtttgtactggacgcttgcccacaagagctcgagattaccgctgagttaaaagccagtgtctgcaagctgctaaaggacgccataaatctcagcagttaactgctgagcattacggagcagaagtttgctagttttcttgtccttgtagttctaatagcgtgctgtcagcatttatctggacttatggaggaaattgccgaggcccatgtttgacgttgcgctcgcaatcgctccctgtgaaggttggagtggtgaaccccagcgacttccttctgatccgtgttttcttttgtgcaactaatatgaagatgaagtacagagtatgtaaaaacttaagatgcatatcgctctgtagctccttttcaactaatatgaagatgaagtacagagtatgtaaaaacttaagatgcatatcgctctgtagctccttttctttttgatgtacgtagtcatataccatagtactgttatcgtttgctgcctcgcctccatttcgttaaactttggtgaactcaggttcaatct

SEQ ID NO: 113964 - DNA, 1968 bp, Zea Mays
aaatattcctggaaaaattaatcccacccgcgtttccacccacaggccaaagcaggcgagaggccccaggcccggacggacgccacaagacacgaggacaggggggaagctgcaggagggagacgagcagccggcggtgagagcaacccggcccgccccaatggagacgcaagtggcggctccgccacaccagcagcagcaacagcagcagaaggcggccaacctggcgcgcaccttcaccaagctgctccgccgcaagcgcgccgaggccgcggcgcagggcggcgcgcccgaggcgcccgcttctgtggctccaggagacgcgctggaggaggagcggacggagcctccgcccgccatcccgtccctcagcaagctcaagctgtcggggaacctcgccgccgcctactccttcgacgccttcttccgcaacgccgccgagaagaaggcggcggcggcgggagggggagcggtccggcagcctgcgggtgcgggggaggtgacgctggaggccgcggcggatgcgctgctggccaacctcttcgcgggggtctcggcggtgaaggcggcgtacgcgcagctgcagctcgcgcagttcccctacgacgcggaggcgatccagtccgcggacgccgccgtggtcgccgagctgacgaggctctccgacaccaagcggaggtacctgagggaccccgccgccgcggcccggggcgcggcggcggcgggccacaccgcgctcgcggcgcacgccgaggagcagcgccacctcctcaagacgtaccagatcacggcgcgcaagctggagtcggacctccgggccagggacgccgaggccgagcgcgccaggagctccctgaccggcgagctccgcgccgagcgcgccctggaggcgcggctccacccggggcggaccctggcgtcgctggacgagctccacctctcgggcctgaacccgacccacttcctgaccgcgctgcggcacacggtgaagtcgatccggtccttctccaggtcgatgctgagctcgatgcagtccgccgggtgggatctgggcgcggcggccgccgccgtgcacccgggcgtcccgctccggcgcgccggcgacgccaagttcgtgttcgagtcgtacgtggcgatgaagatgttcgccaacttccaccgccgcgacttcaacttcagcttcctgggcgagcgggagttctacgagcggcggcgcttcttcgaggagttcacggagctgaaggcggagccggcgagcgcgttcctggacgcgaggagcccgcggtggggcgggctcggcaagttcctgcgcgccaagtacctgtcgctggtgcacgcgcggatggagacggccttcttcgggcggctggagcagcgcggcatcgtgagcgccgggcccgggttcccggagagctcgtggttcgcggacttcgcggagatggcgcgccgcgtgtggctgctgcactgcctcttcttcgcgttcgacggcggcgccgaggaggacggcgcgtccatcttccaggtgcgcacgggggcgcgcttctcggaggtgtacatggagagcgccagcgacgggagcgccggcgacgacgccgaggaccgcgtggtcggcttcaccgttctgccggggttcagagtcgggcggacactgatccagtgccgcgtctacctgtccaagccggggcggcggccgtgatcgatgatgggtcgtggctgtgagagaccgaagagagaagaagatgatgggggggggggggggggggaatagtgcccattttgggtcggccgtcgaggtctcccgccggcagccggccggggcagtggccattatgatgatgacgggggggtggctatgtatgtaaatctatccagacatgtagggatgttctaatccgtaatataaatggtattttcagttccagatgctgcactgccattgttctttgctctctgctctccctgtcattt

SEQ ID NO: 113965 - DNA, 3096 bp, Zea Mays
atggcgtcggagaagaagcagtcgaacccgatgcgggagatgaaggtccagaagctcgtgctcaacatctccgtcggcgagagcggtgatcgcctcacccgcgccgccaaggtactggagcagctgagtggtcagtcaccggtattctccaaggcaaggtacactgtgaggtcgtttgggatccggcgcaatgagaagatcgcatgctatgtgacggtgcggggtgagaaggcaatgcagctgctggagagtggcttgaaggtgaaggagtacgagctgctgaggaggaacttcagtgacactggctgctttggatttggcatccaagagcacattgatcttggcatcaagtatgatccatctactggtatctacggcatggacttctacgtcgtccttgagcgtgctgggtaccgtgtcgcccgtcgccgcaggtgcaagtcccgtgttgggatccagcatagggtcactaaggaagacgccatgaagtggttccaggtcaaagagttgttactgcttctactccgaggccgagcccaccgggaccggtcacgccggcggaatgcagaacaggttggtccgttggtgcagccggaagatgccgacacacccgccagggaaacgaacgcccagatatgtctcgctgatgtatggggaccaccgtggcgtggccttcgtcctccgcggcctgtaaggcgggacccgctgtgtttgtgccagggaaatagagagccgccgaggcgggagcgggaaaaccgccgcctggtggctcatccgcggctccacgcccaaaaccccaaattccctatccctatcccgcgcgccctgttcttcgtctatctctctcccgactcggaaggaaaccctaggcgccacgctagggttctcgaaccttcgctccccaccccccgattcggaagccctagcctggaaggttccgggaccttctggcgcgggaggatggcggtcgtggaccagtcgctgctgccccagatccatgccctcttctccgacccgcttcgcgtggtttcgtacaaatggctcagtcggaacttctctgtgtcatcaaatgatgccaagaggttgcttcaggactttgtcaacaaacatggaactgacctccaagtgatttacagtgtgtcggggtggttgaagagcaatccccaaaactattgtgtaaagctcatttcaggcccaaaacttgaagaagcaaggcaaattttcaaagattcttgttcagttcagatctacagtatccaggcctgtattccaaaagatacagctgtactttggaatcctgaatttgtgcaggcagaggagcttttcaaccagccttttgattatgagaactgtttgagagataataggttttgtggtgttttgaattcttttgtcaagcgaacatccaatggaaagcatgtgagttcattgccaccaaagcccttgaatagtgctgcagccgccgcgcagtctaagcctagtgttactccaaaggagcagtttgttactgctcgacggcaagatttgcctgtaagttcaaagcagggagcagacactaagtccgagaaggataattccacagtattagataaggctggcaatggtcctgttgtcaaagaacaatcagttgatgcccatgcaagcaaaagtaaagctcaaaatggaaaggccatgcctagtaatggtggatcactggctaacatgtggggccgtgcatcagcaaaacctaagcctccaagtaccactaattctacagctgtagcaagtgttgcagctactgctgatgcacaaatttgtgcaaaggaagaagcagatggaaatagcagcgatgatgaacatgggataaagtacaagaggggatccactaatgcaaataacagaaagagaagagcggtatttgattattcggatgatgaggaagatgacaatattgtaagcattgcatctcctgagctaccaaaacagcataccccagaccctgttgttggaattgctgaagacgctgaagtaaatcaaaagaacttggaaactgaacaccatgtaccaaacaatgggaaaggttcctcaacgggggtggattctgacttcacatctgaatgtaaaatcaaaacgatcgatcctatgaacgattctgggattactttaaaagaaaagagcagtgatcctccaatcaatgacaagaagcaggattctgctgctgagcctgcctccacctcaccaaagaggagaaaggttttgaagacacgcatagatgagaggggaagggaagttaccgaggttgtctgggagaatgaagcttctgcagatgacaaggcagagcagaatgtcaacactattgatgcgactgcaagcggggcgactgtcccaagcaaaccgaagcccgcaacaaacgctgacaaaagcaaagctccaagcaaaacagcagcaggcaacaagaaagctgcgaaggctggagccaagcaagggagcattatgtcgttcttcaagaaagcatgagccagcggggggtgcgcatgcaccaaaatgagacaggacttggttaagcaaactggcagtggcagttatacctgaacattgtcagtcaggccggcgagcaagaagggctgctccaagcaggcgaccgttagctgtatcgtttgttttagctagcgtagcgatggttgagtcaagcagcagagagcacgcattctagctgaggtagtactatcttgctgaagatgtacacgtacacatatacaataactgttgtctactgtgctgtctagaagagtaaaggtccaaggtggaagggcggaacagtttgagtacctgtgtctggttggtatggaccccactggaagagagtgcacacaccatcatggtcttggagggtgcgagctgggcaccggtggcgtagcaagccagcaaacggccgacagcaacgtagggagggagttggagagccagagccaccccatcgtatcggtatcgcgactcgtcaacacatgtttgctgttggtcctacaagatgacgattcatataccagcttggagttggagagccagagccacccctgcggccgaccgaagccagcggctaagcagctaaatgcctga

SEQ ID NO: 113966 - DNA, 708 bp, Zea Mays
cacatatgtgtttgtggctattttcttcatttagggatttgggattttggagtacatcacttgttaccctgttcctgtgtatagttcctcttttttttccgcagtccttatcatagcttttgctgagatgtgctgcgttttgttaataattggtaaccttcctctttgctgcactttgtaaggtatgatccatctactggtatctacggcatggacttctacgtcgtccttgagcgtgctgggtaccgtgtcgcccgtcgccgcaggtgcaagtcccgtgttgggatccagcatagggtcactaaggaagacgccatgaagtggttccaggtcaagtacgagggtgtgatcctcaacaaggcccaagccaacacctcctaagcctaagcgtcaccataagatattagaccctcttggtctcttctagtgcttcgagttaatggagtatatctggcggtgggatttgtattagaagaaaatcagatgcattatcatttttgcctgtactggtcctactggagttagttggatccatgtttttgtgtgtgtcgaatacattgatgttactactgttctacctcgacagcagtctgggctattctttgttctgttattgaatcgtgagatctcggcggcaaggcaatggcagtgcaatttgtacaccgtttctgacggccacctttgccttgacaagcttatcgcctgctt

SEQ ID NO: 113967 - DNA, 1002 bp, Zea Mays
acgtacgtaattgtacacaagcaagcatagtacgatttagggtttccttaccttacaagctttttcttccgccgccgcctcagccctcgccccgcgctgctgtactctctcacctccttcgccgttgtctaccagatcatcccatggcgtcggagaagaagcagtcgaacccgatgcgggagatgaaggtccagaagctcgtgctcaacatctccgtcggcgagagcggtgatcgcctcacccgcgccgccaaggtactggagcagctgagtggtcagtcaccggtattctccaaggcaaggtacactgtgaggtcgtttgggatccggcgcaatgagaagatcgcatgctatgtgacggtgcggggtgagaaggcaatgcagctgctggagagtggcttgaaggtgaaggagtacgagctgctgaggaggaacttcagtgacactggctgctttggatttggcatccaagagcacattgatcttggcatcaagtatgatccatctactggtatctacggcatggacttctacgtcgtccttgagcgtgctgggtaccgtgtcgcccgtcgccgcaggtgcaagtcccgtgttgggatccagcatagggtcactaaggaagacgccatgaagtggttccaggtcaagtacgagggtgtgatcctcaacaaggcccaagccaacacctcctaagcctaagcgtcaccataagatattagaccctcttggtctcttctagtgcttcgagttaatggagtatatctggcggtgggatttgtattagaagaaaatcagatgcattatcatttttgcctgtactggtcctactggagttagttggatccatgtttttgtgtgtgtcgaatacattgatgttactactgttctacctcgacagcagtctgggctattctttgttctgttattgaatcgtgagatctcggcggcaaggcaatggcagtgcaatttgtacaccgtttctgacggccacctttgccttgac

SEQ ID NO: 113968 - DNA, 1067 bp, Zea Mays
gtacacaagcaagcatagtacgatttagggtttccttaccttacaagctttttcttccgccgccgcctcagccctcgccccgcgctgctgtactctctcacctccttcgccgttgtctaccagatcatcccatggcgtcggagaagaagcagtcgaacccgatgcgggagatgaaggtccagaagctcgtgctcaacatctccgtcggcgagagcggtgatcgcctcacccgcgccgccaaggtactggagcagctgagtggtcagtcaccggtattctccaagggtaattttcttatacctgacgttatcaatgtgtagtgtggtcctggatttatgatggtcgtagcaaccatgttgtgacattgcagcaaggtacactgtgaggtcgtttgggatccggcgcaatgagaagatcgcatgctatgtgacggtgcggggtgagaaggcaatgcagctgctggagagtggcttgaaggtgaaggagtacgagctgctgaggaggaacttcagtgacactggctgctttggatttggcatccaagagcacattgatcttggcatcaagtatgatccatctactggtatctacggcatggacttctacgtcgtccttgagcgtgctgggtaccgtgtcgcccgtcgccgcaggtgcaagtcccgtgttgggatccagcatagggtcactaaggaagacgccatgaagtggttccaggtcaagtacgagggtgtgatcctcaacaaggcccaagccaacacctcctaagcctaagcgtcaccataagatattagaccctcttggtctcttctagtgcttcgagttaatggagtatatctggcggtgggatttgtattagaagaaaatcagatgcattatcatttttgcctgtactggtcctactggagttagttggatccatgtttttgtgtgtgtcgaatacattgatgttactactgttctacctcgacagcagtctgggctattctttgttctgttattgaatcgtgagatctcggcggcaaggcaatggcagtgcaatttgtacaccgtttctgacggccaccttt

SEQ ID NO: 113969 - DNA, 677 bp, Zea Mays
gtacacaagcaagcatagtacgatttagggtttccttaccttacaagctttttcttccgccgccgcctcagccctcgccccgcgctgctgtactctctcacctccttcgccgttgtctaccagatcatcccatggcgtcggagaagaagcagtcgaacccgatgcgggagatgaaggtccagaagctcgtgctcaacatctccgtcggcgagagcggtgatcgcctcacccgcgccgccaaggtactggagcagctgagtggtcagtcaccggtattctccaaggcaaggtacactgtgaggtcgtttgggatccggcgcaatgagaagatcgcatgctatgtgacggtgcggggtgagaaggcaatgcagctgctggagagtggcttgaaggtgaaggagtacgagctgctgaggaggaacttcagtgacactggctgctttggatttggcatccaagagcacattgatcttggcatcaagtaagatgatctcatgtcttattgtaaataatttgaatgtggcctgtttgtttctgtgaacggatgttttatgatgggcactgttgcttgcctgtaagcaggggaaaagatatgtaactttgtattcatgtagcctgtacccactatgggtcactacgtactgggatagcttaaggctaagtgcttaacacagttt

SEQ ID NO: 113970 - DNA, 1775 bp, Zea Mays
cccacttggaatctggaatttgactgaggggatgtagaccgttcgatttccaatcgcacggtccgcgttcgtttgacgtccttctggcggttatgctgctgcgaccaagtcgagggctttcgtgccttcagcccttcagtcttcaccagtcgcgcgccgccatgtcggagaccgaatcggcggcagcggcgccggtggctgcggctgaatcgaagcctcggcgactgcgggggcacaagaagggcgccgtcacctgctgcgtcgcctcctccgcccgccccggcgtcgtcgcgtcctccggcgaggatggatgtctttgctggtttgatctgcgcaccaaagatgcacttttgaccatggaggcagcaaataaaccaatttcttcaatttgctttaaaccaggaaatgaagattttgtgtatatctctgctggaaatgaaatattgtcctttgatgttcgtatgggaactcaatcaaagccattagagacatataactacaatagagatgaaatcaatcagattgctgtcagctctaaaggttttctcgctgctgcagatgatagtggggatgttaagattgtcaataccattcagaaatgcctgtataaaagattaagggaagcccacacaagtatttgcagcagcgtgcaattcattccttggagaccttggacagcaattactgggggccttgactcaaagctcgctgcatgggatttctccaaaggacgaacactgttttctattgattatggatcacctgaattgcaaaacggcagttcttccggtagtgcagggcaatgtttcaaccctgcttttgttcattcagtagcagtttctgaagagggtattttgggagggctctacaaggtttgtgctgttgcaaggggggatggtgctgttgatgtggttgatcttgagtatgaactggcccctgcgaaatcgaagggacctcctcgggcagctattttgacaacgagatcaaaaggcgctgaacttggagatgggagctgcaatcaaagtcgagcgaaaagaatccatcttgactacaccatgggcggccatactgcagctgtgtcttgtgtagcattttcagcatttggtgagaaggggaagttcctcatttcaggtggcaatgatgcatcagtgaagctgtgggattggtcgaaaggattttactctgaaacaaacagcaaagttgatttggttttggatattgatgtaaagaaaaaggtaaattggctgtgtactgctccaactgattcagataacttgattgtgtgtgacacatccaaggtggtcaaagtatatagtttccggtagatggatcaaggtgtagcctcagtttgtcaggcagttatctgagggagtgaagcttgtctgaccgttggaaccaatctggtcctgactctggtatccagatattacaagcctgccgcagacagttcctgaattgtgaggtcattggttagcaatttgcaatgtcagttgtggcgcagaacagatctgataaagtatatattattttgttactgtcagaactttttgtacaacttccagtctgctagcttagctggactcggcatgtatatctctgttgtacggtgaaatgaatttatgtgtttggagaaaataaggcttgtttgtgctggaagagattatcttgattgtgtttatccttttggtttctatagattgtaggcttgtagcttttatttctcggtatggtgcaacctgtggtagcacatataatataaggatgatgtatgacga

SEQ ID NO: 113971 - DNA, 1763 bp, Zea Mays
cccacttggaatctggaatttgactgaggggatgtagaccgttcgatttccaatcgcacggtccgcgttcgtttgacgtccttctggcggttatgctgctgcgaccaagtcgagggctttcgtgccttcagcccttcagtcttcaccagtcgcgcgccgccatgtcggagaccgaatcggcggcagcggcgccggtggctgcggctgaatcgaagcctcggcgactgcgggggcacaagaagggcgccgtcacctgctgcgtcgcctcctccgcccgccccggcgtcgtcgcgtcctccggcgaggatggatgtctttgctggtttgatctgcgcaccaaagatgcacttttgaccatggaggcagcaaataaaccaatttcttcaatttgctttaaaccaggaaatgaagattttgtgtatatctctgctggaaatgaaatattgtcctttgatgttcgtatgggaactcaatcaaagccattagagacatataactacaatagagatgaaatcaatcagattgctgtcagctctaaaggttttctcgctgctgcagatgatagtggggatgttaagattgtcaataccattcagaaatgcctgtataaaagattaagggaagcccacacaagtatttgcagcagcgtgcaattcattccttggagaccttggacagcaattactgggggccttgactcaaagctcgctgcatgggatttctccaaaggacgaacactgttttctattgattatggatcacctgaattgcaaaacggcagttcttccggtagtgcagggcaatgtttcaaccctgcttttgttcattcagtagcagtttctgaagagggtattttgggagggctctacaaggtttgtgctgttgcaaggggggatggtgctgttgatgtggttgatcttgagtatgaactggcccctgcgaaatcgaagggacctcctcgggcagctattttgacaacgagatcaaaaggcgctgaacttggagatgggagctgcaatcaaagtcgagcgaaaagaatccatcttgactacaccatgggcggccatactgcagctgtgtcttgtgtcatttggtgagaaggggaagttcctcatttcaggtggcaatgatgcatcagtgaagctgtgggattggtcgaaaggattttactctgaaacaaacagcaaagttgatttggttttggatattgatgtaaagaaaaaggtaaattggctgtgtactgctccaactgattcagataacttgattgtgtgtgacacatccaaggtggtcaaagtatatagtttccggtagatggatcaaggtgtagcctcagtttgtcaggcagttatctgagggagtgaagcttgtctgaccgttggaaccaatctggtcctgactctggtatccagatattacaagcctgccgcagacagttcctgaattgtgaggtcattggttagcaatttgcaatgtcagttgtggcgcagaacagatctgataaagtatatattattttgttactgtcagaactttttgtacaacttccagtctgctagcttagctggactcggcatgtatatctctgttgtacggtgaaatgaatttatgtgtttggagaaaataaggcttgtttgtgctggaagagattatcttgattgtgtttatccttttggtttctatagattgtaggcttgtagcttttatttctcggtatggtgcaacctgtggtagcacatataatataaggatgatgtatgacg

SEQ ID NO: 113972 - DNA, 1788 bp, Zea Mays
cccacttggaatctggaatttgactgaggggatgtagaccgttcgatttccaatcgcacggtccgcgttcgtttgacgtccttctggcggttatgctgctgcgaccaagtcgagggctttcgtgccttcagcccttcagtcttcaccagtcgcgcgccgccatgtcggagaccgaatcggcggcagcggcgccggtggctgcggctgaatcgaagcctcggcgactgcgggggcacaagaagggcgccgtcacctgctgcgtcgcctcctccgcccgccccggcgtcgtcgcgtcctccggcgaggatggatgtctttgctggtttgatctgcgcaccaaagatgcacttttgaccatggaggcagcaaataaaccaatttcttcaatttgctttaaaccaggaaatgaagattttgtgtatatctctgctggaaatgaaatattgtcctttgatgttcgtatgtggttttcttgtagggaactcaatcaaagccattagagacatataactacaatagagatgaaatcaatcagattgctgtcagctctaaaggttttctcgctgctgcagatgatagtggggatgttaagattgtcaataccattcagaaatgcctgtataaaagattaagggaagcccacacaagtatttgcagcagcgtgcaattcattccttggagaccttggacagcaattactgggggccttgactcaaagctcgctgcatgggatttctccaaaggacgaacactgttttctattgattatggatcacctgaattgcaaaacggcagttcttccggtagtgcagggcaatgtttcaaccctgcttttgttcattcagtagcagtttctgaagagggtattttgggagggctctacaaggtttgtgctgttgcaaggggggatggtgctgttgatgtggttgatcttgagtatgaactggcccctgcgaaatcgaagggacctcctcgggcagctattttgacaacgagatcaaaaggcgctgaacttggagatgggagctgcaatcaaagtcgagcgaaaagaatccatcttgactacaccatgggcggccatactgcagctgtgtcttgtgtagcattttcagcatttggtgagaaggggaagttcctcatttcaggtggcaatgatgcatcagtgaagctgtgggattggtcgaaaggattttactctgaaacaaacagcaaagttgatttggttttggatattgatgtaaagaaaaaggtaaattggctgtgtactgctccaactgattcagataacttgattgtgtgtgacacatccaaggtggtcaaagtatatagtttccggtagatggatcaaggtgtagcctcagtttgtcaggcagttatctgagggagtgaagcttgtctgaccgttggaaccaatctggtcctgactctggtatccagatattacaagcctgccgcagacagttcctgaattgtgaggtcattggttagcaatttgcaatgtcagttgtggcgcagaacagatctgataaagtatatattattttgttactgtcagaactttttgtacaacttccagtctgctagcttagctggactcggcatgtatatctctgttgtacggtgaaatgaatttatgtgtttggagaaaataaggcttgtttgtgctggaagagattatcttgattgtgtttatccttttggtttctatagattgtaggcttgtagcttttatttctcggtatggtgcaacctgtggtagcacatataatataaggatgatgtatgacg

SEQ ID NO: 113973 - DNA, 211 bp, Zea Mays
ttcgacttcatgtgacttattttagaaacttgagctcacaaactttctcttatttggtctctatatggtggaattatgtcattttataatctctgttcgttcagtcagtcgttgtaaactcttatctaatcgctcacttcattggtcgtgttgtaccaaaatatattgcatggagtaagcaataacatcagttagccaaatcaaaaaaata

SEQ ID NO: 113974 - DNA, 2462 bp, Zea Mays
ccgcaagtgccacggataaaggtggggaaaagatctttgacggctgtgttatccagtccagtatcctcgacggtcgacgccggcgcgagcagcaaatggccaccgcggcggtgacgatgaccatggcgacgcacaacccccgcgcccgcgcacccctccgcgtctgcgccgcctgggacatgaacccgggagccgccaccgtggccacgcccaagccctccaaggccaaggccaagccgccgccgccgcccgcgaccacaaccccggcccgcccgcctcctctgacccacgccgatctcttcgcgcgctccagcgaggcgcaaggaggggtgaagaagagcacatatatgggctttgagaaatggtggttgccacctgcgccagtggtgaagaaaccccgatcgctctacagtgcggtgtcactggcttacttgggagactgcatatatgaactttatgctcggaggcacttcttctttccacctctgagcatcaatgagtacaacaaacgtgtgatggatgttgtgaagtgtgagtcacaggaccttttgttgaacaagcttcttggagaagattttctaactgaagaagaaagggacatacttcgttgggggcggaatattgttagcagcaaaactcgcaccaggaagcgtgcaggaattgctgtctacaaccgggcatcttcactcgaaacactaattggatatctttacctcacaaatttcaaacggttggaacaactgatgtttcaattgggcttcacaagtggtgcctcatcacagcatattgcagacgagctgcgctcaagtttccagaaaacaacccccgcttcggccacacctccacaacctgcaacacagtgaacaggtctgaggtgtaacggtattggatcgtgctcccacaaaggttatctttagtcttcgaccctaacgacggagaaaggacgcaagagtcacggcgtattcagatgcaatagcgaggctgggagcagatggttagcgaacaccaccaccgtatattcatcagcatgtttctgcgaatggagcaacatagatatgctcaaactctgaagatatgcgaaaattaagactcagaatgtctgggctgacctggggtttgcgagtaggatagcttgatgtttgcaaagaagctcgagtgtgggagataggcccgacttggggtgttgtaatcgacctaaattcgtgtaggtaattaaccacttcatgttacttgttgccaaaaaaaaagtgatgattctgcttgtacacacgccttgtttttttttcctgttccctgtgacttctgttgaacagcaaaagctatgagcgctaagatgctgtgggaatgaatagaacaaaataccaaacctgtgggcgttactataaatccaattgatccaattgcttcattcggggtagtaattttacaaagcccagttatggggatacattggtttcaaaaaaaaaaactcgaaattctcccgcctatccaccttgaattggattggatttgcttcgagcagtcagtcttgccgaagtttttaggagttctccgacctcgtagtcaatcactcagtctcggagacacacattgccactgcgatggccgcccaccaggactcggcggcatcggggagcgggcctcctcgtcgtcctcgcgtcctcctggcagcctccggcagcgtggccgccatcaagttcgaggtcctctgccgcagcgtcgccgagtgggcggatgtccacgcggtggcgaccgcgtccgcgctggaattcatcgacgtggcctccttccccggcggcgtccctctctacaccgacgaccaggagtggtctagctggaagcgggtcggcgacaaggtcctgcacatcgagctgcgccggtgggccgacgtcctggtcatcgcgccgctctcggccaacaccctcgcaaaggtacgccgtacgcacgccagctggtcatcgcgctcgccctcaccggtcgccgctgacaactctgcctgctgccaggtcgccggcgggctgtgcgacaacctcctcacctgcgtcgtgcgcgcctgggactacagcaagcccgtttacgtcgcgccggccatgaacaccttcatgtggggcaaccccttcacggcgcgccacctcgccgtcctgcgcgacctcggcatgtccgtcgtcccgccggtcaatggcgcgatggcggagccgtcggagatctgcaagaccctcatgctcttcttcggtccgcaacatctttagcagtcgccaagctcctcagttctttgctcctttatgtatgatgagatgtgtcccttgcttgacctagcatagcaatcttgccacaaaccacggggtagaattagatggcaattgttctacgcaatgcttgcaatgacatcatacatggcagtggagcgcttctcgtctttcatttccccgtacagatcgtcaagcaccctgaaaacctcctca

SEQ ID NO: 113975 - DNA, 2404 bp, Zea Mays
gccacggataaaggtggggaaaagatctttgacggctgtgttatccagtccagtatcctcgacggtcgacgccggcgcgagcagcaaatggccaccgcggcggtgacgatgaccatggcgacgcacaacccccgcgcccgcgcacccctccgcgtctgcgccgcctgggacatgaacccgggagccgccaccgtggccacgcccaagccctccaaggccaaggccaagccgccgccgccgcccgcgaccacaaccccggcccgcccgcctcctctgacccacgccgatctcttcgcgcgctccagcgaggcgcaaggaggggtgaagaagagcacatatatgggctttgagaaatggtggttgccacctgcgccagtggtgaagaaaccccgatcgctctacagtgcggtgtcactggcttacttgggagactgcatatatgaactttatgctcggaggcacttcttctttccacctctgagcatcaatgagtacaacaaacgtgtgatggatgttgtgaagtgtgagtcacaggaccttttgttgaacaagcttcttggagaagattttctaactgaagaagaaagggacatacttcgttgggggcggaatattgttagcagcaaaactcgcaccaggaagcgtgcaggaattgctgtctacaaccgggcatcttcactcgaaacactagtgtgcaatactctaacactgtgtatcattctattatagctgcaattttttagactaattgccacgctgttggtcttgttttctgttagattggatatctttacctcacaaatttcaaacggttggaacaactgatgtttcaattgggcttcacaagtggtgcctcatcacagcatattgcagacgagctgcgctcaagtttccagtaaaccatccctggccgatacgtactattttcgaagtcttttaggaggagcggtcttgcactaatgaactgtctttggcaggaaaacaacccccgcttcggccacacctccacaacctgcaacacagtgaacaggtctgaggtgtaacggtattggatcgtgctcccacaaaggttatctttagtcttcgaccctaacgacggagaaaggacgcaagagtcacggcgtattcagatgcaatagcgaggctgggagcagatggttagcgaacaccaccaccgtatattcatcagcatgtttctgcgaatggagcaacatagatatgctcaaactctgaagatatgcgaaaattaagactcagaatgtctgggctgacctggggtttgcgagtaggatagcttgatgtttgcaaagaagctcgagtgtgggagataggcccgacttggggtgttgtaatcgacctaaattcgtgtaggtaattaaccacttcatgttacttgttgccaaaaaaaaagtgatgattctgcttgtacacacgccttgtttttttttcctgttccctgtgacttctgttgaacagcaaaagctatgagcgctaagatgctgtgggaatgaatagaacaaaataccaaacctgtgggcgttactataaatccaattgatccaattgcttcattcggggtagtaattttacaaagcccagttatggggatacattggtttcaaaaaaaaaaactcgaaattctcccgcctatccaccttgaattggattggatttgcttcgagcagtcagtcttgccgaagtttttaggagttctccgacctcgtagtcaatcactcagtctcggagacacacattgccactgcgatggccgcccaccaggactcggcggcatcggggagcgggcctcctcgtcgtcctcgcgtcctcctggcagcctccggcagcgtggccgccatcaagttcgaggtcctctgccgcagcgtcgccgagtgggcggatgtccacgcggtggcgaccgcgtccgcgctggaattcatcgacgtggcctccttccccggcggcgtccctctctacaccgacgaccaggagtggtctagctggaagcgggtcggcgacaaggtcctgcacatcgagctgcgccggtgggccgacgtcctggtcatcgcgccgctctcggccaacaccctcgcaaaggtacgccgtacgcacgccagctggtcatcgcgctcgccctcaccggtcgccgctgacaactctgcctgctgccaggtcgccggcgggctgtgcgacaacctcctcacctgcgtcgtgcgcgcctgggactacagcaagcccgtttacgtcgcgccggccatgaacaccttcatgtggggcaaccccttcacggcgcgccacctcgccgtcctgcgcgacctcggcatgtccgtcgtcccgccggtcaatggcgcgatggcggagccgtcggagatctgcaagaccctcatgctcttcttcggtccgcaac

SEQ ID NO: 113976 - DNA, 1450 bp, Zea Mays
gccacggataaaggtggggaaaagatctttgacggctgtgttatccagtccagtatcctcgacggtcgacgccggcgcgagcagcaaatggccaccgcggcggtgacgatgaccatggcgacgcacaacccccgcgcccgcgcacccctccgcgtctgcgccgcctgggacatgaacccgggagccgccaccgtggccacgcccaagccctccaaggccaaggccaagccgccgccgccgcccgcgaccacaaccccggcccgcccgcctcctctgacccacgccgatctcttcgcgcgctccagcgaggcgcaaggaggggtgaagaagagcacatatatgggctttgagaaatggtggttgccacctgcgccagtggtgaagaaaccccgatcgctctacagtgcggtgtcactggcttacttgggagactgcatatatgaagtgagagtcaggccgtgtgaacactgatgtacaagtgtactagttgtcaagttgaagcttgctttccataggaagatctgattctttctcttttggtgtacagctttatgctcggaggcacttcttctttccacctctgagcatcaatgagtacaacaaacgtgtgatggatgttgtgaagtgtgagtcacaggaccttttgttgaacaagcttcttggagaagattttctaactgaagaagaaagggacatacttcgttgggggcggaatattgttagcagcaaaactcgcaccaggaagcgtgcaggaattgctgtctacaaccgggcatcttcactcgaaacactagtgtgcaatactctaacactgtgtatcattctattatagctgcaattttttagactaattgccacgctgttggtcttgttttctgttagattggatatctttacctcacaaatttcaaacggttggaacaactgatgtttcaattgggcttcacaagtggtgcctcatcacagcatattgcagacgagctgcgctcaagtttccagaaaacaacccccgcttcggccacacctccacaacctgcaacacagtgaacaggtctgaggtgtaacggtattggatcgtgctcccacaaaggttatctttagtcttcgaccctaacgacggagaaaggacgcaagagtcacggcgtattcagatgcaatagcgaggctgggagcagatggttagcgaacaccaccaccgtatattcatcagcatgtttctgcgaatggagcaacatagatatgctcaaactctgaagatatgcgaaaattaagactcagaatgtctgggctgacctggggtttgcgagtaggatagcttgatgtttgcaaagaagctcgagtgtgggagataggcccgacttggggtgttgtaatcgacctaaattcgtgtaggtaattaaccacttcatgttacttgttgccaaaaaaaaagtgatgattctgcttgtac

SEQ ID NO: 113977 - DNA, 1258 bp, Zea Mays
gccacggataaaggtggggaaaagatctttgacggctgtgttatccagtccagtatcctcgacggtcgacgccggcgcgagcagcaaatggccaccgcggcggtgacgatgaccatggcgacgcacaacccccgcgcccgcgcacccctccgcgtctgcgccgcctgggacatgaacccgggagccgccaccgtggccacgcccaagccctccaaggccaaggccaagccgccgccgccgcccgcgaccacaaccccggcccgcccgcctcctctgacccacgccgatctcttcgcgcgctccagcgaggcgcaaggaggggtgaagaagagcacatatatgggctttgagaaatggtggttgccacctgcgccagtggtgaagaaaccccgatcgctctacagtgcggtgtcactggcttacttgggagactgcatatatgaactttatgctcggaggcacttcttctttccacctctgagcatcaatgagtacaacaaacgtgtgatggatgttgtgaagtgtgagtcacaggaccttttgttgaacaagcttcttggagaagattttctaactgaagaagaaagggacatacttcgttgggggcggaatattgttagcagcaaaactcgcaccaggaagcgtgcaggaattgctgtctacaaccgggcatcttcactcgaaacactaattggatatctttacctcacaaatttcaaacggttggaacaactgatgtttcaattgggcttcacaagtggtgcctcatcacagcatattgcagacgagctgcgctcaagtttccagaaaacaacccccgcttcggccacacctccacaacctgcaacacagtgaacaggtctgaggtgtaacggtattggatcgtgctcccacaaaggttatctttagtcttcgaccctaacgacggagaaaggacgcaagagtcacggcgtattcagatgcaatagcgaggctgggagcagatggttagcgaacaccaccaccgtatattcatcagcatgtttctgcgaatggagcaacatagatatgctcaaactctgaagatatgcgaaaattaagactcagaatgtctgggctgacctggggtttgcgagtaggatagcttgatgtttgcaaagaagctcgagtgtgggagataggcccgacttggggtgttgtaatcgacctaaattcgtgtaggtaattaaccacttcatgttacttgttgccaaaaaaaaagtgatgattctgcttgtac

SEQ ID NO: 113978 - DNA, 1347 bp, Zea Mays
gccacggataaaggtggggaaaagatctttgacggctgtgttatccagtccagtatcctcgacggtcgacgccggcgcgagcagcaaatggccaccgcggcggtgacgatgaccatggcgacgcacaacccccgcgcccgcgcacccctccgcgtctgcgccgcctgggacatgaacccgggagccgccaccgtggccacgcccaagccctccaaggccaaggccaagccgccgccgccgcccgcgaccacaaccccggcccgcccgcctcctctgacccacgccgatctcttcgcgcgctccagcgaggcgcaaggaggggtgaagaagagcacatatatgggctttgagaaatggtggttgccacctgcgccagtggtgaagaaaccccgatcgctctacagtgcggtgtcactggcttacttgggagactgcatatatgaactttatgctcggaggcacttcttctttccacctctgagcatcaatgagtacaacaaacgtgtgatggatgttgtgaagtgtgagtcacaggaccttttgttgaacaagcttcttggagaagattttctaactgaagaagaaagggacatacttcgttgggggcggaatattgttagcagcaaaactcgcaccaggaagcgtgcaggaattgctgtctacaaccgggcatcttcactcgaaacactagtgtgcaatactctaacactgtgtatcattctattatagctgcaattttttagactaattgccacgctgttggtcttgttttctgttagattggatatctttacctcacaaatttcaaacggttggaacaactgatgtttcaattgggcttcacaagtggtgcctcatcacagcatattgcagacgagctgcgctcaagtttccagaaaacaacccccgcttcggccacacctccacaacctgcaacacagtgaacaggtctgaggtgtaacggtattggatcgtgctcccacaaaggttatctttagtcttcgaccctaacgacggagaaaggacgcaagagtcacggcgtattcagatgcaatagcgaggctgggagcagatggttagcgaacaccaccaccgtatattcatcagcatgtttctgcgaatggagcaacatagatatgctcaaactctgaagatatgcgaaaattaagactcagaatgtctgggctgacctggggtttgcgagtaggatagcttgatgtttgcaaagaagctcgagtgtgggagataggcccgacttggggtgttgtaatcgacctaaattcgtgtaggtaattaaccacttcatgttacttgttgccaaaaaaaaagtgatgattctgcttgtac

SEQ ID NO: 113979 - DNA, 1822 bp, Zea Mays
gccacggataaaggtggggaaaagatctttgacggctgtgttatccagtccagtatcctcgacggtcgacgccggcgcgagcagcaaatggccaccgcggcggtgacgatgaccatggcgacgcacaacccccgcgcccgcgcacccctccgcgtctgcgccgcctgggacatgaacccgggagccgccaccgtggccacgcccaagccctccaaggccaaggccaagccgccgccgccgcccgcgaccacaaccccggcccgcccgcctcctctgacccacgccgatctcttcgcgcgctccagcgaggcgcaaggaggggtgaagaagagcacatatatgggctttgagaaatggtggttgccacctgcgccagtggtgaagaaaccccgatcgctctacagtgcggtgtcactggcttacttgggagactgcatatatgaagtgagagtcaggccgtgtgaacactgatgtacaagtgtactagttgtcaagttgaagcttgctttccataggaagatctgattctttctcttttggtgtacagctttatgctcggaggcacttcttctttccacctctgagcatcaatgagtacaacaaacgtgtgatggatgttgtgaagtgtgagtcacaggaccttttgttgaacaagcttcttggagaagattttctaactgaagaagaaaggtgaatattagattgctaaacttatacaatttatgcaacattaccaggaatataatttctacagagaaatgttcgacggtagtcttaagatgcatgcctgcacttttacggaatgttagcattttgacatttgtcaagactagcataggtatttggatgttaccgtatttgtttttgggaaaatgctgtatctctctactttttctacactgtccaggtccagggcctcgagcctattcagtaatgagccttgaagacgtactttgagttacatgattaagcacatttgtagggacatacttcgttgggggcggaatattgttagcagcaaaactcgcaccaggaagcgtgcaggaattgctgtctacaaccgggcatcttcactcgaaacactagtgtgcaatactctaacactgtgtatcattctattatagctgcaattttttagactaattgccacgctgttggtcttgttttctgttagattggatatctttacctcacaaatttcaaacggttggaacaactgatgtttcaattgggcttcacaagtggtgcctcatcacagcatattgcagacgagctgcgctcaagtttccagtaaaccatccctggccgatacgtactattttcgaagtcttttaggaggagcggtcttgcactaatgaactgtctttggcaggaaaacaacccccgcttcggccacacctccacaacctgcaacacagtgaacaggtctgaggtgtaacggtattggatcgtgctcccacaaaggttatctttagtcttcgaccctaacgacggagaaaggacgcaagagtcacggcgtattcagatgcaatagcgaggctgggagcagatggttagcgaacaccaccaccgtatattcatcagcatgtttctgcgaatggagcaacatagatatgctcaaactctgaagatatgcgaaaattaagactcagaatgtctgggctgacctggggtttgcgagtaggatagcttgatgtttgcaaagaagctcgagtgtgggagataggcccgacttggggtgttgtaatcgacctaaattcgtgtaggtaattaaccacttcatgttacttgttgccaaaaaaaaagtgatgattctgcttgt

SEQ ID NO: 113980 - DNA, 1549 bp, Zea Mays
gagaggctcaggctgctcgtgatggcttggctcgcagacagacaggcagacagagagatatcaaaacatttgagggaaatgttatttgtgtatcactgtgcatgcagtacgcagtgagtaatgaatgaattctggtgtggccagcagatcgtgttcgagatcctggtgaggggtctgatcgggctggaggcaggcccggagatgcagcagctcaagcaccagttccaggaattcattgtcggcctcatgtccctccccatcaagctgccggggactaggctctacaggtccctccaggccaagaagaggatggccacgctgatacaggggatcatacaggagaagaggcggcggcggagggccgcccttgaggatggcggagagggcgagggcgaggccggtcccccgcgcgacgtcatcgacgtgctcataagcggcggcgacgagctcaccgacgagctcatatccgacaacatgatcgacctgatgatccccgccgaggactctgtgcccgtgctcatcacgctcgccgtcaagtatctcagcgagtgcccgcttgctctgcaacaacttgaggaggagaacatgcagctgaagaggcggaaaaccgacgtgggagagaccttgcagtggacggactacatgtcactgtcgttcacacaacatgtgataacggagacactgcggatggggaatatcatcaacgggatcatgcgcaaagcggtgcgggacgtggaggtgaaggggcacctcatccccaagggctggtgcgtgttcgtgtacttccggtcggtccacctcgacgacaagcgctacgacgagccctacaggttcaacccgtggaggtggaaggagaaggacacgagcaccatgggcttcaccccttttggcggtgggcagaggctgtgcccaggcctggatctggccaggctggaagcttccatctttctccatcacctggtgaccagcttcaggtgggtggcggaggaggaccacatcgtcaacttcccaaccgtgcggctcaagcgaggcatgcccgtcaggctcaccagcaaagactagctagctagtcactacgacctgcttgtgcatgccatgcatgcagatttcagtcacgtcatatgcaatatatattggaccctggaggttgcacgtgtacagaagagaggatgcaggagctagcagatgatcggaggtatttaggcagactgaaattgaatcgaccgcgaagagtagcacactactataccacgagtatgatctgtagtagtagtaataagaggaatataatatcattagtgtggtagtatttacttattatactactctctcttttcgtttttatttatcgtgttttagtttaaaaatgaactagcgaggttagtcaataggcgtgcatgcatggcccatcatggtcatggatatataggccttgatggttatactagtataagcagtagtgttatgtcacaagggattactgggatctgggatgatgatccacaatcccatctaaaacgaaaagagttaataaagattgttaagttta

SEQ ID NO: 113981 - DNA, 1909 bp, Zea Mays
gtgcggctgtgcctgtcgtctctccctctctcctcgcctgtagtatgtagtgtactttctgcacttgccgattcgattccatgcttccattgacgccacgaccacgctacatataagtggcgtctgcggtgcctctcctccgaccctcgtcctcgtcctcgcgcagcctctgcttccatataactcgctcactgctcgcgcgcctcggtgggtgcaaacgcgcacagggacagaaacagagacagagccagccatgtcgaccaccaccctgcagctggttccgtggccgccggagccggcgcgcgccgccgtgctgcttgttgcggcggtcgtctgcctgtgggtgcttctgtcacgcaggcgggccgccggagggagcaaggacaaggagcgggcggcccggctcccgcccggcagcttcgggtggccgctggtgggcgagacgctggacttcgtgtcctgcgcctactcctcccgcccggaggccttcgtcgacaagcgccgcctgctgcacgggagcgcggtgttccggtcgcacctgttcggctcggcgacggtggtgacgtcggacgcggaggtgagccggttcgtgctgcacagcgacgcgcgcgccttcgtgccctggtacccgcggtcgctgacggagctcatgggcgagtcctccatcctgctcatcaacggcagcctgcagcggcgcgtgcacggcctcgtcggcgccttcttcaagtcgccgcagctcaaggcgcaggtcaccgccgacatgcagcgccgcctcgcgcccgcgctcgccgcctggaaggttcggtgcgcctccgcgccgccgctccgcatccaggaccacgccaagacgatcgtgttcgagatcctggtgaggggtctgatcgggctggaggcaggcccggagatgcagcagctcaagcaccagttccaggaattcattgtcggcctcatgtccctccccatcaagctgccggggactaggctctacaggtccctccaggccaagaagaggatggccacgctgatacaggggatcatacaggagaagaggcggcggcggagggccgcccttgaggatggcggagagggcgagggcgaggccggtcccccgcgcgacgtcatcgacgtgctcataagcggcggcgacgagctcaccgacgagctcatatccgacaacatgatcgacctgatgatccccgccgaggactctgtgcccgtgctcatcacgctcgccgtcaagtatctcagcgagtgcccgcttgctctgcaacaacttgaggaggagaacatgcagctgaagaggcggaaaaccgacgtgggagagaccttgcagtggacggactacatgtcactgtcgttcacacaacatgtgataacggagacactgcggatggggaatatcatcaacgggatcatgcgcaaagcggtgcgggacgtggaggtgaaggggcacctcatccccaagggctggtgcgtgttcgtgtacttccggtcggtccacctcgacgacaagcgctacgacgagccctacaggttcaacccgtggaggtggaaggagaaggacacgagcaccatgggcttcaccccttttggcggtgggcagaggctgtgcccaggcctggatctggccaggctggaagcttccatctttctccatcacctggtgaccagcttcaggtgggtggcggaggaggaccacatcgtcaacttcccaaccgtgcggctcaagcgaggcatgcccgtcaggctcaccagcaaagactagctagctagtcactacgacctgcttgtgcatgccatgcatgcagatttcagtcacgtcatatgcaatatatattggaccctggaggttgcacgtgtacagaagagaggatgcaggagctagcagatgatcggaggtatttaggca

SEQ ID NO: 113982 - DNA, 119 bp, Zea Mays
gctagtttatttggatgccaagctatttaattttgaaaaagttaagtgtcatgtttctaattgaccctttttttatgggtgtgggctcgctctcgtgcagtcgcactagggggttgggc

SEQ ID NO: 113983 - DNA, 1751 bp, Zea Mays
cccagtatcccagatccagtccactactccactcccgttcccccaagtctatcagccaaagcatcgcccgccgatggcgtctccgccccactcagtcgaggtccggacccccggcgactcgccgcggcccaccgccgctctcctctccccctccgtggccgcaccccagccctccaacgcctcccgcctcctgctcctcctcaccgcggccgtcgccgccgctacggccttcgtcctgctccgcccgcccatcaccgtcgtgaccgcggcgtccgccaccgcgcggccgctctccaagctctccaagcccgtggtgctgctcatttcctcggacggcttccgcttcgggtaccagtacaaggcccccctcccgcacatccgccgcctcttcgccaatggcacatccgccgccgagggcctgatccccgtcttccccacgctcaccttccccaaccactactccatcgtcaccggcctctacccctcctcccacggcatcatcaacaactacttccccgatcccatctcgggggactacttcaccatgaaaaaccacgatcccaagtggtggctcggggagccgctctgggccaccgctgccgcccagggggtcctgtctgccacattcttctggccgggttcggaggttacgaagggttcctggaactgccccgacaagtactgccgccactacaatggctcggtgccgtttgaggagagggtcgacaccatccttggctattttgatctcccgcctaaccaaatgccacagttcatgacgctgtactttgaggatcctgatcaccaggggcaccaggtgggtcctgacgatccctcaatcaccgatgcggtcgtacatatagatgagatgctcgggaggctcattgctggtttggaggctaggggaatgtttgaggatgtgaacattatattggtaggtgaccatggtatggttgggacctgcgataggaagcttgtgtttctcgaagagttggctccatggatcgagttgaagtcagattgggttctgtcagtgacgccattgctggcaatcaggccgccagatggtgtgtcgccagctgaggttgtggccaagatgaatgaggggcttggatctgggaaggtgaagaatggggaatatttgaaaatgtacttaaaagaggagttgcctactcgcctgcattattcagagagttacaggatcccaccaatcatcgggctggttggggaagggtataagatcgagatgaagcgctccaagagaaatgagtgtggaggagcccatgggtacgacaatgccttcttctcaatgaggaccatatttgccgcacatggacctcgttttcagggtggtagaactgtgccctcatttgagaatgcggagatatacaatgtcatggcttccattctcaatttgaagcctgctccaaacaatggttcagcttctttccctggcacgattctgttgccgaacaaatgatcatggattggttttgtaggagtaagggcacatggatgtatgatggtgttctcatttggttattgtattgtacctcttaaattagacttctgccacatcactgtatctgagcaaaaatgctgctagtagagagttgcttctctctagtgacaacatttggaaacatgtttcacatcaaacgtttggctgctcaattgtttcataggagttcattcgagctccatgttttctccttaattgactgatgctcctgttgataacatatgcattt

SEQ ID NO: 113984 - DNA, 2275 bp, Zea Mays
agccgacgctgagcaggaatggaagctgcaatccccctcgggctcgcccttccccgaagcagcaccggcatctgcagcttatcggtactgctcaagtcctcaaccaagcccaacctcagctgcttcggctgggtcaccggaaagcgcgggcctatcccgtcccgcgccgtctccgaggaccgcaccgactccacgccgcagtggcaacttgactttcttggggcgagcgcggtggcccccgattcgcctgtggaggaggaagaggaggaccttctcccagccgaggccactgactggtgcgtccgcgcacgccgctctgccctgcgctccatcgaggagcgtggcctcgcgcccgctctgcagcggatggtgtcaccgcccaagaagacgaaaaagaagaagactgccaagaagaaagagctcaagaaggcggccgccgagctcaagcgccgcactaagcagttggctgatgccgagggagacgaagacgacgacgatgactatgacgtcgttgatgatttgcagaacatggacgacctggagctgcgggtcgcgcagttcgccgacggcatgttcgacgaaaagcgccagagaaacagggagaccttcgtccagaccttgtccaggttctcggccgcgccttccaaccggagcaaagaggtgtccttgaaccgctccatcgtccaggcgcaaactgccaacgaggtgctggacctcacggcagaggtgatcactgctgtcgcaaagggtctcagcccctcgccactcacgccgcttaacatcgccactgcgctccaccgcatagccaggaacatggaagcggtgtccatgatgcagacgcaccggcttgcctttgcacgccagagggacatgtccatgctcgtgggtctggccatggtggccctgccagagtgctcgccacagggtgtctccaacatcgcctgggctttgtccaagattggcggtgatctgctatacctgccagagatggataggatagctgatgtggccatggccaaggttcaagacttcaatgcacagaacgttgccaatgttgcaggagcattcgcttccatgcgccaatcagcaccggggcttttttcatctctggccatgagagcagcacaactgctgcaaacattcaaggagcaagagcttgctcaattcttatggggttgtgcttctctgaacgagtgcccacatcccttgcttgatgcactagatactgcttttcaaaatgataccagttttcaatgccatgtaactgatataaaatcaagcgcgcattggagctcagcagaagaactttctggtggagaagatggtagtacgagcagtgcccgtactctgaacttcaaccgagatcaggttgggaatattgcttggtcctatgctgttattgggcaaatggaccgtccattcttttcacatatgtggagaactctaagtcgcttcgaagagcaacgggtttcggatcagtatagagaagacatgatgtttgcttcacaagtatatcttgcaaaccagtctttgaagcttgaataccggaatcttggactgtgcttaagaagtgatcttgaggagaaaatagcaaaagctggaaagagcaaaaggttcaaccagaagacaacttcttcatttcaaaaggaggttggtcgtctcctctatagtaccgggcatgagtgggttagagaatatgccatcgatggttacactgttgatgccgtgttagttgatgagaagcttgcatttgagatagatgggccaacacacttctctaggaatttaggtacaccattaggccacacagcatttaaacgacgctacattactgcttctgggtggaagttagtttcgttgtctcttcaagagtgggagaacctacaaggtgagtttgaacaattggaatatttgaggagaatattagacatagaggctgaataagcggcaacactctgggcaatggagattaagcaagaatgcatctgcttttacaagagtactcattttacaaccacactggccttcccaaaagttcagtccacttgtacatttcttgtgaatctgtctggaaacagaagtgctccactgagccctggaaagttagattttagctgagcattggtaatgagaaatacaatttaaagttcagactaatgtgtgacatgttagttttcgggggactattttgtgccagagaagaaagtattgctgaagcttgtaattcttgaaacaatgcagcgggctataaactcattacagaggtttctgcaca

SEQ ID NO: 113985 - DNA, 104 bp, Zea Mays
gaggacgacttcatcatctaaatttagggtacatgacactttagaggtccttgttgtagctagtcttaatatagtagtatagatatagattcagttgtgtgaac

SEQ ID NO: 113986 - DNA, 1029 bp, Zea Mays
atgaagacgttcgacccgtggccggtcttcttccaccgggagtggaagcgcaactgtcccttcctcacggggttcaccatcaccggcttcatcatcaccaagatgacagccaacttcaccgaggaggacctcaagaactcaagttcgttcaggaacacaagaagcgctgaccaaccggctcagcgggagctctcacctcgaacaaaaaaccaagcaaaaaatctttggaccaaacctccaagacttgatgcttgtcctattgaatcgaaattttggggcacctatgctcagcatgatctcctttcttgggctgaagcagagttcttgcattggtggattcccaaagattgccctctcacgccttcttcgaaggcaactatttgtgaacacatttgtagtttaccctcagctgtgaacaccttctggtttatctatttacttgcacgagaaacttatatgacaagaatttgttttgatagttatgccatagttagtgatatgagtgctgctggacttggattaaacaagttttgttatgctggattgataactgcattcaagaacaagacaccaaccactgaggaaactatggcgaagattcttgacttcgtcgggcagtcgaaaggttggcaatatgttgaaagagtatcaaaggacattgctgagaatataatgatgaatgtgttagaggaagaactgtacaacctcccaacagcagaatatgtaaataggcgaggaggatttgtctttaaacaacatacagtttatcatgttgctctccaagcttgtgcagaattgcgaagcaaagagacacttgaagcacttctggaaatgttcaataaggataatagagatggatctacttatgatgcctacatggtgatgcaagctatgaggtgttacctacgatgtggagatattgattctgctgttaagatgtttgaagagtattcaagctcgaggtccccacccgctgagttgtatgcggaagaggagctggaagcaaggatcagattgcttgaagtgtga

SEQ ID NO: 113987 - DNA, 285 bp, Zea Mays
gtgctggcccggcccgacacgattatttttttattttacaaaaaaatgtatatacctatatacaatttatattcaatattaaaaacatcttagcgtgatgttctactggttagatagtttcacccagtgtctcccgcccttcttccatcagggcatgggttcaaccccacctcctgcaccgttttttgacattttcacagttagcaggccggcatgacgtgcctgtaccatagttgtggcccgcgtgcatctagcccgtgtcgggcgtcgttacactgatttaat

SEQ ID NO: 113988 - DNA, 2607 bp, Zea Mays
gtgcttcccctcatcctccttcctttctcctccttccctctcactcctggcctggactctccctctaaaagcctccagctagctatcaaccctagcacgcaccacgcagcaggtcccttacatctatcgtcttcttcctccactccaatcgatcagcttaactagctgaggcagcgagctagctcctgaccactccactccacccgtccgtccgtgcacggcaccaattaattccatggcgctgtggtggtactgctagcccgacgtaccagcaagtcgtccccttgagattcaaggggaggatagctgcggcctaggcgtccttccgtccccagtccggcagtcccgagctgagtgcctgagcccccagtccccactgctgcaggagcaggacaggcactagctgatctgggtgcaactgcaagtaccaccacgcaccacgacggctgcacactgcacatgatcgggtcgcccaaagccgcccgcccgtgagatctgatcctgctgctgcctgttccgcttcaattctgacagcaccctagctgcctgcatgcgcgctcgcaagctgatgctgatctgatccaccaccaccaccacccatcacatcgtcgtccggattcaggagtgtgagggatctgatcttattgtcatcgatcgatcggggagatgatgctcaaggatctggcagcaattcagcagcatcaccaccagcagcagctggccgcggccgccgccgacgagaacatgtctaacttgacctccgcctccggcgaccaggccagcgtctcgtcccaccccgtcccgcctcccgccaagaagaagcgcagcctccccgggaatccagacccggacgcggaggtcatcgcgctgtcgccgcggacgctgatggctacgaaccgctacgtgtgcgaggtgtgcggcaaggggttccagcgcgaccagaacctgcagctgcaccggcgcggccacaacctgccgtggaagctcaagcagcgcaacccaaaggaggtggtgcgcaagaaggtgtacgtgtgcccggagcccggctgcgtgcaccacgaccccgcgcgcgccctcggcgacctcaccggcatcaagaagcatttcagccgcaagcacggcgagaagaagtggaagtgcgaccgctgcgccaagcgctacgccgtgcaatccgactggaaggcgcactccaaggtgtgcggcacgcgcgagtaccgatgcgactgcggcaccctcttctcaaggagggacagcttcatcacgcacagggccttctgcgacgcgctcgcggaggagagcgcgagggcggtgaccgccgccgcggcggtcgcgggccagcaccatccgggaccggccgggatgctcttctcgcaggccgccggcgggggcgacggcggcgcggggttacacctgccgccaggcgtgcttgacccgtcgcagacgctgggcggcggccacggcatgtcgttgcaagagctgtgcctgaagagagagcagcagcagcagcagcagttcgcgccgtcgtcgtggctcacggcgcaacatcaccagcaggagctggagctgcccggatcggccgtgttcggattggcgaggccgctagaccagcaggagtacatggggaactccacaacggagagcacggcgggcctcagcggcttcgtcgggttctcgccgtccgccgccggtggagcggcggcctcggcgcacatgtcggcgaccgcgctgctgcagaaagcagcgcagatgggtgcaacgctgagccgaccgtcgaaccagggacagatggcgggcactcacagcagcagcaccaccaatgctggcactggcaccgccaacgccgcagcagctgctgcaagcaacgtgcctggcactggcgctgctggtgccctcggcttcgggtcaccacatcactttggagcggaggagaggaccacccggccggctgatcgcgacgccggcaatggcagcggcaatgccgccgccgtagcggccggaggcggcaatgaaggcctcaccagggacttcttggggctgagggccttctcccacggcgacatactcagcatggccggtttcgacccctgcatgtcgtcggcgtcgccggcggcgtacgagcaagggcaccaccacccgagcagcaagcagtggcatgtctagtctagacatcattacatcgtcatggcatcgtcgtcagtactgatcagtacaatacatcatcatggcagctcgccatatatggatgaatcattactatatatattctgaatgagctgcagcacgtacgcatgcatggactttgctcgatcatattgggtaagtcggatcatcgatcgaatccacttcacttttttgcttggctcttattttgatgttcatttgggggtgtactacggttatgggcatttcagttcttatatataaacttcattcattcaagaggtgcaatatatatatggaatgtttttgctattatttatatatcatagtcaacaatccgtgttcttagccagaatatatgcatgtgtttgtagtatgtagctacttaatctgtaaagcttcgtagctaatttgtacgagaagctctactacgtactactcaagttc

SEQ ID NO: 113989 - DNA, 1280 bp, Zea Mays
ggtgccggtgccccgtgccccgcaccgggcggcggcggcgaacgacgggagcggagacaaaaatcaaatcaaccaacagcgacgtcagcgggcgccacgggacagcgtgcgtggtgatgacgccacggcgcatgctttcccgtcgtgctgacgtaggacggcggtgcagcagcgcaagtactgtacagcgttgcattgcctgtctgtctccatttcggtcaattgtgaggcaatcagatttctttcgccacctctccactcgactagtactagaccggctggcaccgcttcgtggggggtgacgtggcaccgcgctggcctccctttccgtcccggccacgtgacgcaacctccggccccacgcgtcctcgtcacagcccgcgcctgacgtcaccttcccctcacccggcgggcatatgatggtgtgccgtgcccggctatatatgtgctgcgggcacgcgacgcctttcctcgctccccgcagccggcaggcgaggtcgtccctttcccttccggtccttttggcccgctgtagctaataagtagtgtactccgtaaccagcagcagcatgcaggcggtgggcatccggcgtggtctgaccatcgacccggccggggaggaggaggcccccgcggcgcgcgtgtggcggctggtccgcgagagccccgtggtgatcttcgcccggcgcggctgctgcatggcgcacgtgatgaggcggctgctggcggcggtgggcgcgcacgccaccgtgatcgagctggacgccggcgccgcggaggagcaggagctggcggcggcggtcgagggcggcggcgtcccggcgctcttcgtgggcggcgaccccgtcggtggcctcgagggcctcatggggctccacctcagcggccgcctcgtgccccggctcagggagctcggcgccctctgcgcctagctgagctcctccggtgctccgtccgtctgtctgtcggtccgcgtgccgggcgcccggactcgcgaagattcgcagtcgcatgccatgtgctggctgtacctgtacatactactacgctacgctagctacagggggggaaacggcagtgcaggaggagcagccagcaagcaaagcttctgtttttctttttgtttttgtttttgctaatactgtactccagagattcaaatcgaaaggtgcgtggatgtagtttagctagcataaaactatggcacatgattgaattgcagtgcagtgcagccgtgcgtgtatagtagcgacaaattaaagccgattattattcttata

SEQ ID NO: 113990 - DNA, 336 bp, Zea Mays
atgcagacgcaaacaagcccacatgctcgctaccatccagcaggcagcagcgtcaccagcgtgtgcatgcgacgattacaattcagcagggccacggactggtcgaagctggagctggcagccgtacgtagcgggcagttagctagccacgtcaagggtcgaagacggcggcgccgcacctgcacttccacccgacgggctcgtagttggcgcagcgcgggcggaggcggcgctccgccgcggcgccggcgccggcgcgcacctgcacggccttgcacggcgcgcacgcgccgcacttgcggtcgcagcacggcggcctggagcccagcctgctaa

SEQ ID NO: 113991 - DNA, 1463 bp, Zea Mays
tgtttcagtcatattcccaagaaatatgctatggagaaattactaagatgcaaaaatatcacaattctcaatctccaatcacaagcatttaataaaatgctataaacaaaatgatctgggcaaactcacaaaataacattattcataataaaggaaatcaacagctaggttgttcgcaagaatgatagtttgttattgcaatcgtgatctatgtaggtgagaatggaactattgatggccaaggcattgtgtggtgggatatgtggaagaaaggtacactgccctatacaagacctcaccaattgatctatttatgtggtgggatatgtggaagaaaggtttgtgatggaggtgataaaaactttgtggtgcgaaagggcctctagcgtaatggttaaggcttccaagtagcaactccaggtcccaggttcgatctctctcgggggcgaattttgggcttggttaaaataatcctctcgttgtgtcccgcccggtctcgggggtcgatatcctgcgcgccaccctccgtctgggctgttgcagagtggcctgttgatcggcccgttaaggctgggggcagagttcggggttttttttttcggtcgggaccatgtttcggtctcttcttaatataatattgagagggcagtcttttcatcccagccggagccgagttgataaaaactttgtggtgatcaatcagaagggcattgaccctccatctttggatctctttgctagagcgggggtaatctctcctctatttggtggttacatgacctaagttcattttgaaccctgaatggatttagattttcatttgagaacgtgaatctcatgaagttaagggttgaagaaggcattgactgattaaaactgctctgaaatgatcatttatgctcagattattgctcttcgagctatcacgtggtggtggagctatcaattcagttgatgacttgactgaaaattgtctaggctcatctgatcttgtctatgagtatgttctcgtagaagaaaagtacacatttgtggggaatgtgaaaaatccttgctcttgtactatactgattaaaggattcaaggatgatgttctgttaagaacacagttgaggatgaagcagttgtgttgttatcatccgtaaatttctttgtccaggaattaggaagaataaatttgtgttgatactgtgaaggtaccaggccgacacaaatttatttgataaaatacgtgttcccaaatgtgtgtatgtacgatcaggatcgaataatttatgtcctgtcccaatgtacagaggcactaaggaaacctgtcgcggttcacagcgaacgggtcttgaactcttggctcgctcattttaatattattatgtaaatttcctatcaagaaacgttcctgtgacattacatcgagaagacgagaatcatgactgcagaaatacatctttattcactactgtatc

SEQ ID NO: 113992 - DNA, 986 bp, Zea Mays
tgtttcagtcatattcccaagaaatatgctatggagaaattactaagatgcaaaaatatcacaattctcaatctccaatcacaagcatttaataaaatgctataaacaaaatgatctgggcaaactcacaaaataacattattcataataaaggaaatcaacagctaggttgttcgcaagaatgatagtttgttattgcaatcgtgatctatgtaggtgagaatggaactattgatggccaaggcattgtgtggtgggatatgtggaagaaaggtacactgccctatacaagacctcaccaattgatctatttatgtggtgggatatgtggaagaaaggtttgtgatggaggtgataaaaactttgtggtgcgaaagggcctctagcgtaatggttaaggcttccaagtagcaactccaggtcccagattattgctcttcgagctatcacgtggtggtggagctatcaattcagttgatgacttgactgaaaattgtctaggctcatctgatcttgtctatgagtatgttctcgtagaagaaaagtacacatttgtggggaatgtgaaaaatccttgctcttgtactatactgattaaaggattcaaggatgatgttctgttaagaacacagttgaggatgaagcagttgtgttgttatcatccgtaaatttctttgtccaggaattaggaagaataaatttgtgttgatactgtgaaggtaccaggccgacacaaatttatttgataaaatacgtgttcccaaatgtgtgtatgtacgatcaggatcgaataatttatgtcctgtcccaatgtacagaggcactaaggaaacctgtcgcggttcacagcgaacgggtcttgaactcttggctcgctcattttaatattattatgtaaatttcctatcaagaaacgttcctgtgacattacatcgagaagacgagaatcatgactgcagaaatacatctttattcactactgtatc

SEQ ID NO: 113993 - DNA, 1491 bp, Zea Mays
tgtttcagtcatattcccaagaaatatgctatggagaaattactaagatgcaaaaatatcacaattctcaatctccaatcacaagcatttaataaaatgctataaacaaaatgatctgggcaaactcacaaaataacattattcataataaaggaaatcaacagctaggttgttcgcaagaatgatagtttgttattgcaatcgtgatctatgtaggtgagaatggaactattgatggccaaggcattgtgtggtgggatatgtggaagaaaggtacactgccctatacaagacctcaccaattgatctatttatgtggtgggatatgtggaagaaaggtttgtgatggaggtgataaaaactttgtggtgcgaaagggcctctagcgtaatggttaaggcttccaagtagcaactccaggtcccaggttcgatctctctcgggggcgaattttgggcttggttaaaataatcctctcgttgtgtcccgcccggtctcgggggtcgatatcctgcgcgccaccctccgtctgggctgttgcagagtggcctgttgatcggcccgttaaggctgggggcagagttcggggttttttttttcggtcgggaccatgtttcggtctcttcttaatataatattgagagggcagtcttttcatcccagccggagccgagttgataaaaactttgtggtgatcaatcagaagggcattgaccctccatctttggatctctttgctagagcgggggtaatctctcctctatttggtggttacatgacctaagttcattttgaaccctgaatggatttagattttcatttgagaacgtgaatctcatgaagttaagggttgaagaaggcattgactgattaaaactgctctgaaatgatcatttatgctcagattattgctcttcgagctatcacgtggtggtggagctatcaattcagttgatgacttgactgaaaattgtctaggctcatctgatcttgtctatgagtatgttctcgtagaagaaaagtacacatttgtggggaatgtgaaaaatccttgctcttgtactatactgattaaaggttagtttattcttgagaaatttctcttttctaatactctaattgagctatgaattgagtgtcgtttgacataattaggatctaatgaccgtaattgcaggattcaaggatgatgttctgttaagaacacagttgaggatgaagcagttgtgttgttatcatccgtaaatttctttgtccaggaattaggaagaataaatttgtgttgatactgtgaaggtaccaggccgacacaaatttatttgataaaatacgtgttcccaaatgtgtgtatgtacgatcaggatcgaataatttatgtcctgtcccaatgtacagaggcactaaggaaacctgtcgcggttcacagcgaacgggtcttgaactcttggctcgctcattttaatattattatgtaaatttcctatcaagaaa

SEQ ID NO: 113994 - DNA, 1944 bp, Zea Mays
tccaggtcgggggtccgtacgatgcaaaaaaatcgcgatgagtccaccacgactccaagcagctgcggacgcgccgctctaaccggagatccgttaagagtccgccgcccccatctcagcgcctgagtcagccgttctctccccgtgctcgcagccactggtttccgcgggtctagggttcgtggaggcagcgtggagcttagggtttcggcgggatgagctaccggaaggggttgaaggtttgggtggagaagggggaagggtgggtagaggcggtggtgacggaagcgaaggaccacgccgtcgccgtgctcacgagccagcgggaaaaggcacggcagaggacgatggcaactgtccagcgcacacttcaggcaatggatgaggacaacatcagagatgagtctagaactggaaggctcgtcgtcttggcggcgctggccgccggcgccatcagcatcggcaagcgcatgcccctgctggcgccatctcccccgtcatcttggcggcgctggccgccggtgccatcagcgtcggcaagactgtcatagatgagattttcatgttctgaagactgaattcaagatgatgggatgcttgtgatatcgacagttcctggttctccaccaaagctgtgcatcaaggctgttgcattagaaaacttctgtccaagagcattttcattgctgtcgatcgccggactatctgggttttgctaggccatgcagtgtcctagaaggcctattaattcaatttgcagcagactgaaagctaaagaagtccgtattagagtctgggctcatcaattagctgctcattctccagtacttcattcccttggtcccctacaactccgacctgactggctaattgctgctggagaaaggaacaaaggagaatggagcatgtagtggatgcgccaatgcaggtttcagttcctcaagtatatgttcctatcggacccctttgttcctcaagtccagatgcaaccagggcagccatcgatgtctgcgaacagggtttattatcaaagatctttggttagggagattgaagcccggttaaaagccaagtgtgacacattagctgatctatttgctatggatgaaagattgttttgagcacatttttagtaaggtctcgttaagcgccgcgtttgagcaccatgtccttccctggatgcacagaagctactgacttcgtggttacaatcgccctttgctttacctcctcccatgatggaaaggttgaggtgagaatggaactattgatggccaaggcattgtgtggtgggatatgtggaagaaaggtacactgccctatacaagacctcaccaattgatctatttatgtggtgggatatgtggaagaaaggtttgtgatggaggtgataaaaactttgtggtgcgaaagggcctctagcgtaatggttaaggcttccaagtagcaactccaggtcccagattattgctcttcgagctatcacgtggtggtggagctatcaattcagttgatgacttgactgaaaattgtctaggctcatctgatcttgtctatgagtatgttctcgtagaagaaaagtacacatttgtggggaatgtgaaaaatccttgctcttgtactatactgattaaaggattcaaggatgatgttctgttaagaacacagttgaggatgaagcagttgtgttgttatcatccgtaaatttctttgtccaggaattaggaagaataaatttgtgttgatactgtgaaggtaccaggccgacacaaatttatttgataaaatacgtgttcccaaatgtgtgtatgtacgatcaggatcgaataatttatgtcctgtcccaatgtacagaggcactaaggaaacctgtcgcggttcacagcgaacgggtcttgaactcttggctcgctcattttaatattattatgtaaatttcctatc

SEQ ID NO: 113995 - DNA, 1200 bp, Zea Mays
cgcgttcatccaggtcgggggtccgtacgatgcaaaaaaatcgcgatgagtccaccacgactccaagcagctgcggacgcgccgctctaaccggagatccgttaagagtccgccgcccccatctcagcgcctgagtcagccgttctctccccgtgctcgcagccactggtttccgcgggtctagggttcgtggaggcagcgtggagcttagggtttcggcgggatgagctaccggaaggggttgaaggtttgggtggagaagggggaagggtgggtagaggcggtggtgacggaagcgaaggaccacgccgtcgccgtgctcacgagccagcgggaaaaggcacggcagaggacgatggcaactgtccagcgcacacttcaggcaatggatgaggacaacatcagagatgagtctagaactggaaggctcgtcgtcttggcggcgctggccgccggcgccatcagcatcggcaagcgcatgcccctgctggcgccatctcccccgtcatcttggcggcgctggccgccggtgccatcagcgtcggcaagactgtcatagatgagattttcatgttctgaagactgaattcaagatgatgggatgcttgtgatatcgacagttcctggttctccaccaaagctgtgcatcaaggctgttgcattagaaaacttctgtccaagagcattttcattgctgtcgatcgccggactatctgggttttgctaggccatgcagtgtcctagaaggcctattaattcaatttgcagcagactgaaagctaaagaagtccgtattagagtctgggctcatcaattagctgctcattctccagtacttcattcccttggtcccctacaactccgacctgactggctaattgctgctggagaaaggaacaaaggagaatggagcatgtagtggatgcgccaatgcaggtttcagttcctcaagtatatgttcctatcggacccctttgttcctcaagtgagtgatggcgctggggttgtcttactaagcgagacatttgcactgaacaattgcagttccgctgaactcatagagttcatgtcaatctctctattgaactttaatttttgaaagtttggtacagagattttcataaaaaaaacagatattgcctgattctgttggcacctgatttcctgaatttcatttcgaaaaaagagaagaaacagata

SEQ ID NO: 113996 - DNA, 112 bp, Zea Mays
ttgaaatttacatattacaagaatatattgaaaggaaaaggacaaatttatagatttacagattacaagaatatattgaatgtcctataagtgatagactaagcaaaccaaa

SEQ ID NO: 113997 - DNA, 3106 bp, Zea Mays
gcggggccacttgtgcgccactgccgttgccttctatccggcgccatctccaccgtccactgccccatccgcagttccacaccacactacgccgccgcagccaggcagacagaggcagccccctcatggctgcccacgccgtcaccccgctcaccatctgctgcctccgccgcggcgttcccctcaaccacagccgccgcctcctcgccgtagccgccgcagcgccagaatcgcccgcgcctacccccgcgccatcccagttgccgcttcccccggttcctcctcgcaagggctacttcccgaagcgtggcgagacagtcgagctcacctgcgaggcgctcgcctttaagggcaagggcgtctgcaaggtcgcgggctccacgttcgtcctgctctgcgatggtgcgctccctggcgagcgcctcatcgcccgcgtccgccgcctccgccgtggcgcctttgccgaggccgccaagctcaggaccctcgagccacaccacgacgccatcgaggcgccctgccccctcgccgctgactgcggcggctgcaagacccagtctctcgcgtacgccgcgcagatccgccacaagcatcaccaggttcgcgacttgctcgtgaactttggcaagtttgatcccaagcgcctggagagctcggagccggatgatatcctcaaacccaccgtgcagtgtgacgagatattccggtacaggaacaaaatggagttctcgtttgggacgaagagatgggtgcaaaaagagttgaaggacaagggtgaggaggtggaggtgaagcaggaaacgaatgaaactgatggatatgcgcttggactgcacgcaccagggttcttcgacaaggtgctacatgtgcagaaatgttttctgcagagtgagccagcagataaggttcttgcagttgttcaagaaacctggatggatcctgccataggcctcacaccttatgatgtccataagcatgttgggtttctcaagcatctgatgataagaactggaagaaacatcagcactggaactccagaagtaatggtcaattttgtgacgtcatgttataagccagatgtattgatgcctcttgttgataaaatcacaaaaatacctgaagtggttagtgtcataaataatgtgaactcgtctgttggtaattcatctgtgggtgaacaagaatatactttgtacgggaagccaaacattacagaaatgttgagaggacttgcgttccagatatctgccaactccttttttcagactaatacaaaacaggctgatgttctttacaagcttattgaagattctgctgggcttaaaggagatggctctgaaattgttcttgatctgttttgtggaactggaaccattggtttgacctttgcccgaagggcaaagcacatttatggatatgaagttgtccctgaagccattgaagatgcgcgaaagaatgccaagttgaacggtatcaacaatgcaacatttgttcaaggggacctcaataaaatcaatgaatcattcgggaaggaatttccaaagcctgacataatcatctcagatcctaatcgccctgggatgcacatgaagttaatcaagtggctgttagaagttaaagctcctcgaatagtgtatgtctcatgtaatccagctacttgtgctcgggatttggactacctatgtcatggcgtggaggagaaagatttgagaggattctatgaactgaagagtgtaattcctgtggatatgtttcctcatactcctcatattgagtgtgtatgcttattggagctgcgttgattttcagttttggtcaggctagtaatcaacctaggaagagatgcaagccttgaaaagttagtgggaagagaagagaaaaaggaagagagcataccagccaagccatctcgtttctcaaccaaatcagtgcagactcggcatcatcatcacatgcactcaagaaaatttgcctgttgtcaaggtccttgaagacattataggctttcgctttttcctcctttgtaacttccattgtaccaataatggatatgcacttcttgattgagaagtctgcaacttgactcacttccttttcctccctcccttttgctagttgtgtggcttcttccttagcttgcttcgttctcatgtcaatgtatcttcccattatcccttctaggttatcgccctttttatgcctctttgtccttgtttcttcattgttcccttttgtagcagtagtccttctctgcggcactggatcatgccttaaacctgttgcatctcctgcctcaacaacatggacatcatcttcttcatgtgccggcaaggtttcttccacttcatcttgttcatgttctatgttgagaaactcatctctatttcctacttgagtaagatctggaagttgggtggaggtgtagttgtaggtcccttcagatgtttgccctgcacaattatgttttactaaaaagggtagacaacataacacatattggaaagcatggccattgtaatgagactaaccatcataaagctcccccaaggcctcatatagaggaaaagacttgttgcagaattttttagccttaggatgagaagtcagtatatttttccataaatctgggtcagccgtaatccttcctgtcttctcatcaaaatgagctccactttgattctttgcatcctttagcaacctatagtcccttttcaactctctttccttatcttgtatttgtgtctttgtgaaatagacatattgttctctctgatgaaattccttgacaattttgttccatgcttctgttgtccatccattttgacccctataatcagctgtcttgtgctcatgcaagaggtccacaagagtcttctctagagttgagttccaagcggctcttaatttctctacacaagacaaggaagaaacattactagtagaattccaagaggcgcttaatttctcctaagtctactttcataccttttggagaacctccatgttttcttggatcaccagctttaggagaaggcttctttgttgcactttttgataagagcatgttgattcttggagaaccccttccaaacatgttaactaatat

SEQ ID NO: 113998 - DNA, 2110 bp, Zea Mays
gcggggccacttgtgcgccactgccgttgccttctatccggcgccatctccaccgtccactgccccatccgcagttccacaccacactacgccgccgcagccaggcagacagaggcagccccctcatggctgcccacgccgtcaccccgctcaccatctgctgcctccgccgcggcgttcccctcaaccacagccgccgcctcctcgccgtagccgccgcagcgccagaatcgcccgcgcctacccccgcgccatcccagttgccgcttcccccggttcctcctcgcaagggctacttcccgaagcgtggcgagacagtcgagctcacctgcgaggcgctcgcctttaagggcaagggcgtctgcaaggtcgcgggctccacgttcgtcctgctctgcgatggtgcgctccctggcgagcgcctcatcgcccgcgtccgccgcctccgccgtggcgcctttgccgaggccgccaagctcaggaccctcgagccacaccacgacgccatcgaggcgccctgccccctcgccgctgactgcggcggctgcaagacccagtctctcgcgtacgccgcgcagatccgccacaagcatcaccaggttcgcgacttgctcgtgaactttggcaagtttgatcccaagcgcctggagagctcggagccggatgatatcctcaaacccaccgtgcagtgtgacgagatattccggtacaggaacaaaatggagttctcgtttgggacgaagagatgggtgcaaaaagagttgaaggacaagggtgaggaggtggaggtgaagcaggaaacgaatgaaactgatggatatgcgcttggactgcacgcaccagggttcttcgacaaggtgctacatgtgcagaaatgttttctgcagagtgagccagcagataaggttcttgcagttgttcaagaaacctggatggatcctgccataggcctcacaccttatgatgtccataagcatgttgggtttctcaagcatctgatgataagaactggaagaaacatcagcactggaactccagaagtaatggtcaattttgtgacgtcatgttataagccagatgtattgatgcctcttgttgataaaatcacaaaaatacctgaagtggttagtgtcataaataatgtgaactcgtctgttggtaattcatctgtgggtgaacaagaatatactttgtacgggaagccaaacattacagaaatgttgagaggacttgcgttccagatatctgccaactccttttttcagactaatacaaaacaggctgatgttctttacaagcttattgaagattctgctgggcttaaaggagatggctctgaaattgttcttgatctgttttgtggaactggaaccattggtttgacctttgcccgaagggcaaagcacatttatggatatgaagttgtccctgaagccattgaagatgcgcgaaagaatgccaagttgaacggtatcaacaatgcaacatttgttcaaggggacctcaataaaatcaatgaatcattcgggaaggaatttccaaagcctgacataatcatctcagatcctaatcgccctgggatgcacatgaagttaatcaagtggctgttagaagttaaagctcctcgaatagtgtatgtctcatgtaatccagctacttgtgctcgggatttggactacctatgtcatggcgtggaggagaaagatttgagaggattctatgaactgaagagtgtaattcctgtggatatgtttcctcatactcctcatattgagtgtgtatgcttattggagctgcgttgattttcagttttggtcaggtaaacccactggagccttgtttgggtgacgagtattcacctcaatccatataaggcattgttcggcactctagtatttaatacatattgggatccaatacatggtgggattgagtgaatccatcccatgtcacttaaaccatgtgtgtttcaattacagctgagatttaatacatggctaattttccattgtttagttacaccacatggatacattaatttgttgcatgtatttaaaaacatcagtgtccatcatattaggtctctgaagcggatgaaatttgaagcatc

SEQ ID NO: 113999 - DNA, 269 bp, Zea Mays
acgccgtcaccccgctcaccatctgctgcctccgccgcggcgttcccctcaaccacagccgccgcctcctcgccgtagccgccgcagcgccagaatcgcccgcgcctacccccgcgccatcccagttgccgcttcccccggttcctcctcgcaagggctacttcccgaagcgtggcgagacagtcgtcctgctctgcgatggtccgccgcctccgccgtggcgcctttgccgaggccgccaagctcaggaccctcgagccacaccacga

SEQ ID NO: 114000 - DNA, 122 bp, Zea Mays
cttcacgatgtcaaatcgaattccttattaaacccatgctccacaaaatcactcatcaaacaaagtgaaagtatgctccaacatgatgtgacaatcaaagtacttaaagggttccaatttac

SEQ ID NO: 114001 - DNA, 1667 bp, Zea Mays
ggctgttaaagatcaggagattattaataaacacacggacgattatctgaaacgtgcatgccatggctgctgcaggacgtggtcatggagccccagcccgggtcgccgctcttctctccaccaagcacagcgctatgggacaatgccagggcgggaacaccgtcggaagagatggcagcgccggacgagccaaaggaagagggcaccgaactcgagccggccagaaagtcgacctcctcctcgtcgtcgtcgtcctcctcctcgtccgcgtcgtcggctgatatcccgtgccacatcgatgtcgtcgagctcatcaacccgttggcagcggcgctgcccgaggacgaacacggcgcggtggtcaaaacggcccactcggcgacgctggaggacgaacgagccgctcccgccgtacacagcgccgaggccaagccggcggacggcgcgatgacgaaggatgtacaggccgctcccgccgtgcacagcgcggaggccaagccggacgactgggtgacgtggccggatccaccgcctccggccgtcgacgactcgttcgcgtcgtcggacggccgcggcgcggcgcggccggaggcgccgaaggtccagacggtctcgccgaccagcctcggagcggcggggtccaacaacgggtacgatccggggaggatcccggcgtccgtcttccagcacaggacgtcggtgtcgcaggccgactggagcatggcgtcgaacgagtcgctcttcagcatccagggcgccagcgacctctaccccggcagcaggtcgcacttcgacttcttctacgacgaggccatggcggaggcggactccaggctgccgtccctcgcggagggggcggagcccggggacgcgcccgagtccaaggagttcgcggcggcgccgcgcagcgcggagccagccgccagcaccgggtgcggcaacgacgccaagagagccgccgtgttccggagccacgagagcggctccggaagcagctccagcaacttctccttcgccttcccaatcaatcacctgcatgcagactggcggagacgtcgccgaggaagaaggacctcgtcaacaccgcgctgtaccagccgctggagaaggagtgcgaacagccgccgccgtcgccgccgccgcagcagcagcagctcgagccccccgtgtcggccttcatggagatgacgacggaggaggagcggcggagcagcgacaccgggtgctgctgctgcggctgctgctggttcgattgctcctggtggtaccggtgccagtggtggcgatgcggctgctgcagttgctcctgccctagcttctgccggtgcacctggtgcctctgcacgtgacgtgagagatcgaattggcgggagatcactttattggccggaactcgatttgcttcgacaagattcagaagccttttttcttgccaaatgggaaattagatgggtaggcaccgtcccttgagatgtactgtagatcttattcggcacctcatgtttgtgttttcggagaggattatttggcagacagggtttggcatgtgcacatcagctgatacagagtatacagtacagtgtacaatcttgagaaggaatacaagttcaaatgcataacttcgctaggttggtataatgctaacctcacctgattaatggtcgatt

SEQ ID NO: 114002 - DNA, 1678 bp, Zea Mays
ggcggtgccgtccttaggtgcagcggctgcgcgcagccccggtccctcgtcctctcgtcgcaggtcgcagccccgtcccccggcccgcctcccctcgtgttggggctcctcctgttcttcaggacgtggtcatggagccccagcccgggtcgccgctcttctctccaccaagcacagcgctatgggacaatgccagggcgggaacaccgtcggaagagatggcagcgccggacgagccaaaggaagagggcaccgaactcgagccggccagaaagtcgacctcctcctcgtcgtcgtcgtcctcctcctcgtccgcgtcgtcggctgatatcccgtgccacatcgatgtcgtcgagctcatcaacccgttggcagcggcgctgcccgaggacgaacacggcgcggtggtcaaaacggcccactcggcgacgctggaggacgaacgagccgctcccgccgtacacagcgccgaggccaagccggcggacggcgcgatgacgaaggatgtacaggccgctcccgccgtgcacagcgcggaggccaagccggacgactgggtgacgtggccggatccaccgcctccggccgtcgacgactcgttcgcgtcgtcggacggccgcggcgcggcgcggccggaggcgccgaaggtccagacggtctcgccgaccagcctcggagcggcggggtccaacaacgggtacgatccggggaggatcccggcgtccgtcttccagcacaggacgtcggtgtcgcaggccgactggagcatggcgtcgaacgagtcgctcttcagcatccagggcgccagcgacctctaccccggcagcaggtcgcacttcgacttcttctacgacgaggccatggcggaggcggactccaggctgccgtccctcgcggagggggcggagcccggggacgcgcccgagtccaaggagttcgcggcggcgccgcgcagcgcggagccagccgccagcaccgggtgcggcaacgacgccaagagagccgccgtgttccggagccacgagagcggctccggaagcagctccagcaacttctccttcgccttcccaatactggcggagacgtcgccgaggaagaaggacctcgtcaacaccgcgctgtaccagccgctggagaaggagtgcgaacagccgccgccgtcgccgccgccgcagcagcagcagctcgagccccccgtgtcggccttcatggagatgacgacggaggaggagcggcggagcagcgacaccgggtgctgctgctgcggctgctgctggttcgattgctcctggtggtaccggtgccagtggtggcgatgcggctgctgcagttgctcctgccctagcttctgccggtgcacctggtgcctctgcacgtgacgtgagagatcgaattggcgggagatcactttattggccggaactcgatttgcttcgacaagattcagaagccttttttcttgccaaatgggaaattagatgggtaggcaccgtcccttgagatgtactgtagatcttattcggcacctcatgtttgtgttttcggagaggattatttggcagacagggtttggcatgtgcacatcagctgatacagagtatacagtacagtgtacaatcttgagaaggaatacaagttcaaatgcataacttcgctaggttggtataatgctaacctc

SEQ ID NO: 114003 - DNA, 1305 bp, Zea Mays
ctcttgtcttcttcctcacccttcctcccgcctcccctacaaattgcctcgcctgtccgtccatccctgtcgccagcccactccttgcacagttgcacttgccaccgtatcgaccaacaactggtacgtacgagcgaccttggctagcaacaaccgggagaggagaggagaggagggatggttcgctcttccgctgccacggaggtgggccaggtgccggacgggaggccgctgccggctcccgtggccaccggcggcggcggcggcggtaccggcacgggaggcgggcgggagccggagggcctgccgtgcccgcgctgcgagtccgccaacaccaagttctgctactacaacaactacaacctgtcccagccgcgctacttctgccgggcctgccgccgctactggacgcgcgggggagcgctccgcaacgtccccgtcggcggcggcacgcgcaaggccacgcccgccggccgccgcaagcgcgccggcccggcgcccgcaaccgcggcgccgcctgcgcctccgcctccgagcgcgctccacggctcgctgctgcgcccgtacggtgggctgtccttcgccgcgccggccctggcgtcgccgctcgccgccgtggacccggaccgccggctgctggacctcggcggcagcttcacgtcgctgatcgcgccaggggccgacgtcggcgtccacttctccgccgagttcctcgtgggcggactcgcgccggcggccctgcctcgcgcgaccgcctctgtccctgctctgccgccaccgccaccgcagcagcatcagcagccgacgacggtgtcccaggcgttgccggaaggcctgttctggagcatggggtggccggacctgtccatctaagagctccatgcctccgccggtgtcccaggcgcgctcggtgcatcgtccgtcaccggtgcccggctaatgactgctgcgtgcgggtgcatcatcgctaatctagctttttctctttctctcttttagctgtttgaattaacagtagactgtagtgctgcatccaggtgatctttttgaggggggcaagttgtttagtcatcatgaaacttttccagtcaggaaggaactgtgagagagtgatctgatctgctgaggatgtcatgaaaaactctgcatgctcggttgccttgcctgcatgaggacctgtgctgcagtgcgtgagcaattgagcttgaccaaccgataccatcagcagattgttttttggggggtcgaaaacgttgagctgattggtgctgtgctgttttctgtgattttcctttcgcgtgatct

SEQ ID NO: 114004 - DNA, 1546 bp, Zea Mays
tttcgccctcgccccgtctgccccattccaataacaggaatacgtcaggtgatagtgtttgatagctagagttaggtgttagctgagaaaatataagcacaaattgtttttttactcatttgccgtggacatttcagcagatagaggaagttagccactgtgtgtttgacaaaaaaaaggcaaaggaaaacctcatggtaacatcaattatagcccacgtaatgaagtccacccggcccatctagccctttgtgtgagccgccgtcgcgcactcgccgctccgcccctacgcgcagtcgccacgggagctcgttcctctccggcggcagcaccctccactataacccaacccgcaagaaaaaacccgcagcagagaagaggagtcgccgcgaccgagagctccagagcacgcccccgccacagcctccgacgatggatccaaagatgacagaggtgacccagatgttcgcccgcttcaaggcggcctacgcccgcaacgacctcaacacctgcgtcaccctcctctcgcagctcaaggtccatctcacccaattccccagccttccgcccttgtttcagcagacaccgaacattgtggaggagctcaaacttgcaagggacatttatgagcatgctgttgttttgagtgtgaaacttgaggaccaagatgcgtttgaacgcgatttctgccagctgaagccttattacatggatacatgtggcataattcccgcctcgccagaggagtacccaattttgggactcaatcttctgaggctgttggttcagaatagaattgccgaattccacactgagctggagcttttacctgccaaggcactcgagcatccttgcatcaagcatgctgtagagcttgagcaatccttcatggagggtgcctacaaccgagtgttaagcgctcggcaggctgtgccacatgagacctacgtttacttcatcgaccttctcgccaaaacagttagagatgagatcgctgggtgcagcgaaaaggggtatgattctctatctgtgagtgatgcaaagcaaatgcttatgttcagttctgaccaagatctgcacgagtacatcactgaggagcacccggaatgggagattaagaacggtgctgtcttcttccagaaggcgaaggaatcacagccctgcaaggagatcccatccttgcagcttatcaaccagacgctcagctacgccagggagctggagcgtattgtatgatttaaaccaatccctggtggttctttccccccctgtggccgcttggcatggcttgtactgtcctttgcatttgggatgatctttgatcgcagctctcatctgactgaaacatcatgtgaatctctgaagggctcagtctctccggcattggtctgttaactccatttgtatttcaccacattaactgcattgcttgaaaaatgccggcattcactgctgctgtgaacttttgatgggcttgatattgaattactgcctcggaattccactgacctctgcaggcttctgacgtcacgttttcttctgcatc

SEQ ID NO: 114005 - DNA, 502 bp, Zea Mays
tcgaaagcgcaggagagctgcgcgaaaatatattaagaaggggaaaaaggtccaaaaggaccccaagatacagataaggccgccctacggcggccaataacaagcataaatggaaccatccatgacaaaaaacactgctaccaaaacagcactacagctatctagctaacaggtagacctgggatgggggcagtaagcaaggacagcttctttgcaccagctataacccaaagatcaatctccaaaccaatgcttctaatagcaacagccacactaggactcttattgtcaaaaacgcaatggtggactcttattgtcaaaaacgcagccattgcgatgtttccaaagggtccaaacaccaagaatgacaagagaattaagaccatttcttgcaaccccaggaatcttggtgctcaagtcttgccaccaatccataaaaaccccttcacaggactgatgggccaagtgttgtagatttacaagaagaagcagcttgaaccaa

SEQ ID NO: 114006 - DNA, 173 bp, Zea Mays
atgcatattacagtaatcacattcgatacacacactttggagataaagagcggaagactttacaaacattctttaccttttcaaaactcaagttttacatgtttcgaaagagtaatatttattacaagtcctgatatactcaaagtgcataacttattacaaaagcaggaagg

SEQ ID NO: 114007 - DNA, 173 bp, Zea Mays
atgcatattacagtaatcacattcgatacacacactttggagataaagagcggaagactttacaaacattctttaccttttcaaaactcaagttttacatgtttcgaaagagtaatatttattacaagtcctaatatactcaaagtgcataacttattacaaaagcaggaagg

SEQ ID NO: 114008 - DNA, 1527 bp, Zea Mays
gcttgggccaaagtaagaatttttataaatacatacatatatgtgtccctcctccatctgagaggcgatagttattgttacaaaatcgatgttaccatcaatcgaaaaaccataaaagaatccccctgtataactactctgtgatttaatctgtccaatgacgtaatttaccctccaaaaaatttacttcgtatgctgctgctgctgctagtgctgctgcgtcgacgctgtcgtttccttgttccacgtgtctacgaagcggctcatcctagcgagtgcaacatccagcgtgtccaggctcatgttggcgaagcacaccctgaaccagccaggctccgagcaatggcacgacgagcccggcgagatgttgagcttcgcctcccgcagcatccggtcccacaggcggagctcgccggcgacggtggtggcctcgccgagcagccgcctcatgtccatccacacgaacagcccggcgttgccgcggaggcacggcacgcccgcgcgggccagcccggcgacgacgtggtcgtgccgcgcccggaggcgctggcggttggtgcggacgtaggcgtccgcgaacccggcgtccgagagcatggcggcgagcgtcttctgcgtctgcgacgacacgagcgtgaagctggacatgcggcgcgccgcggtgaccacggcgtcgttgtacgagtacacgacgccgacgcggaaccccgggaggcccaggtccttggacaggctgtacacgatgtggacgcgctccgcgacgccggggtcgccgcgggactcgaccagctccgccacgctgaccaggtccggcgccgcgaagaccgagccggagtatatctcgtcggagatgaggtggatgttgttgcgggccacgaagtcgagcacgtcctcgagggccggccgcgtcacggtggtgcccagcgggttggacgggttggtgagcaggacggcgcggacgcgcgtccccgctgcctcggcctcctcgtacgccgcctggagcgcggcggccgtgacctggaacccgttggcgctgtcgcagtgcaccggcacgatgttcacccccgtcctccaccgcaggtctctgtcgaaactaggatagtaaggagtagggatcagcagcgcgtctcccgggttggccaggacgaacgtgagcagctcgttagctgccgtggcgccggcggtgagcacgatgcggtcggggtcaaaccgggccttgccgcccctaaccttctccatgaagttggccatcgcctttctgaaggccttgaggccgtggtagtcctggaacagcgcgttgtccctgaagctggcgacgccggagccggagccgccccagcccgcggcctccgggtggtccctgaggtacccctcgaggaggtcgaaggacacctggttctcggcgaggcccatctgaatgacgccgccggggttggagacggcgtcgtaggggttctcgtcgtaggctttccacccggcgaagtagggcgagtcctcgccgtggaggccggaagtggccacctttga

SEQ ID NO: 114009 - DNA, 1793 bp, Zea Mays
atagtcatgtaacctgccgcctggcccctacattcaacggtcatctccgctccgctccgctcctccgctccacgccgccaccgctcctccgctcctcgcggctcaaacggtcaaatcgcatatccacaggaaaccccaagcggcggccgtccctgctgcggctctgcctccctctgctctccgattcgagcggattccatggccagagatgacgacggcgcgcccgcgcccggcgttccgggccaggtgtacctgcccgcgtggcgccgcgcgtacgaccgactcgtgaagatgctgcgccaggcgtacgcgcaggccgaggagctctccgtcgagcgcgagcatctcatctccgagctccagttcctgcagagcgccagccgcgagcgccaggagatctcccaggtccgcctccagcagatctgcaaggacaaggagctcagcaagagagtccttgaggctgagacggcggcgcgtcttggcggcaaggagcttcagattcactgccatcagaaactcgcagaacttgccgagagtgatttggagaacttcaaaagttgtatttcgaatttggctgctgaaaatactgagctaaaggaaaaactgaagatggttgaaagtcaggtgcagattagcaccgacaattcagatcacgagaaaagtgggaaatatactaaggaagagttacagaaattaaagaaagcttacaagacaatgagatcagaaaaggacaaggaaatttcagcattacaagcagaaaagaattttgtttggaaccagctcaaaaatatggaaaaagattacactggaactattaagagcaagcacatagaggtaaagcaggctaccgaagcggcacaaaagcttctacagaatgtagatgagctgcaagcggcagcccaaaagaaggatggtgaaattgataaattacaaatagaggtgtcaaatgccaaacagaggatctcaattcttgaggatgagctgcaaaacttgcgctccttggttaaggataaagatcataaaactggtaaaaatgaagatggtgaaccggagactcggaggatgttgaagaaggatgctaataaggcaaacagaaaatctaagtctgaatggctacctttagaggatatatcaagaacttcccaggtcacacctgataggcgagaagtgaagactacaagagcacttgcgtctgagactaatcagaagcgcaagcgtagctccttcaagtcctccatgtcgtgtatcttcgaacgctaggtgccgaaaggcatcaaaactgtgtctgcacaactcagcccaaggagtcttcactttcatgagctgagctgtggttgtcaagccatggccatccgagatccacccatgctaaacgttaagcgagatgcgcgtcttgatgggcttcagcttcacccccatgctctccggtgacagaagctcgggtgatatgcagaacgggctcagtgtgctccgggggctgctttcctgctgcgatggcctgtagagcccgtaccccatgaggaagtattccatcgggatcaccatcgcatggggctgctcttctgtgacaagtgaaccacaagcctgaacctgcacagttttggccacgaaaaaccaccttggccatcagccgttttactcctgtgtgtactgaagggatcaagttttttgaactgtatgttacctcgactagagcgcagtatctccggtccagctttgtggtcatgtggacagcgtccgcatggaactgtgagttttctccaacaaagatcagcgtccggcacttgagcttc

SEQ ID NO: 114010 - DNA, 1708 bp, Zea Mays
atagtcatgtaacctgccgcctggcccctacattcaacggtcatctccgctccgctccgctcctccgctccacgccgccaccgctcctccgctcctcgcggctcaaacggtcaaatcgcatatccacaggaaaccccaagcggcggccgtccctgctgcggctctgcctccctctgctctccgattcgagcggattccatggccagagatgacgacggcgcgcccgcgcccggcgttccgggccaggtgtacctgcccgcgtggcgccgcgcgtacgaccgactcgtgaagatgctgcgccaggcgtacgcgcaggccgaggagctctccgtcgagcgcgagcatctcatctccgagctccagttcctgcagagcgccagccgcgagcgccaggagatctcccaggtccgcctccagcagatctgcaaggacaaggagctcagcaagagagtccttgaggctgagacggcggcgcgtcttggcggcaaggagcttcagattcactgccatcagaaactcgcagaacttgccgagagtgatttggagaacttcaaaagttgtatttcgaatttggctgctgaaaatactgagctaaaggaaaaactgaagatggttgaaagtcaggtgcagattagcaccgacaattcagatcacgagaaaagtgggaaatatactaaggaagagttacagaaattaaagaaagcttacaagacaatgagatcagaaaaggacaaggaaatttcagcattacaagcagaaaagaattttgtttggaaccagctcaaaaatatggaaaaagattacactggaactattaagagcaagcacatagaggtaaagcaggctaccgaagcggcacaaaagcttctacagaatgtagatgagctgcaagcggcagcccaaaagaaggatggtgaaattgataaattacaaatagaggtgtcaaatgccaaacagaggatctcaattcttgaggatgagctgcaaaacttgcgctccttggttaaggataaagatcataaaactggtaaaaatgaagatggtgaaccggagactcggaggatgttgaagaaggatgctaataaggcaaacagaaaatctaagtctgaatggctacctttagaggatatatcaagaacttcccaggtcacacctgataggcgagaagtgaagactacaagagcacttgcgtctgagactaatcagaagcgcaagcgtagctccttcaagtcctccatgtcgtgtggtaaccagagatgttacacaaggcttctgcaagttaaagctgctgtgtcacctgtgctcctcccgccaagtttcactgttccaaggctaaaaaccccacctcctccccaatcggatgaaatcactagcagctgtagtctgatgtgctgacaattgaaattgtcccaacacgccctactctgacatgacaggtaggtgaggctaagtctatcagttggtgctgcagagcagcattgtatagttgattaactgtgtctgtagcatatttattctctcatctctgtgttggagtgcttgcaacatattgggtgctgtgaaacggatacggaaggtgtccatgtgtgttgtttaaggaacatatgacttgctggtagaacataacaacagcgtacttttgtgattcctgtgaatgaatgcagatcataaaactgtgaaagatgcaaagttcttttttttttgtttg

SEQ ID NO: 114011 - DNA, 1516 bp, Zea Mays
atagtcatgtaacctgccgcctggcccctacattcaacggtcatctccgctccgctccgctcctccgctccacgccgccaccgctcctccgctcctcgcggctcaaacggtcaaatcgcatatccacaggaaaccccaagcggcggccgtccctgctgcggctctgcctccctctgctctccgattcgagcggattccatggccagagatgacgacggcgcgcccgcgcccggcgttccgggccaggtgtacctgcccgcgtggcgccgcgcgtacgaccgactcgtgaagatgctgcgccaggcgtacgcgcaggccgaggagctctccgtcgagcgcgagcatctcatctccgagctccagttcctgcagagcgccagccgcgagcgccaggagatctcccaggtccgcctccagcagatctgcaaggacaaggagctcagcaagagagtccttgaggctgagacggcggcgcgtcttggcggcaaggagcttcagattcactgccatcagaaactcgcagaacttgccgagagtgatttggagaacttcaaaagttgtatttcgaatttggctgctgaaaatactgagctaaaggaaaaactgaagatggttgaaagtcaggtgcagattagcaccgacaattcagatcacgagaaaagtgggaaatatactaaggaagagttacagaaattaaagaaagcttacaagacaatgagatcagaaaaggacaaggaaatttcagcattacaagcagaaaagaattttgtttggaaccagctcaaaaatatggaaaaagattacactggaactattaagagcaagcacatagaggtaaagcaggctaccgaagcggcacaaaagcttctacagaatgtagatgagctgcaagcggcagcccaaaagaaggatggtgaaattgataaattacaaatagaggtgtcaaatgccaaacagaggatctcaattcttgaggatgagctgcaaaacttgcgctccttggttaaggataaagatcataaaactggtaaaaatgaagatggtgaaccggagactcggaggatgttgaagaaggatgctaataaggcaaacagaaaatctaagtctgaatggctacctttagaggatatatcaagaacttcccaggtcacacctgataggcgagaagtgaagactacaagagcacttgcgtctgagactaatcagaagcgcaagcgtagctccttcaagtcctccatgtcgtgtgtaagtatcccgttaataggctcatattgcactgctcgcatgatcaattagcaacacttttcatttgttattcatgtatggtcaatgacaatgttgttttattaagtgaatttggtctgtttttcaaatgtgcataaacaaatagactaaatgttttagctgacctagagtttatctaaaagactctgataggctgtatgtatgggttctttcttgctgtaaatatggattggtaatgaattgagaaattaggtttgctctgtattatttc

SEQ ID NO: 114012 - DNA, 528 bp, Zea Mays
aaggttggagaaaccgtcgcctttgagagaaccggttggcagctcattgctctcgtgccatctcggttccgttgcgggcgtagagagagccggcatcggctctggatctctgtctgctccgtcccatccttcgcacaccatgtaccctagcgagatggcagacgggtttcccgaacagatctttatcgttttcggatttcagattcgtctcttccgagtgagaactgggcagggccacgcagttttctttcgtgttcacggtggtcatcggcaatcccagacgagttttcgctcggatctgtgagtctcttttggaagcccccgtcgatccgcctctcttggatcggcttttagtttgatctgctgattcgcgtccatggcctccataatcccggatttacttgcttagctgttcttccgattcatgggaggccgagatcgatgttccctgggagtttcgctgatagcgccttcttccccgtggaggtgcttcattagtaactcaccacacattacaactgtttcttg

SEQ ID NO: 114013 - DNA, 1719 bp, Zea Mays
tttctcccctctccggtgtcctgtccttccctccctgccatattttaagcagggccgaggcgagctcccagatgcaaacatcctcctctcctcgcagacatcttatcccctcccgatcgaggcccccgtttcctcctcctccggccaccgcacctagctgtcttaacttgccgttcgcagcctcacgcccatggctaggaagtgctctagctgtgggaacaacggccacaactcgaggacctgcagcgggcacggcgccgggggcgggggcgtgaggctgttcggggtgcagctgcacgtggggtcctcgcccgtggccatgaagaagtgcttcagcatggagtgcctgtcgtcgtcggcgtccgccgcgccggcgtactacgcggccgctctcgccgcgaccaacagcgcctcgccgtcggcctcctcctcctcgtcgctcgtctcggtggaggaggcccccgagaagatggcccacgggtacctctccgacgggctcatgggcagggcggcgcaggagaggaagaagggtgagttccacggcccgggatttcatcaaatcttttatatagaacagaacagaatagaacaacaatactcctgttccggcagcttgtttgagctaagcaagtctgattctaaaaaaaaaactctcctcgccttcttgtctgggtatcaccaggcgttccatggacggaggacgagcacaggcgattcctggcgggcctggagaagctcgggaagggcgactggcgaggcatctcccggcacttcgtgacgacgcggaccccgacgcaggtggccagccacgcccagaagtacttcctccggcagagcagcctgacgcacaagaagcgcaggtccagcctcttcgacgtggtacgttacgtcccgtcccgtcccgtccgtccgtcgccacgctccctccatgcgagacgtgctgtaccagccctggcgtgtgcgtgtctgattcgcgaacctcttccgtttcaggtggagaacgccgagagggcggcgacgagctccatcaagggcatggagcgcctgcggctcaaggacgccatcacgaccgcgaccgcgactggctccgcagaacccggaaccgggacgacggcacagctcccgccggccctgtcgctcggcgtcggcaggccaccagcgaggcccgaccacgccgcgctgcctccgagcagcctgctgtccctgcagctgccgcggtgctcggcgggaattggccgcacggcgccgagcctggccctggcgccgccgaaacacagccacccttcttcgtcgctgacggcggcaaaggctggtggcctggcgccggacctggagctgaagatctcgaccgcccggcagagcgagcaccagcagcaggtccagatggggccatcgctgccgccgccgccgccgccgccgcagaggacgccctttctggggaccatcagggtcacatgacatgaccggcaaagacggcggcggttagtagggaatatcctgctggtaggagaagagcttttgcccatctgaagctggagaaggttgcttcaaaagataggacggggtgggaaaactggaaagaaggaagcttttggcagcgtgtgcgtgtgtgtgtgttgctggcacctggcagtggcagccgagacgacgatggcgtcgtgtatcatgtgggtgttgtgtatatcatatcatcatcatccgaaagatggaaactttact

SEQ ID NO: 114014 - DNA, 648 bp, Zea Mays
atgggttatctccttatacagttactgttacaagttcttctccatccagatcagtattgggaggctgcacttgatgtgactatattttgcaagaaatcctttcttgtcattgctcaagtgcattttgagaaggataaggctttggctcgtagattccagccagtattggtgaatgagcctagccaggcgctggttaacaggttgaagtattctcttgatgagaatgacaaagaggatgtatccagatttcaagccaccatcctcgccttcgccgtcagcaccttaatttggcaagagtacaagaaaccgggtctagaggatattaaagaagttgagttgttcatatggagccggcatctcaccagaggttacgcctgtgaaatgctcactgcttttctattggtttgtgtgccgttcaagctctgcaaggtgaggtctgttcagtttggccagaaaggcatcccctacctgaacacctatgacggccgcaccatccactaccctgaccctctcatcaaggccaacgacaccatcaagatcgatctggagaccaacaagatcatggacttcatcaagttgtatttgctgtttcatggacttcatcaagttatatacttagttaggctcaatgttagcacaaaaagttga

SEQ ID NO: 114015 - DNA, 1990 bp, Zea Mays
gcaccgcacagccgctcaaaaaccctagttctcgccgccacctccgccgctcggcgcccgccgccagtccaccacttgcccacctcgtcgcgacgtcgcgcagatatcttcaccgcccgtcgcagcaggttcagctgctggcacgggacatttgaaccggcactacaaagcttgtttagcaaagctaggaaagactcaaggaggaggtacgcaaacccatcttaactttgctgctgatggtacaataagtacatgggtttacaacccacaggtagcacgtgatgaaatagccaaatttattgtttgtgaagatttaccgattatgttgggcgagagccaaaattttaaaaacttgattcaacgtgctttttgcccacaatatcagcctgtcactagaaaaactacaaaatctgatttgattgcaatatacaaaaataaacttgctgctcttaaagagtcttttaaaaaggttcagttctcatttgctttaacatcagacatttggacatcatcacaccaaaaaacatgttatgtttctgttgttgcccactacttggacgattcttatgctttaaacaagcgagtcatcggttttagaatgatggatgagtcacacactggagatgcaattgccaaccatatacttgaggtagttcgtgattttgagatagatggtaagattctctctataacccttgacaatgcttccgcaaacacaactgctattgatattctcacccctcggttgcagtcatatatacaaggttatattatccaccataggtgtgtgtgccacattataaatttggttgttcaagctggtataacagttgcaaataagtacttgaataatatccgtgctgctattcgtttcataacaagcacacctcaaatgatttctagatttgctgagtattgtaaagctcaggatatgagaccaagaaaatttggtcttgatatgaagatcagatggaattcaacctaccatatgcttaagagtttagaaggttatgaacaattaattactgtctttgtgaatgccaatggaggtaaagtttctaaaatactttgaacaaatatcacatgtatactgttttgcaactatttttgatccacgcaagaaactggatggtttgcaaattgcattggagggaataggtgatgcattggacatggatttttcagatgcttttaatcatgcaaaagatgacttgtttcgtgtctttggttactattacaaaaaatatggtgaaagtgagatagactcacctgctgttgagtttggtgcagaaatttcagatacctctcttacagctcacttatggaagagagcgaaggggaaagaaaatgtcgcctcatctcaaaggtggaatcctaatgctgaattaaatcactatctgtccactaactttgtaggtactgatcgcgcactaaggggtgagaaggtaaagttacttgagtggtggagggaccacaagtatagttttcctgtcttgtctcagtttgctagagatatacttgttattcctgtctcaactgtttcctctgaagctacctttagcactgttgggagaataattgaggaacgaaggtcttctctagcacctaagacggtggaggcaatcacttgccttaaagattggaacagagccgaagagcggaagcaacatcaacttgaggatcctgagattgaatttgccgctgcagatttggacattgattagacaataatgtttagttgctgctacagattgaatttgctactatgaactttatgtggttgtaatatttagactttatttggacattgccggtctgtactcttttccttatagaggggccctgtaatggggtataaggtttttaatgagacaggccgaggaatatatttttgtttccctcaaaatgtgtgttgattcattagttcacatgtttgtaacatatagtctggtgctactgttttagtttgtaatgaaatactatcatgtat

SEQ ID NO: 114016 - DNA, 1350 bp, Zea Mays
gccgtatacgtacagcatacaggttccgtcgtcccgcaccgcacagccgctcaaaaaccctagttctcgccgccacctccgccgctcggcgcccgccgccagtccaccacttgcccacctcgtcgcgacgtcgcgcagatatcttcaccgcccgtcgcagcaggtgagttccctggcccgttgcgtcactgcgtgttgtgacttgtgaggctaatacaccatactgcatacatcctgtgagggcgtgaggccaatacagcattcaatcttgtggatccgtggcccgtagcccgtggcgtcgctgcgtggagatcggagcggtcaagtttagtaaatggcgcgacaggccaactgtcccaacaaatggctcttcctcggacaactcagagcgcatggcacgagagcccgcccgcccttggtcaagtccagtaaatggcgcgacagagtgctgcttcgattcccattaagtgtgtgttgcttcgattttcagttagtcaattctataaaaccgaccctctctttgttaggctgccagagactttgatttggtgatccctgtgagtagatatggtgagaagacgtcctgtcatggcgtcgaagtccagagccagggctagtgaagccaaccgtaatcctagtagtagtagcgttggtgaaccagcacaaactgccgctaatgtgggtgtggctgctggtgaactaggtgtggatgctggtgaactgggtgtgggtgtgggttgtggggctgctggtgaatcagcaacaataccatttgtcgtctatgggggtgaattgggagatgcggttgctgctgaatgtgcaccaccgttggcatcatcaagcagtgcaaagtgtagttcgagggcagactgttggaaacatatggtgaagaaggaagtcattgaggatggtgtagtacatttttttgctgtaaagtttctaaaatactttgaacaaatatcacatgtatactgttttgcaactatttttgatccacgcaagaaactggatggtttgcaaattgcattggagggaataggtgatgcattggacatggatttttcagatgcttttaatcatgcaaaagatgacttgtttcgtgtctttggttactattacaaaaaatatggtgaaagtgagatagactcacctgctgttgagtttggtgcagaaatttcagatacctctcttacagctcacttatggaagagagcgaaggggaaagaaaatgtcgcctcatctcaaaggtggaatcctaatgctgaattaaatcactatctgtccactaactttgtaggtactgatcgcgcactaaggggtgagaagatttggacattgattagacaataa

SEQ ID NO: 114017 - DNA, 2109 bp, Zea Mays
gaatgcccaaaatcctggggaatattccactttccctatacattacattacatacacgccggagcggcatttctttcgtcctctccaaaccgtgtaaataaacgggaaccttctatcctcccccttttgggttcggtcctcctccgtccgtcgccgtcgtcaaacctcaagcgcgacgtgtgtaaacggcccgcgccttcggcagacgccaacaacagactcagactatactcgcagcagaaaggttagttagctgagctccgcggggggtcgaaccgagactcttcgtcgcgcgcgccgcagggccagcccagcaggcggcggacgcgaaagcttgctcagctctgtgttcaccggcggcacgggccgtcccggcgatggaatccttcggtgtccctcctgcgcccgtggcggcgccggagaagaggaagaagccgctcgacctcaaggaccccgtccccgccgccgccgccgccgccgccaacggcggcggcgccaccaaggcgtccccagcggcgaagtgggcggagaagaagaagctggtgggcggcgacgccggctacgtgctcgaggacgtgccgcacctcacggattacctgccccagctcccgacatacccgaaccccctccaagacaacccggcgtattcagtcgtcaagcagtacttcgtcaacccagacgacaccgtcacgcagaagatcgttgttcacaagaccagcgccaggggcacccacttccggcgcgccgggccacggcagcgggtgtacttccagcccgacgaggtgaacgccgccatcgtcacctgcggcgggctctgccccggcttgaacaccgtcatccgtgagcttgtctgcggcctgtatgacatgtacggcgtcaccagtgtcgttggcatagagggtggatacaagggtttctattccaaaaacacggtcgcgttgacaccgagatcagtgaacggcatccacaagagaggcgggacggtcctgggaacgtcgagaggagggcatgacactgccaagattgttgactgtcttcaggaccgtggtattaaccaggtctatattatcggcggcgacggtactcagaaaggcgcctctgtgatttacgaggaagtccgtagacggggcctcaaatgcgctgtggtcggcgtcccaaagaccatcgataatgacatcgcggtgatcgacaagtcgttcggatttgacactgccgtggaggaggcccagagggccatcaacgctgctcatgtcgaggctgagagtgcagagaacggcatcggtgtcgtgaagctgatgggtcgcaacagcggtttcattgccatgtacgctactctagctagccgcgacgtggactgttgcttaatcccggagtcgcccttctaccttgaagggaagggagggctccttgagtttgtcgagagacggctcaaggacaacggacacatggtcatcgtggtggccgagggtgctggacaggatctcatcgcgaaaagcatgaattccgtggacacccaggatgcttcgggaaataagctgcttctggatgttggcctctggctatcccagaagataaaggatcatttcaagaagaagccccgtttcccgataactctcaagtacatcgacccgacttacatgatccgcgccgtcagttcaaacgcttccgacaacgtctactgcactctgctagcccacagcgcgctccatggcgccatggcggggtacaccggcttcatcgtcgctccggtcaatggcagacacgcctacatcccgttctataggatcaccgagaagcagaacaaggtggtgatcacggaccggatgtgggcgagggtgctgtgctcgacgaaccagccctgcttcctgagccacgaggacgtggagaacatgaagcacgacgacgacgagcaccacctgcacaacacgctgctcctggactcgccggaaaactcgtccaaatgaaatggggcacaagacttgttttgcttttttgggtgctggcgttgtagagattagcgaccgctatatgatagggttggataatgtgagcattttgtaataatataagcttcctgaagtaagctcgttttggctgttcgtgtattaa

SEQ ID NO: 114018 - DNA, 1843 bp, Zea Mays
gaatgcccaaaatcctggggaatattccactttccctatacattacattacatacacgccggagcggcatttctttcgtcctctccaaaccgtgtaaataaacgggaaccttctatcctcccccttttgggttcggtcctcctccgtccgtcgccgtcgtcaaacctcaagcgcgacgtgtgtaaacggcccgcgccttcggcagacgccaacaacagactcagactatactcgcagcagaaaggttagttagctgagctccgcggggggtcgaaccgagactcttcgtcgcgcgcgccgcagggccagcccagcaggcggcggacgcgaaagcttgctcagctctgtgttcaccggcggcacgggccgtcccggcgatggaatccttcggtgtccctcctgcgcccgtggcggcgccggagaagaggaagaagccgctcgacctcaaggaccccgtccccgccgccgccgccgccgccgccaacggcggcggcgccaccaaggcgtccccagcggcgaagtgggcggagaagaagaagctggtgggcggcgacgccggctacgtgctcgaggacgtgccgcacctcacggattacctgccccagctcccgacatacccgaaccccctccaagacaacccggcgtattcagtcgtcaagcagtacttcgtcaacccagacgacaccgtcacgcagaagatcgttgttcacaagaccagcgccaggggcacccacttccggcgcgccgggccacggcagcgggtgtacttccagcccgacgaggtgaacgccgccatcgtcacctgcggcgggctctgccccggcttgaacaccgtcatccgtgagcttgtctgcggcctgtatgacatgtacggcgtcaccagtgtcgttggcatagagggtggatacaagggtttctattccaaaaacacggtcgcgttgacaccgagatcagtgaacggcatccacaagagaggcgggacggtcctgggaacgtcgagaggagggcatgacactgccaagattgttgactgtcttcaggaccgtggtattaaccaggtctatattatcggcggcgacggtactcagaaaggcgcctctgtgatttacgaggaagtccgtagacggggcctcaaatgcgctgtggtcggcgtcccaaagaccatcgataatgacatcgcggtgatcgacaagtcgttcggatttgacactgccgtggaggaggcccagagggccatcaacgctgctcatgtcgaggctgagagtgcagagaacggcatcggtgtcgtgaagctgatgggtcgcaacagcggatcatttcaagaagaagccccgtttcccgataactctcaagtacatcgacccgacttacatgatccgcgccgtcagttcaaacgcttccgacaacgtctactgcactctgctagcccacagcgcgctccatggcgccatggcggggtacaccggcttcatcgtcgctccggtcaatggcagacacgcctacatcccgttctataggatcaccgagaagcagaacaaggtggtgatcacggaccggatgtgggcgagggtgctgtgctcgacgaaccagccctgcttcctgagccacgaggacgtggagaacatgaagcacgacgacgacgagcaccacctgcacaacacgctgctcctggactcgccggaaaactcgtccaaatgaaatggggcacaagacttgttttgcttttttgggtgctggcgttgtagagattagcgaccgctatatgatagggttggataatgtgagcattttgtaataatataagcttcctgaagtaagctcgttttggctgttcgtgtattaa

SEQ ID NO: 114019 - DNA, 542 bp, Zea Mays
caacttatactgctaacctcatggtacacaggccatttgacagcgaagagcgatgtgtacagctacggtgtggttcttctggagctgctgtctgggcagcgcgctctggacaagaaccgcccgcccggtcagcacaatctggtggagtgggctagaccttacatcaccaacaagaggagggtcattcatgtcctggactcacggctgggttcccagtattcccttcccgcggctcagaaggtggcaaccctggcgctgcaatgtttatcgatggacgcacgatgcaggcctggcgtggatcaggttgtgactgcattagaacaacttcaaaggccaagggctcactgaaaaagatgtccatctacctctgtggagtctggagcatcctcctgtaatactttaggggagtaaaaaacaaagaacggatgatggtttgaagggctaagtggcttgtgaagagaatataatattgccttgctttgtgtacaactagttgcttcgtcgttgtaacttgggtctctacttatatatttaccatgacg

SEQ ID NO: 114020 - DNA, 2051 bp, Zea Mays
gcagcagtgtgagagctcgattcgttgccgtccacttgtctcacggcctgtcgccatctccttcctggttttttcatccgaccatccccggctcctccgcgccgtcggcgacgactccatcgagtcactcggccgcagcaaccggcgaccatgtaccgagtcgcctccgggctcggcgccctcaagaggcatggggcaaatgctcaaatgatgaatgctgcaattaggtgtgccagcacaagtgttgcacagaggtcttcgggtggcttctggacctggttgactggtgcgcgttcaaatgaaatacctcctccagatttcacacttccaggagtgactattcctcctccgctgcctgaccatgtggaggctggcaaaacaagagtcacaacacttcccaatggtgttaaaatagcctctgagacatctgcgggatcatcttgttctgttggagtttatgttgattgtggttctgtatatgaagcacctgaaacaacaggcgccagtcaactgttgaagacaatggccttcacaaccactgccaacaggagtgagttgcgggttgtgcgtgaaattgaggcaataggtggcagtgccaaagcatctgctagccgtgagatgatgagctacacttacggagccctgaagacttacatgcctgaaatggttgaggtgcttattgattgtgtacgcaaccctgcttttcttgattgggaggtcaaggaacagattttgaggctacaggcagagcttgcaaaatcatcaagttttcctgaaaattttcttttggaggctcttcattctactggctattctggtgctttagcaaatccactaattgtgccagaatattcagttagcagattgaatgcagatgtcctggaacaatttataactgagaactacactgcttcccgaattgttctagctgcatcaggcgttgatcatgatgaattggtatctattgccgaaccccttctgtctgacattcccagtgtatctggaacaacaaggccaaaatcaacctacattggtggagaatacagaagaagtgcagattcatcgagcacagacgttgcattggcattcgaggtcccaagtggttggctcaaagaaaaagattgcgtcactgtatcagttcttcaggcacttctgggtggtggtggcaagttttcttggggaaggcaaggaaaggggttacattcacgtctaaaccgcctcgtaaatgaatttgatcagatcaagtcaatctctgctttcaaggatgttcacagtaatactggcatctttggaatccatacatctactgatgcatcatttgttcctaaagctattgacctagcagccagagagctcacttcccttgcaactcctggacaagttgaccaaagccaactggaccgcgctaaagcctcagctaaatatgcgatactggcaaatttggaatcacaggcatcgctaacagaggacatggggcgccaagttttggcatttggtgaaaggaaacctgctgagcaccttctcaaggctgtagatggtgttactatgaaagatataacgtctgttgctgaaaagatcatttcatccccattgacaatggcatctcatggaaacgttctgaatatgcctacttatgagtcggtcagtggcaagttccgctcaaaatgaggagtacatgacccttcccttcattttatcaccttgtttgctggacaagttttaccagtaccttgtcattcacgtctaggccatggttcttggtcagtttcagaagaaataagcaacctcatgcagttttgttcgtgaaacctgtgatcacttcacaattattcccttttctcattcttttgcggaacattcgtgtggttaatgctggtgatagaccagtaacgtgcttgtaaatttaaccgaaccctggcccctcattcggtaccaaggccccaagagaatgtacaaaattgtcgtaaaactcttgacaaaaatgttgtcgcacatgaataatgattctacagaactgaagtttgcatgagtcgtgtactcgtgttcgatgc

SEQ ID NO: 114021 - DNA, 1463 bp, Zea Mays
ggctgcgaattccggggatgggcaaggcggcgaggtggctccgcggcctgctcggcggcgggaggaaagaccaggagaggcgggcctcgccggcgccgcccaccgcggacaggaagcgctggagcttcgcgaggtcctcgcgggactcggccgaggccgccgcggcggcgaccgagggctccgtgcgcggcggtggcaacgcggcgatcgcgcgggccgccgaggccgcgtggctcaagtcgctctacgacgacacggggcggcagcagagcaagcacgccatcgccgtcgccgcggccacagcggcggcggcggacgcggccgtggccgccgcgcaggccgcggtcgaggtcgtccggctcaccagccagggcccggtcttcggcggcggagggccggtgcccgtgctggacccccgcggccgcgccggcgccgccgtcaagatccagacggcattcagacgcttcttggcgaagaaggcgctgcgagcgctgaaggcgctggtgaagctgcaggcgctggtgcgcggctacctggtgcggcggcaggcggcggcgacgctgcagagcatgcaggcgctcgtccgcgcgcaggcagccgtccgcgccgcccgctacagccgcgcgctacccgcgctcccgcccctccaccaccaccctcccgtccgcgcgcgcttctcgctgcaagagcggtacggtgacgacacgcgcagcgagcacggcgtggcggcgtacagccggcgcttgtccgcgagcatcgagtcggcgtcgtacggaggcgggtacgaccggagccccaagatcgtggagatggacacggcgcggccccggtcgcgcgcgtcgtccctgcgcaccgaggacgagtggtacgcgcagtcggtgtcgtcgccgctcctgccgccgccgccgccgccgccgtgccagcacctgcaccagtaccaccacctgcccccgcgcatcgcggtgcccacgtcgcgccacttcccggactacgactggtgcgcgccggagaagccgcggccggcgacggcgcagtgcacgccccgctgcgcgccgccgacccccgccaggagcgtctgcggcgccgggggcaacggcggcggctacctcgccgcgtcgcccggctgtcccgggtacatgtcgagcacgcggtcgtcggaggccaagtcgtcgtcccggtcgcagagcgcgccgaagcagcggccgctggagcagcaggagcagcagcagcagccggcccggaagcgggtgccgctcagcgaggtggtcctggaggcccgcgcgagcctgggcggcgccggcgtgggcatgcacaagccgtgcaatacccgcgcgcaggcgcaggacgcgttcgacttccgcaccgccgtcgtgagccggttcgatcggcgcgcgtcggacgccgccgcggcggcggccgagcggcgggatcgcgaattgttcttcctgcagaggaggtggtga

SEQ ID NO: 114022 - DNA, 2034 bp, Zea Mays
gcgtagagtttgctttgcgcagcgaagatccgtctgtatccccgttaaggttttcatataatgaaaaaaaaaggagaggaacacggcggagggagggatgaagcgatgcgtgcgtgccatggagcagattcgtttcgctttttgccgccatttttatttataaggggcaagaggcaagacgagcaccgcaacactctctctcacacacacctggcaacctccctagacctggagcgcacgagagagagatagaagagagacggaccgacgaccgacggcgatctcgatcggtaggcagccgttgcttcttcttgcttggcgggcggggcggccaccatagccctctgtagctcttgccggctttccttgtgctccttggaatctcgccctgcatatcttgtactacagtagctagctcctctgctactgtagagctacaggcaagagggaagcaggcagcgaccgagctctagctgccggctgtgcgactgcgagctagagagagagagagagggtgcgggcgacggacggaacggaacagaggagcctagtacttgttgtccgctgtctttcgtccgtgcgactggaccttattccctcacacctgcagctttgaggctcggccgtcacgtagtagtacgtgtacgtttcagggagggagccttctgacctcttgttcccttgccgccttttggtcacctcgggcaccgcgaggcgcagcacctgtgcttccttccgtcgtcttcctgcctcctcttctgttcaccgctctggcgctctcctatactcttctctctctctcgctgaggcaggcgggggcagcctttcctccccggtcgccatcctcgtttatatacacacaccctctcttgccgaaccactgctcgcttctctgcctgcttctgcttgagtcgtgccagtgacccgtgaccgtgaccgcgagcttcagggacgcgggcggcggcgatcatggcgtggcgcggcccgctcggagccggagaggaggccctggacagcggcctcgagctcagcctcggcctcccggcctacttcgcccggccttcaggtttggacgccgccagggaggagcccgccgaggcctctgcctacgctatccaggccgccagtgggagcaatgtctccaaggcaagggtcaggccagcgggcgcggcgccggtggtggggtggccgccggtgcggtcgttccggaggaacctggccgcctcctcctccaggccgtcgtcggggaaacacacccgccaggagggcagcgccaaggacggcctgttcgtgaagatcaacatggacggcgtgccgatcgggcgcaaggtggacctcacggcgtacggcggctacgccgacctctccgccgccgtcggcaagctcttccgcggcctgcttgccgctcagagggaccgagcggccacggcgggtggcgaggaggaggaggagggggagggccccgtgatcggcggcgactacacgctggtgtacgaggacgacgagggcgacagggtccttgccggcgacgtcccctgggagatgttcgtggccaccgccaagaggctgcgcgtgctcaagagctccgacgtgccggcctcgtcggtgacgctgggagctgggggcccggagaggtctgcagccgactgctgctgctgaaacgtgctctgcttcgtcagctgcttgtaaaaagtcccgagtggaggagacgaggagtggccctatccctggcctcttttttgtgtgttgctcttgctgcctttctgctagtggtactagtattgggtgccagtaaaaagtaggagaacaaagtcatgacggtattaaggatgtaatgtgcaagattagcagtggtagtagtcgtaaggtgtttaatgaatctacggtctctgttttggggcatattcgaccgtttaaagctgtatgcacgcgtcgaatttcggtgtggtttctgcatgccggccttaatgtttttcagcttttgtttgcacacgaacgctttagagcaagtttaataatagttggctctaacta

SEQ ID NO: 114023 - DNA, 820 bp, Zea Mays
actgctctcgctacttctggaagggggttctttacctagctttcaccatcggtgattttgcggacgacggcctagggttcccaaaccaccgaccgatcgacgatgacatccttctccccggcaacataagctcactcatcgacctcatcagtggtgtgattgattcacgttaaaacatcttctgcacggtgggctgttacctagagagacatatcaagttgtttggtgataatggatccaaagcattcggctgaagtgtccaagtatttagacaagcaaaatcaagcactaatggaaacatatcgagcaatgtcccatgagttgcataaactgcaggtagaagaagagacaatcatgcgcaagttgtatgaactgatgtccgcggaagggcttcttccaaagcgcaagaaagaaaagcaacatggggaaaatatagtgggataagctgagagcaaagaacaggaaccataaattcttatgcgacgtgtaatgtgatatgacagcaatgccattttatctggagagttggtgcttgttaacttctgtatagcagttctctatcatcacaactctgcgaccactacatttaacttcacagttgaaaatttaacctgagtattagttccgtgaggaattacttacagacaaacataatcattcctttcgctcatatgcttcaactgaggttttatattttgttttccctttcttctatttccagggacattattacacacaagactgcttgtctctttcttttcgttttggcgacacaattgttacgaattctgattcatcccatataagttccatgcacaac

SEQ ID NO: 114024 - DNA, 745 bp, Zea Mays
actgctctcgctacttctggaagggggttctttacctagctttcaccatcggtgattttgcggacgacggcctagggttcccaaaccaccgaccgatcgacgatgacatccttctccccggcaacataaggagacatatcaagttgtttggtgataatggatccaaagcattcggctgaagtgtccaagtatttagacaagcaaaatcaagcactaatggaaacatatcgagcaatgtcccatgagttgcataaactgcaggtagaagaagagacaatcatgcgcaagttgtatgaactgatgtccgcggaagggcttcttccaaagcgcaagaaagaaaagcaacatggggaaaatatagtgggataagctgagagcaaagaacaggaaccataaattcttatgcgacgtgtaatgtgatatgacagcaatgccattttatctggagagttggtgcttgttaacttctgtatagcagttctctatcatcacaactctgcgaccactacatttaacttcacagttgaaaatttaacctgagtattagttccgtgaggaattacttacagacaaacataatcattcctttcgctcatatgcttcaactgaggttttatattttgttttccctttcttctatttccagggacattattacacacaagactgcttgtctctttcttttcgttttggcgacacaattgttacgaattctgattcatcccatataagttccatgcacaac

SEQ ID NO: 114025 - DNA, 1357 bp, Zea Mays
cgttcacggttcatccctctgtccagagcatcattccgaattcccaacgaatccggacacgccgtgaagtgaagcccctcgtcgcttctcgtagtctcgcatccaccgctccaccgtctccatccacgcgcccgcgcgcggcccggcaacgggagccaaggaaaccgaagccccgatggcgagcttcttccgggacgcgcgcctcccgcagcagcgcgtcgtggagggcgtcccgttcccggcggtgctggtcccgagcgcccccgcgggcggcggcctcgacgagttcctggcggccgtgcgctccgagagggcgtcccggctggagccgctggtgcggcacgcgggggccctgctgctgcgcgggttccccgcgacgacggccgcggacttcgaccgcgccgtcgacgccttcgggtacgaggagctgccgtacgtcggcggcgccgcgccgcggaccaacgtcgtgggccgggtgttcaccgccaacgagtcgccgcccgatcagaagatccccttccaccacgagatggcccaggttccaacgtttccgtccaaactgttcttcttctgtgaagtggagccaaagagtggcggggagacaccgatcgtactgagccattacgtctacaagaggatgcaggaagaattccccgaattcgtggagaaactggagaaggaggggctggtatatacaagggttctgggggagggcgatgacccgtcttcgccaatcggccgtggatggcagtcgacatttctcactaaagataaagccgttgctgaggaaagggccgccaagctcgggatgaagctggaatggaccggcgacggcgtgaggacggtcatggggcccatcccggcggtgaagtgggacgagagccgggggcggaaggtctggttcaacagcatggtggccgcctacacggggtggaaggacgcccggaacgacccggtgaaggcggtgaccttcggcgacggctcgcccctgcccgccgacgtcgtcgccgcgtgcggccgggtcctggaggaggagtgcgtggccgtgccgtggcggcgcggcgacatcctcctcctcgacaactgggccgtcctgcactcccggcgctccttcgagccaccgcgccgcatccttgcctcgctctgtaaatgatgtatgtatgtatgtaagtgccccgccatggtatgggttttttacttggcagtggaactaattctggatgggcgcggatttgctgctccgacgagcgatgaacgcctgaaactgagaataatttcacacgctggagagagcggtgtttagaaattccatagtgaagaaaaccgttcacccgttatgccacgtcgcctttccgtc

SEQ ID NO: 114026 - DNA, 1509 bp, Zea Mays
acacgccgtgaagtgaagcccctcgtcgcttctcgtagtctcgcatccaccgctccaccgtctccatccacgcgcccgcgcgcggcccggcaacgggagccaaggaaaccgaagccccgatggcgagcttcttccgggacgcgcgcctcccgcagcagcgcgtcgtggagggcgtcccgttcccggcggtgctggtcccgagcgcccccgcgggcggcggcctcgacgagttcctggcggccgtgcgctccgagagggcgtcccggctggagccgctggtgcggcacgcgggggccctgctgctgcgcgggttccccgcgacgacggccgcggacttcgaccgcgccgtcgacgccttcgggtacgaggagctgccgtacgtcggcggcgccgcgccgcggaccaacgtcgtgggccgggtgttcaccgccaacgagtcgccgcccgatcagaagatccccttccaccacgagatggcccaggtaatcgagtcttgagcctcccctgcactctggcaccataagagcagcagcggggtaactgaaattcaggagacaacgcagtggccacgacatgtacatctgcaacgtgggcttgctttttaagcctagtacccatttttcaattcaaaattagattgatcttttttttcacgtagagctcagtttgatgaccaagctacaatacagcacgcacgctttgattttttaggttccaacgtttccgtccaaactgttcttcttctgtgaagtggagccaaagagtggcggggagacaccgatcgtactgagccattacgtctacaagaggatgcaggaagaattccccgaattcgtggagaaactggagaaggaggggctggtatatacaagggttctgggggagggcgatgacccgtcttcgccaatcggccgtggatggcagtcgacatttctcactaaagataaagccgttgctgaggaaagggccgccaagctcgggatgaagctggaatggaccggcgacggcgtgaggacggtcatggggcccatcccggcggtgaagtgggacgagagccgggggcggaaggtctggttcaacagcatggtggccgcctacacggggtggaaggacgcccggaacgacccggtgaaggcggtgaccttcggcgacggctcgcccctgcccgccgacgtcgtcgccgcgtgcggccgggtcctggaggaggagtgcgtggccgtgccgtggcggcgcggcgacatcctcctcctcgacaactgggccgtcctgcactcccggcgctccttcgagccaccgcgccgcatccttgcctcgctctgtaaatgatgtatgtatgtatgtaagtgccccgccatggtatgggttttttacttggcagtggaactaattctggatgggcgcggatttgctgctccgacgagcgatgaacgcctgaaactgagaataatttcacacgctggagagagcggtgtttagaaattccatagtgaagaaaaccgttcacccgtt

SEQ ID NO: 114027 - DNA, 1039 bp, Zea Mays
ttcttggaaacaaggacgtgaaaccccccattaagaatagcttaatataatggtacattttttggggcccatagttttgggcccagacggctgcccaccctaccgccctcgcggaacacgaggcttattataataactatttttaggagtctgaactctgaagctgaccacggccaggtttggctgtccacgtcatccctctgcccagagcatcgttccgaattcccaacgaaaccggagtaccggacacctctcgcaccgcacccaccgctgctccaccttctccacgagcccggcaacgggaaccaaggaaaccgaagccgcgatggcgagcttcttcagggacgcgcgcctcccgcagcagcgcgtcgtcgagggcgtccccttcccggcggtgctcgtcccgagcgctcgtgcgggctcctgcgccggcggggtcgacaagttcctggcggccgtgcgctgcgagagagcgtcccggctggagccgctagtgcgggacgcgggggccctgctgctgcgcgggttccccgcgacgacggccgccgacttcgaccgcgccgtcgacgccttcgggtacgaggagctgccgatcgtcggcagcgtcgcgccgcggaccaacgtcgtgggccgggtgttcaccgccaacgactcgccgcccgatcagaagatccccttccaccacgagatggctcagacgcaagtaatgtccagattgaccttatcagaatgctgctgccggatcaatcgaagggggtgctggagtggaggaggaaagatctgtttgctcaggtctagatgtgcggaataaatgtgccatggccgatgctcagccggtaaattattatgtgtcaaaaaaaattatgtcctgcacccactcgttgtattagtttggtcgtatttagttttttgggcagatctgttcgcgttggtcgggtcagacaactcatgctcaagtctggatgtgaggaataaatgtgcatgtgcgagatgtgaggaactggagacgaaaataaataagaatatttttcttgggata

SEQ ID NO: 114028 - DNA, 1676 bp, Zea Mays
ttcttggaaacaaggacgtgaaaccccccattaagaatagcttaatataatggtacattttttggggcccatagttttgggcccagacggctgcccaccctaccgccctcgcggaacacgaggcttattataataactatttttaggagtctgaactctgaagctgaccacggccaggtttggctgtccacgtcatccctctgcccagagcatcgttccgaattcccaacgaaaccggagtaccggacacctctcgcaccgcacccaccgctgctccaccttctccacgagcccggcaacgggaaccaaggaaaccgaagccgcgatggcgagcttcttcagggacgcgcgcctcccgcagcagcgcgtcgtcgagggcgtccccttcccggcggtgctcgtcccgagcgctcgtgcgggctcctgcgccggcggggtcgacaagttcctggcggccgtgcgctgcgagagagcgtcccggctggagccgctagtgcgggacgcgggggccctgctgctgcgcgggttccccgcgacgacggccgccgacttcgaccgcgccgtcgacgccttcgggtacgaggagctgccgatcgtcggcagcgtcgcgccgcggaccaacgtcgtgggccgggtgttcaccgccaacgactcgccgcccgatcagaagatccccttccaccacgagatggctcaggttccaacatttccgtccaaattgttcttcttctgcgaagtggagccaaagagtggcggagagacgccggttgtaccgagccattatgtctacaagaggatgaaggagaaattccccggatttgtggagaaactggagaaggacatgattgtatatacaagggttttaggagagggcgataacccgtcctcgtcaatcggtcgtggatggcaatcgacatttctcactaaagataaagctgttgccgaggaaagggccgcaaagctcgggataaagctagaatggaccgacgacggcgtgaagacggtcatgggccccatccccgcggtgaagtgggacgagagccgagggcggaagatctggttcaacagcattgtcgccgcctacattgggtggaaggacgcccggaacgaccccatgaaggcggtgaccttcggcgacggctcacccctgcccgctgacgtcatcgacgcgtgcggccaggtcctagaggaggagtctgtggccgtgccatggcagcacggcgacatcctcctcatcgacaactgggccgtcctgcactcccggcgctcgttcgagccaccgcgtcgcatcctcgcctcgatctgtaaatgatgtgtgtagatgcgctgcgggtttgctgctccgacgggcgacgaaggcctgaaactgggaatactttcacacgttggaaagagcggtgtttagaatattagaggtgtgcgtgcaggcgaaataattggtatttcgccgctcaaaacgttgtctcctggttataattatcattgtatctatgagttgtgggtccatttgagtctacaaaatgtagcttgatggcaaatttgtgaaccctttcgtggtgatggcaaatatcgtaatctcccgtttatcggtgcccaatgaaacgaatccgtgtaaggggccattcgtttcttccggaacggaggcatggaataatttctagccggtttgtttctct

SEQ ID NO: 114029 - DNA, 118 bp, Zea Mays
tctatatatggtaaatatttaggatgctctcgctccaccaaaacaaccggatgcgagcgctctcgcggacgcgaacgctcttctccctttcctccactccacactcatatagttctcc

SEQ ID NO: 114030 - DNA, 1437 bp, Zea Mays
aggaaaaaaaaggttttccggcctcgcgggagtgcagcgagatccgtgccgccggcaccgtccctcgccctcctcgtctggctcgcccgccgtgtcctgttctgagtcctgcacgccctgcagatcgccgaccaccgctcgaggggacgcgggacgccctccatgattctgcgctccgcgccgcgtcgcctccacctactccgcccgcaccacctccggctcctctccgccgccgcgctcgcttccgcggtcccgatcccggccccggcccagtccccaattgagtgggccgaggctccgcttgcctccgtgcgccctgccaccgccgacgcatcgctcttccacgtctccctcgacctctccgcgcaccgggggctcctcgcctcccacaccgccgccggccagttcctccgcttccgcctccccgcctcttcctaccacatcttcctcgccatcgcatcccctcctcccccacctgcgctcgagaccctagccctagccgggccaccttcctgcttcgaattcctcgtcaagcgcctcccgggaaccccctccgcgcgcctctgcgacctccgccccggcgaccttgtccatgttggcgccagcgtcgtcggccgcggatttgatgtcgccaggatatctgatgcccgcgacgttctcgtcttcgccaccggatccgggatcagccctatacggtcacttattgagtcaggttttgctgaaaacaaaaaaactgatgtaagactcttttatggggttagaaatcttcagaggatggcatatcaggaaaggtttgaggattgggaatccagaggagttaaaattgtacctgtcctctccagaccagatagtcaatggacaggggagagaggttatatccagaatgtgttctcaaggatgaagaatactgtaaaccctccatcagtgggagtaattttgtgtgggcataaacagatgagtgaggagatcacaagagttcttgttgccgatggtttgtcaaaagatagaatcttaactaacttctgatcgccagaaggacattgttccatcctttgtagaggttgtaccttttttttttgtaccacagtcaagcagctactctttacaaccgcacaatggcacaagtgcaaatcgcaacaggaagacagttgcgtgattacaaataagttcattttcttctccatgtgaccacattggcttattgctgaatgactggtgtagttctccttttttagaaaaagaatgcctgatgtgaatctcacatgcactggctctagctgagatgtgttctatagcatctgagacattgatcccctgtaaggctctgatgtacttcagagaaggccctttttggagaagtaagaaggggatatagatgtagcattattcaaaattttgaattaattgagtggaatgtaatggatgcatgctgtttaa

SEQ ID NO: 114031 - DNA, 1336 bp, Zea Mays
aggaaaaaaaaggttttccggcctcgcgggagtgcagcgagatccgtgccgccggcaccgtccctcgccctcctcgtctggctcgcccgccgtgtcctgttctgagtcctgcacgccctgcagatcgccgaccaccgctcgaggggacgcgggacgccctccatgattctgcgctccgcgccgcgtcgcctccacctactccgcccgcaccacctccggctcctctccgccgccgcgctcgcttccgcggtcccgatcccggccccggcccagtccccaattgagtgggccgaggctccgcttgcctccgtgcgccctgccaccgccgacgcatcgctcttccacgtctccctcgacctctccgcgcaccgggggctcctcgcctcccacaccgccgccggccagttcctccgcttccgcctccccgcctcttcctaccacatcttcctcgccatcgcatcccctcctcccccacctgcgctcgagaccctagccctagccgggccaccttcctgcttcgaattcctcgtcaagcgcctcccgggaaccccctccgcgcgcctctgcgacctccgccccggcgaccttgtccatgttggcgccagcgtcgtcggccgcggatttgatgtcgccaggatatctgatgcccgcgacgttctcgtcttcgccaccggatccgggatcagccctatacggtcacttattgagtcaggttttgctgaaaacaaaaaaactgatgtaagactcttttatggggttagaaatcttcagaggatggcatatcaggaaaggtttgaggattgggaatccagaggagttaaaattgtacctgtcctctccagaccagatagtcaatggacaggggagagaggttatatccagaatgtgttctcaaggatgaagaatactgtaaaccctccatcagtgggagtaattttgtgtgggcataaacagatgagtgaggtatgttcattttgcttattttccgagtcatttgtatcttgacactctaactattagacaggttgatagcaccttctacaattagtggaatttccctctattacaagctttggttctgttcattgttattgttaggcacatcttcgcataaatcataatgctgcacaccattgtcatttttgaaaccatgttttttgtgctgttgctgatctatagttcgtagtgtatttttgacagcataaaatgactagaagtgcgagtctcgcagcatgtacatcttctaggattatgtatgcctcatacaatatttccacattgtatgatggttgtgtcattcaggattaacaatgtgcaattcaaatccaatttcttt

SEQ ID NO: 114032 - DNA, 1794 bp, Zea Mays
atggcggtggtttattacctgctgctggccgggctgatcgcctgctctcatgcactagcggcaggcacgcctgcgctcggagacgatcgcggccgtccctggccagcctccctcgccgcgctggccttggacggcaagctccggaccgacagcaacgcgacggcggcggcctcgacggacttcggcaacatcacgtcggcgctcccggcggcggtcctgtacccatcgtccacgggcgacctggtggcgctgctgagcgcggccaactccaccccggggtggccctacaccatcgcgttccgcggccgcggccactccctcatgggccaggccttcgcccccggcggcgtcgtcgtcaacatggcgtccctgggcgacgccgccgcgccgccgcgcatcaacgtgtccgcggacggccgctacgtggacgccggcggcgagcaggtgtggatcgacgtgttgcgcgcgtcgctggcgcgcggcgtggcgccgcgctcctggaccgactacctctacctcaccgtcggcggcacgctgtccaacgcaggcatcagcggccaggcgttccgccacggcccacagatatctaacgtgctggagatggacgttatcaccgtgaaggagtggtgggaagcaacccccagactgctgctctcctcggcggtcaggagcctgctgtctggttgtggcggcagcccagttgatttttcagcggaaaaaggggtgggacaccgaactggcatgcatgatatgtggcgcagagaagacctctgggatgattggaatcgacgttggaagggccagaatgccttcgaaccatgtggaggagtcagcaaagggctgggatattctggtggcaatggaacggtcacaggaaaagcttgcccaaagggtctttatggaacattttgcaaggaatgccctttgggaacatacaaaaatgttactggatcttctaaatctttatgctttccatgccctcctggtgaactccctcaccgtgctatatacataaatgtcagagttcttagtggagggtctgttcttttttttggtggtcatgggtgtcatgagctcgcgtccgtgctgggcacgctgagcaacgtggaagggttcgcgttccagcgcgacgtgtcctacacggcgttccttgaccgggtgcacggcgaggaggtggcgctcaacaagctggggctgtggcgggtgccgcacccgtggctcaacatgttcgtgccgcgctcgcgcatcgccgacttcgaccgcggcgtcttcaagggcatcttgcagggcaccgacatcgtcggcccgctcatcgtctaccccctcaacaaatccatgtgggacgacggcatgtcggcggcgacgccgtcggaggacgtgttctacgcggtgtcgctgctcttctcgtcggtggcgcccaacgacctggcgaggctgcaggagcagaacaggaggatcctgcgcttctgcgacctcgccgggatccagtacaagacctacctggcgcggcacacggaccgcagtgactgggtccgccacttcggcgccgccaagtggaatcgcttcgtggagatgaagaacaagtacgaccccaagaggctgctctcccccggccaggacatcttcaactgatgatagcccatgcatgcatgcatgttttagtttcttgggacaataatgtgaataactcccagctagcggctattaattaatctgtatatagattgatcactgcactgattgtatgtcaaggtcattatttacgttatggtaaaaaaaataccctcgtcgtat

SEQ ID NO: 114033 - DNA, 1264 bp, Zea Mays
ggatgctatctgtcaggctagccttgttgctatatattggaggctcttcgcctgcttcggttacccgtttgcttggtatcagtttgtggcgctatctggttggttgtcacttggttgatacatatggttgcatgatctgcaagtgaatcttcagagattacagctatctcattagtggatagtcatgcatttatgtaaaaaaatagcaatgagaaaaaagaacaaagtaaagaaaaagagaaaatatagatagagatatgtgggagtatatccaagaggatggaaaaaaaatataatctgttatcatattacaatttttgttcttaatgtttctgcaatagtgtgttgatgtcatcaagatgggaggcaaggttagctgcatgatcacccatggcccatgggtactcattggaattccaaagtttgtggaggcatggaacacaaagacagggatgaaactaagatttcaagggccttctagtctggtttgttccatggctatcacggatgagatgctgtttgctggtactggagatggtcgcatcatggcctggagatttcctgctaaggaaagtaacactgaaccagtgttgatcctcagtggccatcaacggccagtgatttcactgtctatctcggcaagaagactttactctggctcactggacaagaccatcaaagcatgggaccttacaactcggcagtgtgtccaaacactctctgagcataaagctgctgtaacatctgtgctttgttgggatgagaagttattatcttgctcccttgacaagactgtaaaactctggactctgtcagagtcaggaaaccttcaagtcaaatatacccatgctgaggagaatggtttgcgcacactcttcggcatgcaccgagttgggaagacgccagttctcttgtgctccctccacaacagcaatcgcgtccgcttgctcgacttgccatcgttcgacgggattggaacactgttgtccacgaaggaagttaggaccatcgagcttgcggctggtgggctgctcttcaccggagactgctccggcgagctgaaagtgtggaggtgggcgcccaaggactaggaggcagtagctgatgtgcatcaaatagtgtagctgtagcctcattgaagaataatagccactgacgtgctccatcattgtattcgtttccatgtaaattatggctgctccccctgatgatgtagcacatacggccaattttgtgaggatgcaaccctggtatcatgttccca

SEQ ID NO: 114034 - DNA, 1823 bp, Zea Mays
cagatatgaagatgcatttaatagatttgtcgatgagataaacacccttgcagcttatcaatggtgggaaggatctatttacagtattctttgtatacttgcgtaccccgtggcttggtcatggcagcagtggcgtaggagaaagaaattacagagacttcgtgaatttgttcgctctgaatatgatcattcatgcttacggtcttgccgttcacgtgcactctatgaaggcctcaaggtgactgcaaccccagatttaatgctagggtatttagatttcttccttgggggagatgaaaagaggcctgatcttccacctcgtcttcgtcaaaggtttccaatgtctcttatctttggaggcgatggaagttacatgactccgtttttacttaatagtgatagtgtgcttactagtcttatgagccaggctgttccctcatggatatggcaccgtcttgtagctggattgaatgcacagctgcgtttggttcgctgtggaaatctgaaagtaacgtgtcttccagtcatcaactggcttgaaactcacgcgaatccttctttagctgagaatggtatccgcgttgatcttgcctggtttcaagctacagcactagggtactgccaatttggtcttcttgtttatgctgttgaaggagatgctgcacttactgaacctgatgggagccctagaataaaaacagagcaacagacaccaacacaaaacatgcttgttgagactcaactcagtcagtccaggattaaggatgctctaatgcgcagaaggatcactggtggagttctcgatagtaatagcttaaggacgctaaacgacaggagagatttattttacccattttctcttatcttgcacaattcgaaaccagttgggcaccaggatcttgttggtctggtaatctcaatactgcttcttgcagatttcagcttagttttgcttacttttctccagctgtattcgtattctatggtcgatgttctcttggttttgttcattctacctcttgggattttgtcgccttttcctgctggtataaatgctctatttagtcatggaccgaggcgatcagcaggccttgctcgtgtatatgcattgtggaacataacttcactggtcaatgtcgttgtggctttcatatgtggttttgtacattataagtcatcaaccaaaacacacccaagcgtgcagccctggaacctgggaacggatgaaagcagttggtggctcttcccaactggactcatggtgttgaaatgcattcaagcaaggcttgttgattggcacgttgctaatttagagattcaagaccgtgcggtatatagcaacgacccaaacatcttttggcagtcatgacacctggtgtaactgaggtccttctggaaagctttttacaactcgattttttgtgagttgataaaaggaaagagtgcgggcagcaaggcctttctttattgaccagaccaaagaagcagctacagaggttatatagacgcatacttccgcatcccccgctgataatgtgcagttgcaaccggtgttctgttgtatatataaaaggtgttcttgatccattctttgtaggatttagacaccatagagtttataaacaatgtcaaaagctaacctaagagagacatcggagggatgtggatttgttgttctattgctaccgtgccctggcccttgatgtttgttgagatgggcagaggggggcaactaaaagtcagggagacgcaaaagcctcttgtatgtgatcagatgggtaaaacaagttattatattattaacatgctccagggttttcact

SEQ ID NO: 114035 - DNA, 1158 bp, Zea Mays
ggagcaaagtcgaaaggggaaaaatgagttaaacccaaatcgacaccaaacccactccaggaacacccgcctccgccgccgccgccgccatcgccggcggccactacaagcgcggcgtccggagacagtactgcgctaccaacccctagagcctggattctgatgagccctccatggcctgtcatatctgtcccctcttcaatctccgactcttgctgctgctcggcgcggttctcgggaacggcggcctcggccggggcggcggagcggaggcttcagatcgggcggacccggacccgtactcgatcctgatgtggcacgactactcgccgccgtcgcccccgctcccgcccccggacccgccgtcgccgacggcgacatgtgagggggacctccacgggaagggtgacttccacacgcgctgcgaggtctccgaggaagtggagctggacggcgacgtctacatcacggggaacggcagcctcgtgctcctctctggcgcctccctgacctgcgagaagtacgggtgcgttatatccgccaatttctcaggcgaggtgcgcctcagccgcggcgtccgcgtcacagccggcagggtctcgctggttgccaccaacatcacggtcgccgacacggtcgtcgtgaataccaccgcgctcgctggtgatccgccagaccggaccagtggcgttcccacggggacgcacggcgacggtggcgggcacggtggtcgtggcgccagctgcttcgtcaaggaagggcagacgcaggaggattcatggggcggcgatgcctatgcatggtctgacctcgaacacccctggagctacgggagcaaagggggctcgaccagcgttgagaaggactatggtggtgacggtggtggcatcgtgtggctgtttgctgaggacctggtcatgaatggcacagttctcgccaacggtggggatagcaatgagaagggtggtggtggttctggagggagcatctttataagggctgcatcgatgtgagtgtttgtggaatgattttttgttcttctttctttatgctaagtgaattgagatatgggaatgcaagcttagttaatcaagtagtgtttgtggaatgattttctgttctgctttctttatgctaagtgatttgagatgtgggaat

SEQ ID NO: 114036 - DNA, 1313 bp, Zea Mays
gtaattccagagatataaacgaatatctctagagatctgcctcatcaacagctgcagtatttgctagccacatatatatacacagttcgacacgtagttataacggaagagagaagcaaagagagaggcagagtgactgcaaccatcagtagttctatgattttattttttaccgttttgttgctgtttcatggtgtttatttgattgtagggtggaggagaggtgaaagctgacagaagagagtgagcacacatggtgcctttcttgcatgatgtatgatcgagagagttcatgctcgaagctatgcgtgctcacttctctctctgtcagccattagaactcctctatctctcaatctcgatctccctctttctttgttgatctctcccatggtgatatttatttgcttcctacgtgttgtgttctctttcttcagcacacacacaacctgttcatgttaccttagggttaaagtttttgcactttgcgtgaagatggaaagacaaacagtagatgagttttttgaaggtttgacagaagagagtgagcacacacggtggtttcttaccatgagtgtcatgctaggagctgtgcgtgctcaccctctatctgtcagtcactcatcaagcccatctgtcttattagcttgtttccgctgctaataaatattctagactcaagggccaagccatgattgcgaagaaaggaatgtaaaagatggctcagaactccatcacaaagtctacatacggtcgaaataagatctccatcagatcggagagctttatttattgattgtttttttagagttctagagcaaagcccatgtcttagcattaccaagacaaaagaataatccatatatatatcctttggatggttcacatccttcactccaggtttaagtttaaccaacacaaataaaaatatataattaaacgaccggcacatagagacaaaaactcaaatctccaagaacatctccactgtcagcagcctccaaggtaaaccataaattttcaatggaacgatcatcaaccaccagggaggaggatatatagcctctgctcttcaaatcttcaggtcttgtggccagattcttgagtttctccagcttcactttgaagtccagtttctatgcctgaaggcagagcagcctcagccttgcttgtagcatgactgccatgttcaagagtaaagacctcgtgtctctaaggaacaccatgaaaacacagttgtttcgtgtcagtttcgaaagcctccacagggctgcaagaatcatttgtgtagtagtggtggttgacgtactctc

SEQ ID NO: 114037 - DNA, 2208 bp, Zea Mays
cgaatttgcgtggcggatagagacggccgggcgccgggctcgtgtggtagaagtagaagcctcgcccccaaatcgcttgcgcacacgacaccggcacgtcactcggcttggctactcgctttctccgttctccccagccgcgtaggccgcggttgcgcccgcctgcccgcgtggtcagccaccttccctcccaccttcctccgtgataccgcgtgctcctctgcccccggtacctatatattcactcctcccgttcgctcccctcccaacctcgacatcttggacagcacagcgcagcgcaagctcgatcaccacaccaaccagactcagaacatccagaactcagagcttctacttctagaacagaagaacatcgagatcagtcctcccctgcatcctccaccggcctcacctagatgagcacctcgtacaccgaggcgcagttcggctccttgttagacctgcccgccggagacgacctcacgtcctggttcacacacctgtgcggcgaggagcaggcggcggcgctgccggcgttccaggcgccggtggcgatggcggaccccaggaagaggagcgccgagtaccagctcctggaaggggaggcgtccggggtcaagaggcagcgctccccgaccagcagctcccgggagaacagcgccggcagcaatgacggcgactacgagcacacgtccgcagccgcagccgcagccgcagccggcggcggtggcggaggcaggggcggcggccgccgcctctgggtcaaggagcgcgaccacgagtggtgggaccggatgagcagccccgcgtgccccgacgacgagttccgccgcgccttccgcatgtcccgggccaccttcgaggccgtgtgcgaggagctgggcgccgccgtcgccaaggaggacaccatgctgcgcgccgccatccccgtccgccagcgcgtggccgtctgcatctggcgcctcgccaccggggagccgctccgcctcgtgtccaagcgcttcggcctcggcatctccacctgccacaagctcgtcctcgaggtctgcgccgccatcaaggccgtgctcatgcccaaggccgtgcagtggcccgaggcgcccgacgccgccgcggccgagtccgccaggttcgaggccgcgtcggggatcccgggcgtcgtgggcgccatgtacaccacgcacatccccatcatcgcgcccaaggccaacgtcgccgcctactacaaccgccgccacacggagcgcaaccagaagacgtcctactccatcacggtgcagggcgtcgtggacgcgggcggtgccttcacggacgtctgcatcggctggccgggctccatgtccgacgccgacgtgctcgaccgctccgcgctctacctgcagcgaggcgccgcgggcctgctgcaggggcagcgcctggtgggcggcgccgggtacccgctcatggactggctgctggtgccctacacgcaccacaacatgacgtgggcgcagcacgtgttcaacgagcgggtggacggcgtgcgcgccgtggccagggacgccttccagcgcctcaagtcccgctggggctgcctccagaagcgcaccgaggtgaagctgcaggacctccccgtcgtgctcggcgcctgctgcgtcctccacaacatctgcgagcgcgccggagacgccgtcgaccccgacatcgcgttccagctcttcgacgacgacatggtggccgagaaccccgtgcgctccacggcggccgtcgccgcgcgcgacaacatcgcccacaacctcctccaccgcagcagcagtagcagcgccgccgccggccccaggttcgccttcaattgaactctgacggcgggagcaaggaaaagcagctcgctttctcggcggaatcagagaagacgacgccacgaggctcagcaatctttcaccgtttttttcgcttgaatgaaattgtaataagttgggaacatagcaacgggggttgatagcgaaacatacatagggttcaaagatacagtaggtgattggttgataggatttgagattgttctgcatttttttttgtagagtcaaaggttcaatcatcatttttcagatttggtgagaccgcgtagcctgtgtagtcaatactgtgcaggctattttgccaccagactttgcaatcaatcggtttttagctaaaacagaagttgatttcgcctctccaacctgggaa

SEQ ID NO: 114038 - DNA, 535 bp, Zea Mays
atcgaacatttggatgagccagcacaattgcttccttgcttgtggcagctagccagcttccctgccctaatcaactaatcgagatttcctcttagcggcgtgagggattgacagactgctgactacgggagccgggagggggcatcgtgcgccgtgcgcggtggcgaaggaagagcgaagcggcggaggccgagctgctacggcgctgactggccgggtcgcacggctacgccgctactcgacgcttgctgcggcttgtgggaagctggagaagaaagtttgtcgcctgtacagctgtcggagaagaaagctcgtgcttggcggcttgctatgggccgcgattgagaggagatctgaaaatggagaaaaggtgcgagctgcaatcaaagttaaggcattagtcatcatttgcttcacctcttctggacaggctgcaaggttgctctgacataacgaggaagtccctcttcatggtcggagaaattgggggcaatgactacaacctacctcttcaatcgagtgccatttgaaaagg

SEQ ID NO: 114039 - DNA, 971 bp, Zea Mays
atggcgcccctgggggcgattggcgccgccgccgccagccctgatcgcccgcatccggttcggggggtgctccgtcctttctccgcgggcggggctagcgctcctctccgtggtggcctcgggtcggccctccccgcggcggactcggtgtccggtcctctgcccaaacctcttctagagccggtaagtgctgagcgctcgttctctggcgggcaaactctgcgcagtgatgtgccccccacgagcgttcaagaccttctcttcctcggttctcctcaaccagatccgcagcgggccgttgcgggcggcattgatcacaggaggatttcactttcaagttccagatctgaaaagtgctctacgccggtgctgcctgaagatccgcatagtctgctttcggcgccgcgaatccaggcggctgaatcatccgactgtcactacacgacggttgatctttagcgacccttattaggtaccaactgttggttgctaaaggttagggaccgacggtcagtcgctaaatccttttgtagcaacggtcggttggtcgctaaaagtctagaaatttaacaacttatggttggtcgctatagatgtcgtcggggactagcggtgggtcgctatagagcaaggatcactatcaaatcttatagcctgaacgtacctgtagatgttagtgactaaaaattaattaaaacaagtaaacattgatcactaaattgcatggtgatttatttctttttaatattgcttgtatgtttatttcatggtttgtttatgtatggacatgactatagtatgcaactgtgttctttgtacttatatgatattagattcgagttgaaagtcgtttcaaatgtttattatttatttgcattcgtaataatttattcaaatgtttattatttatttggtaaaattttatgaattttgagtaatttaaaaatgcatttcgaaataaataaaaaaag

SEQ ID NO: 114040 - DNA, 1606 bp, Zea Mays
acaaaatattgtatattgtatatgtgaccaattcaaagggtgtgacagattctccctaagggacatatcccttgggatacatcccttcacatgtatataatcaggactccctgcaataataaaggctcgctgtcatttgtctctctctcaatctcgttaccactgagtatactataacacgttatcagcacgactcgcgagaaaacggagagaaattgctggtaggaagaaaacagatcgctcctagttggagaaggataatggtatggaacctactcttcctctccgctttcactgtatgcgtgaaatttttatgtcgtcggtggccacaactataccacaccggacggcgccgcgacggcaaggctcggcgcggacaagccctgtccccagcgcaccgacggtgcgggccatgcacaacaaggccatgcgcagagcagcgcgcctcggccatgcgcggtgcgtctgcctgcctacacagggccatgcggctcatgcacagggagggccatgcaggctccccacacgaagccatgcggccagcccaccggacatggcaccggccgctgcgagcccttggccgcatgtgcccaggtgcacttcggcgcgggtgaggcacgaccccggccagtccaatggacacggcacggccgttgcgagcccttggccgctcgcgaccaagcgcagtccggcaagaaccgaccacggcgcgggacagcctcggttacgcgcggtcgagccccagtgcgggcaagccccggccgccgagcgccccggccgccgagcgccccggcgcgggcacgctgcggccgtcccccggctcggacgcggccagttgccagcgtgggcacggacgctcggccgtcaacgggtggacgcctgaacgggtgctctgcatctctgcgcaagcggcacgtccctgccacaccgaccgccggtgcggatccggcaacgtcgggcgcggtcggcctctcgcggagttcggcgtggccgcctcctggtgcggggttggctgacaccggcacgcatgacgaggacgcccaggcgctgctgctcctggcgccggatggagcagactgcgggcggcccgacggaggccgtggcggctctccaaggcggtcgcggaccacggcgcatggcgagcgcctggatcccggcgagggcgcggtcgccccttgcctggtcgcggctaccggccccagccagggcacagtccggcctcggacggggcggcggctccctggtggcggctactgcaggagctgtgggcggttagggtttgaaaccctagccgcccctcataataggcgttttggacccttgttgggcctcctgggccggccagccaggctgggccggtgcctggtccgcctggcatgtcgcttgggctgttttccagggtccagaatagtctattttaccatttttaaattttaaatttaagtataagtctctgttttatatgtaatttcagttcaaaattatcttaggcatctagattcgttatttagattgctaaagatatatgtaactgtacatatttgtccattttattatggaaattacagacttgttaatgaattatattttatttatatttataatt

SEQ ID NO: 114041 - DNA, 865 bp, Zea Mays
cggcggcctcatcacccgcgtgctcagcttcaccggctccttcaacgaccggaccagcctgctgcgcgagcacgacgacgcggagctcggcgggcggtcgtccacgcagacggaggcggcctctgctcctcctcctcctccgccgacgacagcaccagaagcggctgcggcgcctgctgccgcaccgccgggcacgacgccgaccgcggccggccactcgatcgacatcgaggcggcgggccacgaggaggatccgggcagcgaccagcagcaggacgcggagtccaagcgcgtgggcaaggccgtgcagaccgtctgcctcttcgccgcgtccgcctcgctcgtgctgttcgtcaacctccccagccagcagcggcagccgggcgccgcgctgcccccgccggccctgctgtacggcgccgacatggcgttcatcgtcctcggcttcttctccagcctcggcctgtccatgttctccatcgtggcgaggcccggcggcgagaaagcggcggcggtggccagcagcgcgcagaagtgggggatggtggtggccgtggcgtccgtggtcgtcgcgttcacgctgcgcgtgtgcatggtgcccgctgccggtgtctagttgggctggatcggtcggcacgcgcgcgcgcgtgtgcacaacggcttgcgggtcgatcggtcgagactcatgttgtgttattaactcggcgatggagaagatacatgcccggctctctgggctctccatcgacatcgcccatcgatccgtccatagatccattcaatttttcttgtcatcaaactagtacttaaggttagaatagaacattctaagaattatttatggaaatacgtgcatgtcgtaata

SEQ ID NO: 114042 - DNA, 1577 bp, Zea Mays
agggtcatccgagttgccagccaattttgcatccccaccacccacacccagtgacagagacagaaggccgggcagggccacgcgacgcgacggagatggagcacacgaatcatcgccgccgccgtcaagctttggccaccgtgtcggcgacgacgacgctcctgctgcttctcctctgcctcgcggcgttgacgacggcagaggcgctgcgcgagcacagggatgagggcggcgctagcagcagtggcggaagcggaagcggctgcggcagcaacgccgccggcggcaagcaatcgccggccgtgtgggtgttcggggactcgtacgcggacacggggaacctgggcgacctcgggcgggagctgacccgcgagtggtacgacccgtacgggaccaccttccccggccggcccgccggccgcttctccgacggccgcgtcctcaccgacttcatagcctccgcgatgggagtgccaacgccggtggcgtacaagctgcgcaggggcgctgcgcgcgggctcgtggcgcgcggcatgaacttcgccgtcggcggcgcgggcgtgctggacaccggcaacttccagcgcaacatcggcgagcagatcgacctgttccaggcgcagcgcccgccgtcgccgccctccgcccgcggctgcgacgccggggtcgccgtcgtcgtcgtctccggcaacgactactcctacgccgccgacaaggacaacagcacaagcgtacgcgccgcgatcgcctacatcccggcggtggtgcggcagctccgggagcagctgctgcggctgcgcgacgaggcgggcatgcgcaaggtggtggtcaccaacctgcaccccatggggtgcacgccgctcttcacccgcgctctcaactacacggcctgcgacccgctggccaacgcgggcgccgcgcagcacaacgcggcgctccagtccgtgctcgccgcgctcgacccggccaaccgtaccttcctcctcctcgacctcaacacgcccttcgccgccttagtcgacggcgcggcggcggcgacggcggaggagaggttcgcggagccgaggcggccgtgctgcgagagcttcagcgccgacggccactgcgggcagcaggacgacagcggcaggcggcagtacaggttgtgtagcgacccgagcaagcatttttactgggacgacgtccacccgacacaggccgcgtgggccgccgtctcccgaacgttcaggcccatgattcaagagttccttctgtctacctgatcacagctttgtttcgatcagatgagataaaaactagcactacttatccaaagaaccaatcaagagtggagagctaaccgagttgttggattagtgaaattctcctgtcattgttactctaaaaatggctggatttaaaaaaaaaatccacggtgcgagatgttaataaaaaacgttctccagttcgttttaatccacaaaagcagtgaaaaccacaagcttcagttcgtttttaatcatgtttacgttcactaacatacatttaaccatagaatatcataagagtatcttccaagttagcactaatgataacta

SEQ ID NO: 114043 - DNA, 1458 bp, Zea Mays
agggtcatccgagttgccagccaattttgcatccccaccacccacacccagtgacagagacagaaggccgggcagggccacgcgacgcgacggagatggagcacacgaatcatcgccgccgccgtcaagctttggccaccgtgtcggcgacgacgacgctcctgctgcttctcctctgcctcgcggcgttgacgacggcagaggcgctgcgcgagcacagggatgagggcggcgctagcagcagtggcggaagcggaagcggctgcggcagcaacgccgccggcggcaagcaatcgccggccgtgtgggtgttcggggactcgtacgcggacacggggaacctgggcgacctcgggcgggagctgacccgcgagtggtacgacccgtacgggaccaccttccccggccggcccgccggccgcttctccgacggccgcgtcctcaccgacttcatagcctccgcgatgggagtgccaacgccggtggcgtacaagctgcgcaggggcgctgcgcgcgggctcgtggcgcgcggcatgaacttcgccgtcggcggcgcgggcgtgctggacaccggcaacttccagcgcaacatcggcgagcagatcgacctgttccaggcgcagcgcccgccgtcgccgccctccgcccgcggctgcgacgccggggtcgccgtcgtcgtcgtctccggcaacgactactcctacgccgccgacaaggacaacagcacaagcgccgcgatcgcctacatcccggcggtggtgcggcagctccgggagcagctgctgcggctgcgcgacgaggcgggcatgcgcaaggtggtggtcaccaacctgcaccccatggggtgcacgccgctcttcacccgcgctctcaactacacggcctgcgacccgctggccaacgcgggcgccgcgcagcacaacgcggcgctccagtccgtgctcgccgcgctcgacccggccaaccgtaccttcctcctcctcgacctcaacacgcccttcgccgccttagtcgacggcgcggcggcggcgacggcggaggagaggttcgcggagccgaggcggccgtgctgcgagagcttcagcgccgacggccactgcgggcagcaggacgacagcggcaggcggcagtacaggttgtgtagcgacccgagcaagcatttttactgggacgacgtccacccgacacaggccgcgtgggccgccgtctcccgaacgttcaggcccatgattcaagagttccttctgtctacctgatcacagctttgtttcgatcagatgagataaaaactagcactacttatccaaagaaccaatcaagagtggagagctaaccgagttgttggattagtgaaattctcctgtcattgttactctaaaaatggctggatttaaaaaaaaaatccacggtgcgagatgttaataaaaaacgttctccagttcgttttaatccacaaaa

SEQ ID NO: 114044 - DNA, 768 bp, Zea Mays
agggtcatccgagttgccagccaattttgcatccccaccacccacacccagtgacagagacagaaggccgggcagggccacgcgacgcgacggagatggagcacacgaatcatcgccgccgccgtcaagctttggccaccgtgtcggcgacgacgacgctcctgctgcttctcctctgcctcgcggcgttgacgacggcagaggcgctgcgcgagcacagggatgagggcggcgctagcagcagtggcggaagcggaagcggctgcggcagcaacgccgccggcggcaagcaatcgccggccgtgtgggtgttcggggactcgtacgcggacacggggaacctgggcgacctcgggcgggagctgacccgcgagtggtacgacccgtacgggaccaccttccccggccggcccgccggccgcttctccgacggccgcgtcctcaccgacttcataggtcagttttaagtactgctagcagtgtaccacctgtgtgttttgtttcgatggagccgcgcaagctagctagctagctattcgtagtgaagtgtcagagcaatgcaacgcgggtggtggttattgtcacatggcgtacgggcgatggaggggcatggagccccgccgcagtggctcgccaggccacggcgagcaggagcgcaataaatacatgtggtggcatgtcgacgaccatgctgcaatggcgtggtggcctggctgccgtgctgctgctgcatcgtcttcggcgatggagaggggacaggggaggagc

SEQ ID NO: 114045 - DNA, 2019 bp, Zea Mays
actacgcccaggacacgacagggcgctgcttgttgccgattgctagctggtaaagggtaggccggtgcgtctagctaccttggttggttgggtgccggaatttccatggaggtcgcggtcgtggaaagtcctcgtcctcctccgccgccgccgcaggccaaggaggagaagaggtccgacgccaccaagccagagatcgccgcatcgatggtaggaagcgctctcccaatagtcttcgaaagctttccgtcgacgcaaagagaagcggcggcggcgggcgtcaaacaggaggagcgcaggctggaggcggccagggcggagatgggcgaggtgagggaggagaacgagcgcctcaagtcgatgctgtcccgcatcgtcggccagtaccagtccctgcagacgcacttcctcgacgtcgtcaaggtgcgcgagctggcatcatcgtcagccaaggcggcggcagagaacaagatccccgcggcgccggctctgctgcccggcaccgacgacggcgacgaaccctacgacgacctcgtctccctgagcctcggcacgagggcgaatagcagcggcggcggccctcgccgcaaggggcacgacgacaggtcggcgtcctcgtctggcaccgctgacgagatgcccaataccgccgacgacgaacgccgccaccagatctccctcggtctcggcttcgcgcgcgggcttccgccatcgggcacggcggcggccgcggacgacgacaaggccagccacgacgcgtccacggcgccggtcctgaacctgagctccgacagcagcggcagcgccggggacaccgacaccacgaagcctgccctggccgccgcgggcgccgcccgtaagagcccgagtgccggtgccggagacgggtcagctgacgacgaggtgcagcagcaggccaagaaggctagggtttccgtcagggtcaagtgtgacactcccacgatgcccgatggctgccaatggcggaagtacgggcagaagatctccaaggggaacccgtgcccgcgcgcctactaccgctgcacggtggcgccgcactgcccggtgaggaagcaggtgcagcggtgcgcggaggacacgtcggtcctgatcaccacgtacgattgcgcgcacaaccacccgctcccgccggcggcgacggccatggcgtccacgacctccgcggcggtggccatgctcacctatggatccaccacctccgccgcctcggcctcgctcgtccacggccaccaataccactcgctggcggccgccgccgggcttctcggccccaccaccatggtctccaccgccgcgtcctgccccaccatcacgctcgacctcacctcccccgccgcgccgcactccctcgtgcactcctccttgccctacgccgccgccgccgccgcagcagcagcggggttcgagtccaaggcggtccccgcggcgtggagcagcgggtacctggcgtacggcggcgcccacccgtcctacgacaccaagatctcgtcggcgttggggcacctgttcggtggaagcctgggcgtgccatcgagaccggaacagctgtacgcccagtcgtacctgcagagagctaatagcctgggcgacggccatggtgcggtggcgcccgccgtcacggacacgctcgcgaaggcgatcacgtcggatccgagcttccagtcggtgctggcagcggcgatcacgtccgtcatggggcgcggcggagccgctgctacccagaagtgatcaagatcgatggcgcatgcagcattcgctcatgcataagatcgacttgcaagggcagatcgccgtttttgaccccacacacataggcatgcatggatcggtggttcatgtgtaattaataattccatcacatggttaatttttctttgttcattggagtgttagtaattggccggcttgggaaatgggaatagtgatcataatatgtcaatgtaacagggataatcaatttgatcgatagatgtacatatagcacaacgagtcaaaaat

SEQ ID NO: 114046 - DNA, 920 bp, Zea Mays
cgccacgccagtacttttcgcagccgtcgtgcaaagctctctccaagccctcgccctttcacgctcccttgagggctttgatgcgggtggagtccagcggcggcctcccactcccagagctggaaagacagcaggcgggcgccaagagacgccgccggcgggcacgggcggcggcggcggcggcggcaccccgaacgatggccgcgcccgccaccgccgtgcagcggctcttcgaggcgtgccgcgaggtcttcaccggagctggtccaggcgcggttccaccgccggccggcgtcgagaggatcaagtccgttctagatagtatcacagcagcagatgttcgtctaacatccagcatgccatatttccgacgtgttgacccctacggcactccaaaaatcacttacttgcacctatacaagtgcgaggctttctcgatcggcatcttttgtttgccatcgaggggtgtcattcctctccacaatcaccctggcatgactgtgttcagcaagcttttgtttggtgccatgcatataaaatcttatgactgggctgcttctcaacaagacacacctgatgttcagttgcaagcaggaccacgtttggcaaaggtgaaggttgatggcatcttgactgcacctcatgaaacggcggtactatatccagaagatggtggtaatatgcattgctttaccgcacagaatgcttgtgcagtgcttgatgtccttggccctccatatgatgatggcagcggaaggcactgccagtactacaatgtccgttcctctgcaatttctgttgcaggctcaactatattgcctggaggtgacagatatgaatggctggaggagagcgagccatctcgagatttttatcttgttggatcaacatatatgggcccgaaaattttggaccactga

SEQ ID NO: 114047 - DNA, 1222 bp, Zea Mays
aggctatttcctctgattgatacgccactgtttcgaagtgatacacaaaaaaatgaaaaagcattagtcacttcaagcacagacagaacaatccgtctttgttggaagggctactcacgctgttacaagggccattcagcgcctgtgactgctctggctgacagattgcttatggatggtgaatctaaactacttgcaagtggaggggaagactgcaccattcgtctatggtctatgagtacgagggcgaaaaatcacccactaatagcaacatttcatgggcatgaaaaggcactgtcatttttatctgttgcgtggcataaatcgtccctgttggtgagctgttccaaagactcaaaggttaaagtttgggacacagtgtctccttcgagtggttcatcatcatgtgtaggcagtgctcacctcaactcaaacgggccaccaattgctatgaaatgccatgaatccctttgctatatcgctgctggagctgaagtgacagcgattgacttgaggacaatgaagaaggcttctgtccttgcactccagaaccacagaatactttcttgtgagatgatgccttctgaatggttaatatgtactggcacgaaagacagggctcttctatgggacatccgcaaggctcaggagctcccaaacacagtggcggagatgcaatcgagcggcccggtgacattgcttcacttggaccaatacaaggtggtgaccggagtgccgtcggacggccaggtccacgtctgggaaacacggacggggcactcgctgaacacgttgggctgtggcgaaccttcgagactgggtgtgcggagcagggtgtcggccatggccgtggacgggtgcaggatcgccatggcgggcagctctccggaaggctgcatgctgcactaccgtgacttcgcgacggcttctgcccctgtagtgtccttgccaggcaaggagaaggaggtctccaggttctggaggccccaggaattcgacgacagcgaggaagaggagtattgattaatcattacatccccagttccaaattataagtcactttgacttttttttacgtaaattttgccatgcatagtaaaattgatgtaccaaaaaaagagtcaaagctacatagtttggaactgaattagtattacgctatctcggtgagcttccagttctgctacatgcagacaagagaaaagcttgtatatataaaaag

SEQ ID NO: 114048 - DNA, 395 bp, Zea Mays
ggccaccgggcccgccgccagacccccggtgttctcctcgccggcgatgtcggcgccgcctgtgcgtacgctcgccgaccttgatggcgacgtgctggctcactgcgccggctacctcggcgcccgcgacgtcgccagcctcgccatggcctgccgccccctgcgcgccgccgcgtattgcgacgcggtctggtaccgcctcttcagggatcaatggccatttgagaaagtgccttgtgatgctttggggctaagagaactatacatccatagacacactgaaatacatcagatgaaatttggtgaccccatatcagctctttattacttagatcctgcgggaacaacaccaagtcatgtaatgatggataggaactccatctggttttgtcaag

SEQ ID NO: 114049 - DNA, 1715 bp, Zea Mays
actacaaccagtacacgacgcgctgtgcagcctgcaagctgcaaggcaagttccgtccagctcctcctccatttaagccgcctgcctggtgcctccagtccacccaacaaattcccgagacgccattctcaccatccacacaaagccacagcccaagagcagagtcgtcgtcgtcgtcgggcatggcggggttcaaggtgacgcggatctcggagggccccgtgaagccggcgtcggcgacgcccgaggagacgctgccgctggcttgggtggaccggtacccgacgcaccgtggcctggtggagtcgatgcacatcttccggtcgggcgcgggcgaggccccggccgtgatccgggcggcgctggccaaggcgctggccttcttctacccgctggcgggccgcatcgtggagggggagcagccggggcgccccgccatccgctgcaccgccgacggcgtctacttcgcggaggccgaggcggactgcagcctggaggacgtgcgcttcctggagcggcccctgctgctgcccaaggaggacctcgtgccttaccccggcgacgaccgctggcccgtcgagccgcacaacaccatcatgatgatgcagatcaccaagttcacctgcggcggcttcgtgatgggcctgcggttcaaccacgcgtcggcggacggcatgggcgcggcgcagttcatcaacgcggtgggggacatggcgcgggggctggcggagccgagggtgctgcccgtgtggcaccgggagaagttcccggacccgagcatcaagccaggcccgctcccggagctgcccgtgctggcgctggactacgtcgtgctcgacttccccacggcctacatcgacgggctcaagcgggagtacaaggcgcacagcggcaggttctgctccggcttcgacgtgctcacggccaagctctggcagtgccgcacccgggcgctggccctggacccggccgccgaggtcaagctctgcttcttcgccagcgtccgccacctgctcaagctcgaccgggggtactacggcaactccatcttccccgtcaagatgtccgcgccggccgacaaggtgctggcctcctcgctcgtggaggtggtcgacatcatccgggaggccaaggacaggatggccgtcgagttctcccgcttcgctggggaggagacggaccaggacccgttccagatgaccttcaactacgagtccatctacgtctccgactggagcaagctcggcttctccgaggtcgactacggcttcggcccgcccatcttcgccggcccgctcgtcaacaacgacttcatcgcctccgtcgtcttcctcaaggcgccgctcccgctcgacggcaccaggatgctcgccagctgcgtcaccaaggaacactccgaggagttcgcccgtggcatgaaggaagacctgccctgaacttgttcttcctagcttattatatactgctgatgatcatcctgagccctggctgcagggagatgatgaatggtgacgtaaacatgcttctgtttcgttgatgctgttgttacttttggttgtattttttttggggttcactttatcttggtcaatacgtaccacattagatcacagcaagcaaattcgatcttaatttgtactacaccatttgatatgagaccgagacaataaaaaaggttatactgtccaaaaaaattcgaaaaaaattgcaaaaaa

SEQ ID NO: 114050 - DNA, 699 bp, Zea Mays
aaggcaagttccgtccagctcctcctccatttaagccgcctgcctggtgcctccagtccacccaacaaattcccgagacgccattctcaccatccacacaaagccacagcccaagagcagagtcgtcgtcgtcgtcgggcatggcggggttcaaggtgacgcggatctcggagggccccgtgaagccggcgtcggcgacgcccgaggagacgctgccgctggcttgggtggaccggtacccgacgcaccgtggcctggtggagtcgatgcacatcttccggtcgggcgcgggcgaggccccggccgtgatccgggcggcgctggccaaggcgctggccttcttctacccgctggcgggccgcatcgtggagggggagcagccggggcgccccgccatccgctgcaccgccgacggcgtctacttcgcggaggccgaggcggactgcagcctggaggacgtgcgcttcctggagcggcccctgctgctgcccaaggaggacctcgtgccttaccccggcgacgaccgctggcccgtcgagccgcacaacaccatcatgatgatgcaggtatcttagaccacaccacacctcgcctcacctcatcccgtcagtcaattccgcagcgagctttgtttggaccatacgacccgccgacggccgacgagctcagctcagcgcgcgcgctttgtttggagaggga

SEQ ID NO: 114051 - DNA, 912 bp, Zea Mays
caactgcataaccatttcgaggcctattttgagaagcccacagacggaagattacgtctccttgtcacggcccaaatagagcatacaagaactcatcagaatctccccgccgccatgcggatctgcagtaccttcatcctgtttgatccaaagccgactccttttcttcctctaatccttctttctggcagtatttgttagggttttctccgggattgaaggcactgctgcaggctgaaacgtttctcgcttgattggcggaagaagggattccagcgatctgtttgctgctagctgcgagagttcaatatgtctcggaccttcaaatcgacgacgggtctctctcggcggtttctgaatctgatcgcggccaaccactcccctggcgtcaagtcgctgcaccgcatcggcctgggtcgcatctttaactcaacgccagcgccaataccaaacggagatcgattggagtccgcagcaggacaagaagactacatggtgcggccccgcgcgttggatatcattcggctccccacgccggtaatgagcttccgatcttcagcgtcatttgaaagcaaagaatggaagttggattgcttcccgttttcggactgcaaagttttctgcatggaccagtcagggcgcggtttcctcttcgatgccaactcgtgcggggtgtcaaccgtggcccatctccatacacccaagcagctgaagacttcttttctgctatgcttgattgatggggctgcgtcttcacccagttctgcctgtggcttgggctattttatcttcctctgcgcattatgtttttcggctcactttcgagcttgtatccccggtattgtaataacattattcagactctgtaactatttgaagtaatgaatgtggttactagcctcctgggactag

SEQ ID NO: 114052 - DNA, 1501 bp, Zea Mays
ccgacggaaggcccttagcagcgccgccaccaccacgggagatgcgtggagagatgaagcaaaccaagtcaggaagaatagaaatgagggcagaatggaatgaaacaagaacttgtttttttgtgagcttactgaaggagtacaattcaccaagatatcgtgcccaaaatggttggacaaaagaagcatggaacaacatgacacaacgcatcaacgataaatttgaaacaaattttgtggtgacgtaattgaagaacaaatgaccagtgggggccgaataaacttacaaattcataccgaattttgcctggtccactaaagctgcctgcgcccccccccccccccccccccgcatgggctcgtagcccacagacgtcccaggagctggcccaatttatcttcgccatccatttcgattgaatggccacgatttaccgaaatcgcatatataaatgaaaatttcggcatgccctaaccctagcttcattcgcttccgatatttccggagtggtatagggcggatttggtggcggcgactgtgaggcgggcgagcgaggtggtcattgggctcgcgccggagaacgctatgatcccgctgttcgagacggggggcgcgcagctcgagctcatacgggatgccgagattgagccgtgtgcctacgtgaggtgggagcaagggaggccgagaggatccgcttcatgagttggatgcacacgagagacgttggggatcccagcttcccaatgcgggagatccagaagagtcaacggcggatcgatcaagtggattagcactctcccctgtctgcgtgatctgtagaacaaggataagtcggggacgctgttctgctttgccgcgatggaacatgtgttccaatccgagaatttcaggctggggcggttgggatgagggggaagccaatgggagatggatcaaggagatgagcatgggctagacgacttcctggtgaaggtagcttcaacagaccataactttcatgacgcttcaacccgctgcaatgaagacggcgatgaacacaatttcaacataacatataacggtgaagggtttagtagatgaatataataggggatgtatgtgacaaatagaagagttctcaccaaaggcaaatgaacaaaaccgaaaagaaaaggaacatcgtatgtaatttatagtgaaacaaaatatatgtaaagaataaagagggacgtgaggcgttgtgagagcggcaagatccgattaaaaaattgccataaccgagtgaattcgagtgaggtggggggtgtggaaagcgtgaaatctggttggcaggccctattgtcagagtgtgcattaaaatcggatcaggtggtctggcaccggttcaggagaaaccggttgcgtgggaacgtgggtggactggcaccgggtcaggagtaaaaccggtcgcgtggtggcgtcagttggcgggtggacgcgcgcttcgcactgggacgcacgacgggacgacaagtgacgctt

SEQ ID NO: 114053 - DNA, 304 bp, Zea Mays
ttctggaaattaatattcagaatcaagggagctgttaactgcaatacacaagtttattcctctagaaaatgagacggcaattcttttggtttgttccacttcgcacatctgcattcccacaagtcacaacaaacaatcacgaccatcagctgtttctatggcaggaacacccgaagtagcaaataaacaggtttatccaaaacacccttagatattccttttgataatcaactcccatacacgcagctcagtatcccagtgccaaaacgtagtatccttgcatccagtgcacttcgttcaaatc

SEQ ID NO: 114054 - DNA, 2046 bp, Zea Mays
gaaagatgaaaatcgtttttttttttggcgctgcaagcagcagcttttctgggtcaatttacaaaaataagtagagagaattacaatccaagacgacctttctgcagccacacgaacgccaacggtgcgagcttctcaggcagcgacgtgcccatcccgcacgtcacccgcatcatgcacggcatgaacgcgccactgagctgccgcgcgcggcaacagagtaaccgactgccccgcgcacgtacgcgaacgccacacgcactaattaacgctactatcagagtattgctgagcttcacgcggtgagaccgagccgctggaggtgatggtcagtgtcctccgggtggtcgtcgagcaccctctgccgcggcggcagcacccaccggccgtcctccgtcctcaccatgcccttgttctccgcctggtaccacacgggcggcaccatgtggtcctcccggaggaagtcggtggacttgttcaccagcgcggggtccctcccgcggggctcgaaccccgcgccggagccgcggaagccgtccagcaggtgcaggtgcgcctccaggttgtggtagcacgagaggtccagggtctccttgaggaacggcgacaccttgtggtccagctgcagcagcacgcccaggtgcgtgtacacgccgccgaggcccagcctgtccgccgcccgcaggacgagctccgggaacgccgactcgttgaagaacacgccgggcaccttgggcacgctgtcgtgcacgttcacgacgcgcagcgcccgcacgcccagctcccgctcgaaccgcctccggaaggcgacgttcccgacgcgcgggccggcgaaggagaacacgcacaccggcgccaccctgtcgcccggcgacacgttcgcgcgcgtctccgcgatgtcgaaggcgcacagcatcgccagcgcgctgcccaggctgtggcccgtgaccgtcacgctcacctgctcgccccgcccgtggtacagatccaccagcttgcgcacctcggccagcacctgctcccgcgccgagtaccggcagaagcggcagccggtgcccttgtccgtgtacagcgccacgaaccctcgctccaccttcacgtcggggtccgggcaggggacgcccgtctcgcgcagggggatctggttggccgtcagatcggccacccactcgaggcgggtgatggtgccgcgccacgccacggcgatgtcccggcggccgagccgcgccgtctcctcgtcggtggacacggccacgtacccgatgaacgtgccggactcgctccacatcttggcgttggcggccgtcttgatgccgaagttggggaacttgaggtcgttgcaggtggcgtagaggtagcgggtgacctcgtagccgatgccgccgaggccgacgtcgtggaagaaggtcttcgccgggtacttgcagctgccgcagtagggggagaagcggtcgtagtcgaagctgtcgtaggtggcctgggcgaactcgccgtagcggatgagctcctggaggagcacgccgtcgatggggtccagcaggccctcccagttgttgctgccgtggatctccggccaccgcgcggcgagctccccatcgtcgggcgccgcctgatgagagctgaggtccacgtcctcgatcgtcacaggggcggcctcctgttcggctctcgtcgccgaggcgacgacgacgagatagcggcgagaacgacgacggcgctgaagcgtgttcgtcagtgccacagcggggaacccgccggcccggtggtgcacggtggggacgaggctcaggcaggaagatacggtggccgccatcggctgcttggtgctgcggtcaccgtagttgtcgacgcggtcagagatcacgcagcacgccgctgtgtgtttgttttgaatgtgagtgtagtctagctagactactcgtgcgcgcggtggctagctacagtcttatctttcttgctttcttgatgtgtgtttgagctcggtgctcggaggaggaggagctcgccattgatatatggcgatgcgtgcatgggatgagaactgac

SEQ ID NO: 114055 - DNA, 1520 bp, Zea Mays
tgttaagaagataaatacactatgttaggtgcattcacatcctctcaacgggcctcaacattacaatgtggtcacttcgacccagattttgttgaagcactcaaagcttcttaccatgctcgatcttactatggactgccatgctaccagtgtacacgctgttctgctcttttctggtataatgaaagaataggatcgtcaagtggaaatcgatcaattgtttacaataattgttgcaaaagtggcaaagtctgtctccctccttacagccctagacctgaaccactgttatcactagcacggtttgatggcgattccatatctaaatccttcatgcaaaatatcagacaatataattgcttgtttgcattcacatctatgggagcccatattgataggtcagtgaatgatggtcatggtcctccaatctttaagatatgcggccaagtccaccatcgaataggatcattactgccaataaacgaccagcctcccaaatttcttcaactttatgtgtacgatacaacacatgaggtcaacaatcggataaactctctatccactgctgatggtcctacctcttctataagacaagatattgtacaagaattatcaaagatgttggacgagcacaatccctttgctaagaaatttaggcttgccagggaaaggcttaatgaacacacaaatgaagaatttatcatcagaattattggagctagggaaggagatcctgtgcagtacaatatgccaacaaccgatgatttagccatgcttgttattggtgatttctcacttgataccttcaaacgagacattattatagagacaagaaattcggaattgaggtgtatttcatcattgcatccagcatatatggctctccaatatccacttctttttccatatggagagcgtgggttccaagttggtgtagcatatagtgatacaagggttagaggaacaaattcaagggctcataataaccatgcaagaatactattgctatcaatttcattacaaggttggccaaccaaatccattttctgtcttatgggacactatcaaaccaagctaaagttgatgctcgtgcctgtattgatgaaaatagacttatgtatattctgaataatcaagacaaattacgaatagaaaacctccaaggcatatcagatgctgttagtaaaggctgcataaacggtgacgaaatgggaaaaacaatcgttcttctggcgtcacacattggtggacgacgatatatgatacaaaattaccatgatagcatagccatctgcagagtccatggtccaccagacttttttgtaacatttacatgcaatgcaaagtggcctgaaattgtagatggtcttcaacactctggccaaaaatcttcagatgcacctgatattcctgtaagagtatttcatatgaaattggaagagttgttacaggatataaaaggttgtaatatatttggtccttgcaaagcaggtgcaaatacattttactatgttttcatg

SEQ ID NO: 114056 - DNA, 1227 bp, Zea Mays
gcgcccctcctccgtgcgtgccccgcccccgtccttcgctcacccgatgccctgccacctccgccgcgatagcctcccccacgaaatgcccccgtgatgttcgccccgctgcgaacccctccccctagatggaataagcagaggtccaatgcggatccgcggcccccgaccctccaccttggtgtgacagtcgcggctccgtggaggcaacttgctccctcgctcccacctcccacgccgccactgttgtcgccttcagcacgctgcccagcccacgccccccccccccccccgcctccaaatgtggatctgccaccccggccctccaccttggtgtgccttcagcacgccaccactgctgtttgattccttctcctttttgtttaggacgtcgccaaattccatccatctctcagcgccgtggtctcccgatgtggatgggggaaggaggaattaaccgagagcttgctgccgcaaagaaggttgctttgctacttctatgaatcttcggacttaagttcatacaagttcaaaaataaggacttaagttcataccacatctttttctggatgtgcactggcaattctggcagatttctcacatctgagatcgggagaagaaagcattttcaaggagaatagccgatctgttgatgtgcttggccttaagactgcttttgcaaccttcatgggtaaggttccagagaagaaagcgagggaatggtgcgcctccaagggcgatattccatacttcgagacctctgcgaaggaggaccacaacgtcgacactgctttcctatgcatcgctaggctcgctttggagcatgagcatgaccaagacatttacttcaagacagttgtggaacaagtcccggacactgaacagacaagcggatgtgcttgctaggagccagccatttcctggaaggctggaactacgtggatgttactgaaggactggcccccgatatgtttccctcccattttttcttttgagctccagtaactttattactattctgtgttgctctcactggattttagcacttctgtaagttgtcatcttttaaagttaagaatttttacataagtcttacacatcgaacaaatccaccatgtacattaagatgcaatgcttatcgaacactcaagtattatgctcttgtaacctaaattaatcaaaattgggcaatgatcagcaaccgacttgtgctaaggtagaaaaat

SEQ ID NO: 114057 - DNA, 1111 bp, Zea Mays
gcgcccctcctccgtgcgtgccccgcccccgtccttcgctcacccgatgccctgccacctccgccgcgatagcctcccccacgaaatgcccccgtgatgttcgccccgctgcgaacccctccccctagatggaataagcagaggtccaatgcggatccgcggcccccgaccctccaccttggtgtgacagtcgcggctccgtggaggcaacttgctccctcgctcccacctcccacgccgccactgttgtcgccttcagcacgctgcccagcccacgccccccccccccccccgcctccaaatgtggatctgccaccccggccctccaccttggtgtgccttcagcacgccaccactgctgtttgattccttctcctttttgtttaggacgtcgccaaattccatccatctctcagcgccgtggtctcccgatgtggatgggggaaggaggaattaaccgagagcttgctgccgcaaagaagatttctcacatctgagatcgggagaagaaagcattttcaaggagaatagccgatctgttgatgtgcttggccttaagactgcttttgcaaccttcatgggttccagagaagaaagcgagggaatggtgcgcctccaagggcgatattccatacttcgagacctctgcgaaggaggaccacaacgtcgacactgctttcctatgcatcgctaggctcgctttggagcatgagcatgaccaagacatttacttcaagacagttgtggaacaagtcccggacactgaacagacaagcggatgtgcttgctaggagccagccatttcctggaaggctggaactacgtggatgttactgaaggactggcccccgatatgtttccctcccattttttcttttgagctccagtaactttattactattctgtgttgctctcactggattttagcacttctgtaagttgtcatcttttaaagttaagaatttttacataagtcttacacatcgaacaaatccaccatgtacattaagatgcaatgcttatcgaacactcaagtattatgctcttgtaacctaaattaatcaaaattgggcaatgatcagcaaccgacttgtgctaaggtagaaaaat

SEQ ID NO: 114058 - DNA, 1776 bp, Zea Mays
cgatggcgctcgccacgctgctggcgcacctcacggcgggccgcttcggccgcgtgctggcgcttacgagcggcggcgcgccaactgcgtccgccgcgcaccgcgttctccacctcctcctccgcacctccccgccgcccccgctcccgcgcctcgtcgccatcgcgcgctggtctcgcgcccacttccgcgcgccgctcccgctccggctccacgcgctcctcctggcccgtctcgcctccgacggcagcctccactctctcctccgctccgagctccacgtcctcgccgcggggcgcctccactcgcccgcgtccatcctccgcgccctccccgcttcgtccggcccgctcgtcgccgacatgctcgtcctcgcgctcgcccgggcctcccagccgctggccgcgtacgaggcattcctcctcgccggcgccgactgcccgcgctaccgcccttcggccttctccgtgaacgccctgctcgccgccctcgtccgcgccgaccgggtcgacctcgccgaccgggcgttcagggcggcgctgcggcggcgcgtgtcgccggacttgttcacctttaacatcgtcatctccgggttctgcaagactgggcagctccgcaaggccggtgacgtcgccaagaacatcagtgcgtggggggtggcgccctcggtcgccacctacaacaccctcatcgacggttactgcaaacgcggacaagttggaaaaatgtaccatgtcgatgcgctgttgaaagagatgatccaagctggaatttctcctgacgtggtcacattcaatgtgctgattaatgggtattgtaaggagcccaacattacagctgcaatcaaggtcttccaggagatgagacagcaggggattcctgcgaatgtggtgacatacaattcacttgtttcagggctctgcagagaggggaaggtggaggacagcatcaagctggtggaagagatggaggagctggggttggcatgcatattgtctaccatgaacagtgtgctgaacgggttttgcaagaaaggcatgatggtggaagctgagggttgggttgatggcattgcacagaggggcatgaaacccaatgtgattacttacaataccttggtcgatggataccggcggcttggaaaaatgaaggaggcagcggcagccaaggacgctatggcagggaaggggattagtccaaatgttaaaacttataattgcttgataacagggtttaccactagtagggattggagaagtgtttcagggcttctcgatgagatgaaggagaaaggtgtgaaagcagatgttgtcacttataatgtgctcattggtgcgctgtgttgcaagggtgaggtccggaaagcagtaaagctcttggatgagatggtggaggttggtttggagccaaaacatgtggcgtacaataccattataaatgggttctgtgagaagggggacgctcagggtgcccatgaaatcaggcttaggatggagaaacgtaagaagcgggcaaatgtggtcacatacaatgtgtttctcaagtacttctgcaagatggggaagatggacgaggctaatgtggtactgaatgagatgttagagaaaggtctagttccaaataggatcacttatgaaataataaactcaggcatgatagaaaaaggttatgtgcctgatataagtggatatgctgcagatgtttctaaaaacttgacatcttcctgaaagatttgttcttgtaatgtgccaatatagcttgttagaacttgctgtg

SEQ ID NO: 114059 - DNA, 1597 bp, Zea Mays
cggccgcgtgctggcgcttacgagcggcggcgcgccaactgcgtccgccgcgcaccgcgttctccacctcctcctccgcacctccccgccgcccccgctcccgcgcctcgtcgccatcgcgcgctggtctcgcgcccacttccgcgcgccgctcccgctccggctccacgcgctcctcctggcccgtctcgcctccgacggcagcctccactctctcctccgctccgagctccacgtcctcgccgcggggcgcctccactcgcccgcgtccatcctccgcgccctccccgcttcgtccggcccgctcgtcgccgacatgctcgtcctcgcgctcgcccgggcctcccagccgctggccgcgtacgaggcattcctcctcgccggcgccgactgcccgcgctaccgcccttcggccttctccgtgaacgccctgctcgccgccctcgtccgcgccgaccgggtcgacctcgccgaccgggcgttcagggcggcgctgcggcggcgcgtgtcgccggacttgttcacctttaacatcgtcatctccgggttctgcaagactgggcagctccgcaaggccggtgacgtcgccaagaacatcagtgcgtggggggtggcgccctcggtcgccacctacaacaccctcatcgacggttactgcaaacgcggacaagttggaaaaatgtaccatgtcgatgcgctgttgaaagagatgatccaagctggaatttctcctgacgtggtcacattcaatgtgctgattaatgggtattggctctgcagagaggggaaggtggaggacagcatcaagctggtggaagagatggaggagctggggttggcatgcatattgtctaccatgaacagtgtgctgaacgggttttgcaagaaaggcatgatggtggaagctgagggttgggttgatggcattgcacagaggggcatgaaacccaatgtgattacttacaataccttggtcgatggataccggcggcttggaaaaatgaaggaggcagcggcagccaaggacgctatggcagggaaggggattagtccaaatgttaaaacttataattgcttgataacagggtttaccactagtagggattggagaagtgtttcagggcttctcgatgagatgaaggagaaaggtgtgaaagcagatgttgtcacttataatgtgctcattggtgcgctgtgttgcaagggtgaggtccggaaagcagtaaagctcttggatgagatggtggaggttggtttggagccaaaacatgtggcgtacaataccattataaatgggttctgtgagaagggggacgctcagggtgcccatgaaatcaggcttaggatggagaaacgtaagaagcgggcaaatgtggtcacatacaatgtgtttctcaagtacttctgcaagatggggaagatggacgaggctaatgtggtactgaatgagatgttagagaaaggtctagttccaaataggatcacttatgaaataataaactcaggcatgatagaaaaaggttatgtgcctgatataagtggatatgctgcagatgtttctaaaaacttgacatcttcctgaaagatttgttcttgt

SEQ ID NO: 114060 - DNA, 372 bp, Zea Mays
cagaaatcaaccaagaaggaagcaagcagttcaaagccagttcagaaatgggagcctaagggcagggatgacgaaggaccagagaagaaaaaggcaaagaagaaaaaagatcctaatgcccccaaaagagcaatgacaccgttcatgtatttctcgatggctgagcgaggaaacatgaagagcagcaacccagatttgcctacgactgagattgcaaagaagcttggggagatgtggcaaaagatgtcaagcgaagagaagcagccttacgtccagcaggcacaggtcgacaagaaacgttatgaaaaagagtctgccgtctatcgtggtgaagctgcaggtgacgtggattctggcaacgagtctgattag

SEQ ID NO: 114061 - DNA, 1193 bp, Zea Mays
tccggactcttccggaatcccaacaacacagggcagggacgcctccgcctcgccgcgccaggcagcccgagcacactccaccacctttcagaaccttccatcgccttccagaagcccatccctcaccacccatataaaccgccccctccggcctcgtcactccccacaccaagaaagaatcacacaacagcagctcaaaaacctaacacacctcaacaagcagagcaaagacccgggattcgccggcgcggtagcgagagcgagagatggacgggaggatgttcggtctcgagacccccctgatggtggcgctgcagcaccttctggacgtgcccgacggcgacgccggcgcgggcggcgacaaggcgagtggtgccgcggcgggcggcgggcccacgcgcacctacgtccgcgacgcgcgcgccatggcggccaccccggccgacgtcaaggagctcccgggcgcgtacgcgttcgtggtggacatgccggggctgggcacgggcgacatcaaggtgcaggtggaggacgagcgggtgctggtgatcagcggcgagcggcgccgggaggagcgcgaggacgccaagtacctgcgcatggagcggcggatgggcaagttcatgcgcaagttcgtgctgccggacaacgccgacatggacaagatctcggcggtgtgcagggacggcgtgctcaccgtgaccgtcgagaagctgcccccgcccgagcccaagaaacccaagaccatcgaggtcaaggtcgcctgaggtgggactaggtcgaccgatcgtggctctgaagatgtgggagcagtgccagcgagttgtgaggacctctacctgtgtggaatgtggcgaggaataatcgtagtctgtagtgggggtgcttctggtgtgcgtgtttgcgttccttcggtctcggtgtctgtctaccaattcctatctgatgtatcggcttcggtttcgtatgaaccatgccggatgctttcagtatgttcatctacctgtgtcttttgtctaaataatccgtagtcttcattgacagaaagactacacacgttatcctgacaagacacgaaatcccaataaagtttaaattcaggctactaccaagaacccaaaaaaattataatcaaaatttcaagggcagagtccggaagtgcaaagcaaaatgaaccaatagttcaaattcaggct

SEQ ID NO: 114062 - DNA, 576 bp, Zea Mays
atggcgccggcgccggcgccgcagcatgggccggggcagatggagggccagggtcgtcgggtctggcgcgtcggcagggtgccgtgcgccgtggtcgcccggctgctcctcttcctcggcgtgaccgtcggctttgcgttcgccatctaccgcgcgtgccacaaccacaacaagcgcgaccttgtgttcgccatcgtcacctacttcctcgtcgtcgtgttcgcgtgctgcttcgccaagctccagcagctgcggcgcgacccggccgccacggaggcccagatgcggcgtgtcaggatcgccgcctgggtcgtctcgacggcgctcggcatcgcggccacgctgcgcgtcgccgacgcggtgcacgggctggcgctgaagctggttgtgtgggctgtctccatcgtgctccacgggctcgggttctacttccttttcctccgcaaaggcgccaacaccgcgctcgccaacccgagtcggctttgcccggccgggtgtccccggaggagaaggtctagtgaatccaatgtccgcgggtatcggtgtatgtattgcaattgcaacaccatagattag

SEQ ID NO: 114063 - DNA, 1791 bp, Zea Mays
ttttttttgtcaggtggagtattctgagcttagaattatctacaaacgagaggaaaagtagaaaaatactgctattactatctgataaacgcgcgactggaccgggtcgagcttttgccacgcgctcgtccacgttcacagtcgcagactcgcagctcctcgtgctcagagcgcgatggctcgcccactcgcctgtcgcctcgcgtcggattccagcagcgtcaagggttgcgtgctcgggcctcgggctggtgagagaacgaagagccgtgggtgcaactgcaactgcaactgcaacgaactagccgcgtccactgccatcattcgagtcttccctggttgcggctgcacagggactcgatggcgtcctcctccctcccggcgcccgcggccggccgcgccgagctcctcaaggccttcgacgacgcccgcacgggcgtgcgaggcctcgtggagtcgggcgtctcgtccgtcccggagctcttccgccacgcggacccctacgcctccatcccgctcgccccgcccggcgtttccatccccgtcgtagacctctccctcccgccccacctcgccgcggcggccgccgcgtcggccgcccgcacctggggcttcttccacctcgtcaaccaccaccacgccctccccgcggccgccgccgccgccgacgacgactaccccgagcgcgccttcgcggcggtgcgcgccttcaacgaactccccgcccacgagcgcgcgccgcactacagccgcgccgtggacggcggggtcaactactcctccaacgtcgacctgtacaactcccccgctgccagctggcgcgacaccatccagatcctgctgggccccaaccgccacccggacctcgccgaccggatcccggccgcctgccgcgccgaggtgctcgagtgggaggtccgcgccaccgccgtcgcccgcgccttgctcaggctcctctcccaggggctcggcctccgccccgaggcgctggaggacgcgtcctgcgccgacgggaagctcatggtgtgccactactacccgcactgccccgagccggagcggaccatgggcatcgtcccgcacacggaccccggcgtgctcaccgtgctcgcgcaggacggcgtcgggggcctgcaggtgaagcaccaggatgaggacggcaaaatctcatgggtggatgtgaagcccgtgcccggagcgctcgtcatcaacgtcggggacctcttgcagataatgtctaatgacaagtacacgagcgtcgagcatcgggtggtcatgaacacacgtgaagaacccagggtttccatcggcatcttcttcagccctgggaagagaggggactcggtgttctatgggccgctgccagagctggtctcttcagagaacccgcccaagtacaggaacttcaccatgtccgagttttacgggaccttcttctcacgagaccttgccagcaaggctctactcgacaacttcaagctgtcaccttaaagtgtcgactccagctcgaatagtttagatagactcgtgtatactatagtcatgcgtgaattgtgattgccggctggcaatgtatagaaattgttctgtcttggcctgcatcagtcgtacgcaggtcaccagccgacaccgcagtgtgcccggccgcgctgggcacgctgcatgaccggccagagaagcaacgtcacagaaactagccaactgttcaagcgcgttggatgataccacacggcacaaacctgtggtaaacgaaccaaacataactgagctgaaaccgcgcttcgacttttc

SEQ ID NO: 114064 - DNA, 168 bp, Zea Mays
agaaaactgaggtcccgagtagagtttcaaaaactccaaaataccacggttttggataaaccatggtatttaaaactgtgttttgcctgtataaaccaaacaccttttgagtttgaatactatagtataatcaaataccatagtattgtttcaaaactgcaaaaatac

SEQ ID NO: 114065 - DNA, 468 bp, Zea Mays
atggagggccagggtcgtcggggctggcgcgtcccgtgcgccgtggtcgcccggctgctcctcttcctcggcgtgaccgtcggcttcgcgttcgccatctaccgcgcgtgccacaaccacaacaagcgcgacctcgtgttcgcgatcgtcacctacttcctcgtcgtcgtgttcgcgtgctgcttcgccaagctccagcagctgcggcgtgacccggccgccacggaggccgagatgcggcgcgtcaggatcgccgcctgggtcgtctcgacggcgctcggcatcgcggccacgttgcgcgtcgccgacgcggtgcacgggctggcgctgaagctggttgtgtgggctgtctccatcgtgctccacgggctcgggttctacttccttttccttcgcaaaggtgccaacgccgcccgccaacccgagtcggctttgcccggccgggtgtccccagaggagaaggtctag

SEQ ID NO: 114066 - DNA, 938 bp, Zea Mays
cccaactgcaagccctagccatgtcccccgccaccgccgacgaacccagcgtcgcaatggaggagcagcccggaaaggagagcgaggaagccgccgatgcaatggaagagcagctcggaaaggagagcgaggaggcggcagagtccgccgaggaagtggggcaagtcgaggaggagcccgaggagggcgtcgaccccgccgaggcaatggagaaggctggagaggaggcggaggccgaagagggggcgtcgctgcggccggcgctgccggtggggagggtcaagcggatcatgcgggtggaccgggacatcaagaaggtgacgagcgaggcggcgctgctcatcgccgccgccaccgagctcttcctgggcagcctcgcgacaggggcccacgccgcggcggcgcggcgcagccggcgcactgtgcgtgccgtgcacgtccgcgccgcggcccgcgcgcaccggcccacggcggacttcctgcttgactgcctcgctgccgaagaggaggctccccgcgcccgccagaccgcaggatcagcccgcggcggcggcggcggaggaggagggaacgcgaagccgctgccgcgtgggacccgccgcatcgatgccttcttccagaaggttacctagaggtgtctctctctgcgtacgtgcttccatattttggtgatctaaatgtttacttcaaaattctatgggtgctgtgatgaatgtatgaacatgcaattaaattacgcttttctgttcctctgattcgttgtcattttgcttattttccgggatttctgtgtgtctgtgtgagcccataccttgaattgtgcagctgctcctacgatgcaaatttgatggcaatttggctcttctcccttgttattaggctgtacgggtcaatgtgcacatcacttttgggtatgtttagtactaacacatgatgac

SEQ ID NO: 114067 - DNA, 447 bp, Zea Mays
atggatataatagctaaattcaggatattcagctgctgctgctggtggtggcggcggctgctggcgaaacttagaccggaggcggccgacgttgtatgcactgagagaatagagatggccgccggtcgtcggagccggatctgcaggctaccagatgaagctcatctcggcgttggcgcgcgcggcgtcgtcgtcttcgtcgcgggacggggagtggacgtggcggccctcgtaggtggtgatgaccatgcgggggtcctcggcgagccgctccacccgcttcttcacccggcagttgtcctgcgtgcaccggtagtagctcctgcatgcaatgcagcgagcacatcatatcatgcgggggtccccaaaatgaacttagaaagagaaggagagtgcagtgcagagctggctagctttcttgggggacttctccggctcctgtgctag

SEQ ID NO: 114068 - DNA, 499 bp, Zea Mays
acaaaaactactaccttcgtttcgtaaaggttgtcactgatatttttataacatatatttaaggttcgagaagctaaatacatattaccaaagtcaatatcaacatttataagctctcagccaatatttcaaagagctagattttccaagagctcgttttatgagatcacagaaaggtctcggatctatgtgaatgaactcaaatttttttatcatcgttcatcacccgagaacagacagaaatagaatagacagaaagaattttagatctctcgggttagggttttacctgaccctaaatctaggattttcggccactaaatgagacttggtctcgaccaaaccgaggaaatccgagatagtaaaatagatcgaggttttagggttagggtttaataacctaaccctaatcatttttaaatcttggtcaacagagatcagtggctcgggatctttttttacatccacggcctagatgacagaacagattagaataggt

SEQ ID NO: 114069 - DNA, 834 bp, Zea Mays
aagagaacagaacacagaaaaggaaagggggaaaacaaagatcatttaaaaacaataacaagactagcaagtggcagataataagcagaatccaggaaaggataaataaaaatgttaacgctgaaaaaagggggctgaacaatacaatacaaggatgaataaccgatgataactgtggtacaaaaggaacaaacgggcactggaaatttattggtctaaactttgatgtctgactgaactcaactgagctgaaacttctctatacacccagatatatgatatatccctgcacctacaatacaatcccctcctctgctgtccctctcaaaactcttctttattcacagccaattttaaccaccaatcccaagcctaaaacgctccgaagagacccagcagaccaccccgtcacattcaattcaatccctttcagcaccaacgaccgacaccgacagaccatgatttcacaaaattctgtggagattaccacgcgctatcgaagccatgcagccgtcaaccaacaaaaatatgttagcatgacaacgaccacgacactcagaatctggcaagtggtagccatggccggaggggcaagagcagaaccaactatccttccgttccgtgcgtttgagattctctgtcaaggcagcggagggggcggcggcgatccgtattgaactgggtatactggtggccatggatggtgctgatgtgggggaggaggtgatgcgtatcggacagggtctgtgggtgggaatgggccggggtaatatggtggcggaggtggccatggatgcgttggtgtgcagggtagcggtggcggcagggcggggc

SEQ ID NO: 114070 - DNA, 1769 bp, Zea Mays
tgcagagaatatcaatattatcacgttgacacacatgtttgcacttgcacatgcgcttagagcaacaattaattaagtacagttgtagatcgagtcccataacctatgtcgaccgcacgagagctgacggcctagttattcccgccggcgatctgcttggcgacgaacgccttgaggttcctctccgacgagccgcccttcgacgcggcggcgcgcgccttctccctccacacggcggccttggcgcgcaccatgtcggaggtagcgaggtcgatacacctccgcagctcgccggcctccagcaccccgtccttgtcgctgacggcggccctgacgccggtcccgatcctctccaccagccacgcgttggtgccctggtccgtccactgcggcacgcacacgacggggacgccgcacgccgtgctctccagcgtggagttccagccgcagtgcgtgacgaagcagcccacggccgggtgcgacaacacccgcacctggtcgcaccaccccaccaccatgccgcgcccgccgccggccagcgtcgcggcgtcggcgtcggcgccctcgcttctgcggttgtcctcccgcagcacccacaggaacgggcggccgctctcggacatcccccgcgccacctcctcgatctgccgcctgcgcatcaccgacaggctcccgaacgagatgtacaccacggagcccggcgcctgtgcgtccagccactcgaggtagcccttgccgtcctgcgtgaacaggtcgttgttgccgccggccgccgcgtcgtcgtccaggaaggagaggacggggccgacggggaccacgtccacgccgtgctcccgcagcgacgccaccgcctcgggctccacggcgtcgaacgtgttggccagcacgctggggctgtcctcgccgccgtccagccgcccgacgagctcgcggaacgcgtcggcgacgaacgcgtaggggtcgtcctcggaggtggagacgatgaacgacggcaggtcgcggacgcggagcggcgggaggcccgggaaccggacgcccgcccacgggtcgccgcccgccgcggcgacggccgcgtcgacgccgcccgtggcgcggaagaagtgcaggtagacggcgagcacggtggccggctggatccagtagagcgcggcgggcacggcgtgggcgcgcgccacgtcggccacccacgacagcagcagcgtgtacacgacgagcgtggcgggcctgcccgcgccgcggaggcgggccaggacgtcccccagcgtgcgggaccccacgaccttgacctggtccatgtagcgcgtggcgtcgtgcacggcgccgtcgaagccgtcgtcgtagccgtcggagtagggcacgtaccgcacccccgcgccgtcgcggtggccctcctccgcgtctgcctcggcgcccgggaacatcttgcggagcgcggacacggccgtgcagacggtgacccgcgcccccgtggcgcgtagcaggcggcgcgcgaggtggcgcgccgggttgatgtggccctgcgccgggaaggtcaccaccaggaagtgcggctcgggcgccgcccgcctgacgagcccctcctctaccatggccggcattgtgttgtgcgacgagagtcacggaacaacaacaaccgtaccccaggtccccagcaggcagcagctaactggtggtagcctggtcctggtgctgctgttgcacgacaaggctgctgctgctggaagctagcgctagctagtgagtgaggtcgatggctgcggagacgagcg

SEQ ID NO: 114071 - DNA, 5101 bp, Zea Mays
ggacagttagctgtaacctacctttccccgctcttcatcggcaaaaaagagggggaaaaaaaacgaaccctgaagaggagagggaaaaaactcgagaaaagcaaaccctaggttgccatgtcatcgacgacatcctaattcgccgcattgcatcgcccaggcaaggggcttttggcacaggtcggcgctcccctgtcatcggattcgattcccctgctcaatttgccgccgatccgtggttcggatcttctcgccgctcggcgactgtcgcgccattttttctctcgatccgtctgcgagacactaagcgcttcgccgacggtcgaccctgctgacgccaccggcgccaggtggcttgtcgcctactctggtccgccaaccgacgcttgatgcctccagggctccaaaggattgctgatgagatcgaaactgtttctgttaatttatcgtggattcaactgaacccccatgctccacgcaaccgcccctggtctgggtcgaaactctacatatgatgggaggtgaaattctgaggaattatgttaacttgattcgtgggctcgtgaatggaacccagtggcagtgataaacccactgcaacagatgctaacgaatcagtggtgggtttagatggtgaggacactttgtctgagagggaatctgttggagcaaaagatggacctgccttgcctaatgggagtggaaaggaggctcatgcaagcagtccatctgcggcgaataagaggaagcacaacgacttgggttctaatcaaatggaactcaatgaaccagggacgccaagttccagctcaggtgattccacatggagcataaatggtctcgatgactgtcaccaactctcattgtctagaaataagaacgacgactctgaacattcggttacttcagctggagttacagtgatcaggcagcctcgtggcgtcttgaggttaagaaagctggctcagaatgttagtactgagagttggactggtggtcataatacttcacaagctaatggagttcctaggtcttcccaacacccgaggcggaacaataagagggaatcaattccgtcccaggagaatagagttagtggtgatgaacctgtcagctgcttgaggactgagaatggtacttgtgatcaggataccggcaccaagttctgttccaaaactgagttcttagctgaaaagcagtcacatctttcaggcgaacccccaaaagctgttcatgttgacaagggtgtctatgattatgtcaaagacgatgatggtgatagtttggaagaaaatgctgcctggatgctctgttctttatcagataacaaatgtgctggatcaccaaggaagggaactgataggttgtcaaagagatctttttctcagaattcaaaccattttaagaattcatatgaaaaaatcaaggatatatgtagtcctgctaggttgctgcggaagcgtgatggcaaagttccgttcttgaagcgtcgtcagcgtcggcatttttatgaagtcagccctagcgatgtggatccattctgcattgttaaagagaggatcagggttttttggcctcttgatgagacttggtactttggcatggtcaaggaatataatccggtcacaaggttacatcatgtcaggtatgatggtaaggatgaagaatggatcaaccttcaaaatgagaggattaaacttctgtttttaccagcggaagctcccaataaatctaaatgcaccaactcaaggtcagcgtttgagtcgaagcatgaacagggtgacagagaagacatgcatagaagcggaagcaatacagagagttttgagtcaggtcccatcagctcatggttggctcgatcaaaccaagcaaaatctgctgcactttgtgacatcaacaagcaagatcacagtcattccaatactgttccagtttcatttgaccaaaaacagtgtcgtgcttctgatgccaaggaatctattgattctgcaccatgtagttcacttgcaaatgggggtgtagaggttctcaaggataggaccatacctgaggacgggaggtttcactttgtttattctaggaagcgattttgcagaaaaaagaatgattttcttagcatttccgaacagcattctaattgccaaagaagagcaagttctatggttcttgcttcttgtcctgatatgaaatctagtattgcaactggtgcttcagttacatatgtcatacctgcattgagcctcccactgaaacctgtttataagttgctttgtgaagcctgttgtgtttcggtttccaatgctttctttcttcttcaatgtggtacaatggttgccttatggcctgttgtacatctggatatacttcttattgatagtgctttaggcttgaaacgtttccttcttgacacatgcatgagatcggcagtatcacttttctgtttacttgctggaagctttaagcagtgttctaggcagagaactaccaaggaatcaagaataccttgtacttcagtcagatttcagatatctggtgggcatggtagaagccaagtagtgtttatgtttttcagctttgttggtgtagagaaatggaaatgggaacaccttcaaggaaagcttcaatatcaatgttccaaaagggagttgtctaaagattccacaaaatgtacaggtcgaagagctcttccttcaatgggtctcttctctaagggttttgatgttcaagagtctgtctttcttccagagtctaattattcagatatcaaacctgccatttgttgtttggatgaccggtgtaaattcactcaaagttttctggacatgacaactgcaccttcagtactgctttggcaccatagaaaaatgttaatggaaagcaattcgactaatggttctcagcaatccatgtcatgtgctttggatgaggatcatcagcagttgtttcgagatcaaaatgagccttgtattggtgctgataggccatgttcctccaaccttagtgttatttgctcttcacagaagtttgcagaggatcgtatttccatcaatattcctcaagacaaagcaattgatgcaacaaatgataaacctcttgacaaagatgaaaaagaaaagcatcctatatctaacttggttcaggaattgaatgaacatccaattggtcgtgttacaccaactgcccccagaactacttcccatcggaaccggtttacgtctatatcacgtgcttttggagatggttcaaagttactgccagaagaccacatgttgactggcttcgctagtggttctaagaagccacgaagtcaagtttcatactcaggttctcctagaagtgaggaacttggcttaaaaaacaaagatcatttccgcaagatacaatctcatgtcagtgttaagacaagtgatgcaaaaaaacttcctgatagttctagaagtgggcatagcagtccagagctattgacttgcattgcaaatgttcttgttacagtgggtgatagaggttggagggagtatgatacccagatcacaatggattctgatgttcacagtgaacagaggatatgcgtgaaacttgctgaagggaccaagtatgctcacaaggtctgtcaagttttgcagcctggggccacaaaccgctatacacatgccatgatgtggaagggtggggctgagtggtgcctggaatttcctgacagaagccagtggttgattttcaagcaaatgcatgatgagtgctatagccataacatcagagctgcttctgtgaggaacattccaacccctggtgtccatttggttggaatccatgatgataatgatatggtatcctttgtgcgatctgaagattatcttgtccacatcggaacagatgttgaaattgctcttgatgaggcccgtgtgttatataacatggacagtgatgatgaagagtggatatcaagccggcagaaattcttagtaagagacaacaacgccacacttgagttggcagaagatttgtttgagagggttatggacaaactagagaagtttgcatatagccacgactctaatgaactcagcattgttcagatgaaggaactggagactgatgacctacctctggacattattgaagtgatacatgcatattggcaagctaagaggcagaaaaagggaatgccacttattcgacatttccagttcgctatgtggaaggtctacgagcaacagttacatgaatgggaatcgaaagtatgcagaatgcagggttcatcaaatgggtaccaaggaaaaaaaatgcctcccaagcctgcattgtttgccttctgtttgaggcctcgtggactcgatgtaccatacaagggaccaaagcagcgttctcataagaagcttatgtctacaggctgccatagcttttcaagacagcatgatggcttttaccggcaagtatcaggtaggagatacaatgaatgcactgtggatgggcggatatgcgaattatatgacattggttctctttattccctaacagggtactctcccaggttctctacaagaacaggttctcttcgggcatttgagtcctcggaaagttctacaccaagatttttcaggacaaatattgtcaaaaggagtgcaaccgttgctttctctgatgatcaccagccgtcgccttccttccgccctcagagagttaaacggagcgcatctgaccattggaacactgtcattcatgactggcagaactcaaagcatctctttccgggctcgccccctgttgatattgaggagctcaaactgcgggatgctgcaagcgcagcacagcacgctgctgccatggcgaagctcaagagggaaaaggctcactgcctgatgcagaaggctgaccttgccctccataaggccacggtagccctcatgattgctgatgcaatcaaatcttccagcaggaacaagtctcgggattgccgaaggggatttgatgaatgaggaacgctgacttttttttgccttttgccgcgagcccttggcgtatacacacaacttgaactcgatgcttttgctgatgatgggagcgtgtttgcttatctaatgatcgagtcattagatagcat

SEQ ID NO: 114072 - DNA, 4944 bp, Zea Mays
ggacagttagctgtaacctacctttccccgctcttcatcggcaaaaaagagggggaaaaaaaacgaaccctgaagaggagagggaaaaaactcgagaaaagcaaaccctaggttgccatgtcatcgacgacatcctaattcgccgcattgcatcgcccaggcaaggggcttttggcacaggtcggcgctcccctgtcatcggattcgattcccctgctcaatttgccgccgatccgtggttcggatcttctcgccgctcggcgactgtcgcgccattttttctctcgatccgtctgcgagacactaagcgcttcgccgacggtcgaccctgctgacgccaccggcgccaggtggcttgtcgcctactctggtccgccaaccgacgcttgatgcctccagggctccaaaggattgctgatgagatcgaaactgtttctgttaatttatcgtggattcaactgaacccccatgctccacgcaaccgcccctggtctgggtcgaaactctacatatgatgggaggtgaaattctgaggaattatgttaacttgattcgtgggctcgtgaatggaacccagtggcagtgataaacccactgcaacagatgctaacgaatcagtggtgggtttagatggtgaggacactttgtctgagagggaatctgttggagcaaaagatggacctgccttgcctaatgggagtggaaaggaggctcatgcaagcagtccatctgcggcgaataagaggaagcacaacgacttgggttctaatcaaatggaactcaatgaaccagggacgccaagttccagctcaggtgattccacatggagcataaatggtctcgatgactgtcaccaactctcattgtctagaaataagaacgacgactctgaacattcggttacttcagctggagttacagtgatcaggcagcctcgtggcgtcttgaggttaagaaagctggctcagaatgttagtactgagagttggactggtggtcataatacttcacaagctaatggagttcctaggtcttcccaacacccgaggcggaacaataagagggaatcaattccgtcccaggagaatagagttagtggtgatgaacctgtcagctgcttgaggactgagaatggtacttgtgatcaggataccggcaccaagttctgttccaaaactgagttcttagctgaaaagcagtcacatctttcaggcgaacccccaaaagctgttcatgttgacaagggtgtctatgattatgtcaaagacgatgatggtgatagtttggaagaaaatgctgcctggatgctctgttctttatcagataacaaatgtgctggatcaccaaggaagggaactgataggttgtcaaagagatctttttctcagaattcaaaccattttaagaattcatatgaaaaaatcaaggatatatgtagtcctgctaggttgctgcggaagcgtgatggcaaagttccgttcttgaagcgtcgtcagcgtcggcatttttatgaagtcagccctagcgatgtggatccattctgcattgttaaagagaggatcagggttttttggcctcttgatgagacttggtactttggcatggtcaaggaatataatccggtcacaaggttacatcatgtcaggtatgatggtaaggatgaagaatggatcaaccttcaaaatgagaggattaaacttctgtttttaccagcggaagctcccaataaatctaaatgcaccaactcaaggtcagcgtttgagtcgaagcatgaacagggtgacagagaagacatgcatagaagcggaagcaatacagagagttttgagtcaggtcccatcagctcatggttggctcgatcaaaccaagcaaaatctgctgcactttgtgacatcaacaagcaagatcacagtcattccaatactgttccagtttcatttgaccaaaaacagtgtcgtgcttctgatgccaaggaatctattgattctgcaccatgtagttcacttgcaaatgggggtgtagaggttctcaaggataggaccatacctgaggacgggaggtttcactttgtttattctaggaagcgattttgcagaaaaaagaatgattttcttagcatttccgaacagcattctaattgccaaagaagagcaagttctatggttcttgcttcttgtcctgatatgaaatctagtattgcaactggtgcttcagttacatatgtcatacctgcattgagcctcccactgaaacctgtttataagttgctttgtgaagcctgttgtgtttcggtttccaatgctttctttcttcttcaatgtggtacaatggttgccttatggcctgttgtacatctggatatacttcttattgatagtgctttaggcttgaaacgtttccttcttgacacatgcatgagatcggcagtatcacttttctgtttacttgctggaagctttaagcagtgttctaggcagagaactaccaaggaatcaagaataccttgtacttcagtcagatttcagatatctggtgggcatggtagaagccaagtagtgtttatgtttttcagctttgttggtgtagagaaatggaaatgggaacaccttcaaggaaagcttcaatatcaatgttccaaaagggagttgtctaaagattccacaaaatgtacaggtcgaagagctcttccttcaatgggtctcttctctaagggttttgatgttcaagagtctgtctttcttccagagtctaattattcagatatcaaacctgccatttgttgtttggatgaccggtgtaaattcactcaaagttttctggacatgacaactgcaccttcagtactgctttggcaccatagaaaaatgttaatggaaagcaattcgactaatggttctcagcaatccatgtcatgtgctttggatgaggatcatcagcagttgtttcgagatcaaaatgagccttgtattggtgctgataggccatgttcctccaaccttagtgttatttgctcttcacagaagtttgcagaggatcgtatttccatcaatattcctcaagacaaagcaattgatgcaacaaatgataaacctcttgacaaagatgaaaaagaaaagcatcctatatctaacttggttcaggaattgaatgaacatccaattggtcgtgttacaccaactgcccccagaactacttcccatcggaaccggtttacgtctatatcacgtgcttttggagatggttcaaagttactgccagaagaccacatgttgactggcttcgctagtggttctaagaagccacgaagtcaagtttcatactcaggttctcctagaagtgaggaacttggcttaaaaaacaaagatcatttccgcaagatacaatctcatgtcagtgttaagacaagtgatgcaaaaaaacttcctgatagttctagaagtgggcatagcagtccagagctattgacttgcattgcaaatgttcttgttacagtgggtgatagaggttggagggagtatgatacccagatcacaatggattctgatgttcacagtgaacagaggatatgcgtgaaacttgctgaagggaccaagtatgctcacaaggtctgtcaagttttgcagcctggggccacaaaccgctatacacatgccatgatgtggaagggtggggctgagtggtgcctggaatttcctgacagaagccagtggttgattttcaagcaaatgcatgatgagtgctatagccataacatcagagctgcttctgtgaggaacattccaacccctggtgtccatttggttggaatccatgatgataatgatatggtatcctttgtgcgatctgaagattatcttgtccacatcggaacagatgttgaaattgctcttgatgaggcccgtgtgttatataacatggacagtgatgatgaagagtggatatcaagccggcagaaattcttagtaagagacaacaacgccacacttgagttggcagaagatttgtttgagagggttatggacaaactagagaagtttgcatatagccacgactctaatgaactcagcattgttcagatgaaggaactggagactgatgacctacctctggacattattgaagtgatacatgcatattggcaagctaagaggcagaaaaagggaatgccacttattcgacatttccagttcgctatgtggaaggtctacgagcaacagttacatgaatgggaatcgaaagtatgcagaatgcagggttcatcaaatgggtaccaaggaaaaaaaatgcctcccaagcctgcattgtttgccttctgtttgaggcctcgtggactcgatgtaccatacaagggaccaaagcagcgttctcataagaagcttatgtctacaggctgccatagcttttcaagacagcatgatggcttttaccggcaaggttctctacaagaacaggttctcttcgggcatttgagtcctcggaaagttctacaccaagatttttcaggacaaatattgtcaaaaggagtgcaaccgttgctttctctgatgatcaccagccgtcgccttccttccgccctcagagagttaaacggagcgcatctgaccattggaacactgtcattcatgactggcagaactcaaagcatctctttccgggctcgccccctgttgatattgaggagctcaaactgcgggatgctgcaagcgcagcacagcacgctgctgccatggcgaagctcaagagggaaaaggctcactgcctgatgcagaaggctgaccttgccctccataaggccacggtagccctcatgattgctgatgcaatcaaatcttccagcaggaacaagtctcgggattgccgaaggggatttgatgaatgaggaacgctgacttttttttgccttttgccgcgagcccttggcgtatacacacaacttgaactcga

SEQ ID NO: 114073 - DNA, 1477 bp, Zea Mays
aagtaaaaccctaattcctttctccagtcgcagcctcgatttctttccctttccctttcccttccccagtcagccgcgagcctcgtaccggcgcagccatggcggaggagcccgccatcgtcgtcgccgcctcctccagctgcgaggtcgacctcggcaacctcatggcgtacgacccgtgtcaccacgtcgcagccgccgcctccgcctccagaatgcgtggtcttgctggggcgaaaaaactcagggaggagctgaggcaggagtgcctgcggaaggggacggagctggcgcaggcggtggccgacgccctcttcgcgctgccgcccaccgaggaccgcgacggccccatcgtccacctcccgccacacaccgttcgactcccgcgcgagaagcatctacccaagcccaagccaccgaccaagtgggagctgtttgcaaaggcgaaaggaattaccaagcgcaagaagaacaagcgtgagtgggacgagcaaactcaatcctggaagcggacttatggctatgaccgtgtaaatgatgataaagacgttccgattcttgaagccaaactgactgacgagcctggtgttgatccctttgcacagagaagggatgagaagaagaagagggttgaaaagcaagaaaaaagcagattagagaatttaaagaaagctgcaaagtcatatacagcttgctgcgaaggccttgcccatcacaggaactaaagctgaccttccaaaaaaatctagaaaagaggatcttgagagtgttgttggcatggcttcgtcagcaacagcaagcggtgggaagtttgacgagaagttgcctggcgagaaacctccaaagcaccctggcaaacatagaaagttcctcccagttgctgaggggaagggaatgggcagcctggagaaacagcagaatgacaaaatcctgagctctctacttgccagaaactctgatgaaccgcttgatgtcagcaaggcaattacaatgtacaaggtgaaaaaggaaaagcagagaaggaaagagaaaaatatgccatcaaaatctgataagcttaagccccagaagaaaccccacaagaaatcatcgaagaaaagggcttaggtccacgtctttcagttgaccacagttttgaaagctgaagcaaggaggcctgtcacatattggattgtatttgtgagctttgaatctctgggagaaatattgttattccgtctaatggttatgatacaaaaacctgaatgctttgccatggtatgcgcccatcttgtacttttcaaattatgtttgggatgtggtttgtagcttggtaagagtccctccctttggttctgaaacctgttcaaaggagctgtcctggaaacagtaccaatgaagctactgtctagtgtcgatggtactgatttgttgttggcctctgagtttactctacgatgtggtgtgagattatacattttaaatctttcctccgata

SEQ ID NO: 114074 - DNA, 1477 bp, Zea Mays
aagtaaaaccctaattcctttctccagtcgcagcctcgatttctttccctttccctttcccttccccagtcagccgcgagcctcgtaccggcgcagccatggcggaggagcccgccatcgtcgtcgccgcctcctccagctgcgaggtcgacctcggcaacctcatggcgtacgacccgtgtcaccacgtcgcagccgccgcctccgcctccagggaggagctgaggcaggagtgcctgcggaaggggacggagctggcgcaggcggtggccgacgccctcttcgcgctgccgcccaccgaggaccgcgacggccccatcgtccacctcccgccacacaccgttcgactcccgcgcgagaagcattttatgttcttgtcagctacccaagcccaagccaccgaccaagtgggagctgtttgcaaaggcgaaaggaattaccaagcgcaagaagaacaagcgtgagtgggacgagcaaactcaatcctggaagcggacttatggctatgaccgtgtaaatgatgataaagacgttccgattcttgaagccaaactgactgacgagcctggtgttgatccctttgcacagagaagggatgagaagaagaagagggttgaaaagcaagaaaaaagcagattagagaatttaaagaaagctgcaaaggttggtgctttgccaagtcatatacagcttgctgcgaaggccttgcccatcacaggaactaaagctgaccttccaaaaaaatctagaaaagaggatcttgagagtgttgttggcatggcttcgtcagcaacagcaagcggtgggaagtttgacgagaagttgcctggcgagaaacctccaaagcaccctggcaaacatagaaagttcctcccagttgctgaggggaagggaatgggcagcctggagaaacagcagaatgacaaaatcctgagctctctacttgccagaaactctgatgaaccgcttgatgtcagcaaggcaattacaatgtacaaggtgaaaaaggaaaagcagagaaggaaagagaaaaatatgccatcaaaatctgataagcttaagccccagaagaaaccccacaagaaatcatcgaagaaaagggcttaggtccacgtctttcagttgaccacagttttgaaagctgaagcaaggaggcctgtcacatattggattgtatttgtgagctttgaatctctgggagaaatattgttattccgtctaatggttatgatacaaaaacctgaatgctttgccatggtatgcgcccatcttgtacttttcaaattatgtttgggatgtggtttgtagcttggtaagagtccctccctttggttctgaaacctgttcaaaggagctgtcctggaaacagtaccaatgaagctactgtctagtgtcgatggtactgatttgttgttggcctctgagtttactctacgatgtggtgtgagattatacattttaaatctttcctccgata

SEQ ID NO: 114075 - DNA, 1500 bp, Zea Mays
cgcttcacatgtcacttgggccagcggccagtcagccccaagtaaaaccctaattcctttctccagtcgcagcctcgatttctttccctttccctttcccttccccagtcagccgcgagcctcgtaccggcgcagccatggcggaggagcccgccatcgtcgtcgccgcctcctccagctgcgaggtcgacctcggcaacctcatggcgtacgacccgtgtcaccacgtcgcagccgccgcctccgcctccagggaggagctgaggcaggagtgcctgcggaaggggacggagctggcgcaggcggtggccgacgccctcttcgcgctgccgcccaccgaggaccgcgacggccccatcgtccacctcccgccacacaccgttcgactcccgcgcgagaagcatctacccaagcccaagccaccgaccaagtgggagctgtttgcaaaggcgaaaggaattaccaagcgcaagaagaacaagcgtgagtgggacgagcaaactcaatcctggaagcggacttatggctatgaccgtgtaaatgatgataaagacgttccgattcttgaagccaaactgactgacgagcctggtgttgatccctttgcacagagaagggatgagaagaagaagagggttgaaaagcaagaaaaaagcagattagagaatttaaagaaagctgcaaaggttggtgctttgccaagtcatatacagcttgctgcgaaggccttgcccatcacaggaactaaagctgaccttccaaaaaaatctagaaaagaggatcttgagagtgttgttggcatggcttcgtcagcaacagcaagcggtgggaagtttgacgagaagttgcctggcgagaaacctccaaagcaccctggcaaacatagaaagttcctcccagttgctgaggggaagggaatgggcagcctggagaaacagcagaatgacaaaatcctgagctctctacttgccagaaactctgatgaaccgcttgatgtcagcaaggcaattacaatgtacaaggtgaaaaaggaaaagcagagaaggaaagagaaaaatatgccatcaaaatctgataagcttaagccccagaagaaaccccacaagaaatcatcgaagaaaagggcttaggtccacgtctttcagttgaccacagttttgaaagctgaagcaaggaggcctgtcacatattggattgtatttgtgagctttgaatctctgggagaaatattgttattccgtctaatggttatgatacaaaaacctgaatgctttgccatggtatgcgcccatcttgtacttttcaaattatgtttgggatgtggtttgtagcttggtaagagtccctccctttggttctgaaacctgttcaaaggagctgtcctggaaacagtaccaatgaagctactgtctagtgtcgatggtactgatttgttgttggcctctgagtttactctacgatgtggtgtgagattatacattttaaatctttcctccgata

SEQ ID NO: 114076 - DNA, 1746 bp, Zea Mays
ctagcgcaagccgcacggcagcaaagcaaaccaccgtgcctcaggcagaggcctcagcctctctctcgtctttgcgttgcgccgctgctttaaacaaacgtcaggtgaaggctgcggcacgcgtcccctcctccgcctccagtctccgcccatctcaaaaccctagcaaccgcgcctccacccctacccgaatcccaatccaggtccgatcccccggcggcgaggacacccggcgccgattcgtccccgcagatcggcgggcaggacagattcagattcgggttcggggtccgctcgggtcgcctcgccggggtccaccgcggcggtcagggagcatggtgggcggcgggaggcggggtggagcggcggaggaggtcaagctcaacaccggcaacgtgttcgcggcgctcgagtccctcaagaagaagaagaagggcgacaaaggcaaggcggccgggtcttcctccaggaagaagcacggcgagggggccgcgcagcgacaagagccaccgcagaaggagctgttctgggcgcccgcgccacttaccaccaagtcctgggcggacgtcgaggacgacgacgacgacgactacttcgccaccaccgcgccgccgcgccccgtctggggcactgccggtgagcccgccaaggaagaggaagacgtcgatgatgctgtgcgtgccgcccttcaggaggacattgagagtgatgatggggaccttgatgatgaggttgatgatggacctgaggatgaacctgaacatgatgcggaagatgccccagccgaacctgctatcaggacagctgcggccccggctgcgccacccaaggacacagaaaggcagctgtctaaaaaggagttgaaaaagaaggaactagcagaacttgatgcagtattggctgagctgggactctctgcaaattctagcagcactgcacaggatgctgagaagaaaggtaccaaccaaattggtgatgcagagaagaaggaagatgctcctgctcctcccgagagcaaggcctccaagaagaagaaaaagaaggacaagagttcaaaggagggaaaagaaacacaagaagcacttgatgggtcagaggagactgccagtgcaggacctgatgaagatacttctgctgtggatgtgaaggagcgcttgaagaagatggcatcaatgaagaagaagaaatcgagcagagagacggacacagctgccaaaattgccgctgccgaggctgcagcaaggagtgcaaggcttgcggcggccaagaagaaagaaaagagtcattacaaccagcagcccgtgcggtaaatgggcataaagttttgagtttgggtgctgtgagtttgatatccccttgttcgttttggactcgcaataaaacttttttgagttatcgtatttatgactgggaagtgcctttctgagtttcattttcagaatttaatgaaaggcctttgtggttgcaaaacggtggtgtaattgtgctttaaattgttcatccaatgataaacttcgtgaacaactccagcaccgcctgtagtccgatttttaaatccttgcattgatgaggagggcgggggtacacttgccgaaattatccccagcctgatttcttttatcttatatatataaatgtgccttttatacttctatagactgcagtacctttgaggcgatccccgtggctttgttcggttactagggaataaatctcactatatatttaatctgggtctgtattgta

SEQ ID NO: 114077 - DNA, 1737 bp, Zea Mays
aaaattaaaaaatcggcaccgcgtctccctccttcgcgtgctcctccggtcctcccccgaaccccacccccctcccacccacgagtcgagggcgagcgcgagatccagatccgcgtctagatccatcgcccggggtccgccatgatcccgacgcggtccgcgcaggcgtcgttccgcgaccgcaccaacgagttccgcgccgccgtcgagagagcgcgccgccacgccgtaccttcctcgtcgtcagcccccgccgcgccgagtagcagctctaccgggcccctcgacgggttgatcgcagccacgtcggctcgctcggagttcaacaaccgcgcgtccaagatcgggctcgggatccaccagacctcacagaagctatcccgccttgcgaaattggcaaagagaacatctgtttttgatgaccctacagtggagattcaagagttgactgcagtcattaagaaggatatcacggctttgaattctgctgttgtagacctacaagctctctgcaattcacaaaatgagagtggcagtctctccaaggacacatcaaatcattccactacagtcgtggacaacctaaaaaatcgtctgatgagtgcaacaaaagaatttaaagaagttcttaccatgcgaacagagaatttgaaggttcatgaaaatagaaggcaaatgttctcttcgtcagctgcaaaggacgcgtcaaatccattcatccgtcaacgaccccttgttgctagggatccatcagagtcatctgtgcccccagcaccatgggccagcgactctgcatctaccccattattccagaggaagaaaactaatggagaccatggggcatcatcatctcagcctttcgcacagcagcaacaattggcagtgcagcaggacagttacatgcagagcagagctgaggcccttcaaaatgtggaatcaacaatccatgagctgagcaacatatttacacagttggcaaccatggtttctcaacagggagagctagcaatcagaattgacgagaacatggaggaaacagtggctaacgtggagggagcgcagggccagctcctgaagtatctcaacagcatttcgtccaacaggtggctgatgatgaagatattctttgtgctgatggtgttcctcatgatcttcatattcttcgtggcttgaccttctgtaccattctgcccgaggtgctctggccgctatgcgtagtattcttttatttttactcatactacaccgtgtacacaattttcaccctggacgataagccatcgttcacccttttgtggccatgtaaattgggaggagttcgagtcctgttacgttactcttgattggcaatatctccactgtatttgatgtatcaactcgccagacagtaataggcaggtggcaaaaccgcttctcgttcttgtcagatcactatacctatacgggagtatgccccgctagttcaggcacatgctattctgattgtttctgatatctgttgtttatcctcttttcattcgctaatttcaggtaggatatctgtcaggtagggtctgtcatgactactataatcatacatgaatcctggatggtgcctcttttgcgcttagatttctattttttttagttacaattttttcttgcgctttttagctcggttcagaaaagaaaataacttgacatgaaccagatatcactacccagctttgcgatttcatatttctacaaggttcatga

SEQ ID NO: 114078 - DNA, 723 bp, Zea Mays
aggattaaatactccagaggcagcaccttgtaggtcaaggaacctgcgcactgaagcaagttgcggtgatgctctttcttccactaccaaattggagaaaataatggcaggtactgcagtgaagaagggatctcaactaaagaagtcaattcaaagcagcatagggagattgattcatggtactgaaagaaggaacgcgcagcattcagcacaagggactccaactaaaatcatagctagcggatgccataataatgtctccccagttacagctgatatcaggttaaggagaagacagtcactgacaggtatcccaccaccgctcccaactatgtcacgcagatcctcacttggagggaggtcggatacaagttcaaacgacaaaagaggtgcaaaaacaccacctcccgtgaactcggcagcaaaggctaaaagatggctttgaatctgaagcagaactgtcagaaaattttgactccaagcagagctcaaggcagacacgtatttggtgccatcacttaactgtggttttaggccttgggtggtggttacattctttgtaacagctgaagcattagttgtacaagggggaagggtgtgtgtttgttgtattctggatttctatgatggagcattggagcaactcacttgttcgatttattatgggatgtttgttttgaggaaatcaccccatctaagatgaagtggtgcattatgagttca

SEQ ID NO: 114079 - DNA, 2533 bp, Zea Mays
cgcgtcagttggccccacaactgcaccccatttcgaattcaaaccacctcctacggcccttcagccctcttcctgctccccctcctcgtctccttccatcgaagcttctacgccctcgccgaaggcccttgcccggggagcgcgaggcgcagtcatgacggagccgcgcagggtgtcgttccgcgacggctgcctcgcgtcgcggaaggccgaggaagcagcatggaggcggcatcaggctgcagcctggctccaagcaatggtgggctccttgggcctgcctccttatccgtcggagcaagagtttgttgcttctctaaggaatggcattgtcctatgcaaggcaatcaacaagttacagcctggtgccgtgacaaagattatcacaaatgcccccagcaatagccagccgttgacggcttttcagtatttcgagaacatccgcaacttcttagtcgctgtcaacaaactgaagctgacgagttttgaggcatctgacttagataaggacaatcttgatgctgggacggttggcaagattgttgactgtgtcatttcattgaagtcttaccatgaatggaagcaagccggcggagccaatgggcctaacaagtacatgaaatcacctcttgcagtgcgttcttcgcagattcaatccgaaaatgttgcttcgggaccttctccctccctaaagcgtctagacttgactgaggttgatgctgacacacagacatttcaaaatctagatcctaacatgaaagattgtgcatttgcagacgcagtggagaaacttcagaaagttatagtagattctatgttgagttctaaggaaaatattgaccaagacattctgaaaaaggttccatcaaagcttattggtgctgttttagcaagccaactgggaaaagaacagttcaaacatcttcagcttttatctccggaaaagcttatagcggagaatgagccaactcattgtattgagcatcccaactcaccgattgagagcaaacaattgctgttgcaagcacatgaaactgaacttttggacctcaagaaaatgtttcaagatgttaaagtcaacttcaggtctttgcagacccaatttcgagatgacatggccaaattaggtgaaaatatccaagatctttccaaagctgcccttggttataaccaagccgtaaaagaaaacagaaatttgtataacatgcttcaagaactgcgaggaaatatccgagtcttctgccggataaggccacttcttcattcagagtctatttcttcaattgaacatgttggaaccgatggctcagtgatggtctgtgatccagttaaaccacaaagtgcacataaaatattccagttcaacaaagtttttgggccaacaactactcaagatgaagtgtataaggagacacaacctttggttagatccgtcatggatggatataatgtatgcatatttgcttacggtcagacaggttccggcaaaacccatacaatgtgtggcccatctggtgggctgtccaaggattatggaattaattacatggccttgaatgatctcttcaacatatcaacttctagagaagatgtcaagtacgacatacgggtgcagatggttgaaatatacaatgaacaagttcgtgatcttctaaatgaggacagatcaagcacaaaattagatataagggcttccttgaacaatggtctatccaaccttccagatgcaaagatctgcccagtgcagtccccttctgatgttatcaatttgatgcagttgggtgaaaagcaccgagcttccggatcaacagcaatgaaccataggagcagtcgttcccacagtatcttaactgtccatgtaaatggaaaggacattgctggcaatgtgagccgtagcagtttgcatttggtagatcttgcaggaagcgaaagggttgataggtcagaagccacaggagacagattaaaagaggctcagcatattaacaagtcactctcctgccttggagatgtcatcaacgcattagctcagaagaactctcacattccttatagaaatagtaaactcacccaactactacaaagttcattaggggggaatgcaaaaatgctaatgtttgcccacataagtccggatgcagaatcttgtgcagaaacccttagtacactaaaatttgctcagagggcttctactgtagaacttgggactgcactcgcaaacaaagaaagcagtgaagtaagagagcttaaggaacaggtagatactctgaaaaaggcattagcaagtaaagaactggaaaaaacaactcttaaagtgaagggaagtgcaaccacgagtgagagaacaaagcaagtactggattgcactccccctaggccacggagattaagcctagagaatgctagtgataaagccaggatgccagaaagaaagatactgaaatcccctcgttcagctgtgggtataacccacgacaaggaatgcaacactgatgccttccgtcacgccaaccaccacgaatcactaatacag

SEQ ID NO: 114080 - DNA, 706 bp, Zea Mays
gttgtcacttgttgtcaggctaccggaccaaactgcgtgctccggcctccgggagaggagagagggtagagccagaggagttgggcgcgcagcaggatgagcggggaggaggccgacggctccaagccccaaggaggcggtgtacactacggcaccttccaggggccgcccagctacccgcccccgcgcccgccgccgagcctctccgcccaccaccgcggcgactaccaggccgttcccgctcgagattacgaggcaggtgtgcggggacgtagccatgatcgacttccctgttgtggcattggttttggatggttcctgttcatagtcggtttcttccttggtgccattccctggtacgttggagcctttctgctgtgctgttccagagttgattacagggagaaaccaggttatgtcgcatgtgttgcagcggctatcctcgctacaattgctgttatcattggggcggcagctggaactcatgttctttgattttttttagcttacaaggctatcctcccaaactagcccttactgttatcatttgggcggcagctggaagtggaagtggaactcatgttttttttagcttacattgtattgtcattgtacatacatacagtagtacatggtgtccatgtgtcgaagaaatcgtgcaatcaacatcgtaatggatgtctgttctgcattcgcaattattcat

SEQ ID NO: 114081 - DNA, 2165 bp, Zea Mays
cgccgaggacgaggaccccccgacaacttacccggggggcagctacatttatacaaagtcgacgacggcaagaggataaacgagtcgaggagaaaggaacaaccttaaccggagcccccgttcccgctaggtagattaaaagttatctcaggtgcttcactaggaaaaaatgaagtaccttagttaagttttgtaacaaggatatttgatcagtgcatgtcaaaggagggtatcaaaccaacgtgtcatatgactgtctagcttatgaatgttgctcctgttttatcacccctgaaggccaagcacacaatcatcctttattgatggctcacactggaaacttgagccagcgtgatcacacaatcgatataccaatgagtgatggtatgaccgcatcaacatctcaccaggatgatcatagtggctcggatgagctgcatcgcagcagaggtccttcgaatgaagtttcaccaagcccagatacatcttccggtacaaacgatgtatctaactctcacaatgcatcctcagcaagaatagatcgaggccaccgtcaacagaaccctttgaattctggcttctggatctcaatcgaacttattgtaaatcttagtcagattgtagcagctgttgttgttctgtcagtatcaaggaacgagcacccacaggctccattgtttacatggcttcttggctatacaataggttgtattgctattcttccgcatctttactggcgttatcttcaccgcaatcgcctagacatggagcaggagatgccaccccaaaggtcgccaggaatgaacatatccgagattaattcttatgctgtcgtttcatctcctcatgcatcagaagctgtggaaggtgccaacagtactggagtctcaagaactaacttaccaatggcaagtccaaggttttacgcaatggttgcctgctttaaattggtgttggattgtttctttgccgtctggtttgttgtgggaaatgtgtggatgtttggtagccgttcttctgcccatgacgctcctaacctatacaggatctgtctagtgttccttgcgtttggcttcattggctacgcgttgcctttcattttatgtacaatgatatgctgctgcctgccctgtataatctccgttctgggcgtccatgaggatttggatatgaacagaggcgctaccacagaggcaatcaataccttggtggcatacaagttccaatcaaagagggttcatgatggggatgtgggaggagatggtggtggagtcttggcagctggaactgacaaagagcgaactatttctgcagaagatgctatttgctgcatctgcttgtcaaagttctcaaacaacgaagacctgcgcgaacttccctgtgcacatgtcttccacatggaatgcatagataaatggctccagataaacgcgttgtgccctctatgcaaggctgagatagggggatcaaaagcaacaagtaatccagagagtggctctgtggatcccgacaacaacaacaatagagtagacaacgacgtggagtcacaacggtagttgttgtctgctctcttggcctttccaatgagcatgaagatgacggaggggctctttgatgcggtctaattaaactgacaatcatataacaaactacaagtaggaaagttacacactatatggtccaacaagtcctcttttttcctgatggttttgtttcatcttaccaatatagtatttcctgcctcagtgcagagcagtgtgttcaacattgttcttggccgaaacattttcgcttaggaaccatggatgctggtagtggtggccacctaagatgaccccactgtgttggtggttgatgctatgttgctaacctccttgctgtcaggatttgcctggtgattgtctccttgtatagaaaatgttacctgatcagctggtggcaccgctgcagctcctgtaatggtttaccttgtacattgcataggttcatgtatatatatgctaggtccttggtacatgcctgcaaggtacagttccattctgttcgagagatgtacttatgcacacgggtgtctgtaacatcgatgcaataatgaccgggtgactgtaagtgcacatacaaatatatctatccatgatatatagaaaagagcacatcaatccgtg

SEQ ID NO: 114082 - DNA, 1634 bp, Zea Mays
ttttgtgtttttatatttttaccttctcacgtttttgtagtttgatcttttagagagtgacgtggaagagtagaatataaaataaaaaaaatcggacaatgttggatgtagaattctagaatctagattacatccttgcacagaatttgttcggactccgtgttctgcacgcgagaacccagaggagcgctacagaacggagattttgccgcctccgtcccctccaccgttctggtcgctcgccggtagctgctccccgctaactactcttcctcgccccgccgccatcggtcctcgcgacgcccctctccactgcctgtcctgctgctccacgccgcggacagatcacctcgctccctcagcttgcagccgcgccggcacgaaggacggaaggacgggacatccgtggggaactcaaaaaagatcccgatacctggtcgccacaatggatcacggcggcggcggcggtagcggcatctggatccgtgcggcagtggcggtggcggcgggagccgccatcgcggcgcgcgctgtccggcgcaagtctgtcgactccagcgccgtgttcgtcggagtccccgccatggtggctcataccgtcgccgggtacaggttcgcggggctgctactggtgttcttcttcacgtcgtcgcgggtgacgagggtcggcgaggcgaggaagcgtgctctcgatcccgagttcaaggagggcgggcagcgtaactggaagcaagttttgtcaaatagcggtattgcaagtatcttggttgttttgatagcatcagttaccggagggacagataggtgtttggattcaaaagagtcgactcttgttactgctcttattggtggtgttatcggacattatgcttgctgcaatggagatacttggtcatctgagctcggcattctcagtaaagctgagccacgaattatcacaacattcaagagagtgcggaagggtaccaatggtggtgtaaccatagatgggcttctggcagcagcagcagctggattctcgattgggcttgcatttgtgctgataggattcttcaccactcagtgtgctcctgatgtattctggaaccagctgctggctatacccttggctacagctgctggcctatgtggaagtttgatcgattcgttcttgggcgcaacagttcagtatagtgggttctgcagtgttcgcaaaaaggtggtgggtgtagatggtccaacggtaacaaggatttcagggatgaacatactggataacaacggggtcaatgtagtctctgtgttcttgacaactgctcttactgcggtggcttgcacatacattttctgaggttagctatggcgagtattggtgcgccatggtaggtccacattagatgacacagagaaacctgattgatgaattagaacagcagattgtgtagcagtggcattaatcattttcgaacacctagcagaagatgaacaattgttctcctttaacaaaaaatgttttcaacagtagatgagatcttgtaaaaatagagaaatttcatgtctctcttaaagatgtctcgaagtcgttgctctatgcctccgtcgcttgttttccctaactgcaggagaggtgatgcatgtgatgttatctctgtgag

SEQ ID NO: 114083 - DNA, 1714 bp, Zea Mays
ttttgtgtttttatatttttaccttctcacgtttttgtagtttgatcttttagagagtgacgtggaagagtagaatataaaataaaaaaaatcggacaatgttggatgtagaattctagaatctagattacatccttgcacagaatttgttcggactccgtgttctgcacgcgagaacccagaggagcgctacagaacggagattttgccgcctccgtcccctccaccgttctggtcgctcgccggtagctgctccccgctaactactcttcctcgccccgccgccatcggtcctcgcgacgcccctctccactgcctgtcctgctgctccacgccgcggacagatcacctcgctccctcagcttgcagccgcgccggcacgaaggacggaaggacgggacatccgtggggaactcaaaaaagatcccgatacctggtcgccacaatggatcacggcggcggcggcggtagcggcatctggatccgtgcggcagtggcggtggcggcgggagccgccatcgcggcgcgcgctgtccggcgcaagtctgtcgactccagcgccgtgttcgtcggagtccccgccatggtggctcataccgtcgccgggtacaggttcgcggggctgctactggtgttcttcttcacgtcgtcgcgggtgacgagggtcggcgaggcgaggaagcgtgctctcgatcccgagttcaaggagggcgggcagcgtaactggaagcaagttttgtcaaatagcggtattgcaagtatcttggttgttttgatagcatcagttaccggagggacagataggtgtttggattcaaaagagtcgactcttgttactgctcttattggtggtgttatcggacattatgcttgctgcaatggagatacttggtcatctgagctcggcattctcagtaaagctgagccacgaattatcacaacattcaaggtgctgttaaggcttttttctgattgcacaaatcatcagcaaacatgtaatttttcactgtttacttttgatttgttcagagagtgcggaagggtaccaatggtggtgtaaccatagatgggcttctggcagcagcagcagctggattctcgattgggcttgcatttgtgctgataggattcttcaccactcagtgtgctcctgatgtattctggaaccagctgctggctatacccttggctacagctgctggcctatgtggaagtttgatcgattcgttcttgggcgcaacagttcagtatagtgggttctgcagtgttcgcaaaaaggtggtgggtgtagatggtccaacggtaacaaggatttcagggatgaacatactggataacaacggggtcaatgtagtctctgtgttcttgacaactgctcttactgcggtggcttgcacatacattttctgaggttagctatggcgagtattggtgcgccatggtaggtccacattagatgacacagagaaacctgattgatgaattagaacagcagattgtgtagcagtggcattaatcattttcgaacacctagcagaagatgaacaattgttctcctttaacaaaaaatgttttcaacagtagatgagatcttgtaaaaatagagaaatttcatgtctctcttaaagatgtctcgaagtcgttgctctatgcctccgtcgcttgttttccctaactgcaggagaggtgatgcatgtgatgttatctctgtgag

SEQ ID NO: 114084 - DNA, 1657 bp, Zea Mays
ttttgtgtttttatatttttaccttctcacgtttttgtagtttgatcttttagagagtgacgtggaagagtagaatataaaataaaaaaaatcggacaatgttggatgtagaattctagaatctagattacatccttgcacagaatttgttcggactccgtgttctgcacgcgagaacccagaggagcgctacagaacggagattttgccgcctccgtcccctccaccgttctggtcgctcgccggtagctgctccccgctaactactcttcctcgccccgccgccatcggtcctcgcgacgcccctctccactgcctgtcctgctgctccacgccgcggacagatcacctcgctccctcagcttgcagccgcgccggcacgaaggacggaaggacgggacatccgtggggaactcaaaaaagatcccgatacctggtcgccacaatggatcacggcggcggcggcggtagcggcatctggatccgtgcggcagtggcggtggcggcgggagccgccatcgcggcgcgcgctgtccggcgcaagtctgtcgactccagcgccgtgttcgtcggagtccccgccatggtggctcataccgtcgccgggtacaggttcgcggggctgctactggtgttcttcttcacgtcgtcgcgggtgacgagggtcggcgaggcgaggaagcgtgctctcgatcccgagttcaaggagggcgggcagcgtaactggtgcaacccactcttattggcaggaagcaagttttgtcaaatagcggtattgcaagtatcttggttgttttgatagcatcagttaccggagggacagataggtgtttggattcaaaagagtcgactcttgttactgctcttattggtggtgttatcggacattatgcttgctgcaatggagatacttggtcatctgagctcggcattctcagtaaagctgagccacgaattatcacaacattcaagagagtgcggaagggtaccaatggtggtgtaaccatagatgggcttctggcagcagcagcagctggattctcgattgggcttgcatttgtgctgataggattcttcaccactcagtgtgctcctgatgtattctggaaccagctgctggctatacccttggctacagctgctggcctatgtggaagtttgatcgattcgttcttgggcgcaacagttcagtatagtgggttctgcagtgttcgcaaaaaggtggtgggtgtagatggtccaacggtaacaaggatttcagggatgaacatactggataacaacggggtcaatgtagtctctgtgttcttgacaactgctcttactgcggtggcttgcacatacattttctgaggttagctatggcgagtattggtgcgccatggtaggtccacattagatgacacagagaaacctgattgatgaattagaacagcagattgtgtagcagtggcattaatcattttcgaacacctagcagaagatgaacaattgttctcctttaacaaaaaatgttttcaacagtagatgagatcttgtaaaaatagagaaatttcatgtctctcttaaagatgtctcgaagtcgttgctctatgcctccgtcgcttgttttccctaactgcaggagaggtgatgcatgtgatgttatctctgtgag

SEQ ID NO: 114085 - DNA, 1145 bp, Zea Mays
ctcgccccgccccgcatcactcccggccgcgcatcactcccgcagcgccccgccccgccggcgcatcactcccggccgccaagcccgcttcccgaggccgccaaggtttccatcccgccgctcgctcaagggttccatcccgcggccgcatccagcgcattccatcgcgcaatcaccgctcgctcaaggcactcgctcgcactaaatcctttcgctctcagatcctgcccctcgctcgccgcccaatcaatagctcagacgttgcctcggttgtcctgcaagtttgtggaccccgacaacgtcgtttcctccgctctagtggcgcgtcgcgtgcggtcagacacgatgagttgcggcagcgatgtgtgccgggacagctgcagtagtagcggcagcgaggagttcaggcggtcgtggcccagcaaagtcaccgctgatgattcagtggcgcctgcccggagctcggatgtcgcagcgccggcatcgtggattgataggaagctgcttgttgatccaaagatgatgttcgtttgggacaagattggggagggagctcatggcaaggtctacaaggggaagtacggtgatcaaattgtagcgataaaggttcttaaccgtggcagtatccctgaagaaaaacaacacttgaaggctgtttcatccgaagtaaatatgatgtgtaaagtgaaacatgagaatcttgtcaagatacttccgggtcttaatgctagcttatgtgattcgtaaattgttagttcttttggacctcacaaccgtttatgcactcctgcagtttattggagcttgcaaagaaccattgatggtgatcgttagtgagctactgccaggaatgtcactgaaaagttacctgcatagcatccggtctagccaactaaatacacacactgcaataagctatgtagtggacatagctcatgcactggactatttacatgccaatggcataatacatagcgacctgaaacctggtaaggatgcttaagctaattgacttttggcattctacgctttgatcctttagcacgagcaccttaagtatgagtttacaatctgaacagttagtgtttacatgtattttatttttatgcaatatttatacttgttttgtatgtgtttattccgat

SEQ ID NO: 114086 - DNA, 3366 bp, Zea Mays
atggtgtcggcaaacctgcggctcgtggccgcgttcttgctgccgttccttgccatcgcctccgcgtttgatctcttccaccagactgggccacggatggatccaaagatggtgccgatgggaggcggccagcctctcttcatcccgcacgagtacgtccgctccgccgacgtcaagcggcaatgccggtcggtgctgtccgccgccaccgagctcacgttcgacgccaaccgcgccaacgccctcatgccggagctcagcttcgtcaagggggactggaagcaggacgacgacggcgtgccgctgatgccgttcgacggcaccgacgtgtcgggcgatcaggcgccggacccgctgcggctggcctcgttcatgctcacgcacgtcgacgtggggttccgggggaaaacggccctcaacgtcagcggcgtgctcggcgtcgccgtctcccgcaacggcacgggccccgtgatggggacgtacgtgtcgcccgagctcaaggtgtggcccgggagcaccgagcttaagatcctcttcgagggcgtgtacaccgagaacggcgacggcgagagcgtgctctgcatggtcggcgacgccctgctgccgaggcgcggcagcgacggcggcaacccctgggactgggccaaggacaccggccgcgacagcttccagccgccggtcaccaaggacggaaacctactgctcgtgctccggtacccgacgacgctcacgctgacgacgcgcgccgtgcgcggcgagctgacgagcacgagcgccaagtcggacgtcgcgtacttcgacgccgtgcacctgctgtcgcagctgggcgcctactccaactacaagttcggctccgagaagctcgtggacagagcgtgcagcgctcacccttaccgcgacgacatcctcggcggcggccggggcctgtacaggggcaactccttctgcggcatcctcgaccggttcacgtcggaggacgtgctcgccgtcgtcccgaactggcggtgcaactccacggacgcgttctgccgaaggctcgggccgttcgagacggacaagaccgtcgacgcgacggacggtgccttcacggacgtgagagtcgtgatgcaggacgtccggtgcgagccgaggaacgccccgggcggcgagagcacggcgcgggtgtcggccgtgttccgcgccgtgccgccgtgggagcacaagtactcggcggggaagcggagcgggctcggcggcacgaccctctcggccgagggggtgtggcgcgcgtccacggggcagctctgcatggtgggctgcctcggcgtcggcgccgaggcgtgccactcccgcgtgtgcctgtacgtgcagaccaccttcacggccacccgccgcagcctcacggtggggcagatcacccgcgtcgacggcggcggcggcggcgttgcccacttcccgctcacgatcaaacacacggtgcacccgatggagctctggagccggttcggcgtctcgggcggcgcgcctctgagcatggcgtacaactacacgaaggtgcggcaggccagcgattttctgaggcgcagcgagccgttcgaattcggggccgccctcgccaagtcgctcctcagctacccgaagaaagccgaaggcctcaacgacgacgcgatgagcttgtccagcctcgcggccgacctcaccctccacgtcgcggccgtgccagacccgttccctcgtgaacggttcgagcggtcgttctttcagctggaggtgctctcgctcggatcactcgtcggccgtacctcgatagagcagttggctacggagtttcccggaatgcccggcgagctcggagggggcaaagcgtcctcctggacgtcgtcgcagtcagagtcctcatcgacgacgtcgtcgtcgtcgcagccagcagagtcatctcttctcaacgtgtccgccgaggtctcgctgtccgggaatccttacgggaacgtgtcgagcttgttcatggaaggcgtgtacaatccggtgaatggacggatgtacctgatcggctgccgaagcattcaagcgactcggcaaaccttctcggcgctgaaagaggtcgaggatggcatggactgctcgatcgagatgagggtggattacccgccgacgacggcgcggtggctgataaaccccacggtgaaggtgcacgtagccagcacgcgcgaccccggcgacccgctgcacttcaacgcgaccaagctccagacgctgccgatcatgtaccgggagcagcggcaggacatcctgtcccggcgcagcgtcgaggggatcctccgcatcgcgacgctggcggcggccatcgccgtggagctgagccagctgatgtacatcaaggcgaacaccgacgtgatgccgtacgtgtcgctggtgatgctgggcgtgcaggcggtcgggtacagcgtgccgctgatcaccggcgccgaggccctgttcgcccgcatcgccgcgggctctgacgacggcgccgtgccgccgtcgtacgaggtggacaagagcagcctgtactggaccatcgactgcatcgtgaagatcctcatcctcgccgcgttcctcctgacgctccggctggcgcagaaggtctggcggtcgcgcatccggctgctgacgcggtcgccgctggagcccggccgcgtgccgagcgaccggaaggtgctggtctacagcctcggcgcgcacctggtgggcttcgcggtggtcctggcggcgcactacgtgaacgtgtacagccggccggtgcgggacgacgggtcgtacatggacgcgcgcgggaggacgcacgcgctgcgggagtgggcggtgacgctggaggagtacatcgggatggcgcaggatttcttcctcctcccgcaggtggtcggcaacgtggtgtggcggatcaactgcaagccgctgaagaagagctactacgtcggcgtgacggcggtgcggctgctgccgcacctgtacgactacatcaaggcgccggccatcaatccctacttcgccgaggagtacgagttcgtgaacacgagcctggacttctactcccggttcggcgatgtggcgatcccgctcgtggccgtggcgctggccgccgccgtgtacgtgcagcagaggtggaactacaagatcatcagcaagaccgtgaagacgcagcagaagaagctgcagcacctcgggtccagggtgtacgagcggctgccgtccatgtcgtcggggaacttcgaggccgagctcgtctccggcgtcaacgagggcgtcggcctgcggcgggacaccagcttgagctgagcgcctgagccatcgtctgttgatcagctagctagctcgtttgctttacttctttgtgtgtgtgatgcgatc

SEQ ID NO: 114087 - DNA, 1763 bp, Zea Mays
gaagccgattccccctctgatccctcatcaaacacacacacacacacacatccacattcccctacacctcctccgcctcctcctcctctctctctctctctctagcacacagcagtacagttgatcatattatctgagaagtactatactagtaaaagcttgtagcagctagctacagccaatagtgtaagctccaacacagacaaatatacttgcgccagtagtgagtgattctagtacatcctcggatcgagcttggcagcatggcttcttcgccgtccgacctaaccctagactacaagcccaacggcaacggcgccgcgtacgcagtgacgaccccgaagccgccgcaggagacgctcgtggtggacggacaccaccaccaccaccatctgacggcggcggagcagacgacgcagaagctccgggagttcctcgcgcgcctggaggaggagcggctcaagatcgacgccttcaagcgcgagctccccctctgcatgcagctcctcaaccacgccatggagtcgtaccggcagcagctggaggcgtaccagatggggagcctgcagggcgcgccggcgaggccgctggtgctggaggagttcatgccgctcaagaacatcgggatcgacgccgccgccgacaagatggggaacccgacgtcggagaaggcgagctggatggagtcggcgcagctctggaacgggcccgcggcaacggcggacgtggccgccagggggccgcagacgcccaaggagagcgcggagtgcgcgcacggcgccgcgggcgccggccacgggcagcgcaacggcggcggcggcggcggcgcgttcctcccgttcgccaaggacaagaccgcgtccgcggcagaaggcgcggcgctgccggagctcgccctcgcgcccgcggacaaggacgcggccgacgctgacaggaagccgtaccttgatgccgccgccggcagcaacaacggtggcgtcctgggctcgcggagagacgccgtccagagcggggtcgtcaacgtcaagccggcgccgaacgcgccggaagggcagcaggcggcaccgccgcagacgcaccgcaaggcgcggcggtgctggtcgccggagctgcaccgccgcttcgtcaatgccctccagatcctcggcggcgctcaagtggcgaccccgaagcagatccgcgagctgatgaaggtggatggattgaccaatgatgaggtgaaaagccatctccagaagtacaggctgcacacacggcggccgatgccggcgccgcccgcaccggcgaccgccgcgccgcagctggtggtcctcggcggcatctgggtcccgccggagtacgcgtcgcaggcggcggggcaggccatctacggcgcgcacccggcgacgcagccgcactacacggcggcggcggcgcaggagtactacccgtcccccgccgcggtgcaccacctccagcaccacccggcggccgccgccatggtgcaccgtgcggccgcggcaccgccgccgccgcagcaggccgcgtacagcaaggcggcggcgatggcgggctcgcctcccggatcggaagggcggggcagcgccggaggaggcagcatcggcggcggaggcgggagggagaggtcggagagcatcgaggaggaaggcgaggtggaggagcgggaagaggatgacgaagacgacgacgacgacatgacggccaacaaggccgacggcgagggggccgccgccggtgccggagtcggcgccgccatgtactaa

SEQ ID NO: 114088 - DNA, 551 bp, Zea Mays
aaaaaaatacttgtacacacactaatctgatcacgttagggtgaccataagaaataccacacaaaagtctgcaagctaagctcactcgcttattcagctacacagactacaacaattggaatcgattttgaactcacacaaagaaaaggaaaaataaagaggtattcagacgtatggtgcagtgacctatttgtttactgctttcttgattgcctgcttgcacctgctaagaaacttagtgctgcttctggacactgaatcctcatagccatatttgcggtcatcgtcgacagccatgcgttccacaccttttctcattcccaggatcatggagggtgatgatggcagtgaccggaaacccctggtgctgtcagacctagggaaccaaatcttcttttcctctctgtctttaattccaaagctgttcctccctctttctgctccctggtcagaaacaatctcgtcctcgacctcgacgatctcatcagaacattcagttaccccattcctgcagctctcttggtcaacccggctctgcgttcgctgctcat

SEQ ID NO: 114089 - DNA, 1645 bp, Zea Mays
accggtagaaaaagaggtctaaggttgcgccgcgaagaggtttgcccacgcgcgccccgccccgccgccgcagccatgaagcagtcgccgtctcagaatcagagcccaaagaccccatcgcgctcggccccggagccgtggctggtggccgcggcggcggcgagcgccagcgacgactcgtgcgtgaacgacgtggacagcttcgcgcgcaccgtggccgccgtgaagtccaaggccgcgtcgtgcgcgcggccggacatgctggcgtccgtgctgtcgcactacgccgccaagtggctcccggacgtggcgcctcccacgtcgtcgtccgcctcggggcgcttcctgccgccggagagccccacggccacgtggctgaagaagcggctcctcctggagtccctcgtggccgcgctccctccggacccggcggcgggcggcggcggctgctgcgccgcggccgtcgccgacgacggcatcacgtgcgacttcctgctgaagctgctccgcgcggggagcatggtgggcgcggacgcggcgctgctgcgggacctggaggcgcgcgcggcgagacggctggaccaggcgacgctgggcgccgtgatgataccggcgttcggccacggcggcgagcacgcgccggcgctgctcctggacgtgcccctcgtgctgcgcctcgtgcgcgggttcctcaaggagggaggcggcagcaaggccggcggcggcgccgccctcgtcggcggcggcggcgcggcggccgcccgcgtggccaggctcgtggacgcgtacctggccgaggccgcgctggaggccggcctgcgccccgccgagttcgaggagctcgcgcgcgccgtgcccgcccacgcgcgccccgccgacgacgcgctgtaccgcgccgtcgacacctacctcaaggcgcacccaggcaccgcgaaggaggagcgcaagtcgctggcgcggctgatcgacgcgcgcaagctcacggcggaggccgcggcgcacaccgtgcagaacgagcgcatgccggtgcgcgccgtggtgcaggtgctcttctcggagcacggcaagctcaaccgcctcgcggagctgagcgcctccttcagcggccagcgcagccccagccccagccccaacccggcgctggagctccccggccgctgcccctccaagcgcgaggtcctcgcgcagcaccaggaggtgcgccgcctccgcgacgacgtcgccaggctccaggtgcagtgcaacgcgctgcaggcccaggtggacaggctgggctccgagaggcggcggcgcggcgggggcggcgggggcttcttcaagtggagcgcgttctggttcggcggcggcatgggtgccgacgtcgctagggtcgacgactccgagagcggcatggagcgccggacaccgcccaaggggaagaagagcgccacggcgacgcccaacgccaagtggcgcaagtccacgtcctgagatgacaagggtgttgtgttgaagggatggcgatcgacggccgttaattgtgttttctgctttttggatggggtttgtgattactttgagtttgaacatcatatattttatattgtgttgctgtcaactcgagtttgtgttcgtggtgaaactatcaggctggaaactgtacgac

SEQ ID NO: 114090 - DNA, 495 bp, Zea Mays
aacaccaggctctccaattaggcaggggttgttctttgtccgcctgcccaaaatctgagtaacacgctcaatctgatcttgtctaccaacgactgggtccaatttgccctgcagaagaagatagtgataacatcatttctacgtctgtgagtataccagggaggtgggagtgggtcggcattgccgccgctgccggagcgcgccatggagatgggagcggatcggcgtcgcaactgccttggcacgtgcggtttgaccggagcacttcagggaggtgggagcaggtcggtgtcgccaccgctgctagagtgtgccatggagatgggacttggggagctggtagggttgctgatggagggcgccatggagggggcgaggtatgcgataatggcgggatgcgggtgagtttccatcgacgaggagagccggggcgggggcacggtgtacccagtgtgggagcaaattccgggcggctctaacgagcgctgaaatctt

SEQ ID NO: 114091 - DNA, 325 bp, Zea Mays
tgggccagcaacaatcaattcctattaaaatgcatatgaaaggtcatagaacttagaagcttgttagaaatgaaaaatacatcacctacgacctacatgtacatctgtattacaacatggtgactggaaccttcaaacaagtatatgtgttggaaatcgactacaagtgcagaattctaatcaatgaggcattgagctttcttcaggatttcccccaaactacaaggaaaattagttacttactagctaagatatggaatcgttttgatatttggcctctgattggatctcttgaggaacctgcattataataccaataactttt

SEQ ID NO: 114092 - DNA, 1609 bp, Zea Mays
caaacagcagtacgacttccacctcacagctagccacacagccatggcggcggcggcggcctctgccacccaagcagcactcgcgctcgcccacgacctggaggacgcctccgaaaggaaggcacacttcgtgctggtcccactgatggcgcagggccacaccatcccgatgaccgacatggcgtgcctgctggccaggcacggcgcgcgggtcagcttcgtcaccacgccgctgaacgcctctaggatcgcggggctcatcgaccacgcggcggcggcgggcctcgcgatccggttcgtcaggctccgcttccccgccgccgagttcggcctgcccgaggggtgcgagaacgccgacatgctccagtccagagacctgttcaagaacttcatggacgcctgcgcggcgctgcgggagccactcgctgcgtacctcagagagcaagaacaacctccgagctgcgtcgtatcggacatgagccactggtggacaggtgacatcgcgagggagtttggtgtccccaggctgacgttcaatggcttctgcggcttcgcgtcccttgccaggtacatcatggtccgcgacaacttgctggaacacgtcgaagatgagaatgagctcgtcagtttcccaggattcccaacgccgcttgagctgacgaaagcaagatgccctggaagtgtatctgttcccggtctggatcagatccgtaagaagatgtatgaggaggagatgagatccagtggtgttgtcataaacagcttccaagagctggaggccttgtacatcgagtccttcgagcaggttacagggaagaaggtctggacagtgggaccaatgtgtctgtgcaaccaggacagcaacacgatggcggcgagaggaaacaaggcctcaatggatgaggcgcagtgcctgcaatggctcgattccatggatccgggctcggtgatctttgtaagcttcggcagtatggcccgcaccgcgcctcagcagctcgttgagctgggactagggctggaatcttccaacagggcgttcatctgggtgatcaaagcaggagataagtttccagaagttgagggatggctcgcggacgggttcgaagaacgggtgaaggacagaggcttgatcataaggggctgggcgccgcaggttatgatcctgtggcatagatctgttggaggtttcatgacacactgtgggtggaactcgacattagagggagtctgtgcaggcgtgcccatgatcacatggccacactttgcagagcagtttgtgaacgagaggctggtggtggacgtgctgaaaactggggtggaggttggagtcaaaggggtgacacaatgggggcatgaacaagaggaggttacagtgacaaaggatgatgtggaggcagctgtgtccaggttgatggatgaaggtgaggctgcagaggagatgaggatgagagcaagagaatttggtgttaaggcaaggaaggctttggtagagggaggttcttcgtataataatataaatctattgattcatgaaatgggaaaccgggcaaatgtatctacctagctagcatagagaagggattaagctccctcccccctctctggaggc

SEQ ID NO: 114093 - DNA, 381 bp, Zea Mays
atggcgccacgatcgcagggcccggtgtcaccacaccgaatgaagctacggctcatgtggcagacgttattttcgatggagtaccacagtccgagaaaggatccggacgtggaaagtggccatcacaaggttcgcaagggtctgttcgttttattcgtggccacgaacatgggagcgccctgcgcctacaagcctccacgatctaatttaattgatgtgggcgattcgcaacccaacgaagaggaacaacatgctgaaccactaattgaaaacaataatgaagttatgacaaagcagcttggacttttgagaacactagagggttttgtgaaatttgtatccaagaaatcaatgctggtaataggtcgaatgacatcatga

SEQ ID NO: 114094 - DNA, 264 bp, Zea Mays
atggagagctcgacatttgtgcgggtgtcctcgtcgtacatgacgagcgtgaggaggaagaaggtggtggcgagcatggcgaccggggttcgccgcgacgatgagaggagggagcgcccaaatgtggcgagcgagttgaggagcatcgcgggggcggggtgggatgacgacttgggaaccgagatggtggtcgtggggagcaagggggcggaggtggaggtgcctgatgatggcttgggcatggctgcggccggaggctgctga

SEQ ID NO: 114095 - DNA, 2485 bp, Zea Mays
ctcgacaaagcccacgccgcgccctcgccctcgccctcgcccccctgcctagggctccgcgccgccccgaggagaggagaacgcgcgcgcgcgcgcgcgccattgcggatccaaacgctccgccgcctcaactccctcgtcaattcacctccgccgccgccgccgcgccgcttcgaacacgatggatctactgagacaccccttcaagggagttgtcactgatatcaaaggaagggccacttggtacaagcatgattgggttgcaggactccactctggctttaggatattggcacctaccatgtatatcttctttgcctctgctctccctgtcattgccttcggagcacaactgagcacggcaacaaatggaatactctcaacagttgaaacactggcatcgactgcgatatgtggcatcatacattcaattcttggagggcagcctttgttgattgttggagttgccgaaccaactattatcatgtacacttatctctacaattttgccaagaatcatcaagctctgggtgagcagctatatttggcgtggacaggatgggtctgcatctggactgccatcatgttgtttcttttggcaacgttcaatgcttccaacgttattagcagatttacaaggattgcaggagaactttttggcatgttaatcactgttctcttcttgcaagaagctatcaaggggatgataagtgaatttagtgtgcccgaagacgctgacagcagttcaccaatataccaattccagtggctctatgtcaatggcctactcggtgtcatattttcaattggcttgctgtacactgcattgaggaccaggcgagcaaggtcatggctctatggcacagggtggtttagaagcttcatagctgattacggcgtcccacttatggtgattgtgtggacaggattgtcgtatttacatccaggcaaggtgccttcaggagtccccaggaggctttcttctccacttccctgggagtcaagttcactgggacactggaccacagcaagggatttgttttctgtccctccagcatatatatttggagccattctgcctgcttttatggttgcaggactttacttctttgatcacagcgtagcttcacagttggcacagcaaaaagagtataatttgaagaagccttctgcctaccactatgacattttggtccttggattcgtggtcctgctctgcggtttgcttggtatccctccatctaatggagtgcttcctcagtctcccatgcacacaaaaagtcttgctgtccttaagaggcagttgctaagcaaaaagatggttgatactgccaaggagagcataggaggaagtgctaccagtttggaaatatatggcaagatggaagaagttttcatcaaaatggatagcgaacagaatactgattctgttgacagggagttgaagaacttcaaggatgctgttctgcaagaaggcgacgaagaagggagattggctagagaatttgaccctcgcaaacatatagaagcccacttgcctgtccgagtgaacgaacagagactgagcaatctgctgcagtccatactggttggtgggtgtgttggagctatgccagtcatcaggatgatacccacatcggtcctctggggttactttgcctacatggccatcgacagtctaccagggaatcagttctgggagaggatacagcttctgttcattacagaaagccgacgctacaaggttcttgaaggtccccatgcatcgtttgtggagtcagtggttcccaaaacagtaaccatcttcacgatcttccagttggtttacctcctaatatgcttcggcataacgtggataccgatagccgggatcctgttcccagtgcctttcttcctcatgatcgtcatcaggcagtatctcctcccaaaattttttgatcccgtcgtcttgagggagctcgatgcagctgagtacgaagaacttgacggggtcccccttgaacacaaactggaagatgaagcatctgaagtaggaagttgtcctagccgtcctgatgcggagatattggatgaactcacgaccaaccgcggagagctgaagcacagaagttctagcctgcgtgaagaaagaccaattcaagtgacagtgagcacgcatatggttgcttcaagtgcggttcagccaagcctgtgaagacggcgaagtgttctttttatccgtagaattatgatcctcaagctgcactccgttgatgtgaatactgttgctatgtaatgtactgctactactagtgttgtacttgggtttttgacccaaacgcgtctgttggtaaggggtgatttgtaagaacagggacttacgtaaactacgtaggatcgattggtaagaagagagggagagaggagatgcaatacaagtcttcttggatatgaaagggggaatgccgaaggggcatggagtagaataatatcatatattgtcatt

SEQ ID NO: 114096 - DNA, 2611 bp, Zea Mays
ctcgacaaagcccacgccgcgccctcgccctcgccctcgcccccctgcctagggctccgcgccgccccgaggagaggagaacgcgcgcgcgcgcgcgcgccattgcggatccaaacgctccgccgcctcaactccctcgtcaattcacctccgccgccgccgccgcgccgcttcgaacacgatggatctactgagacaccccttcaagggagttgtcactgatatcaaaggaagggccacttggtacaagcatgattgggttgcaggactccactctggctttaggatattggcacctaccatgtatatcttctttgcctctgctctccctgtcattgccttcggagcacaactgagcacggcaacaaatggaatactctcaacagttgaaacactggcatcgactgcgatatgtggcatcatacattcaattcttggagggcagcctttgttgattgttggagttgccgaaccaactattatcatgtacacttatctctacaattttgccaagaatcatcaagctctgggtgagcagctatatttggcgtggacaggatgggtctgcatctggactgccatcatgttgtttcttttggcaacgttcaatgcttccaacgttattagcagatttacaaggattgcaggagaactttttggcatgttaatcactgttctcttcttgcaagaagctatcaaggggatgataagtgaatttagtgtgcccgaagacgctgacagcagttcaccaatataccaattccagtggctctatgtcaatggcctactcggtgtcatattttcaattggcttgctgtacactgcattgaggaccaggcgagcaaggtcatggctctatggcacagggtggtttagaagcttcatagctgattacggcgtcccacttatggtgattgtgtggacaggattgtcgtatttacatccaggcaaggtgccttcaggagtccccaggaggctttcttctccacttccctgggagtcaagttcactgggacactggaccacagcaagggatttgttttctgtccctccagcatatatatttggagccattctgcctgcttttatggttgcaggactttacttctttgatcacagcgtagcttcacagttggcacagcaaaaagagtataatttgaagaagccttctgcctaccactatgacattttggtccttggattcgtggtcctgctctgcggtttgcttggtatccctccatctaatggagtgcttcctcagtctcccatgcacacaaaaagtcttgctgtccttaagaggcagttgctaagcaaaaagatggttgatactgccaaggagagcataggaggaagtgctaccagtttggaaatatatggcaagatggaagaagttttcatcaaaatggatagcgaacagaatactgattctgttgacagggagttgaagaacttcaaggatgctgttctgcaagaaggcgacgaagaagggagattggctagagaatttgaccctcgcaaacatatagaagcccacttgcctgtccgagtgaacgaacagagactgagcaatctgctgcagtccatactggttggtgggtgtgttggagctatgccagtcatcaggatgatacccacatcggtcctctggggttactttgcctacatggccatcgacagtctaccagggaatcagttctgggagaggatacagcttctgttcattacagaaagccgacgctacaaggttcttgaaggtccccatgcatcgtttgtggagtcagtggttcccaaaacagtaaccatcttcacgatcttccagttggtttacctcctaatatgcttcggcataacgtggataccgatagccgggatcctgttcccagtgcctttcttcctcatgatcgtcatcaggcagtatctcctcccaaaattttttgatcccgtcgtcttgagggagctcgatgcagctgagtacgaagaacttgacggggtcccccttgaacacaaactggaagatgaagcatctgaagtaggaagttgtcctagccgtcctgatgcggagatattggatgaactcacgaccaaccgcggagagctgaagcacagaagttctagcctgcgtgaagaaagaccaattcaagtgacagtgagcacgcatatggagccaaccggttgaattttttgggctcttttcttttctctgggataacaagtagtcaagtacgcaccacgcatgtcagtggctgctttccgcctaacataggaagattttcacaggctagttcgagttgcttcaagtgcggttcagccaagcctgtgaagacggcgaagtgttctttttatccgtagaattatgatcctcaagctgcactccgttgatgtgaatactgttgctatgtaatgtactgctactactagtgttgtacttgggtttttgacccaaacgcgtctgttggtaaggggtgatttgtaagaacagggacttacgtaaactacgtaggatcgattggtaagaagagagggagagaggagatgcaatacaagtcttcttggatatgaaagggggaatgccgaaggggcatggagtagaataatatcatatattgtcatt

SEQ ID NO: 114097 - DNA, 1283 bp, Zea Mays
tttcaatatttactttttttatttgtgcacaaaacatcacaattccaattcgcagagcagaatatttgaaacaaacattatccgtgccacaaccaaatcgacgtagaccaaaatatagatattataagcatacatcattcgcagacacgtctgcgttaagaaaagctagaacatggccgtatacccaagcccaaatttgctattaaaccatatacctcctggaaaagataccggtattatttggacaccgtccctgcgagtctttctcgcatcaaattccaatcaagatgacttagtgccaagccccaaatttgctgtgatccatttgcaaacttcatccatctcctctggaacagtgtagtgcccaagacttcaagtaggagagcaatcatcatgagaaaagaaatatagaaaatttgcaactcaagtgaagcgtagttggataggtgagatataaaacctattgtatgccttgaagagcacattggaaaagccatttgccttcaaggcaccagcagatctctccccgtgcttgtaggcaactacatcatcagctgcataaaatggaaatgaaacataaattaccgaaggtggtaatttgttttttatggatcatcagaaagaactttttacgatgtgtcaaaaataatgttttccttatgcatcatgaaagcaacttgtatcattttcaagacatgaaggaaatattgtgatcctgttagctctaacatatacagagaaaaaagtgacaagtttcctgatgggcacaagaagtataaacaaggcagaactctgtgaatttcaagcaagctgcataaaaacaacccaaacattctgaagaaccactaaatctgctacagaaaaaacgtaatgtctttactcgttaccatcctacattttttagaaacatgtgtggtcattcctgctttgcacagttgcactagagaggttactaccatcagcagaaacacaacagcttgatttctaatggatcatggatggtgttctaggctagccagatctagtagtttgcactgcgatatgatatggttcatgcacaggactagtgttgatatgaagtgttacaagcaagatggactcattagctttttctcagtggatagtaatgcatgcatattcaaaacttggtttaccatgatatattacgcctttacaatggtcgtgtataaaccccatactgtctccaggcggaatgttagaacttagaaccctcccaacatataaagatgcttatcaagccaagcatggaactatgatagaaa

SEQ ID NO: 114098 - DNA, 372 bp, Zea Mays
tttcaatatttactttttttatttgtgcacaaaacatcacaattccaattcgcagagcagaatatttgaaacaaacattatccgtgccacaaccaaatcgacgtagaccaaaatatagatattataagcatacatcattcgcagacacgtctgcgttaagaaaagctagaacatggccgtatacccaagcccaaatttgctattaaaccatatacctcctggaaaagataccggtattatttggacaccgtccctgcgagtctttctcgcatcaaattccaatcaagatgacttagtgccaagccccaaatttgctgtgatccatttgcaaacttcatccatctcctctggaacagtgtagtgcccaagact

SEQ ID NO: 114099 - DNA, 553 bp, Zea Mays
acccatggtaagcccgctacaaaggagactccgctgctcgttctcggcgactccccttcacctccgccgctggcagccgtctcccgaccgcggcggcgcctcctcccactcctcctcgtcgatctcgactcggttagtctcgtcttattattcccacactgcactgcactcgtttctcctcctcgcacccgatcccggcgcgggctcctcgacttgtgtcgtcaagtcgtcgagtgcggtgggggtggggttccttgtcggcggacgtggatcaaactatccgacggcaacgctttcgattgacgaggtattctctagggtttggtagggcctgctgcctgcacaggctgttccgaactccagcggtgcgtggaaacggtgttttgtatgttcgtagaatggagtttaaaaccaggagtgagatagttagtctgaagatagccttaccttctatgtagcccttcttttgcattttaatctttttttttctaaaaattttaagttttatcctcaaacgatgtaatctaatttttaaacacctcagcgtcgtaac

SEQ ID NO: 114100 - DNA, 1119 bp, Zea Mays
tttatttttttgtttgcgtacagtaatcttgaatcgaattgccaaaccgcaaggctgaactacaagacagtacaagaacgaagttacacggcgttctggcacggcaccctaaaccaccgagaaattaactagcagcagtgttcactggtgagtagacgggatggctaacagttaaaacagtgcatcagcgaggcaagagacgaaacccacgggtaacagtaggagaaaagaagaaaaagagaaggcgtcgtcaggaacagcaacacgccagcaatggtcagatcaggcgagcgcgagcagggcacgaaccagctccctctctcgtttctcactagctcttggcgaggtggtgcttcttgccgccgtctccgcccttgccgccaccgccgccgccgccgccggacctcttgctcgcgtgcgccgtcgtgttcttcagaatctgcgcgacggcaccagggaggggttgggtcagtcggtcggaacgagaggaacgctcgctttggagctcagatcgaatcgccgaagcgaagcaaacgaatggagggtggtggacggaggggaggcgaggcgaggcgggcacctggcggagcgtgttgttctcgttctggagcgtggacacccgctgctccagctccgcattgcggagctccaggcccttggccttcgcctccagctccgtcaggtacgccttcttccgctcccgcgcctgctgcgcggacacgcggttccgcagcagccgcttcagccggttctgctccttgtcccccgccgtgcgcccgcgcttcttcccgcccgccggaggctgcgcccccgccgccacctgcccctgcttgccgtcctcccccttgggacgctcgtccgcgccggcgcccgacgaggccgacgccgacgcgccgcccatctccggcacccgccgtatctcctcgtcgctctccgcccctggggtgccatgcggggcagggcagcagcaacttcagctgacggaaccagaaatgatgcaggaaatatgtcatgtcacgggttgggcgcggcacctacctccttccgtgaggttgttgcgagcggagctggaggagcgctcgctgctggaggggagcgagctcgtggtgctcgtcttcg

SEQ ID NO: 114101 - DNA, 1435 bp, Zea Mays
atgtgcgtgacatggactggctggctcctcgaccgcgtgaagtagatgccatcgattagcggggcagtgggcgtggctgcctgcccgtgatgtgtgtgtatcacacggtgagcattcgagctgctccacatggtccgcattcgagctggccgcatggtgcggcaaccggcacttcgccactgctccacatcgagctcaaggctgggtatcgctgtcggcgccccccacacggcgtacgctctttataagagcccccggccgcgcgccgcggcaacctccacaacgcacaacagcatatgcatagctagctctagtgctgcatcctctccgtctccagcgtcatcgtccctttccttcgttcacctccagctagcagccacacgcaccaccgtcccgtcgcgtctccggcctagctcgccagccacctccgcacgtcgtccatctcccttcatatattcagcaagcaaagacagcttctgacgcgtcgtcgtcccggctcgatctgcattgtgcggcggcgcggtgaatagtagaattaaaccgccggcggaacaataagcaaacgactaagcagctacaggccaggccaacagcacgcccatcgaagacgactagaacgttcgttcgtcggaacaagatatggtgagcagcaagggcgtcgagccggtgcagcacgccgccgccgccgccgccgccgccgggtcgttgccgctggcggcgctgaaccacatctccgtggtgtgccggtgcctcgagagctccctccgcttctaccgcgacgtcctcggcttcgcccccatccgccgcccgggctccttcgacttcgacggcgcatggctgttcaactacggcataggcattcatctcctgcaagccgaggatccggcgagcatgccccccaagaagacggagatcaaccccaaggacaaccacgtctcctttcagtgcgagagcatggaggcagtgcagcggcggctcacggagctgggcatccggtacgtgcagcggcgcgtggaggagggcggcatctacgtggaccagctcttcttccacgaccccgacggcttcatggtcgaggtgtgcacctgcgacaacctccccatcgtgcccctcgttcccgaggacgaccatgccatcctcggcctgcagcagcctgcagcgccagcctgcaagcggcggccagccgccgccctgaagcaagcgccgccgcagcagcagcagcaggcgcttcctgttcccgtggccgtcccaaccccggcgaaggccagcggcggcagctgcgtcggcgaggtcgagctcgaggcggcgagcatccctggttgcgcgatgaggtcttgcccggagcacgcgtgcgtgtagcggtgcgtgggtctgacagtctgactggtcgtcgagagaccaagatcgaccggaacgctcgcattttgaagatcca

SEQ ID NO: 114102 - DNA, 117 bp, Zea Mays
ctagctttgccgaatccgagcgcagacgcaacagcaacatctcctaatctcttttctcttcctccccacatcaacggctccaccccggccgacttttttttctttaatttttcccac

SEQ ID NO: 114103 - DNA, 626 bp, Zea Mays
gttctgctacattttgtataggtagtgtggctaccggagagttaaatttcacatcaacctttgttgatcttcctccaccttcagctccatccaggagtgtgtctggacaaaatctcaatcccttgagtactaattcacttgatttggatggacaagaaaccacaagtgtcttcaatctatcttctaatgctcaatctgtcccagtcaatactaatgaacccaccgaagctcaatttgtcccatctaatcaagaatcaagccagagagaaggtggcagtgggagaaagcgtaagcaaagccatgttggattagctcttgaaagttatgtagagtttaaaaagatccaaaatacagaaacacttgaaactcttaaagaacataagaggcaagaggatcaattttctattagcaagtgtcaggctgaattgaaaggaatggatggattaacagccatgcacaaatcatatgctttggagcttttcgtatctgcgataaaactgagattttcttaacaacaacagagcatgatgttagagaaatttggctcaagcgcaaaattaggttgcttcgtgggagtgatgcatggcctgcataaatgatatgagaaaatttggtatgttctttca

SEQ ID NO: 114104 - DNA, 377 bp, Zea Mays
aagtacatgcttttgtgcaagataatagtcaaccaagctgatgatgttgcaggaatcatctcaccgaatgatggcctcaagtatctgggtcctgacattaatgctatgaaagctgtggctgatgcctactccaaaaggtctttgaagtactttgaaactgctctatgtacaaagcccagctagacgatcctattgtccataggcaactttcctctctttctgatactcccatggagcagaaagtctacaggttgattgagccctactcaagggtagagattacccacgtagtatagatgattgagctgcaaacgaaccatgttgagaagaagctatgctagatgatccttgacaagaaattcgcagggacactagat

SEQ ID NO: 114105 - DNA, 1314 bp, Zea Mays
atggcgatcatcgtcagctcctcagctcgctcgacgctttttattctatcgtccattaccaaccatgtctaccgccgacaggtcgtctccgccctgaagacgacggccgccgcagcgaggcggcatacggccttcgccatgctgctcgccttcgtcacgctgctgcttgtgctggccactcgaccggcgcagtgccaccagcagagctacgacgtcgtcaggaacttccacgccgccgcggatggcaagacggacgatgccaaggcgttcctggcggcatggaaggcggcgtgcagcgacgaggccaggccagtcgtggtcgtcccgggaggacggacgttcctgctgagccaggtcacgtttcagggcccctgcaagtcacccatcaccatacagctggatggcaggatcgtagcgccgaaccgcatctggacgactcagccagccaacctcctggtcttccacggcgtcgacagcttgactctggacgggaacggcgagatcgacggccgaggggccatctggtgggactgctataaccacaagagatgcaacgcccggccaattctgctggccttctcgttctgcgaccacctacgggtcacgaggatacggctgaccaacagcgccgacaagcacatgaccctgttccggtgcagccaggcgctcgtggacggcgtctccatcgccgcgccgcccgacagccccaacacggacggcataaccgtggcgtcgtccaaccacaccgtcatctccaactgctccatccgaagcggagatgactgcgtatcgatcctgtcgcaaacgagaaacgttaccgtcactcgcagcacctgcgggcctggccatggtatcagtgtgggaagcctgggaagatccgagagcgcggtggtggaacagatcgtagtgactaactgcagctttgttgggaccatgaatggtgtcaggataaagtcatggcagggagggaagggctacgcaaaagggttcctctttgcgggcctcaacatgaccggagtgcagtatcccatcgtcatcgaccagttctactgcccgcaaggaaactgtcctgtgaagcctggtggcgtggcgataaccgacgcaaggttcatcgacatccaagggacgtcatccaggcaggaagccatcaggctgctgtgcagccagagtgtccactgccatgggatctacctcagcaacgtcaacctttcctgggtcaaccacaccgccccgtccaacgctactattctgaacgcccacgggacaaccgagggcgtcgtcgtgccaaagatacagtttttacagcctttgtag

SEQ ID NO: 114106 - DNA, 831 bp, Zea Mays
atggcgattcagctactctcattttgtgcttttctagagcttcattatcgcaatttgttccattgtaatggccacattttctactggaatcgacaccaaatccttccaggattcgtcatcgactcgagccaggtgagggttcagcgtggaggttcgtcgaggtctgctactagtagctctcgtcgcttcactcaagatccagcagaagtggagcaactgcgagaagaacttatgcaacatcaggattacttgaagcaacaagctgcgcaacatgaatattatgctacacagattcgacaacagcaaacactcatacaacaactagcacaggcccaagggatacacgtcctggtgccccccacctctcgttcattatccttggtcttcacctccacctatacctacatctccatctaccgaacatcagacccctccagctaccttgccaacgcatgaacgagaagataggttagactttgtcgaaaccctcttcgctagtggaggtatcgaccatcactcgtcactgtaacccgatggtgatcggcgaccgtgaggttccatgttattgtgttctgatacttgagacttttattatgactatgtatgagatattgtctcttattagtactggatgatgagatgtgtcttattatgactatggatgagacttttgtgatgtaattgatgagactatggatgagacttttgtgatgtaattgatgagactatggattttaatattgttatgtgattgtgtgtgagatgttttatgcgaaaatatgttgtgctatatagctgttgatatatttgttatgttgtggaatgtggtgt

SEQ ID NO: 114107 - DNA, 75 bp, Zea Mays
tcaacccttagtaattatagaagaattgtagtacttttcttaagctttccaacaaattttggatcaccctttttg

SEQ ID NO: 114108 - DNA, 1301 bp, Zea Mays
agcatgacatcgacagtttgacatttagcagcacacacttgaacaagcaatcatgtttaagttctgaaatctggagtcacttccggcactgcaacgcagcaagcaacagaagctacaccagacaagggacaacacaatctggatgcagtaagcagtcgtactgtaataaacaactataattcctatcctcccagtctcccaccgtgcacaatgcattttattatgactcaataacgtcgaatccctctggacggaggggggatataatatcaacactgcaatctgaacctccagtgtcccaaacacaaacacagggacaccaaggtgaggccagagaggagagcagccatggcgctgcctgcagtgtgcactctatgtggtgaggatgggcgggaggtaatccgacttgttcccgaggacgcgggcgcgggtgtcggggaagttctccatcccgggcagctcggtaacgctgccgtcggcagtgacaccgatcgggtagctgaggaggtggcccgggaggtcctgctccaggtcgtcgctcgagtacaggtcccagtacttctcggcgacctcgttcaccttctgcacacactctacgctctcgggccgctggaagacgtcttccagcattcccaggtgctcgtaccaaagagacatccggaagccatggatctggccccgggcaggctgcctagtcgccaagtggtacggctggtacgcgcccatggcgatctcggagtccctggcaccgtccatggacctctggttgatgttggcggacccaatgatgatgtactcgtcgtccactgaaaccaaacaaaaatcgttaccatcttcatcaacaaaatgtatgcctttcagaccaagcaagagagcaattcaagcaggaatttgactgttcaacactttgctaccgagacagagtaactaactgcatactttgaatttattttttactcgtttgaaaagagtgttagttccttttttttaaaaaaaaagtagaattatatgagcataggacagcccctcgtaatatttgttgctttgtattgatggctttactgtccagtatagttttgcttttaactaaaaaacatgttgctccaaacatatgcacatcggcacatcagaaaagtaagtttcacaacaacaacagccaatactcctaaatagtgataaataaaagatatatggcctattaaaaggaactatcgacatattatatagcataatgcatggataaatagagggttatcatgcaccgaaaatctaacgcctctgaagccaagaaaagaaaacaa

SEQ ID NO: 114109 - DNA, 1632 bp, Zea Mays
ctactcgacgtgctcgtattggtataatcccagagccacaggcacgaacgagtacgggatcccgggaagattcacgcccggcgccacctttccgtagcgccacgaggccacgaccacgagtattttaagcgtggccggcgaccgttccgcgggaagaccgcgcaagatgatgcagggcgcggcggcgggggggacctctgtctccggagcctcttgggctcgggccacgcgcggccgcgcggccgtcctcgcctcgcgccacgtcggcgtgggcgcctcctcctccgactactactacaaccacttcgggccccgcggcgccaccgccgccccgctcctccgcgcccgcgggggcgggcggctcaggcctctgccgctgctgtccggcagcggaaagaatggggaggtcgccaaggccgcggcggcggcggcatcggtgccggcggacgacgcgagtgccgccgcggtgacgacagacggcggtggcattgcggccacggcgcagctgggcgccatgatcgtcgcgtggtacctgctcaacatctacttcaacatctacaacaagcaggttctcggcgcgctgccgttgccgctgccgtacaccatcacagccttccagctcgcgttcggctccctgctcatcttcctcatgtgggccaccaggctccacccggcgcccaggctctccgctgcgcagctgggcaagatcgcgccgctggccgtggggcacatgctgggcacggtgttcaccaacatgagcctgggcaaggtcgccgtctccttcacgcacaccatcaaggcctccgagcccttcttcaccgtcgtcctctccgccctcttcctcggcgaggttccttcccttccggtgctgggctcgctcgtgccgatcgttggcggcgtcgccttggcgtcattcaccgaagtttctttcaactggaccgggttttggagcgccatggcgtccaatctgaccaaccaatcgaggaacgtcctcagcaagaaactccttgccggtgacaaggatgttatggatgacataaatctcttctcggtgatcactgtgctgtcgtttctgctgtcctgccctctgatgatctttgccgaaggcatcaagttcaccccaggatacctccagagcacgggcctgaacctccaagagctgtgcgtgagagcagcgctcgcaggtctgtgcttccatggctatcagaagctctcgtacttgatcttgtcgagagtgtcgccagtgacacactccgtcgccaactgcgtaaagcgtgtggttgtgatcgtctcctccgttctgttcttcagcacacctatttcgcctgtcaatgcactaggaactggtgctgcattagcaggtgttttcctttactcgaggttgacaagaaccaagaagccaaaggatgcataagcaaggataaaacagattacaggtttttgagggcacagccgactgcaagattcacgaatgaatatatattctcgagcctcacgtgagcatctccaacatgtcatgcaaagcactttacactgtagattacattttttatagattgcactttttgtaaagtgaagtttaaaataaagagcatagagtcaatctgacatgggctaatatagtccaaactc

SEQ ID NO: 114110 - DNA, 1770 bp, Zea Mays
ctactcgacgtgctcgtattggtataatcccagagccacaggcacgaacgagtacgggatcccgggaagattcacgcccggcgccacctttccgtagcgccacgaggccacgaccacgagtattttaagcgtggccggcgaccgttccgcgggaagaccgcgcaagatgatgcagggcgcggcggcgggggggacctctgtctccggagcctcttgggctcgggccacgcgcggccgcgcggccgtcctcgcctcgcgccacgtcggcgtgggcgcctcctcctccgactactactacaaccacttcgggccccgcggcgccaccgccgccccgctcctccgcgcccgcgggggcgggcggctcaggcctctgccgctgctgtccggcagcggaaagaatggggaggtcgccaaggccgcggcggcggcggcatcggtgccggcggacgacgcgagtgccgccgcggtgacgacagacggcggtggcattgcggccacggcgcagctgggcgccatgatcgtcgcgtggtacctgctcaacatctacttcaacatctacaacaagcaggttctcggcgcgctgccgttgccgctgccgtacaccatcacagccttccagctcgcgttcggctccctgctcatcttcctcatgtgggccaccaggctccacccggcgcccaggctctccgctgcgcagctgggcaagatcgcgccgctggccgtggggcacatgctgggcacggtgttcaccaacatgagcctgggcaaggtcgccgtctccttcacgcacaccatcaaggcctccgagcccttcttcaccgtcgtcctctccgccctcttcctcggcgaggttccttcccttccggtgctgggctcgctcgtgccgatcgttggcggcgtcgccttggcgtcattcaccgaagtttctttcaactggaccgggttttggagcgccatggcgtccaatctgaccaaccaatcgaggaacgtcctcagcaagaaactccttgccggtgacaaggatgttatggatgacataaatctcttctcggtgatcactgtgctgtcgtttctgctgtcctgccctctgatgatctttgccgaaggcatcaagttcaccccaggatacctccagagcacgggcctgaacctccaagagctgtgcgtgagagcagcgctcgcaggtctgtgcttccatggctatcagaagctctcgtacttgatcttgtcgagagtgtcgccagtgacacactccgtcgccaactgcgtaaagcgtgtggttgtgatcgtctcctccgttctgttcttcagcacacctatttcgcctgtcaatgcactaggaactggtgctgcattagcaggtgttttcctttactcgaggttgacaagaaccaagaagccaaaggatgcataagcaaggataaaacagattacaggtttttgaggtatagagattagatcgagagatatcaatgagcataatgaactaaacatagtttccgcctagttgtacacttgtaccacagggcacagccgactgcaagattcatgaatgaatatatattctcgagcctcacgtgagcatctcacttgtaccacagggcacagccgactgcaagattcacgaatgaatatatattctcgagcctcacgtgagcatctccaacatgtcatgcaaagcactttacactgtagattacattttttatagattgcactttttgtaaagtgaagtttaaaataaagagcatagagtcaatctgacatggg

SEQ ID NO: 114111 - DNA, 765 bp, Zea Mays
gcccttggaaaaagcagaaagggcattgtagaacctatacagccttccatcaacaaacatggtgccggtttgggatggaggcaaacccgctaagatgttcctttgaagattccagtctttgtatttgtatcctctgaagcctgtcagatttggtgttcttaattcaagtgcaactacaacggaagaattgaggcaactgacttgtgcttgctgcttaaatctggcgtttttttggacagcagtatattcacaggctttcccttctcatttttcttctcatgggcacgagagtaatcagctggggctttgttcttgttcttgtcaccaccttgtctgctcctcttcttatagatgggcttttttatcttgtatgagctagcatttacttcgatgctttgccatttggatgagcattgaagtttgtcttcacaacctcatcttgtgcctcagcgacttgcatgacatcgatcagttcgttgtatggattgtaagcatcttgtaagtagttgcgagtactttagatagcgctcgggtggaaagtagataagtctttttcctatcttttcctgatctgtgataactttatcacaaagtgacaagttggtacaaatttgatgtaaggttgaattatattcatccacggttttgtaaccaacaaacataaggcatgcctaatcttgttatgctttgggttagatcatgtacttaaacttctcgaaccagtttttcaatgtggcccagaggccgcttgccttcttttctgcc

SEQ ID NO: 114112 - DNA, 1632 bp, Zea Mays
aataaaaaaaaaaccgcccatagcgcgcaggacaggccgtacggcgtacggtgtcggcggacggccgcgatgggcgggggcgacgacgcggcggcgggcgttggagacgggttcgcgtgggatgccgactcccagctctactaccacgccagtactgctttttaccatgaccctgttgctggatggtactacagcagcagagatagccaatattacgtctacaaaaatggaaattacatgccattgacaacagatctggaaaatgaacccacagccaatcatccatatgatgaggccaaccaagatgtcttggaacactcttcaggcttggaaacaactatacttgacaatgagaatgaaataccaggacctccatcagaatggatggaggaaacactgataaacttgtatttgtcaggctactcaaacaatgaagtcaatgctgaaagttcactagtaatcgcacattcaaatgaggaagacagaattgaaacaaccgggaacaaactagatagcttgacctcggacagtgcttcagcctctctgcatgatgctacatcacagcaaactgaagttgaaacagaaacaaagaattccgcttatgtgtatgaatctttgggggaagaggaagagaaatggcacgctcagtatggtcaggtcgagaggtcaaatgatgatcaacatttacctccaacaattgatatatgggattgggatgtggtccaagaccatgttaacaaaggtcagcccgtggttaggcttgtgggatgtttatctaggggttcaaataagcttcatccttctcttcctactcgtggtggccttgtaaggactgctcctgtgcgtgaagttcatcttgacctcgtgcaagtttcaacagggaagctgtacaggctaaggaaccctagcagaaagtacttagccactttatccgcatatgactcctccaacccaacaaaggattgggggtttcctgatattaatttgaataagcaatccactgcaaagtgccaatctgaagttcttgctgataaatcttgtggcggaggaagtgtctcagctgctaataccatggcaagagccgaacacaaaagtttacagggacagagctgctgagagaaggatcctacatcgtggcttaggggttgggcctggacagaagcagagtaacaccaacaatttcgatgaatacgaggaatcaatcgaggacatggattcaatgggagttgcgtcagctgatttgaatttccaatccagcggtttgctttcggctaagagaataatggagaacatgggctggaagcagggagaagcccttggaaaaagcagaaagggcattgtagaacctatacagccttccatcaacaaacatggtgccggtttgggatggaggcaaacccgctaagatgttcctttgaagattccagtctttgtatttgtatcctctgaaggtaagttccaattgtatcgaataaaccggagggaactgaattgaacttgattctaaattttgctgcttctctcacacagttttaaaaagttgcaacttgtacttaaatgtggtctatgtgtattagcctgtcagatttggtgttcttaattcaagtgcaactacaacggaagaattgaggc

SEQ ID NO: 114113 - DNA, 1520 bp, Zea Mays
aataaaaaaaaaaccgcccatagcgcgcaggacaggccgtacggcgtacggtgtcggcggacggccgcgatgggcgggggcgacgacgcggcggcgggcgttggagacgggttcgcgtgggatgccgactcccagctctactaccacgccagtactgctttttaccatgaccctgttgctggatggtactacagcagcagagatagccaatattacgtctacaaaaatggaaattacatgccattgacaacagatctggaaaatgaacccacagccaatcatccatatgatgaggccaaccaagatgtcttggaacactcttcaggcttggaaacaactatacttgacaatgagaatgaaataccaggacctccatcagaatggatggaggaaacactgataaacttgtatttgtcaggctactcaaacaatgaagtcaatgctgaaagttcactagtaatcgcacattcaaatgaggaagacagaattgaaacaaccgggaacaaactagatagcttgacctcggacagtgcttcagcctctctgcatgatgctacatcacagcaaactgaagttgaaacagaaacaaagaattccgcttatgtgtatgaatctttgggggaagaggaagagaaatggcacgctcagtatggtcaggtcgagaggtcaaatgatgatcaacatttacctccaacaattgatatatgggattgggatgtggtccaagaccatgttaacaaaggtcagcccgtggttaggcttgtgggatgtttatctaggggttcaaataagcttcatccttctcttcctactcgtggtggccttgtaaggactgctcctgtgcgtgaagttcatcttgacctcgtgcaagtttcaacagggaagctgtacaggctaaggaaccctagcagaaagtacttagccactttatccgcatatgactcctccaacccaacaaaggattgggggtttcctgatattaatttgaataagcaatccactgcaaagtgccaatctgaagttcttgctgataaatcttgtggcggaggaagtgtctcagctgctaataccatggagccgaacacaaaagtttacagggacagagctgctgagagaaggatcctacatcgtggcttaggggttgggcctggacagaagcagagtaacaccaacaatttcgatgaatacgaggaatcaatcgaggacatggattcaatgggagttgcgtcagctgatttgaatttccaatccagcggtttgctttcggctaagagaataatggagaacatgggctggaagcagggagaagcccttggaaaaagcagaaagggcattgtagaacctatacagccttccatcaacaaacatggtgccggtttgggatggaggcaaacccgctaagatgttcctttgaagattccagtctttgtatttgtatcctctgaaggtaagttccaattgtatcgaataaaccggagggaactgaattgaacttgattctaaattttgctgcttctctc

SEQ ID NO: 114114 - DNA, 249 bp, Zea Mays
gcacgcaataatatactagtaaggacattaccagaactcgaatggacaggagcacagggcccacaaagacaaaatgaggcatagatttatccgaatactttttaaaaaaaaattgtactgtcagtactacaggctacagcgtgtgtgtcccattcggccactcgttggattctggcctgccggacagggcacatccggattccggagacctctcgaatgcgcccagtcacgtgcactgattaaattaaa

SEQ ID NO: 114115 - DNA, 1040 bp, Zea Mays
aggcctgagccgtatcacgcccatgcatccacaggattttctcctaaagatcacagactttacttaggccatcacaaggagacgtacgctctctgctagcacccatcttgcagcaggcggagccgcccgacccaatccgtgcgtgtgttggtcgagatggctacaacagcttacgctcccatggcgagccaggtgatgaagagcagcccggtgcactcgaggccgaggggcctgtcaggcgctgcgctcacgcggccccggccccggttcagcgtcgtcaaggccgccatccagcccgagaaggcaacgtaccaggtggtgcagcccatcaacggcgacccgttcatcggcagcctggagacgcccgtcacctccagcccgctcatcgcgtggtacctctccaacctgccggcctaccgcaccgccgtgagcccgctgctgcggggcgtcgaggtcggcctcgcccacggctacctcctcgtcgggcccttcgcgctcaccggcccgctccgcaacacgcccgtgcacggccaggcgggcgcgctcggcgccgccggcctcgtcgccatcctcagcgtctgcctcaccatgtacggcgtcgcctccttcaacgagggcgacccgtccacggcgcccacgctcacgctcaccggccggaagaaggaggccgacaagctgcagaccgccgacggctgggccaagttcaccggagggttcttcttcggtggtatctccggcgtgctctgggcatacttcctcctctacgtgctcgacctcccctactacttcaagtagaatacaaattcataaagatgcatatatataatatagctccgcctccgatcctcctctctgcgtgcaaaggtatgccatttcagcagtgacgagcatcgtggatacatgcaattcctctgcacatggatggattgggatgtaacttggaactgttaattttttttactttgatttggatgcatcatgacccccccttcaaaccagctagtgaaatgccattttaggtaaaagtcgacctcctagta

SEQ ID NO: 114116 - DNA, 712 bp, Zea Mays
aggcctgagccgtatcacgcccatgcatccacaggattttctcctaaagatcacagactttacttaggccatcacaaggagacgtacgctctctgctagcacccatcttgcagcaggcggagccgcccgacccaatccgtgcgtgtgttggtcgagatggctacaacagcttacgctcccatggcgagccaggtgatgaagagcagcccggtgcactcgaggccgaggggcctgtcaggcgctgcgctcacgcggccccggccccggttcagcgtcgtcaaggccgccatccagcccgagaaggtcagtcagtactctcgatcggtaacacaaaagaacgcgcgaattccatttcagaatatatccaagcttactgctcgaatccatacatgcgtgcgtgcgtgcaggcaacgtaccaggtggtgcagcccatcaacggcgacccgttcatcggcagcctggagacgcccgtcacctccagcccgctcatcgcgtggtacctctccaacctgccggcctaccgcaccgccgtgagcccgctgctgcggggcgtcgaggtcggcctcgcccacggctacctcctcgtcgggcccttcgcgctcaccggcccgctccgcaacacgcccgtgcacggccaggcgggcgcgctcggcgccgccggcctcgtcgccatcctcagcgtctgcctcaccatgtacggcgtcgcctcctt

SEQ ID NO: 114117 - DNA, 510 bp, Zea Mays
atggatggtggcaacatgcttccaactacaccgtcctcacagccgtcgtcgaccatattttctcaagtgcagctctattcgctgcaccctctccccatcaactacagctctcgtggctctaacctgttttttggtttggctgctaactccgcagtaggacacggatcaggtgttgcacaaaacagaggggctgccttcatccgcgagccgtcactaacaccagagagtcacaaagtttcatctagcgccaagtgtaacatacagacaaccccacatcagggagacaatctgctgcaaggaacagagattatcacttctccgcctaacgtgcaggcgccatcaggagctgcttacagcgtgctagatgggtctacaaacaaggctcacaaaagtgttgtcggaaaaaggtctcgaacatcaccgtccaagaaggttgccaagaaactttttagagatgaagacacaggagatgacgatgttgctggttccgcagacgttgatgctgagtag

SEQ ID NO: 114118 - DNA, 330 bp, Zea Mays
atggacggctcggacctgggcctctgcgacacggcctcccacggcgacgcgccggcgtccgcgcctgaggaccgccgtcgtgcctgcgggagaggagctggcttcgtccacgcctgccccgggagtcgtgtcgcgacctgggcggctccgaccgggtcttccacgaacggcgcggcgaccggatctgcgacggagcggcacgggccaaggacggcgggggcttgcggccggcgcttcgccgttagccagatctgctacgtaccagcagggcagacacgcgcaggtcctcaggctctcctctcggtctcttctgcagctattcgaggttag

SEQ ID NO: 114119 - DNA, 1065 bp, Zea Mays
cgccatcatcgcccccgccgcacccgcccacgccgcgcccgctcccggcctcggccccgtccgccgtggaggcccccgccgcgcccgcccccggcactagccccgtccgccatggaagcccccgccgtacccacccctggccccgtccgccatggacgcccgtgcccgcccccggcctcgtccgccatggacgcccccgcactggccgcatccgccatggaagccctcgccgcgcccgcccctggccccgaccccgtccgccgtggagtggatttggaatttgaccccgctgtcgtgctcgcacgtacatgatgcctctaaaccagagccatctgctgcagggggaaatgaacgaaccgatcaacaaccctcatttgattagtacttcattcaatctattattactgttactgagttcaggactcaggtagcagtcgatgccacattgttagattgcgatctgcaaaaacgctactgattcataaataaaatcgacccagcatgtacacacgcacagcttcaggctggtccaagcaaaaactgcattcatgtttttgcttgtacactgcaccgtactcatattggttttagcagtaagagcgtgcttatgggtgcaaaatgtcatagtgaaagatgttttattgcattgcatttagttaataacatgtcattcaaagttttgtggtaaaatttcttctgacctggatatggcgcggaaaatttgaacggtcctatgggagaattataccagaaaagagaagggtatgcgttactagtagcttcccccaaactgctggcgctatgatcaaaatgtgctttcccaatttagccactgcatgttgcctcataatttctagtttttcgatatctgacaatgccctgaccgccgcggaatgtcacgccaccggacaccgacatctactccattccgagggttcttgccccgatgccgtagaagtacgcgaggtgcacgaagaaaaactttggccgttaccacgtgagcgagccaccagttgagcatttgcgcgattcactgtacaagacagagagggatgtcatgaaggt

SEQ ID NO: 114120 - DNA, 1271 bp, Zea Mays
acctttctcaaccccatctctctctcgcgtctatctcctcccttagtgccgcccgccatcatcgcccccgccgcacccgcccacgccgcgcccgctcccggcctcggccccgtccgccgtggaggcccccgccgcgcccgcccccggcactagccccgtccgccatggaagcccccgccgtacccacccctggccccgtccgccatggacgcccgtgcccgcccccggcctcgtccgccatggacgcccccgcactggccgcatccgccatggaagccctcgccgcgcccgcccctggccccgaccccgtccgccgtggagtggatttggaatttgaccccgctgtcgtgctcgcacgtacatgatgcctctaaaccagagccatctgctgcaggtatggtgtacatttctgcccccgccagtgaactctacgattttctgtatcgaaatttgttcgagtctctggagcgtgaatcatgtgttcttttccggcttaccatggtgcctgtgttgttcaggaggagtgctgaatttcttttgattgcagggggaaatgaacgaaccgatcaacaaccctcatttgattagtacttcattcaatctattattactgttactgagttcaggactcaggtagcagtcgatgccacattgttagattgcgatctgcaaaaacgctactgattcataaataaaatcgacccagcatgtacacacgcacagcttcaggctggtccaagcaaaaactgcattcatgtttttgcttgtacactgcaccgtactcatattggttttagcagtaagagcgtgcttatgggtgcaaaatgtcatagtgaaagatgttttattgcattgcatttagttaataacatgtcattcaaagttttgtggtaaaatttcttctgacctggatatggcgcggaaaatttgaacggtcctatgggagaattataccagaaaagagaagggtatgcgttactagtagcttcccccaaactgctggcgctatgatcaaaatgtgctttcccaatttagccactgcatgttgcctcataatttctagtttttcgatatctgacaatgccctgaccgccgcggaatgtcacgccaccggacaccgacatctactccattccgagggttcttgccccgatgccgtagaagtacgcgaggtgcacgaagaaaaactttggccgttaccacgtgagcgagccaccagttgagcatttgcgcgattcactgtacaagacagagagggatgtcatgaaggt

SEQ ID NO: 114121 - DNA, 1461 bp, Zea Mays
atggcttctggcctccaatgccccgacaaacacacttccatgaacgtggaggccgtcctccacatgaagtcaggcctcggcgagagcagctacgcgcagaactcttcgcatcagaagaaaagcacggagacgttgagaagcctagtgatggactcggcaacgctggtgtacgaggcactcaggccggagagcttcacggtagccgatctcgggtgcgcctcggggaccaacgcgctcggcgtggtggaggccatcgtcaggggcgtcggcgaggcctgccgcggccgcgggccgtcgtcgtcgtcgccgccgcccgagttctcggtgctcctgaacgacctcgcctcgaacgacttcaacaccgtcttcgcccgcgcgccggaggtcgccggcaggctcaaggccgacgctggggccgtcgtgttcctgtccggcgtccccgggtccttctacgggaggctgttcctttgccggagcgtgcacttggtttgctccttcaatagcctgcactggctgtctcaggttcctgcaggccttcgtgacgagaccaacaagccacttaataaaggcaagatgttcatatcaagcacgagctctcccgccgtgccggcggcctacctgcggcagttccagaaggacttcaacctgttcctccggtcgcgcggcgctgaggtcgtctccggcggccgcatggttctgtcaatgctctgccgggaaaccgaggactacaccgacgtgaagatgaccctactatgggatcttctatcagagtcacttgccgcgctggtatcccagggactgctcgagcaggatgtggtggacgcctacgacgccccgttctacgcgccgagcgcacgggagatcgaggaggaggtgagcaaggagggctccttcagcctggactacgtgcggacgttcgaaggcagcctgagcagcggcgcaggcgctgagacagacggcaggaaggtgtccatggcgatcagggccatccaggagtccatgctcacccaccatttcggggccgccatcattgacgcgctattccacaagtacacggagctagtcaccgaatccatgcacaagggagaggtcaagagcgtccagatcggggccgtcctgggactgctcgagcaggatgtggtggacgcctacgacgccccgttctacgcgccgagcgcacgggagatcgaggaggaggtgagcaaggaaggctccttcagcctcgactacgtgcggacgttcgaaggcagcatgagcagcggcgcaggcgttgagacagacggcaggaaggtgtccatggcgatcagggccatccatgagtccatgctcacccaccatttcggggccgccatcattgacgcactattccacatgtacacggagctagtcaccgaatccatgcacaagggagaggtcaagagcgtccagatcggggccgtcctggtcaggatatgatgtaag

SEQ ID NO: 114122 - DNA, 194 bp, Zea Mays
attatgacatccaccgcgccaaaaaccatcaccactaaggcactgggaaaaaaatttgatgcagacctgctgcaaatcagaaagtttgcattccctcaaaaaggaggatagaccccacctgcaggtccaccagataatattttagttgtattattgctgctgcaggtggggtctataatcctttttgtgagggg

SEQ ID NO: 114123 - DNA, 2042 bp, Zea Mays
cggaggccgcggccgccagggatggtggccgtcggcggcggcgggggcggggcccggcggaggcgggcgtggcggtgggccatgcgggcggcggccagcgccgtcctgtggacggcggtcgtgcaggtggcctccatcgccgggctgttccgcccgcgggtcctcgccgactgcggcgggaagggcggcgctgccgccgcgtccggcctcgccgcgctcgccggcgaggacagcctagcggcgaggctgtcgccgccggcgctcgtacccaagagaatttacaaaagcaatggctacctactagtgacttgcaatggtggcctcaatcaaatgcgagccgggatatgtgacatggtgactatagcacgccatctaaatctaacgcttgtggtccctgaactggataaaaggtctttttgggctgacccaagtgattttggagatattttcgacgtggaccacttcattaattccttgagagatgagctgatgatagttaaagagcttcctttgaaactacagttaagaactaagaagagactgtactcgatgcctcctgtcagctggtcgaatgaaacatactacctaaagcggatattacctcttgcgaggaagcacaaggtaattcatttcgataaatcagacgcccgccttgcaaacaatggccttccgattcagctgcagatgctgcgttgccgagtgaactttgaggctctgagattcacaccacagatcgaggcccttggcagaaagctcatctccactctccagagacgaagtgggcagtttgttgtgcttcacttgcgctacgaaatggacatgctctccttttcaggctgcacacatggctgctctggtaaagaaactgaggagctcactaagatgagatatgcttatccatggtggaaagagaaagagatcgattcggaagtgaagaggctccaaggactctgtcccctcacaccagaggagatcactctagtgcttaaagctctagggttcacaaaggacactctgatatacattgcttccggtgaaatctatggcggtgaaaggcgcctggccgtgctcaaggctgcgtaccctaaactagtaaggaaggagaagattttatctcccgatgaactgcggccgttccagaaccattcgacccagatggcagcgctggattacatggtctctctagcaagcgacattttcattcccagctacgacggaaatatggcaagggttgtcgaaggccaccgcaggtatatggatttccgcaagaccatcgtcttggacagaaagaagctcgtcgagctgttggaccttttccaagggggcgctctatcctgggacgaattctcggacgcagtgaaggaggcacacaggagccgcacgggccagcctgcggaaagaaaggtcgtcccagggcagcccaaggaagaggactacttctacgctaatcctctagaatgcctcggctccaacgggggactacgggacgtctcctgacgacgctttcctggaaacacgccgccgatgaacgatgacaccacctcagccctacagcacaccgtgtgtgttcgtgttcatcctcaccagtcaccgccaccgccacctttgtacagctgaccaaaggccctgcccatctaccacaagtgcatgcaggttcaccagatcagaacgcctgcgaccacatttcctcctcacagaataaagcaggaaaagaagctgggaaccctacggggttcttcagaaagaagagatgccgctcgtgcatccagtctgctcctttcctaccatctgtcgtagttgttgttgtaacccttctgtcagttttttcattctattgttcggttgctccccttcaactgctccagttttcagttcttctagccggggcgggtagctcatgcaaaagtaggagtccagctttctggaagtttcttgtactaggtccgcgatgcataacagagatttctgaatcctgacagaaccttattactttcccttgagggatcaaatttcggcgacggaataattgtttggtttccagc

SEQ ID NO: 114124 - DNA, 2008 bp, Zea Mays
aagccccgactcttccatccctccctgcccttcccctgcccgccgatcgcttgccccactcccttgcttccgtggcgcacacgccgcgcacgcgtgctcgcctctcctggaaccgtctccgccgccctcccgcgtcggcgtcgcggcgcaagagggtaccctgaatttcgtcagtgccaagtgacgaccgcttttgcccatttgtgatagctgaatctctgtggttcaaaggcgattgattttggtttgctgacgcacgcctaatgagctcccaagtctccacatcacacggtcttcatcccccggggaagcttgggacatttgagtcaccccatgcctggccgctgtcagcgcctacggcccagcccgaagcgggacgcggtgatgaccaggaggtcaggctgttgtcggttgcctggaaccaagattgtggatgcttcgcggctggtaccagcaatgggtttaggatctttaactgcgaccctttcaaggagactttcaggagggatcttaagagcggcggttttgggatcgtcgagatgttgttccgttgcaacatccttgcccttgtaggaggcggctccaatgtgcagtatccgccgaacaaggtgatgatttgggatgaccaccagagccgttgcattggagagttcgccttccgctcagatgtccgagccgtaaagttggcgaaggactacatcgtgattgtcctcgagcgcaagatatttgtctacaactttaccgatttgaagctgctctaccagattgacaccctgtcaaatcccaaaggactttgctgtctctctcataattccaatacttcagtattggcctgccctggggtgcaccagggtcatgttcgcgtggagcatttcgggctgaaaatggcgaagacaatctcagctcatgattcacacatctcttgcatgtcactgacaatggatggtctcctactggcaacagctagcaccaagggcactttgatcagaatattcaacacaatggatggcactcgcctacaagaggtacgcagagggcttgacagagcagaaatatatagcattgcagtgtcgcccaatgtgcagtggttggcagtgtccagcgacaaaggtactgttcatattttctccctgagagtcagagttgctggggaggatgcaagcaatgagcaacgcactgctgaaagtccacggatggatcaccagagctcttccagttctattgatcctcttattcaggcgaacactggatccaatgcgagttcatcactgtcatttatgagagggatcctgccgaagtatttcagttcagagtggtcatttgctcagttccatttaccagaagtcacccgttacatagtagcctttggtgctcagaatactgtaatgatggttggcctggatggcagcttctacaggtgcagcttcgaccaagtgaacggagggcagatgttacagaaggagtatttccggtttctcaagtccgacagcccacctttaaggagcgcagccatctgacctacctctctcaccctgtaaataccgaaggttgtgcccggtccattgtacatatcaccatcttctcgccggctaaagttattacaggcagcgggaataaggagagctggccgtgtcggatcgccgcaacccacaggattccaaccttgaggtttctggagcggttggtgtcccatccaagctgcaagcatcatttgccatctctcttctttcttctagcgagaaccacaaccacccattggtacactacatataacgtaaaaagttcgataacgaatttgaccgtgtggtctgcaatgccgtgtaagaaatctccgacttgttcttgcctgtggcttgttgatcttgatgatgactgctgcgcaagtgcaatctggttctgcgtgttgtgagatcgcgttgctggtagcggtaggcgtatgattaacatgtttgatcgcgtcttggcttgttaatgcgtggaaatcacatataataatataaatataaat

SEQ ID NO: 114125 - DNA, 1497 bp, Zea Mays
aagccccgactcttccatccctccctgcccttcccctgcccgccgatcgcttgccccactcccttgcttccgtggcgcacacgccgcgcacgcgtgctcgcctctcctggaaccgtctccgccgccctcccgcgtcggcgtcgcggcgcaagagggtaccctgaatttcgtcagtgccaagtgacgaccgcttttgcccatttgtgatagctgaatctctgtggttcaaaggcgattgattttggtttgctgacgcacgcctaatgagctcccaagtctccacatcacacggtcttcatcccccggggaagcttgggacatttgagtcaccccatgcctggccgctgtcagcgcctacggcccagcccgaagcgggacgcggtgatgaccaggaggtcaggctgttgtcggttgcctggaaccaagattgtggatgcttcgcggctggtaccagcaatgggtttaggatctttaactgcgaccctttcaaggagactttcaggagggatcttaagagcggcggttttgggatcgtcgagatgttgttccgttgcaacatccttgcccttgtaggaggcggctccaatgtgcagtatccgccgaacaaggtgatgatttgggatgaccaccagagccgttgcattggagagttcgccttccgctcagatgtccgagccgtaaagttggcgaaggactacatcgtgattgtcctcgagcgcaagatatttgtctacaactttaccgatttgaagctgctctaccagattgacaccctgtcaaatcccaaaggactttgctgtctctctcataattccaatacttcagtattggcctgccctggggtgcaccagggtcatgttcgcgtggagcatttcgggctgaaaatggcgaagacaatctcagctcatgattcacacatctcttgcatgtcactgacaatggatggtctcctactggcaacagctagcaccaagggcactttgatcagaatattcaacacaatggatggcactcgcctacaagaggtacgcagagggcttgacagagcagaaatatatagcattgcagtgtcgcccaatgtgcagtggttggcagtgtccagcgacaaaggtactgttcatattttctccctgagagtcagagttgctggggaggatgcaagcaatgagcaacgcactgctgaaagtccacggatggatcaccagagctcttccagttctattgatcctcttattcaggcgaacactggatccaatgcgagttcatcactgtcatttatgagagggatcctgccgaagtatttcagttcagagtggtcatttgctcagttccatttaccagaagtcacccgttacatagtagcctttggtgctcagaatactgtaatgatggttggcctggatggcaggtacttaccttagtgaattaaattttacaattttaagattttactctcagcagatttggaatacctacatttttattgctggttgtgag

SEQ ID NO: 114126 - DNA, 1521 bp, Zea Mays
atggacgcgctgccgcctctgcagcgcgccacgtcgccgccgccccagccccggccccagccgcccgtgccgtccaggaggtacggcgtgcacttctcggcgtccagcttcatccaggcgccgctcaccacgctgctcgagtactccggcatcctccgccccgatccaggcggcggaacccagcaggatggggccggggctgggccgggcgaggtgtcgatccggattgtggcgcccggcgaggcggggacgtcgtctgagaggcccgaggaggtgatcgtggaggaggaggaagaggatggacacgcaacgagaacgcgcccggaggacccgtcacctgcggctggtggcggggagggcggcagggaatcctcctcatcgtaccagcggtacgacatacagcaggtggccaggtgggtggagcagatactgccattctcactgctgctgctcgtcgtcttcatccgacaacatttgcaaggtttctttgtgacaatttggattgctgcggtgatgttcaagtccaatgatatcctgcgtaagcagactgctctgaagagggagagaaaaattccagttcttgtcgggattacaatattatttgttgttcacgtatctgggttttattggtgttacaagaacggggaccttataagacctctcatgatgcttcctccaaaagaaataccaccattttggcacgcaatattcatcatcttggtgaatgatacaatggtgcgccaaactgctatggttgtcaaatgtttgctgctgatgtactacaagaacagcagaggccgtagctatcgtaggcagggtcagatgctgacgattgtggaatattttctacttttgtaccgcgcattattgcctacacctgtgtggtaccgttttttcctgaacaaggagtatggaagcttattttcgtctctaaccactggcttgtatctcactttcaagttgacatcagtcgtggaaaaggttcaatcatttttgacggcattgagagcgttatctcataaagacttccattgtggctcatatgcaacaagcgagcaggtggctgttgctggagatttgtgcgcgatatgccaagagaagatgcacgttcccatccttttgcgctgcaaacatgtcttctgtgaagattgtgtgtccgaatggttcgagagggagcggacttgcccgctgtgcagggcactggtgaagccagcagacctccggtcgttcggtgacggttcaacaagcctcttcttccagctattctaatctgagagagccaaaagagctgggcaagctggggcgctccaccctgtgcagatgttaggtgtgtgtgtgtgtgtgagtgttgctgctggcaacgcgtgcgagcagtgcggccctgatgcggtgctgggagagtgtacaccgagctgaagctgaaggcgtacatggttttgtattgtgattgtgcatattttcatcccatgtataggcactcgcgggatgcttgagcacctgaggatttttacctgaccttat

SEQ ID NO: 114127 - DNA, 80 bp, Zea Mays
gccgggttgcaatgccggctggcaagcttttaccagtgaacacgccaaatggagttttgagctgccctgtttcttctacg

SEQ ID NO: 114128 - DNA, 1525 bp, Zea Mays
aaggggactgcaacaagcgaccgtttatcatcagtgtatgcattccgtaaagctcaggggttgtgctataaatgtgggcagccatttcagcgtggccaccaatgtcctgactcggtccagttgcatcttgttgaggaattgtggcatcaatttcagttaccttcggatgactctgaatcagtccttgaaccttcattgaggaattgtggcatcaatttcagagggcctttgttgtttgttgttgtctcagtccgttctggagggagttccaatgtataagtctatgcagtttgttggagatattgccggattctctgtcctcattttactggattcgggcagctctgtgtcctttgtcagttcagtggtcgctgatcagcttccaagctgtacctctccatgtcctccagtcctggtgcaagtagctaatggggctcggatgcgttgtgaccatgagttggtcaatgtcacgtggtctatccaggatcatcaatttatgtctacctttaaagtgttagagctgcaacactatgacatgattgttgggatggactggctatcggcttatagtcctatgacagtacactgggcagataggtggttatctattccacatggtcgaacttttgtcaagctctatggagtccagacctcttccacacaaggagcttttatccaactctgtcgactggtggatttgtcagacaaagatcaattggtcattaaggatctgccagctgaattacagcatatcattgatcagtattcatcggtctttgacattcctaagggtttacctcctgttcgtgattgcgaccaccagattccgttgcttcccggtgctcgaccggtgcaaatgcgaccatatcggtacgctcctgctcttaagacagagatagaggctcaagtggctgagatgttggcttcaggattgatccaacacagtaagagtccttttgcatcctccgtgatcctggtcaagaagaaggataacaattatcgcttttgtgtggattaccgacatttaaacgcattgacaacaaagtccaagtttcctgttcctatcattgatgagcttttagatgaactttctggggcagcatggttctctaccttggatcttcgtgccggatttcatcagattcgtatggatccctcggatcagcataaaacagcattccagacccaccatgggcacttcgagtttcgagtgatggcctttggtctcacgggggccctggccacctttcaaggcgcaatgaatcggaccttgcaaccattattgcgtaaatgtgtgttagtcttttttgatgacatcttggtttacagtgatacatgggacaatcacttactgcatttggagcaggttctacagttgcttcgtaaggaccaatggcaagtgaagctaactaaatgttcctttgctcagcaagagatcgcttacctgggtcacgtcatcagcaaggcgggggtcgctactgaccccgcaaaaattgcagctatctcttcctggcccccgccccac

SEQ ID NO: 114129 - DNA, 315 bp, Zea Mays
atggagccgaacctcaagttggcgattgaggagcagtccaggatcttgcgcgacatctctgaccgcctctcggcgcaggattcgcgctgggcagcgctggaatcggtcgtcgcccggcaaacgtcttccatccagcagctggagaccgccgcactccaggtcactgctacctctgagcgcctggatgcggtcgaatcggcgacggcggcgttcgagacttggcgtccatcggtggaggcagcagtggatgacgtcaagtactccgtcgaccgcctctgcgacgacttcgccaagttctctgcatcagccctctga

SEQ ID NO: 114130 - DNA, 1402 bp, Zea Mays
aatgtgtttggcgcgtgtgcctgtgtacacatttctacttttggcgccagatggataataaattaataaatgctgagatgactagctacatcatccgtatgtgacacaagaatatttacatttaatagagggtattcttgtaatctctcatattactactctaacgccttgcgatgctaaaacgacttggctcatgggacggacggagggagtagtggtttagaacaaacaggccctagatggtccacgatctaaacgtgattttttttcttctaaaaacaacgctaaaaaaatccggcccactttaccgttgcggcggacaagcagagtcgcggcggccgaaccgccacctccctttgcgcctcactcatcagtcatggcgtcgctgccgcctggacctccggcgtggtcggtgaccctgagcctaaggcaccgtggcgggctggagatccgtgccgccgcggagaacttgctcccagggtggggccgcggcggggagcgcatgtccctcctgctccgcctccgccgctgcctcctcctctccgtcacatccaattgcggcggtcgtcccgcggcgaccacacagcccgggccgccgccgcgcggcagcagggtcgtccgcttcctgcggagcaggtgggcgcggctgccgcgggccacctccatttggaggcgcaagaaacagcccccggcgcgcgccgccgtgccgccggactgccgggaccagcggagtcgaacgctggcgcggcctgtcttctgggcaacggcatcgacgccagcggcgacgacgcggttcgtcgtcgtcgtcgtcgtcgccgcccttgccgtgaccgtgtctatcgtcacggcgttccgcatcacgggcggcatcagcaaccggagaggaggctgcgacagcaaaccgattgcgcgatgggccaggttgttggagttgctggagcatccccctctcaactgcaactacaggtgtctccttggtgcgccaaagcgagggctggagtggatcttcagcaagtagatgttctgtcagatgaaagccacctgcgttgcgtaggagctaggaaaggttcgatctgactgctgatagtatcctaggttaatttagagtttgtgttatacatgacgactgggatcgatatctgcatgagcatggcaggcattcaaggagcaagttcgtcacagccacttcagtttgatctggttctgtgtgcatttgcaatagcaattcagtggttgtcaacacggttatgtatttatataagatgaattggtcttcaacatttcttttcttttttaaaaaagggttgccatagcagggatctggcattgtgagagttgcaatttcagagtataaaaggcccagtgaatctaattgctatatttatgtaactttttgacgaac
